United States Patent Application Publication US 2006/0134663 A1 - sequence listing, part 65

SEQ ID NO: 166379 - DNA, 968 bp, Homo Sapiens
cggtcgctgttgctgccgccatacgcgctctccctgtttagggtctggctttcgtgacttcctgctcaagccagagttgctccgggccattgtcgactgtggctttgagcatccgtcagaagtccagcatgagtgcatccctcaggccattctgggaatggatgtcctgtgccaggccaagtcgggcatgggaaagacagcagtgtttgtcttggccacactgcaacagctggagccagttactgggcaggtgtctgtgctggtgatgtgtcacactcgggagttggcttttcagatcagcaaggaatatgagcgcttctctaaatacatgcccaatgtcaaggttgctgttttttttggtggtctgtctatcaagaaggatgaagaggtgctgaagaagaactgcccgcatatcgtcgtggggactccaggccgtatcctagccctggctcgaaataagagcctcaacctcaaacacattaaacactttattttggatgaatgtgataagatgcttgaacagctcgacatgcgtcgggatgtccaggaaaatttttcgcatgaccccccacgagaagcaggtcattgatgttcagtggctacctttgagcaaaagagatccgtcccagtctgcccgcaagtttcatgcaagatccaatggagatcttcgtggatgatgagacgaagttgacgctgcatgggttgcagcagtaactacgtgaaactgaaggacaacgagaagaaccggaagctctttgacctctctggatgtccttgagttccaccaggtggtgatctttgtgaagtctgtgcaggcggtgcattgccttggccccagctactagttggaccgaacttccagcgatgccatccacgtgggatgcccaggaggaaagcttcctccggttcaccggttaaagatttcaacgacgaattctgtggtaccaccatttgggcaggctggactc

SEQ ID NO: 166380 - DNA, 450 bp, Homo Sapiens
  misc_feature (32)..(32): n is a, c, g, or t
  misc_feature (60)..(60): n is a, c, g, or t
gccaaaaaaaaggaaaacccaggggtgggggncctgttccaagggtggggggcaaagtantaacctcccttcaacccccccaacccctggtgtccctcctccctgaaaggaacagacggtcaacattcccaaaatgggcgagtccttcctaccgtgtcctgttccaatgtaggaggagatgtcctatctcatcaggcagctcactaatattgacctcaaagcgatcctgcacatcattgaggatcttggcatcattctcatcggacacaaatgtgatagccaagcccttggtgccaaaccggcctgctctggccacccgatgcaggtaggtgtcagaatcctcaggcatgtcataattaaaagcaatgttcacccgctcgatgtccatgcctcggccaaataggttggtagccacaagaattcgtcgttgaaaatctttaaactgctgat

SEQ ID NO: 166381 - DNA, 428 bp, Homo Sapiens
  misc_feature (61)..(61): n is a, c, g, or t
accctaattgcccgaggccaggaaatcgaacgggtgaaaaattgccttttaaattatgaanatgccctgaggattcctgaaaccctacctgccatcgggtggccagagcaggccggtttggcacccaagggcttggctatcacatttgtgtccgatgagaatgatgcccaagatcctcaatgatgtgcaggatcgctttgaggtcaatattagtgagctgcctgatgagatagacatctcctcctacattgaacagacacggtagaagactcgcccattttggaatgtgaccgtctgtccttcaggagaggacaccagggtgggggtgaaggagacactactgcccccacccctgacagcccccaccccatggcttccatcttttgcatcaccaccactcctgaacccccatttctgatttgtcagaa

SEQ ID NO: 166382 - DNA, 937 bp, Homo Sapiens
tgcagctcctcacgacaactgacttttttactctacgaaaacgctcaagacctgttattttatgaagctgcattactgtcctggaaatcacagttgggatagcaccatttctggatctcaaagggctgcattctgtgatcacaagaccactccatgctcttcagcaataataaatccactctcaactgcaggaaactcagaacgtctgcagcctggtatagcccagcagtggatccagagcaaaagggaagacattgtgaaccaaatgacagaagcctgccttaaccagtcgctagatgcccttctgtccagggacttgatcatgaaagaggactatgaacttgttagtaccaagcctacaaggacctcaaaagtcagacaattactagacactactgacatccaaggagaagaatttgccaaagttatagtacaaaaattgaaagataacaaacaaatgggtcttcagccttacccggaaatacttgtggtttctagatcaccatctttaaatttacttcaaaataaaagcatgtaagtgactgtttttcaagaagaaatgtgtttcataaaaggatatttatatctctgttgctttgactttttttatataaaatccgtgagtattaaagctttattgaaggttctttgggtaaatattagtctccctccatgacactgcagtattttttttaattaatacaagtaacaaagtttgaattttgctacatagttcaatttttatgtctcttttgttaacagaaaccacttttaaaggatagtaattattcttgtttataacagtgccttaaggtatgatgtattctgatggaagccatttttcacattcatgttcttcatggattatttgttacttgtctaagatgccatttgattctatgaagtatatacccttttaccaccagagacagtcaca

SEQ ID NO: 166383 - DNA, 911 bp, Homo Sapiens
tcttgggtccattctgggaagggttcaggggagggcaataggggggattcttgtcaagcacttgcccattggcccgggacagcccttttggggcagggtcggtttgctgccctgcccacaaccagtgcgaaggtcccccccatgcccgcagagaccgcgcaggtggggagggacccgagactggcacagtggaagacggcgaagtcccggaacgtgtccgccacgatctcagctcctcggtgaattggtccatttggagaggcctacgaaaaactcccggccggtgaagagaacgtcagtgccatccagcgtcgcgttctcgtctcctatttccacaattcggagccccaggtcttgcagggctttgcggactccatcgacctctggcctacgagcggggctccagggccgcgtgattagggccgtgtccccttggatcacggccgtgtcgccaagcagcggtcccagcggcaatgactcctcaggtggcagttctagcagctgtagccccagtcgttgcctcagtttacctcccagcaccccgggctccctttgagctttggccagatccagagcgggaaggccagcccccgcaccttcccccgacgccgaggctctctgggactccccggatcagggcatgggagcagcggcccagcccctcccccggcgtccccatcccatccacacagactccccctccaaccgctcggatttcttagttttcttgtttcttcacctgtctccagcggccacccccactcctgtcgcgctgtgatctcggctggggccccaccccccgaggacagagttggtggagaagggagtccccgtcttcaagcctcggggactgggagctctggcttttagcgggggtccttgtgtaggcgagctcatatactacgatgggg

SEQ ID NO: 166384 - DNA, 963 bp, Homo Sapiens
  misc_feature (762)..(774): n is a, c, g, or t
  misc_feature (887)..(896): n is a, c, g, or t
gagccgccagaccgtcgcgcccctgccccatcgtagtatatgagctcgcctacacaaggacccccgctaaaagccagagctcccagtccccgaggcttgaagacggggactcccttctccaccaactctgtcctcggggggtggggccccagccgagatcacagcgcgacaggagtgggggtggccgctggagctgctagaactgccacctgaggagtcattgccgctgggaccgctgcttggcgacacggccgtgatccaaggggacacggccctaatcacgcggccctggagccccgctcgtaggccagaggtcgatggagtccgcaaagccctgcaagacctggggctccgaattgtggaaatacgagacgagaacgcgacgctggatggcactgacgttctcttcaccggccgggagtttttcgtaggcctctccaaatggaccaatcaccgaggagctgagatcgtggcggacacgttccgggacttcgccgtctccactgtgccagtctcgggtccctcccacctgcgcggtctctgcggcatggggggacctcgcactgttgtggcaggcagcagcgacgctgcccaaaaggctgcccgggcaatggcagtggctggacgaatccccatatgcctccctgaaccctcccagatgacgcaccatgctggactgtcccctttctctcgacctggggattgcctgggtcgtgcccccctttttcctccctgcacccgcgggaaggtgggggaacttgnnnnnnnnnnnnnatggagggccctgccaaaaaactcctcttgattcccaacactggggaacctggcgggtccccggccccccaaaactggtcatcaccgggcctgggggacccggggctttcaannnnnnnnnntcgctttgggagggttcacgaaacaaaccccccctaataaataacgacgcgatcccctcccccctcc

SEQ ID NO: 166385 - DNA, 559 bp, Homo Sapiens
gggggtccctcccacctgcgcggtctctgcggcatggggggacctcgcactgttgtggcaggcagcagcgacgctgcccaaaaggctgtccgggcaatggcagtgctgacagatcacccatatgcctccctgaccctcccagatgacgcagctgctgactgtctctttcttcgtcctgggttgcctggtgtgccccctttcctcctgcaccgtggaggtggggatctgcccaacagccaggaggcactgcagaagctctctgatgtcaccctggtacctgtgtcctgctcagaactggagaaagctggcgccgggctcagctccctctgcttggtgctcagcacacgcccccacagctgagggcctggccttggggtactgctggcccaggggtaggatagtataggaagtagaaggggaaggagggttagatagagaatgctgaataggcagtagttgggagagagcctcaatattgggggaggggagagtgtagggaaaaggatccactgggtgaatcctccctctcagaaccaataaaatagaattgacctttttc

SEQ ID NO: 166386 - DNA, 521 bp, Homo Sapiens
  misc_feature (80)..(80): n is a, c, g, or t
  misc_feature (277)..(277): n is a, c, g, or t
  misc_feature (280)..(280): n is a, c, g, or t
  misc_feature (471)..(471): n is a, c, g, or t
  misc_feature (494)..(494): n is a, c, g, or t
  misc_feature (508)..(508): n is a, c, g, or t
gggacacggccctaatcacgcggccctgggagccccgctcgtaggccagaggtcgatggagtccgcaaagccctgcaagnacctggggctccgaattgtggaaataggagacgagaacgcgacgctggatgggcactgacgttctcttcaccggccgggtagtttttcgtagggcctctccaaatgggaccaatcaccgaggagctgagatcgtgggcggacacgttccgggacttcgccgtctccactgtgccagtctcgggtccctcccacctgncgncggtctctgcgggcatggggggacctcgcactgttgtggcaggcagcagcgacgctgcccaaaaaggctgtccgggcaatggcagtgctgacagatcacccatatgccttccctgaccctcccagatgacgcagctgctgactgtctctttcttcgtctgggtttcctggggtgccccctttcttctgctncgtggaagttgggattttccaanagccaggaggactnagaagttttgatg

SEQ ID NO: 166387 - DNA, 374 bp, Homo Sapiens
  misc_feature (191)..(213): n is a, c, g, or t
acctcctaccccacggatttaggagcttggacatgctcctcattaccatatagtttttagtttcttcttcagctgcaataaatataaagttggcaatgctcatacaccacagcacagacaatattccaggctttagcatacaattgtaaacagtgactaggttaagaaaataaaataaagtaagtcggacnnnnnnnnnnnnnnnnnnnnnnnaaacagacaaattccctaaaacccggctgttacctattcaaaattgtgtttggtggggctaaaggttcctgacaaaagatcctgggtaaggcaaatgcccctgacattctcaaatagcctcagggggttagccaaagcgctgtcaacggcgaccgaaaaca

SEQ ID NO: 166388 - DNA, 946 bp, Homo Sapiens
cttttagaaattaactggacaggactgacgaatcttctggatgtccctggattgaatggtttatcagatactatcattttggatataatatcaaactatctggtgcttcccaatcgaatcaccgttccacttgtcagtgaagttcaaatagctcagttgcggtttcctgtaccaaagggtgttctaaggatacattttattgaagctcaggatcttcaggggaaagacacttaccttaagggacttgtcaagggaaagtcagacccctatggaatcattagagttggcaaccaaatcttccaaagcagagtcatcaaggagaacctcagtccaaagtggaatgaagtctatgaggctttagtgtatgaacatcctggacaagaattagagattgagctctttgatgaagacccagacaaggatgactttttaggaagtcttatgattgacctcattgaagttgaaaaggagcgccttttagatgaatggttcactctggacgaggttcccaaggggaagctacacttgagactggagtggctcacgttaatgccaaatgcgtcaaacctcgacaaggtgctaacagacatcaaagctgacaaagaccaagccaacgatggtctttcctctgcattgctgatcttgtacttggattcagcaaggaaccttccgagtaacccattagaatttaaccccgatgtcttgaagaagactgcagttcagagagctttaaagtcagggaagaaaataagcagcaacccaaatcctgttgtccagatgtcagttgggcacaaggcccaggagagcaagattcgatacaaaaccaatgaacccttgtgtggggaggaaaacttcacttttcttcattcacaatcccaagcgccagggaccttgaaagttgaggtcagagacgagcagcaccagggtttcctggggggaaactgaa

SEQ ID NO: 166389 - DNA, 742 bp, Homo Sapiens
  misc_feature (229)..(237): n is a, c, g, or t
gaatgtagtatatttccaaagtttgcaagtcttcctgtattgtacaaagatgctgctgcttgataatatgtatagcaatccagattagtatgttattaaatttattttcttacctgtatttttatgctttttacctgtcctcaaaatattacacccctgttggaattagatttatatttataaatggtcagaaatctttttaagtgtctctttttacacataggttgannnnnnnnncttaagagaaatgatgtattcttgaaacatttgttactcattccaggaaacaaaaacccatataataaaacccccactcagagcctgttagtcacctctctagaagatggcatctcaggagaaggaatggctttgtggaagaaggaatcacctttttcttgctcaagaattatgctgacttcagccctgagcctggatctggtcactgagaatcatcaagtgtctagatcctccccccaaaataactaatttagtaggtgattaagatttgaaaaaattgacaccaaaaccctgcctgcattgtaatggaattcgaaaagaattcatgttcacagaactcaacgttcaggctactatttacagaagggaccaaatctaaatcctggtagataactcctgtactgctcaatccaaagggacagccacaagaaaagcaagccaatagactcataaccaaagggaatgaaatagacgtcccttcaaaaggaaactggcgaaggcacgg

SEQ ID NO: 166390 - DNA, 430 bp, Homo Sapiens
tcaagcctactggcttgcaattaagatatcaatctgaaatgcatctgtaattcctggccacaggtccttattgccattatttttaagtatcttcattggagatgaacactgacttttgcatatggtctcttacctcagggaagatcacttgctagcaactcatactactaatgacaggtttttgagaattgtactgacatcacatgttagctactaaatgcaaaatgtataaaagtattgttttatgtagttacctaccaatactatctgctactgaataactctctaaatatgtagacctcactaataactaacctttatgtaaaaaatttacttctgtcattaattacacttcaactggtcaatatagtggcagcataaagtgtttatttcagaatatcaatacagttttgtcttcatttttcaacaa

SEQ ID NO: 166391 - DNA, 410 bp, Homo Sapiens
accccacgagtagtactggagaatagatgagaactccaactaaagaacaatgcctccctcaccccagtaatgttatccacattttccctaccctcacattagaataaagacatcctcccaacttttcatctcctatctccaatctgttcataggagatatatcttttgatcttttattataagggtagaatatagattaagatcatcaaaatccaatttcacatgtggcactaggaaaatggaatgctataaaattaatccccatcacccaagtagggatgctggtgcttttatactgagtctttactgccaataagtgatgctgcctccaaaggaacagctctacagaaagtttttgggttagtgtttccctagcttatttctgcaatggagaaagacaatttcatacc

SEQ ID NO: 166392 - DNA, 791 bp, Homo Sapiens
ccattcctacccaggcacatgaaaactgtgacagtgacgtgcctgggagctttgacacacgagccgtgtgaattcactaggaaacatgtaataaagtcatggaagagaaaatcgtgtgtaaattttgcctttaactttagaccgcagtatattataatacatttgatatctgaaatatctttacttttttaagagtaagattccatatgtctgtctggaagggagccatggttattcacacgaatatccctgtcacttctccagaggtgtcaggtaactaacacgagcattctttgaagactctgggcacatgaatgatacacagaattgaatgtttaaatttccactttgagtcctcatgaatcatttgagactagtaccagctgatcttgtgtacaggctcagggtcagtgcccaagggctcccgcgtgtgtgttctgatcttcagtgcgtagcacattctccatttagaaaagagtggtcagaataattgtggacggtacagtggctttttaaaactacagtctttaggtgtaaggtttggcgccgggagcaattttatgatcaaatatgatgaactcctaagtcactgaggtgtgattgggccaatgttggcatgaggttcttgctctacttccagtgttttgattccactgggagaatttggcctagtgtgtggctttggatgaatccgtgtagagagaggtgagcttgtccatcagacagatgctatcacacatagcgatagtaggcacctagggaggaagtggccgttagttttacctgacacg

SEQ ID NO: 166393 - DNA, 763 bp, Homo Sapiens
tcgagctcggtacctccttccacgccttacatcagccatttctacaagagctctgagtccttttagtgaagggtggtatttataaaccacaatctggatggtttgtggatattgcacagcattcagtcagaagccatgggaaatgaagcgacatttattgaaacttgtattagtcaagcaacttaatgctaggctaagttgcagtgagtaataatccctaaccccagtgacagtgcagaaaaagaagggtttcatatgtggagtgtgatgcatgtcaatgggagtttcctccacctggtgactcaggtatccaggcacattcatctctgcaggtctgccatcttgacacgaggtcattgcagaaggagagagggtgtagagtcatgccagttcttaggtgctcctgacaaggagatctgcagcactctgctcacattcctgttttccagaactcagccagtacccagtgcaactgccaaagagtcttaattgttgatgaggtcttggagcctcccttctgctcccagaggcttttcttgctcatgtctccagccacaatatccgtgcaggacggagtcttggccgcagactgagcctgtacctcacccgtctcccaccaactcttggtactggacgcagtcatgctgggcagctctatggaggcctggcgggctagcttgggggtctggccagcagtcctttcacagctggggagtggagtctgggcctgaggtctcccgtgcgcctccgtggggtaggaggt

SEQ ID NO: 166394 - DNA, 559 bp, Homo Sapiens
ggggcacagcgcgggcgcaggcgcccagaggcgcacaggagacctcaggcccagactccactccccagctgtgaaaggactgctggccagacccccaagctagcccgccaggcctccatagagctgcccagcatggctgcatccagtaccaagagttggtgggagacgggtgaagtacaggctcagtctgcggccaagactccatcctgcaagactctttggcagttgcactgggtactggctgagttctggaaaacaggaatgtgagcagagtgctgcagatctccttgtcaggagcacctaagaactggcatgactctacaccctctctccttctgcaatgacctcgtgtcaagatggcagacctgcagagatgaatgtgcctggatacctgagtcaccaggtggaggaaactcccattgacatgcatcacactccacatatgaaacccttctttttctgcactgtcactggggttagggattattactcactgcaacttagcctagcattaagttgcttgactaatacaagtttcaataaatgtcgcttcatttcc

SEQ ID NO: 166395 - DNA, 523 bp, Homo Sapiens
ggggcccggctccctagggcgtcccatctcgcttcctgggtctgcaggtccagccggctggcaccctccatgtacccaggggagattccagccagacacccgccccccggccctggctaagaagttgcttcctgttgccagcatgacctaccctcgcctctttgatgccatccgctgccacctccttttgctcctggaccctttagcctctctgcccttccactctctgaccaccgcccccgccctccccacccagctccgcttcttgttacttgggggaggaaagaaactcctgatcattgggccaaagggacttacccctggagaggccaagtgccttctaggaagttaggaggttgaggcacagcctgtgcagagagggtgggtcacccccccagatccaaggggaaactgcaggtcaagggctgataacggccatgcaggatgcttgatgctgcgtcccccgctgcttgccgccccccaccccgccattttgtataataaagctccctgtgtattcgcg

SEQ ID NO: 166396 - DNA, 510 bp, Homo Sapiens
  misc_feature (107)..(107): n is a, c, g, or t
  misc_feature (122)..(122): n is a, c, g, or t
  misc_feature (395)..(395): n is a, c, g, or t
  misc_feature (454)..(454): n is a, c, g, or t
  misc_feature (469)..(469): n is a, c, g, or t
  misc_feature (481)..(481): n is a, c, g, or t
ccctcaacctacctaacttccctaagaaaggcaacttggcctctcccaggggtaagtccctttggccaatgatcaggagtttctttcctcccccaagtaacaagaancggagctgggtgggnaggacgggggcggtggtcagagagtggaagggcagagaggctaaagggtccaggagcaaaaggaggtggcagcggatggcatcaaagaggcgagggtaggtcatgctggcaacaggaagcaacttcttagccagggccggggggcgggtgtctggctggaatctcccctgggtacatggagggtgccagccggctggacctgcagacccaggaagcgagatgggacgcctagggagccgggcccccttccacaagcaccttctcatacttccnatgcccggtggccacaaacttatacctcttcccagatggggtgctcttaattgttgatnaggtcttggagcctnccttctgctccnagaggcttttcttgctcatgtctccagcc

SEQ ID NO: 166397 - DNA, 518 bp, Homo Sapiens
caagaatccggagtaaaaggattaatattcacttgaggagtctgtcgcacatcaaattccctttttcctgatttttctgtatccatgaagagagaactaccccggagtttaacagagctggaatcaattccccgagctttggagagcaaactctagggaaagaaaaatacaaatacaatttttaggatccaagtcctatagtcagccttctcaacctaaccttcaacgagcctttcatagggctgaatgcgtaggtgaaagcaacacacaagcctttgttagagttcaagcaaaataaattgtggctaatttaggaagactgaagctggatattaactatcttttcttgaaaaaaatagccaagtaaaatctgcctctaaccctaaaaagaatataaatgctgcctaaaactaagttcattctagtggctaaaagttaacaaattctttcaacccatccaaaatagaaagcagtccgagagccccataaaatctcccccgtggggagaaggtggtacc

SEQ ID NO: 166398 - DNA, 762 bp, Homo Sapiens
ttaactaagctaatctgcgcattctagttgggaactattactacaatgttagactgctccatgtaaaactaataaatggcagtaaaaggtctcagaagcaccaagggttttgatcaggtcaggagttagaaacttaatgtcatttgtattcatttcttgaccaactgccaaagtttatatatttttaatttttctaacataccacattgtctgttgtattaataccagttcactttttgttttctgcagaaaaatccagaggaagacaactcagggagaacattgggttgggagccagggcacttgctgctcaccatctgcaccgtgcgcagtatggagcagctcctgccgttcttcaatgtgctcagtcaagtcttcaacagcaaagtcacaagccgatgtggaggacactcagggagtcctatcctctactcaaatgccttccctaataaggacatgaaactggagaaccacaaaccatgttcgcaagccaggcaaaaaatagaagagatggtagaaaaagattttctggaagggatgataaaaacttgagcaccattgctggttccatttagcttacatgtaaatgtaattatttaaaacacacacactgctctgcgttgtatagtttttccttttttgtatgtaacagaacacatttcagattgtatttaatttaaatatttgtatataagagcaaatgtctgaatgtggcctgaatcaagtttaaatattgttggctcatactgattatggtgcccc

SEQ ID NO: 166399 - DNA, 846 bp, Homo Sapiens
catggatgtgcgccgtctgaaggtgaacgaacttcgcgaggagctgcagcgccgcggcctggacactcgaggcctcaaggccgagcttgctgagcggctgcaggcggcgttggaggccgaggagcctgacgacgagcgggagctcgacgccgacgacgaaccggggcgacccgggcacatcaacgaggaggtcgagaccgaggggggctccgagctggaggggaccgcgcagccaccgccgcccgggctgcagccgcacgcggagcccggcggctactcggggccggacggacattatgccatggacaatattaccaggcagaaccaattctacgatacccaagtcatcaaacaagaaaacgagtcaggctacgagaggagaccactggaaatggagcagcagcaggcctatcgtccagaaatgaagacagagatgaagcaaggagcacccaccagcttcctcccgcctgaagcttctcaactcaagccagacaggcagcaacttgccagagtcgaaagaggccttatgaagaaaaccggggacgggggtactttgagcaccgagaggataggaggggccgctctcctcagcctcctgctgaagaggatgaagatgactttgatgatacccttgttgctattgacacctataactgcgacctccacttcaagtggccccagatcggagtagtggctatccgctcacaattgagggctttgcatacctgtggtcaggagcccgtgccagctagggggtcagaaggggccgtggatgcttccagatgaagatcaatgaggaaatctccgtggaacaccttccgtctacggagcctggacccccagtgg

SEQ ID NO: 166400 - DNA, 932 bp, Homo Sapiens
  misc_feature (755)..(755): n is a, c, g, or t
agccctgggaggccgggccgggctcgggggccaccccgggggcccgggccatggatgtgcgccgtctgaaggtgaacgaacttcgcgaggagctgcagcgccgcggcctggacactcgaggcctcaaggccgagcttgctgagcggctgcaggcggcgttggaggccgaggagcctgacgacgagcgggagctcgacgccgacgacgaaccggggcgacccgggcacatcaacgaggaggtcgagaccgaggggggctccgagctggaggggaccgcgcagccaccgccgcccgggctgcagccgcacgcggagcccggcggctactcgggcccggacggacattatgccatggacaatattaccaggcagaaccaattctacgatacccaagtcatcaaacaagaaaacgagtcaggctacgagaggagaccactggaaatggagcagcagcaggcctatcgtccagaaatgaagacagagatgaagcaaggagcacccaccagcttcctcccgcctgaagcttctcaactcaagccagacaggcagcaattccagagtcgaaagaggccttatgaagaaaaccggggacgggggtactttgagcaccgagaggataggaggggccgctctcctcagcctcctgctgaagaggatgaagatgactttgatgatacccttgttgctattgacacctataactgcgacctccacttcaaggtggccccgagatcggagtagtggctatccgctcancattgagggctttgcatacctgtggtcaggagcccgtgccagctatgggggtcagaaaggggcccgtgtatgctttccagatgaagatcaatgaggaaaatctcccgtgaagcacccttccgtctacagaggctggaccccccaccgtggtcccggaatcgggctgggttccctgga

SEQ ID NO: 166401 - DNA, 1064 bp, Homo Sapiens
  misc_feature (130)..(172): n is a, c, g, or t
  misc_feature (175)..(175): n is a, c, g, or t
  misc_feature (181)..(181): n is a, c, g, or t
  misc_feature (190)..(190): n is a, c, g, or t
  misc_feature (194)..(196): n is a, c, g, or t
  misc_feature (198)..(198): n is a, c, g, or t
  misc_feature (974)..(990): n is a, c, g, or t
  misc_feature (1032)..(1032): n is a, c, g, or t
tttgcgagacggggggtaaattgtgcgaatgttgtgagatccaggccctcccatgggctctagggagaaaggggggattggtgataaaataggggagctcaaggggtggcaggaaaactaggggttcccnnnnnnnnnnnnnnnnnnnnnnnnnnnnnnnnnnnnnnnnnnnttncgaggnggtgggccngcannnangttattctgggagggctggccgggcgcctttcggaccccccataggtgggcacggggtcctggcccgcgggtaggcaaaagccctccattggggagcggatagccactcctccgatttcgggccccccttgaagtggaggtcgcagttataggtgtcaatagcaacaagggtatcatcaaagtcatcttcatcctcttcagcaggaggctgaggagagcggcccctcctatcctctcggtgctcaaagtacccccgtccccggttttcttcataaggcctctttcgactctggaattgctgcctgtctggcttgagttgagaagcttcaggcgggaggaagctggtgggtgctccttgcttcatctctgtcttcatttctggacgataggcctgctgctgctccatttccagtggtctcctctcgtagcctgactcgttttcttgtttgatgacttgggtatcgtagaattggttctgcctggtaatattgtccatggcatctcctcgttgatgtgcccgggtcgccccggttcgtcgtcggcgtcgagctcccgctcgtcgtcaggctcctcggcctccaacgccgcctgcagccgctcagcaagctcggccttgaggcctcgagtgtccaggccgcggcgctgcagctcctcgcgaagttcgttcaccttcagacggcgcacatccatggcccgggcccccggggtggcccccgagcccggcccggcctcccagggctctgtcccccttaaacctttcctgtcaggaggcgaannnnnnnnnnnnnnnnncccactccaatggcggcagcggctcaaaatggccgccgccancctcgtgccgaatcgcccacccaggcctcgct

SEQ ID NO: 166402 - DNA, 1338 bp, Homo Sapiens
gggcaatgggaaggctccatactgcagggtgcgaaggggccggcgccgctgccgagttacgagtcggcgaaagcggcgggaagttcgtactgggcagaacgcgacgggtctgcggcttaggtgaaaatgcctcgtgtaaaagcagctcaagctggaagacagagctctgcaaagagacatcttgcagaacaatttgcagttggagagataataactgacatggcaaaaaaggaatggaaagtaggattacccattggccaaggaggctttggctgtatatatcttgctgatatgaattcttcagagtcagttggcagtgatgcaccttgtgttgtaaaagtggaacccagtgacaatggacctctttttactgaattaaagttctaccaacgagctgcaaaaccagagcaaattcagaaatggattcgtacccgtaagctgaagtacctgggtgttcctaagtattgggggtctggtctacatgacaaaaatggaaaaagttacaagtttatgataatggatcgctttgggagtgaccttcagaaaatatatgaagcaaatgccaaaaggttttctcggaaaactgtcttgcagctaagcttaagaattctggatattctggaatatattcacgagcatgagtatgtgcatggagatatcaaggcctcaaatcttcttctgaactacaagaatcctgaccaggtgtacttggtagattatggccttgcttatcggtactgcccagaaggagttcataaagaatacaaagaagaccccaaaagatgtcacgatggcactattgaattcacgagcatcgatgcacacaatggcgtggccccatcaagacgtggtgatttggaaatacttggttattgcatgatccaatggcttactggccatcttccttgggaggataatttgaaagatcctaaatatgttagagattccaaaattagatacagagaaaatattgcaagtttgatggacaaatgttttcctgagaaaaacaaaccaggtgaaattgccaaatacatggaaacagtgaaattactagactacactgaaaaacctctttatgaaaatttacgtgacattcttttgcaaggactaaaagctataggaagtaaggatgatggcaaattggacctcagtgttgtggagaatggaggtttgaaagcaaaaacaataacaaagaagcgaaagaaagaaattgaagaaagcaaggaacctggtgttgaagatacggcaatggtcaaacacacagacagaggaggccatacagacccgttcaagaaccagaaagagagtccagaagtaattcagatgctgtgaaccaga

SEQ ID NO: 166403 - DNA, 600 bp, Homo Sapiens
cacctctaccacgtttggttcacatcattttcttgcagatttctaaaagctttgccagagtcaaaaatccaagtttggattctaagcagccttgacagtaatcactgaatggtagggaaaaaaagacagttgggatgaattaaaatgttctaaggacactggaaggagttaagtcccatttctcaccaaaatgtcccctcatgttactaacaggctgtaactgatcagctggattaaggaaaaaagctccataatctagatgcattaaaggctgctgctaaacagattttgtgaagagtttaatacaagagactaacctcagtgggaaccacggtcattagctacatcttggagacggcgtaataaggcagaatgattttctgggcaaattctttttgcaggtgattcacttccatcttccaaaagaattcctctctttttagtaggagtttctcctgtgcgtatcatactattaatttctctcagtctctttgaaggactgttgctgaagtaatagaaaatcttttctcgaggagaaagcattgtttcatttttatgtggggaaatgtagacaggatgattttgagacaactgtattcg

SEQ ID NO: 166404 - DNA, 858 bp, Homo Sapiens
  misc_feature (32)..(32): n is a, c, g, or t
  misc_feature (675)..(675): n is a, c, g, or t
  misc_feature (685)..(685): n is a, c, g, or t
  misc_feature (744)..(745): n is a, c, g, or t
aatcagctcggtccacttctaccacggggtgnccgctgaacggatggctgagggagccccgcggatcgtttaggaaagccggccagctgatcgtcgtgtgttgccacccattcatgtcaagatgactaagtttggattttatgcgattgtcctatgagaagcaggacacacttctgaagcttctcattctgtcaatggctgctgtattatccttctccactcgtctgtttgctgtcctgagatttgaaagtgttatccatgagtttgatccgtactttaattatcggactaccaggttcctggctgaggaggggttttataaattccataactggtttgatgaccgagcctggtaccctttgggacgaatcattggaggaacaatttacccaggtttaatgatcacctctgctgcaatctaccatgtactccattttttccacatcaccatcgacattcggaatgtctgtgtgttcctggcccctctcttctcctccttcaccaccatcgtcacgtaccaccttaccaaagagctcaaggatgcaggggctgggcttcttgctgctgccatgattgctgtagttcctggatatatctcccgatctgtggctggctcctatgataatgaaggggattgccatcttttgcatgctactcacctactacatgtggatncaggcagtanagactggttccatctgttggggcagctaagtgtgcccttgctttattctacatgtcccnnccctggggggagggttaggggggtccctgaatcacctaaattccctttccaccgtcctccgggctgatgcttcacaggccggtttctctccccccggaatctatagtgggccc

SEQ ID NO: 166405 - DNA, 736 bp, Homo Sapiens
acagaagtattagtacttgatcatgtaagtcactgtcagtgacttattatagattatagaactgtataatagaacagtgctcccacaatattccttcttataaataaaatgatgcatttaatgtcccacattaaattctttcaaacaactaagcagcactaactgcttgaaatcaacactaaccaatttatcccacagcaatagcagtatcaacagcattcacattgtatcacgaattttaatagaggccatattagagttactaacaggaaagtgacagtgaaaagcaactttcctgagggccacctaagttaaaacaaaactctaagataacgacatctgagtttgttttccgtatgtattattcaggttccctttaccattttcttaggcagaaatgtggattgtagaaatttttactgagaagacagtagaaagaagatgaatacttttgtgactagggagaagtgttactagaaaagaaagaaaaaggtccagtttagagacttttgaaggtaaactgattctgtagcatagtttgagagttaagtcttgtagagattgatatgtcatttcataaaaaatatccctcttttattgtgatttttaaagctattttatatttctggcctgtttatgcttgtgctgtcacctgaaaaaatattactggtgaattcaaatgtggagaaatgattttggcacagttgtggaaacaactatattgtaaactaagatc

SEQ ID NO: 166406 - DNA, 1087 bp, Homo Sapiens
  misc_feature (802)..(802): n is a, c, g, or t
  misc_feature (822)..(822): n is a, c, g, or t
  misc_feature (833)..(833): n is a, c, g, or t
  misc_feature (898)..(898): n is a, c, g, or t
  misc_feature (909)..(909): n is a, c, g, or t
  misc_feature (928)..(928): n is a, c, g, or t
  misc_feature (945)..(945): n is a, c, g, or t
  misc_feature (968)..(968): n is a, c, g, or t
  misc_feature (1003)..(1003): n is a, c, g, or t
  misc_feature (1048)..(1048): n is a, c, g, or t
  misc_feature (1057)..(1057): n is a, c, g, or t
cattactaccccacggagtatgtggcactcttatatgcatggatgatgtggagtccaggaggctcacgactttcatctcgatctcgtcctcgccaaagctcttcagcagcttcataacctcactcagcgtcagccacttacaatccacaagctgaatggagacaatataatctccttcccgggctcctgccaccgaggcagagcagtaaggatccaggaagtgaacctgaacgggggcgttccctctcaaggtgaaccccaagtccccttcttctgcagtgaagcggatgcttcgaggaggcgtccaccgcttgttagccgaaaacacagataaggggcccagcttctggaagaagtccgtgactgtcagcttggagaactggggcaatataatgtcaacctcttgctcagttttagcaacaacactgggggcgtcgatcaggttcagcaggtcatcctcctcctggtgctgggcgtacgtgagccgggagcgttcctgtgcggcacacagcaccttctgtagcacctcaatgctccgcagcttcttgcagaggctcgcctcccgcaccgactcctcgtgatgagccatggctctgcgcaagtgggacttccccagctgtcggcgctgctgatcattcttcagtgtggccaagggtgtcagcccctctggcatgtggtcgtagagctgggacaggcacttctcctggtggtccagatccgtgcctggcttacctggtggtcgatgaggaggatggcaagtgaagtaatgggccagggccgcgtagtggtgggccttacgcangctaagctggccaagagtangggatgttctntttaccggcgcctggctcatggcttgcgtgtagctgttggtagacctctccacctgaaatagaanggacacttggnaaaggcaccccggcacaanggcccttatgaacccantttgcaaaagaaagaaccctttnttttttccattcaacaaccccttgccaagggctgnttccagaaatctgggaagcaacttccaaaaagaacccctccgttntttcatttncacaagttaacaaaggggggatcaaggctg

SEQ ID NO: 166407 - DNA, 901 bp, Homo Sapiens
gttctgcctcgaacttctcctctggcccattcctcattcacatactctttaagaataataatttctccctctgagaaactcaactcatccttctgctctccaatatattcaaaccgagcaacacatcttgagcctttaacacaatgagatgaaacacattctcttttcccatttcctccttctgggatatcaataatcactttgacatagttggcaggaaatatgccaatctggtttctacagttccctctgtaccaatctgtatctatcttctccagaagataaacaatttctccagaagtgaggttcaaatcatcaacttgctctgctgggaaatcatgaagaacgacagcatgaggagcaccactgtcaacaggcttctgagcgtggcttggatcgtttgatctgcttctaagatgttcatcaagtggagtgataatcttcatttgagacaggtgaactctgccagtgtcttctcccttttggcactccaagtaattattttccgtctgcttcagcatcacaagtacatccccacgcatgtatttactgtagagagggtgtcctggtttgggacgagggggtagcaccggatcttgatttttaaaaacttgactcttggcttttgagagtccagttgccaagttactttgttttttctgaagatccatgtcagaagaggatcgattaaaaggcagtttcttattagatcttctggttgcagaaagctttgggggaggtggtctctcagggggcaccttggttggaggctgttgagttggaatggtttttccattcacaggtctcggtggcaaccttgggggtactcgcacaaaacctcctgtttgacctgggtggttggattccaagtttctagttctctcaacattactgagctttc

SEQ ID NO: 166408 - DNA, 566 bp, Homo Sapiens
ccacgcaagtggtatgagggcaacacagcaaacttacccttttgaggccgtttcctttttctgccctcaatctctgtgaactgaaccttgttaaagtcagtcaacaccagggtggatggttggccgttgtcacctattttcaggacataacaccctgacttaggagccattccgatcatttctaattcaatagatgcgcccagcattcagattgccttttctctcaaccaggatctttaaagtcgatgacaagagttccagtcctgaatcatggcaaagtgcagtagtgaactgcggggttattctggaaggatctctctatggctgatggtctcagttccggcatcagcctctgactgagaatcaggtctcacacaggaggagtcagatgaggagcaatcctctgcttccgatggagttagttgtgatgcattggtgaggtctggtttttcacacatgaactaacaatgagctttcgctgtgtcaagcacaagactgaccccagagacacacatagtgcacctcatagaagctttcactcgtctttatatttactccagaatcgg

SEQ ID NO: 166409 - DNA, 598 bp, Homo Sapiens
tgagctggcccgggccgaggcctacgtcctggcctgcactgatcagcagtaccttgttcccaaggatggccaaccattggcgggactgatccaggatcacatggtttcaggggcaagcatgactactcggggttgctttttcacccgggagcactatatggagctggtgtaccgaggactcacggacaaagtggggcgcgtgaagctcctttctccttccatcctgaagccctttccgctgtggacaggaaaacaggttgtgtcaacgctgctcataaatataatcccagaggaccacatcccactgaacttatctggaaaggcgaaaatcactgggaaagcctgggtgaaggaaactcctcgatccgttcctggctttaaccctgactcgatgtgcgagtcccaggtgatcatcagggaaggggagctgctctgcggagtgctggacaaggcgcactatgggagctccgcctacggcctggtccactgctgctatgagatctatggaggcgagaccagcggcaaggttctaacctgcctggcccgcctcttcaccgccctgcagctctacagaggttcacttggcgtggatagggta

SEQ ID NO: 166410 - DNA, 583 bp, Homo Sapiens
ggaccactcttaccacggaacaaatggagtgggaaggcaaagggagcatttgttaagcgcccgctatgagccaggcaccatgaatagggaaaaattcatttgagtcttcctttacaaatctccaaaagaaaaagaaactgtgcattgttaaacaaagtacagaacaggcctgcgtcgctgcttaatctaggtcagtgataactgcaaaggaagtttatttcatgcagagggtactccgttcacccctcttacagctgcacgtgtcaggcagcatcatttacatcaccacgtggccctgtctcagcacacccatgcagtataaacctgcccccaacacatactctacctgttcatgtctggaatgtacatttcagccacaccagaaaaaaatgactggttgattagtaaagcacaaacactctctctcatataagctagaggacagccaatatcttcagaaatttcaggtgccatgctttccatagagtagattcttctttcacttttagccatcctactcctgcattatccagaacaatggtgaaaatggtgctgtgttgggcgataagggatcctcagagtc

SEQ ID NO: 166411 - DNA, 1052 bp, Homo Sapiens
  misc_feature (950)..(950): n is a, c, g, or t
  misc_feature (971)..(971): n is a, c, g, or t
  misc_feature (988)..(988): n is a, c, g, or t
ctaccccacgggggacaatggatgcctagatgacttccgcacagaatttgatgtggctgtggatgagctttcactcaacccgggcaagcagaggttcgagaaaatgatcagtggaatgtacctgggtgagattgtccgtaacattctcatcgatttcaccaagcgtggactgctcttccgaggccgcatctcagagcggctcaagacaaggggcatctttgaaaccaagttcttgtctcagattgagagtgactgcctggccctgctgcaagtccgagccatcctgcaacacttagggcttgagagcacctgtgacgacagcatcattgttaaggaggtgtgcactgtggtggcccggcggccagcccaactctgtggcgacaggcatggccgctgtggtggacaggatacgagaaaaccgtgggctggacgctctcaaagtgacagtgggtgtggatgggaccctctacaagctacatcctcactttgccaaagtcatgcatgagacagtgaaggacctggctccgaaatgtgatgtgtctttcctgcagtcagaggatggcagcgggaagggggcggcgctcatcactgctgtggcctgccgcatccgtgaggctggacagcgatagaacccctgaaatcggaagggacttcctctttctctccttcttccctgttttaaattataagatgtcatccccttgtgtcagagacagaccccttggcttttgcttggcagagaggaccccactggactgggttttgtctctgcatctcattgtagagcttggtggctgagcttggccctattaagataaatagagttccaaataaggatttgttcacatgcatcataaccattcccattggttctcctaaaacatgaaaatgatctcccttagtaatcccccttgccaaattccatgtccctgtataattctacagggatngggacactaatgaagatacgngttggcttcaccttggnagcctgaacaatgacatttttctaagtggggggtgcatccccccagcaactggatggttggttc

SEQ ID NO: 166412 - DNA, 801 bp, Homo Sapiens
ccctgggttaccctggaattcaactatatcatcggaggccgggtaatcaatgagcttattggaaatctggttgggacatctttatttttgtcctaatgttcagatacccaatggacttgggagtgaagaaattttctatccacacctcagttttttgtaccgctggctgcccagtaggagaggaggagtatcacgatttggtgtgccccctgctagcacgaggcgagctgctgatcagaatggcggaggcgggagacacaactggggccagggctttcgacttggagaccagtgaaggggcggcctcgggcagccgctcctctcaagccacatttcctcccagtgctgggtgcgcttaacaactgcgttctggctaacactgttggacctgacccacactgaatgtagtctttcagtacgagacaaagtttcttaaatcccgaagaaaaatataagtgttccacaagtttcacgattctcactcaagtccttactgctgtgaagaacaaataccaactgtgcaaattgcaaaactgactacattttttggtgtcttctcttctcccctttccgtctgaataatgggttttagcgggtcctagtctgctggcattgagctggggctgggtcaccaaacccttcccaaaaggacccttatctctttcttgcacacatgcctcactcccacttttcccaacccccacatttgcaactagaagaggttgcccataaaattgctctgcccttgacaggttctgttatttattgacttttgccaaggcttggtcacaacaatcatat

SEQ ID NO: 166413 - DNA, 727 bp, Homo Sapiens
cccatctggacaaggcctctcatgcgactggcaatcagcttcctgcgaacacacaagctcctctcctcagtttgctctgaaaacgagtccgaagccgaagctgaccagcagatggacaacttgtacctgaaagccttggagggtttcattgccgtggtgacccaagatggcgacatgatctttctgtcagaaaacatcagcaagttcatgggacttacacaggtggagctaacaggacatagtatctttgacttcactcatccctgcgaccatgaggagattcgtgagaacctgagtctcaaaaatggctctggttctgggaaaaaaagcaaagacatgtccacagagcgggacttcttcatgaggatgaagtgcacggtcaccaacagaggccgtactgtcaacctcaagtcagccacctggaaggtcttgcactgcacgggccaggtgaaagtctacaacaactgccctcctcacaatagtctgtgtggctacaaggagcccctgctgtcctgcctcatcatcatgtgtgaaccaatccagcacccatcccacatggacatccccctggatagcaagaccttcctgagccgccacagcatggacatgaagttcacctactgtgatgacagaatcacagaactgattggttaccaccctgaggagctgcttgaccgctcagcctatgaactgtaccaagcgctagactccgagcccgaagtacggg

SEQ ID NO: 166414 - DNA, 508 bp, Homo Sapiens
agctgtggtctggtcctgttccaggcgaattggacccagagccatcagtttccgttttgtttcagcaacccaagctagttctgcatcggcagcttgctcatactgttgtgatctctgaatagcagcatcaatctcatccaccctttgtccaatagtgtcactgactagtttgtactgctcgttagcatcggacacaagtttatccagcccttctctggctctccagggcaccagctctaagagagcacggctcacctcattcactgtgtccaacaccagcctgtgctccatgacctccttctttaattccttctgtctctgctgaaactggggtatctgttcccctgtgggagactgtcctccactggttgccagctcctcctccacctccctcagccacccggtcagttcctcataagtagactggaacttggtggccagctgccgggcattgctactaaagttctgagggcccttggagctagtaactgtgatcgtggtaggaggt

SEQ ID NO: 166415 - DNA, 606 bp, Homo Sapiens
tcggtcggtccacttctacccacgtagcaatgcagaactctctataagttgttattggccagatgcttccagcaactgagaataggacctgctttcatctggtgcttggctttggctgctatcactagccacccttttctccgtggctacctgggatctcagaagatgagggctttctccctgtgtgctgcctcatacactaggggcattgaaagatttgacagcccaccaggtgacaccatgtcctagccccctcaaccatgagtacaaagccatctgcttgtctatgtgatgcctatgaggacaatgggtaggtcataccctctagccctgaccgctcatcctggccctctgaactcctatgagacaaagccatcccttagtccctggaggagttgcttttccctgccctgacccagaacgacctgcctgtaggtgtagtcaggtatgggccataggctgaagtcaggaacacccaaagatggtgggggcaggcaggggagtgagaagtcttgctttcagtggtgtgccggatgctttgtttcacaggcgcataaaagaggaacttcatttaacagacctctccatgacactgttggtgagcta

SEQ ID NO: 166416 - DNA, 543 bp, Homo Sapiens
cgatccactcatttaggccagaaccacatggatctcgcatcacttcactgggctccaggacagaaaggggctcaagtcaggaagggaatgcttctaaccaatgattaattactcatcccctgtcaaatttcttgacaaagggacaaaaatgaacactcctaccagggagcaaaatcaatggaaactcacccttttcccactctgtatatttttaaacaaaaaggttttctcccactaacaggtagttttcctgatttttttaaaagcgtattgagaagaaagaagcagaacatcataaccctgctgcagccttttcaaaggtaatgaatgagccagtcccacaggagagggagctctgcttcagggtgggaaggattccttgagagctttcagagtccaatttcccaggaataaacgaggtccgcagtcaggctggggccgacaggctttttccaaggcagacaaaccccaagatccacgaaagcctatattaatcttaattcctagtgcgtcacaggcaggcaaatagaacacaggcctcat

SEQ ID NO: 166417 - DNA, 555 bp, Homo Sapiens
ccgttcgattcagcggcccagtgttcttcgaacttacaaaagcaaaggattttcttcaatcccgttcgacttttctgttatttcaggatggtcatgagttccatgaaagtccatgtgcttgtttcaatgggagcaacaccagagtaaagacaaagtcctatccccacccccgtcctcgcctccacccgggccatttcctgtatgtcccattttctctgttgtgattgtgcgagtgtgttggtgcatgtaggttaccatcggtgggtgacctacgtggaaaggagaactctttgaaattgcaacgcggccgctatggaaagtgtgtgctggagccgagggaggaaagattccggcgagccagagctgttagaggctcaccccagagaggtaaaccggagtaactgagcttgaagggacatctataacctgcacatcgctttggccttaccccttggccagagagctccactcatgctaggtttacgagaggatcagaactgactccttgatgtgacttcgctggtatctgatctttctactggtttcttacaacac

SEQ ID NO: 166418 - DNA, 794 bp, Homo Sapiens
  misc_feature (412)..(431): n is a, c, g, or t
cgaaactggtgctcccgacccctggtcaagcccatcctccccgtgcagacaggggagcaggcccagcaagaggagcagtccagcggcatgaccattttcttcagcctccttgtcctagctatctgcatcatattggtgcatttactgatccgatacagattacatttcttgccagagagtgttgctgttgtttctttagctctcctccaagacactatggccaactgaagcccaaagccagctgagaggggagtctgggaactgcagggtgcatcatcaacccagtgaaatgcagaccagagcagaggaaggccaggatctgcacagctcattcgctttttatggacttactttccaaggaagaaggtgtgaaactgtataaccccatctctggataacagatcgatgaagnnnnnnnnnnnnnnnnnnnngcaagtgttccaggctagagaaatagagaccacgaccctgaactggagcattgacttcctttctctccctttctccttccttcccgtcccttccgcgctctttgccccaatccagtgcttcctccgcttctggtactacagttccgtcccattcctggtcttggtctctacaaccctggacgtctggcagtcttgatgctgacttgtgtattcctagtaggttagtatcattcgcacatacctgaacatctttcccgggctaataggcataccattggcccattcccattagatttacgctcccaagtgtcccctgccgtcgccgctcgttaatgcggatccactcccctgagcaagctctac

SEQ ID NO: 166419 - DNA, 243 bp, Homo Sapiens
ccagaatgagtgctccctttatgagctgcagtgcagcagaaccccaaaaaaaagtttgctgcaattatatagcatcacagtgctctgctaacagccagcatagaagagatttacctacagctttttgcaccactgttctagccatttaatgctttatactttaatagtagatgctgaccgcaatatctcaacgtgcccctatcatttggcagccaaataatagagagaatcgtggggttggtg

SEQ ID NO: 166420 - DNA, 624 bp, Homo Sapiens
  misc_feature (197)..(256): n is a, c, g, or t
  misc_feature (601)..(601): n is a, c, g, or t
  misc_feature (609)..(609): n is a, c, g, or t
ggggggatactgcaaagaaattgggtgaaatgtggtctgagcagtcagccaaagataaacaaccatatgaacagaaagcagctaagctaaaggagaaatatgaaaaggatattgctgcatatcgtgccaagggcaaaagtgaagcaggaaagaagggccctggcacgccaacaggctcaaagaagaagaacgaaccnnnnnnnnnnnnnnnnnnnnnnnnnnnnnnnnnnnnnnnnnnnnnnnnnnnnnnnnnnnntgaagaataaatggctatcctttaatgatgcgtgtgaaatgtgtgtgtgtgctcaggcaattattttgctaagaatgtgaattcaagtgcagctcaatactagcttcagtataaaaactgtacagatttttgtatagctgataagattctctgtagagaaaatacttttaaaaaatgcaggttgtagctttttgatgggctactcatacagttagattttacagcttctgatgttgaatgttcctaaatatttaatggtttttttaatttcttgtgtatggtagcacagcaaacttgtaggaattagtatcaatagtaaattttgggttttttagggggggcagnctaaaaanggacaagccgattga

SEQ ID NO: 166421 - DNA, 1111 bp, Homo Sapiens
ggggccgtggcgcggagaactctgcaaaacaagaggctgaggattgcgttagagataaaccagttcacgccggagccccgtgagggaagcgtctccgttgggtccggccgctctgcgggactctgaggaaaagctcgcaccaggtggacgcggatctgtcaacatgggtaaaggagaccccaacaagccgcggggcaaaatgtcctcgtacgccttcttcgtgcagacctgccgggaagagcacaagaagaaacacccggactcttccgtcaatttcgcggaattctccaagaagtgttcggagagatggaagaccatgtctgcaaaggagaagtcgaagtttgaagatatggcaaaaagtgacaaagctcgctatgacagggagatgaaaaattacgttcctcccaaaggtgataagaaggggaagaaaaaggaccccaatgctcctaaaaggccaccatctgccttcttcctgttttgctctgaacatcgcccaaagatcaaaagtgaacaccctggccctatccattggggatactgcaaagaaattgggtgaaatgtggtcctgagcagtcagccaaagataaacaaccatatgaacagaaagcagctaagctaaaggagaaatatgaaaaggatatggctgcatatcgtgccaagggcaaaagtgaagccaggaaaaaaggggcccgggcaggcccacaggctcaaagaagaagaaacgaacccacaaaattgagaaggagggacgaggaacaaccaacatgtcgccatggacgcgaaacccattctgcactacttgcgaaaacatgcaccttgtcgggccggccctcggccccttcaaaaaagcttttctaaaaccatttcccttggccgccgcggggcccccgtcaggaaaatggaaaacctgggccccaaacgttgttttcccctaaggaaaaaccttggctcacatgcatacagaggcttggggatctcccaccccagataaaataactctcccgggcgtgcaaaccgacatcgcttttattaaacaaaatctccatagtggcaatttctggagaggctcttttctcgtggatcgtctttccaggaggagaattgcgctggg

SEQ ID NO: 166422 - DNA, 916 bp, Homo Sapiens
  misc_feature (707)..(766): n is a, c, g, or t
gggaaaccagttcacgccggagccccgtgagggaagcgtctccgttgggtccggccgctctgcgggactctgaggaaaagctcgcaccaggcaagaataccctccaataccctcgggtggacgcggatctgtcaacatgggtaaaggagactccaacaagccgcggggcaaaatgtcctcgtacgccttcttcgtgcagacctgccgggaagagcacaagaagaaacacccggactcttccgtcaatttcgcggaattctccaagaagtgttcggaacgtaggaagaccatgtctgcaaaggagaagtcgaagtttgaagatatggcaaaaagtgacaaagctcgctatgacagggagatgaaaaattacgttcctcccaaaggtgataagaaggggaagaaaaaggaccccaatgctcctaaaaggccaccatctgccttcttcctgttttgctctgaacatcgcccaaagatcaaaagtgaacaccctggcctatccattggggatactgcaaagaaattgggtgaaatgtggtctgagcagtcagccaaagcataaactaaccatatgaacagaaagcagctaagctaaaggagaaatatgaaaaggatattgctgcatatcgtgccaagggcaaaagtgaagcacgaaagaagggccctggcaggccaacaggctcaaagaagaagaacgaaccaaaagatgnnnnnnnnnnnnnnnnnnnnnnnnnnnnnnnnnnnnnnnnnnnnnnnnnnnnnnnnnnnntaaatggctatccttttatgatgcgtgtggaatgtgtgtgtgtgcttcaggcaatgggtttgcctaaaattttgaattcaagtgcagctcaatactagccttcataataaaaactgtaccgatttttgtatagctgataacattctctgg

SEQ ID NO: 166423 - DNA, 887 bp, Homo Sapiens
  misc_feature (809)..(809): n is a, c, g, or t
gggggcgcggagaactctgcaaaacaagaggctgaggattgcgttagagataaaccagttcacgccggagccccgtgagggaagcgtctccgttgggtccggccgctctgcgggactctgaggaaaagctcgcaccaggtggacgcggatctgtcaacatgggtaaaggagaccccaacaagccgcggggcaaaatgtcctcgtacgccttcttcgtgcagacctgccgggaagagcacaagaagaaacacccggactcttccgtcaatttcgcggaattctccaagaagtgttcggagagatggaagaccatgtctgcaaaggagaagtcgaagtttgaagatatggcaaaaagtgacaaagctcgctatgacagggagatgaaaaattacgttcctcccaaaggtgataagaaggggaagaaaaaggaccccaatgctcctaaaaggccaccatctgccttcttcctgttttgctctgaacatcgcccaaagatcaaaagtgaacaccctggcctatccattggggatactgcaaagaaattgggtgaaatgtggtctgagcagtcagccaaagataaacaaccatatgaacagaaagcagctaagctaaaggagaaatatgaaaaggatattgctgcatatcgtgccaagggcaaaagtgaagcaggaaagaagggccctggcaggccaacaggctcaaagaagaagaacgaaccagaaaatgaggaggaggaggaggaaaaaaaaagatgagatgaggaggaagaggatgaagatgaagaataaatggctatccctttatgatgncgtgtggaatgtgtgtgtgtgctcaggcaaatattttgcctagaatggaatttcaagtgcagctcaatactaccttca

SEQ ID NO: 166424 - DNA, 345 bp, Homo Sapiens
  misc_feature (105)..(105): n is a, c, g, or t
  misc_feature (124)..(124): n is a, c, g, or t
  misc_feature (288)..(288): n is a, c, g, or t
  misc_feature (314)..(314): n is a, c, g, or t
  misc_feature (330)..(330): n is a, c, g, or t
cgaaatgcaacatcctaaaaaacccaaaatttactattgatactaattcctacaagtttgctgtgctaccatacacaagaaattaaaaaaaccattaaatatttnggaacattcaacatcagangctgtaaaatctaactgtatgagtagcccatcaaaaagctacaacctgcattttttaaaagtattttctctacagaggaatcttatcaggctatacaaaaatctggtacagtttttatactgaaggctaggtattgaggctggcacttggaattcacattcttngggcaaaataattggcttccgggggngtgtggggcgaggtcnggctaaatactttga

SEQ ID NO: 166425 - DNA, 194 bp, Homo Sapiens
ctcattgattatggcaccaggaagtctgaaggtttccacattcgatgatgtcaacctaaaccagcagccatcccgcttgtccctcttaggcatttcaggcttcctttgggatttcaggtgtcccatgatcttgatgtgctgctaggctggagcacacactggccattactgaacacagccatattagggaaagc

SEQ ID NO: 166426 - DNA, 407 bp, Homo Sapiens
  misc_feature (318)..(359): n is a, c, g, or t
caccagaactgtagacaccgaaaatggaaagcaattcgatgtattccaagagtgtggaaataaagagaactgagtatggaattcaagagagaagtgtctcctcctcgtgtagcagcttgtacaagaggcttgggagtgcagcttctcaaaggagaccgatgcttgctcaggatgtccacagctgtggcttccttgtgtttgctagccatatttttaaatcagggttgaactgacaaaaataatttaaagacgtttacttcccttgaactttgaacctgtgaaatgctttaccttgtttacagtttggcaaagttgcannnnnnnnnnnnnnnnnnnnnnnnnnnnnnnnnnnnnnnnnntacctgtactgtgttcttcacagaccctttgtagcgtggggtagaagt

SEQ ID NO: 166427 - DNA, 1017 bp, Homo Sapiens
ttagggcccatttaaggcggggaaattctatttcctaaaacccccccttcccatggatatcaatagtccgggtcctaatatttccttgcccttaggcagggatttttctggggattctgaattggggtctgattaccaagctgaaagatatcttaaattaataaccagggcagggaagaattgagtggggaaagaaggcccttcggacagtagataagtatccaaagcagtgtgggcaaaaagagtaagccaacatccccttgggatttttcccatgtgggtatcactgagcaaagctgctgtgggaagatatgtagattaatgggaaatgcagggttattatggaggaaataactcacaggatgatttcatagcctggctaaattactacttgattaactcctgataaaactcagagcgcacaaagcgaggcagagaatccttttccatcagggcatggattcttttctgggccatgtcaaagctgctcagggaaggttccaccaggttcttcattgtgatgtccttagtgaagtggtcaatattcacctctttaggagcctccgtttgaatgaattcttcataaatttgctttgccttctcagccatcttggcaggggacttgatcttcttgtaatcctcacaggcaatccagaactcaaggttttcctcactgaattcagacttcaggaaacttttgaaactggcaagtccatagttgttctgcaggagtttgtccagggaatcacgccactgcagggcctcgtccagcgaggttttctgggtcttggctggtttctctggcttctcattgtacggaatgacaaggtcaccaactgagtctggcttctggaggagaattcccaacttgatcttaatctccttggccctttccaggcatgagtggggcaaagctgcaagtcctttgcacattttggcaggtggcttagctcctccgctttaagtacaacttcttaacagcagagccagtctttgaaaacttcaaaactgtctccc

SEQ ID NO: 166428 - DNA, 852 bp, Homo Sapiens
cccgtgtggataaaagtatcccacaaggcaagtgggggggcaaaaaaagagttaaggcaaccttcccccgtgggatgttttccccatggtgggttatccactgagccaaagcctgctggtggggaaggatatgtagatttaatggggaaaagccaggggttattatgagaggaaaataactcccacaggatgatttcaatagcctgggctaaaattactacctgaattaactccttgataaaactcagagccgcacaaagcgaggcagagaatcctttttccatcagggcatgggattcttttctgggccatgtcaaagctgctcagggaaggttccaccaggttcttcattgtgatgtccttagtgaagtggtcaatattcacctctttaggagcctccgtttgaatgaattcttcataaatttgctttgccttctcagccatcttggcaggggacttgatcttcttgtaatcctcacaggcaatccagaactcaaggttttcctcactgaattcagacttcaggaaacttttgaaactggcaagtccatagttgttctgcaggagtttgtccagggaatcacgccactgcagggcctcgtccagcgaggttttctgggtcttggctggtttctctggcttctcattgtacggaatgacaaggtcaccaactgagtctggcttctggaggagaattcccaacttgatcttaatctccttggccctttccaggcatgagtggggcaaagctgcaagtcctttgcacattttggcaggtggcttagctcctccgctttaagtacaacttcttaacagcagagccagtctttgaaaacttcaaaactgtctccc

SEQ ID NO: 166429 - DNA, 815 bp, Homo Sapiens
agtactaccccacgcagacgtctcatctcgctcttgatagcaaattggcaggcatagtggtgcccaatgacggaaactgtcatctgaaaaacaacgtctatgtcaaatcgacaaccatggaacacccctcactaggccaactttcagagaaattaatagacaacaacattaatgtcatctttgcagttcaaggaaaacaatttcattggtataaggatcttctacccctcttgccaggcaccattgctggtgaaatagaatcaaaggctgcaaacctcaataatttggtagtggaagcctatcagaagctcatttcagcagtgaaagttcaggtggaaaaccaggtacaaggcatctattttaacattaccgccatctgtccagatgggtccagaaagccaggcatggaaggatgcagaaacgtgacgagcaatgatgaagttcttttcaatgtaacagttacaatgaaaaaatgtgatgtcacaggaggaaaaaactatgcaataatcaaacctattggttttaatgaaaccgctaaaattcatatacacagaaactgcagctgtcagtccgaggacaacagaggacctaaaggaaagtgtgtagatgaaacttttctagattccaagtgtttccagtgtgatgagaataaatgtcattttgatgaagatcagttttcttctgagagtcgccaagtcacacaaggatcagcctgccccgcagtggtcgaggagtttgtgtttgtgggaaatgttcatgtcacaaaattaagcttggaaaagtgtatggaaaatatctgtgaaaaggatgacagt

SEQ ID NO: 166430 - DNA, 647 bp, Homo Sapiens
gacagccgtagtagatgttctactttgttctgctgttctctggaaagaatatttggttttcctgtataggaatgagagtaattcctttccaggtatttgataattctgggaagcataacccatgcctccccctagccatttttactgttatcctatttagatggccatgaagaggatgctgtgaaattcccaacaaacattgatgctgacagtcatgcagtctgggagtggggaagcgatcttttgttcccatcctcttcttttagcagtaaaatagctgagggaaaagggagggaaaaggaagttatgggaatacctgtggtggttgtgaacccctaggtccttgggagctcttggaggtgtctgtatcagtggatttcccaaccccctgtgggaaattagtaggctcatttactgttttaggtctagcctatgtggattttttcctaacatacctaagcaaacccagtgtccaggatggtaaatcttaatctttcgttcagttaagtttttcccttcatctgggcactgaagggatatgtgaaacaatgttaacatttttggtagtcttcaaccagggattgtttctgtttaacttcttataggaaagcttgagtaaaataaatattgtctttttgtatgccaaa

SEQ ID NO: 166431 - DNA, 448 bp, Homo Sapiens
ctagtaatctgcaatgcaatcacaatgcccaaactagacctgccatttctcacacacagatttaggaatgaccaacttgtaccctcccagcgtttagcacaacacaatgacacccttaatttgacaatctgcttcctctaatatatccccagtctaaggcatttaaaattaaacagctcttcaacgccccaagttatttcatcaggctaagaacttctccgagaaacgcacaagaaggcaggcaaacaggtgggtaggtgagaggtcacggggctccatctgcaagctccatctacaaggcatcaatctgcgttgtggcatcaacgttaaaatgttctacagcttagggatcttcttgaagcaaggttccaagcacaaaactagtatgaccgaccctcaattagaaaatgcagcatccgctaagtcagaccacaagtctaaggcattt

SEQ ID NO: 166432 - DNA, 622 bp, Homo Sapiens
taacaggtggtaggttagaggtacggggctccatctgcaagctccatctacaaggcatcaatctgcgttgtgtcatcaacgttaaaatgttctacagcttagggatcttcttgaagcaaggttccaatgcacaaaactagtatgaccggaggctcaattttagaagatgcagcatctgaaaacctttatccccaggaaaggaggggtgcctgctggcattcatgggctctggaacaagcatttattcaaagctgatggcccctcgagccggatgcatctgctgtggactttttaagattgccccccataagctcatctgcaaactttaaatggtagcctcctgaatacagggcttcctgagcaaggcctggaaacagaacattggagaacttcctcctcctaagcctctggaaattcaatctgcaggcatcaattgaggcgggctctctcctccagggtctcccctcctgcaatgctaggactcacactggccagggactccatgtctcccggttccatctgctcgccatgaggaacactatagtaacaaaccacggtccatgaagcatttttgtaactttcagctgaatggctggtcgacgcggccgcgaatttagtagta

SEQ ID NO: 166433 - DNA, 290 bp, Homo Sapiens
gcggccgcctactactactactaaattcgcggccgcgtcgacagaaactgaagcagtccctgcccccttcccaattcccaatctccacagccttccatcctcccactttcgattcaccttgcgccaccgacgcccctggccttcgtttgcagcaagtttacccccaccattacctctcgcataaaagcctgcatttaccaggttcaaagaggggaaccaacgcctgcaggaatcgcttcaccgaatcgcctggccgcgtcctctgctagacttcacctgccgcgtcgacg

SEQ ID NO: 166434 - DNA, 341 bp, Homo Sapiens
gcggccgcctactactactaaattcgcggccgcgtcgacagaaactgaagcagtccctgcccccttcaggaagtggcagaaactgaacatgttgttagagttcacattcccttctccctcactgatatctctcaaattaacaaaaagactcagttcatttccagaagaccctacctcttatattagagtttcagtacctcacccagtgttatgaactaacttggcatgacctctacattatcctctctgccaccctctccccagaagacgaggaccgtatctagaccccagctcaggtgcatgccaatacaattcatcaccaggtcgacgcggccgcgaat

SEQ ID NO: 166435 - DNA, 387 bp, Homo Sapiens
gcggccgcctactactactaaattcgcggccgcgtcgactgtcattaaatgtcgctcaaaagaacaagcaaacatttaaggtggtggagagcagcctggggacagctgacatgctgcatgcttctcagtaccagcaccatcacaatgcaaaaagcaacatctttcttaacctcagcttattctgtttttcagtctactctgtgagagagcaggaatgagaccagactagcaacaccattgccaagctcaaggactgggctcaatgcagtcactccttcagagagaccccccaccccaagcatgccccactttaaaatagcatgtttattgaagggggcagggactgcttcagtttcgtcgacgcggccgcgaatttagtagtagtag

SEQ ID NO: 166436 - DNA, 217 bp, Homo Sapiens
gcgtcgaccagaggttgaggctatcctcaattcaggtgctaggggttattccgccccttaagtagatctgaggcagacccttgggggtgtaaaagagagtcacaggtaccccaaggagtagatgccagggtcctaagttgaaaatgatgtcgattgggggcagggactgcttcagtttctgtcgacccgcccgcgaatttagtagtagtagtcgacc

SEQ ID NO: 166437 - DNA, 714 bp, Homo Sapiens
ggtcgactactactactaaattcgcggccgcgtcgacgaaactgaagcagtccctgccccctgtccagcgtccagcacacagcatgaacttggtcaccttctgagggtgaacttgcgcacacacgtcattggaaataacatggaggtccacacactgaagtttctttggggtcaagaactcctctggttcaatgctgccccagcctgaggcgtagcaggtggtccccagtgctggctcctgggtgggcaggtccatgaccttcacagcatccgtgagctcggcaggctctgacaggcggagcagcatgaggtcgtggctggagtcatcacctggcctgaggaatcgattcttcaggaggctcatattgtagagcgggtgtgggaagctgtggctgacctgaaatacctggcctgtgtcttcaggatgaaacaggctgtgccgacccagcaagatcacgcttttgttcctgatgcagtgggcagctgtgaggacccactgggggtgcaccagaacaccgccgcagactgccctgccacgagaggccacaagcacctgccagggttgggaatgcttctcgcactcccagcctcccacaatccgagacaggatgaggggtgcagcaccaatccacgtcacggacagggtgaggaagacaaccgggacccacatggtgacacagctctccgggtgcaggtggtaagcttggggctccc

SEQ ID NO: 166438 - DNA, 429 bp, Homo Sapiens
tactactactaaattcgcggccgcgtcgacgaaactgaagcagtccctgcccccgacggtctctcttcaaaatgtttgcaactgctgcgttagcatgagttggcacccactgttaacgtggttcatgactttctgtttaagctgtgccacctgttccctgagcatgttggccgtggacgccagctccgagttctgagctttcaaggttttcactttttcctccagccgggcgattctctccagcttcctttttcggcacttggaggcagcgatgcggttcctcatgcgcttcctctccgccttgatccgctcctgggactccatgtcgatgggggacaggggcggtgtctcgccgggcatctcgggcactgtctgaggctcctccttcagggcctgcagccgcggtcgacgcggccgcgaatttagtag

SEQ ID NO: 166439 - DNA, 454 bp, Homo Sapiens
tactactactaaattcgcggccgcgtcgacagaaactgaagcagtccctgcccccacctccattgacctgtagtccctgtgctccacctccattgatatgcagtccttctgaccccacctccactgccctgtagtctctgtgccccacctccattgacctgtagtccctgtgctccacctccactgacgtgtagtccctatgctccacctccattgacctgtagtctctgtgaccccacctccattgacctgcagaccctgtgctccacctccattgagcagtagtccctgtgccacctccattgacctgtagtctctgtgctccacctccattgacctgtagtccctgtgctccacctccactaacctgcagtccctgtgcccccacctccattgacctgtagtctctgtgcccccacctccagtcgacgcggccgcgaatttagtagtagta

SEQ ID NO: 166440 - DNA, 410 bp, Homo Sapiens
ctaaattcgcggccgcgtcgacccgtcctgtggtctgcctcagttgacctgcagtctctgtactccatgtccattgacctgtagtccctgtgactccacctccattgaactgtagtccctgtgccccacctccattgacctgtagtccctgtgactccacttccattgacctgtagtctctgtgctccacctccattgacctgtagtccctgtgccccacctccattgacctgtagtccctgtgccccacctccattgacctgtagtccctgtgactccacctccattgacctgtagtccctgtgctccacctccattgacctgtagtccctgtgctccacctccactgacctgtagtccctgtgaccccacctccattggccgtcgacgcggccgctaatttagtagta

SEQ ID NO: 166441 - DNA, 546 bp, Homo Sapiens
  misc_feature (439)..(439): n is a, c, g, or t
  misc_feature (493)..(493): n is a, c, g, or t
  misc_feature (506)..(506): n is a, c, g, or t
  misc_feature (515)..(515): n is a, c, g, or t
  misc_feature (520)..(520): n is a, c, g, or t
ctgggcaaggctgcggtactgtctctcatcaggtccaggagggggttacaaactgcaatagagactgtagattgcttctgtagtactccttaagaacacaaagcggggggagggttggggaggggcggcaggagggaggtttgtgagagcgaggctgagcctacagatgaactctttctggcctgccttcgttaactgtgtatgtacatatatatattttttaatttgatgaaagctgattactgtcaataaacagcttcatgcctttgtaagttatttcttgtttgtttgtttgggtatcctgcccagtgttgtttgtaaataagagatttggagcactctgagtttaccatttgtaataaagtatataatttttttatgttttgtttctgaaaattccagaaaggatatttaagaaaatacaataaactattggganagtactcccctaacctcttttctgcatcatctgtaggatactagctatctaggntggagttgaaagnagttaaggnatttncgattaaaattcactcttcaggtgct

SEQ ID NO: 166442 - DNA, 939 bp, Homo Sapiens
  misc_feature (231)..(231): n is a, c, g, or t
  misc_feature (603)..(620): n is a, c, g, or t
  misc_feature (871)..(871): n is a, c, g, or t
  misc_feature (880)..(880): n is a, c, g, or t
acatggagtcccaggagcggatcaaggcggagaggaagcgcatgaggaaccgcatcgctgcctccaagtgccgaaaaaggaagctggagagaatcgcccggctggaggaaaaagtgaaaaccttgaaagctcagaactcggagctggcgtccacggccaacatgctcagggaacaggtggcacagcttaaacagaaagtcatgaaccacgctaacagtgggtgccaacctncatgctaacgcagcagttgcaaacattttgaagagagaccgtcgggggctgaggggcaacgaagaaaaaaaataacacagagagacagacttgagaacttgacaagttgcgacggagagaaaaaagaagtgtccgagaactaaagccaagggtatccaagttggactgggttgcgtcctgacggcgcccccagtgtgcacgagtgggaaggacttggcgcgccctcccttggcgtggagccagggagcggccgcctgcgggctgccccgctttgcggacgggctgtccccgcgcgaacggaacgttggacttttcgttaacattgaccaagaactgcatggacctaacattcgatctcattcagtattaaannnnnnnnnnnnnnnnnnttacaaactgcaatagagactgtagattgcttctgtagtactccttaagaacacaaagcggggggagggttggggaggggcggcaggagggaggtttgtgagagcgaggctgagcctacagatgaactctttctggcctgccttcgttaactgtgtatgtacatatatatattttttaatttgatgaaagctgattactgtcaataaacagcttcatgcctttgtaagttatttcttgttttgtttgtttngggtatccngcccagtgtttgttttgtaaataaggaggattttgggagcactcttgaggtttacccat

SEQ ID NO: 166443 - DNA, 390 bp, Homo Sapiens
  misc_feature (333)..(333): n is a, c, g, or t
gttaacattgaccaagaactgcatggacctaacattcgatctcattcagtattaaggggtggagggggagggggttacaaactgcaatagagactgtagattgcttctgtagtactccttaagaacacaaagcggggggagggttggggaggggcggcaggagggaggtttgtgagagcgaggctgagcctacagatgaactctttctggcctgccttcgttaactgtgtatgtacatatatatattttttaatttgatgaaagctgattactgtcaataaacagcttcatgcctttgtaagttatttcttgtttgtttgtttggggtatccngcccagtgttgtttgtaaataaggagatttgggagcactctgaggttacccatttgt

SEQ ID NO: 166444 - DNA, 583 bp, Homo Sapiens
tctcaaagtcggcgaagtcattccaagaagactggaacatgtgcatgaagcggttgatgaacaggttctccatcgctttggagtaattcagaacaaagtccactcctttttcactatcaaactggatatcacggggtaaatccttgtggcatttggcatcgatgctcaaggggaagccagggttccactccagccatcgatattgtttttgccgtgtttccagtttcgttacgtcggtgttgcttgagaatgtgaatttggtcatctcggcccaactttgcgcgtccatccctcaggacaacctcgacatcgccggtgatccagcggtagcaggggaactcgatgtagtccccgtggggcgtcttcagcgtgatgtacttcaggtaccagtcgtcatacagccagtacttgcgcttctcgattctgaccagctggatctcgcccagttcctcgtccacagtcacgtcgtatgaatccaccgcgccacgctcgaagtcgttgtagaagggcttgtccagcaggtgcttctcgctgcagccccacgagcccacgagcctgcgtagatgtagtcgtcagtgccgga

SEQ ID NO: 166445 - DNA, 598 bp, Homo Sapiens
tcacccacagtctcttcccctcaaacatgcacaattatttaactttggagttaccatacaaggcgaactagtttcccctccttcataatgaaagcacgaagtcatgtgtacaaagtcattcatatgaaaagaataaacatccacattccttttcttatgtccttgacaaatatatatggaatgccggaaattatggaaaaacaattccaatgttacgaagtccaaagaactggaatgagaaaactcctcacggcacattatgctgcatggaatgacaatcatcctcggggaattagggcagcatcttctaccacttttaaaggctaccacgagacggggtggaaatgccaaaaatggcacctcatctctgatcaaagattcagagcatgcaagtgttgatgccatgaagagtcccagccttctccccactaaaataccaggcaacgcttagcagctgctgtcctaacaggctactttctgcaactgctgacgcaggttagttcatgtggttaaaggtcagaacgctggccccttacagagctgaagtgctcccacacccatcactggctctggagggaaaagaccactagctgtaact

SEQ ID NO: 166446 - DNA, 588 bp, Homo Sapiens
gtcgacatctagagcgatccccgttaatatattttcctgagaagagggactcaaatgagtataactgtactactcaagtattttactgacctattagagcactaatccttttctgctttttataagttgtttagatagctgtatcattactatactgacttaggacaagatttaaattattatcacataaactataaatagcactatcaaatatgccgtgtaagcagcacatttcctctatccctggcagttcattccagtgccctcttgttcttttggatgaagggaaataatatgcccttcacatttagaagcagagaaattagaatactgcgaagagctaccctatactgctctgtagtattcttgaaacctaaccatgtgcattgatacttttcattgtgtggatgtggaaaatcagtaatgtgaaactttcatttttgtcttacggctttttaatggaattgtaatgattctaaagcattgacatcctctggtctttgaaagattaataaaaggggggaaattttccagttatttatatttgctgtacttcactttaaaaactagatgtgcgtggggtagtgt

SEQ ID NO: 166447 - DNA, 683 bp, Homo Sapiens
  misc_feature (537)..(634): n is a, c, g, or t
ctctaccccacggctaatctttgttaccaggaagaatatgtgtcccttccccagggaagacctggagtagtcccccaaaaaactgagctgacaagtggttgtagatatttaagtcatctcttggcaccatgtgcccaggaaaggtatcccactaggcttggaccttcgagtggggatcttttccctatctactgggatccttccatactgtctggaactgtcaggatttatgctaacaattcctggaagaaggaaaggctacacttccactgtatagggttaaaactgcagggaggcgggtaatgtactttcacttgaagatgtaattaatattggctggctttatagatatcatcctcaagctcagatggaactcaaaacaatatgctgagatattatgaatccaggactcgacttcgtaagtattttgagttgaatagatttgtgtatgaaaaaggttcataatttttttcaattctacagtattaacatctaacttataaaagaatactggagaactggacacagtggctcatnnnnnnnnnnnnnnnnnnnnnnnnnnnnnnnnnnnnnnnnnnnnnnnnnnnnnnnnnnnnnnnnnnnnnnnnnnnnnnnnnnnnnnnnnnnnnnnnnngaaatgattaagcttagtaaggaaggcatgtcaaaagccggcaggctga

SEQ ID NO: 166448 - DNA, 342 bp, Homo Sapiens
  misc_feature (281)..(289): n is a, c, g, or t
ccgtcctaccccacgaccacctcaaaacacagaaggcaaaaggaatggtaacttccatccctaattttgactttgggttatttgtacatttacagcaacagacaccaacttttatttgagatttggggtcattttggcatcgtttcagggtggagagaagacataaatgaagttaggacttcccagtccatctcaccaagctcaggatctcacagagctataagcaggcaaaggtgctccccaccagaaccatctggacaatgtgctttccagtgacttcnnnnnnnnngaggtttagctaggtctttttgttttgtcagtacatggtaactagattgatgg

SEQ ID NO: 166449 - DNA, 161 bp, Homo Sapiens
atgagccactgcacccggccaattttttaagttttctacatcatctcgattgtgttcacttagtaactaagacttcagtgacatttaaataaaatgttctgaccttttctttagagctttatcctcttcatggtaagctgtcatacttgagactcttgagg

SEQ ID NO: 166450 - DNA, 627 bp, Homo Sapiens
ctttctaccccacgaccgaaacacatactcaagactcaaataccactgctcccaccagcgtacggatcaagttcatcaggcttccatcggctggagcatgggaccatagcccctgcccaggagccgtaccctcggaccacagtggctctgtatggccaggaactgggactcgagctttcagattctcaactagccttggcaaaacagctgtaggtggcctccctgacaacagacactcagccctccccaccctggctctccttgcatttccccatgctccccaccccctggcaaaaggctggccatgctctgttcccagcagccgcgcaggtttccccactggctgcaatggccctaccaaaagccatgttgcatatccgttgtaagcacgtgccctgtgccctgtccccattccttatgccctaggaggccaagctggtgtctctaggagggcccacacaggcaccctggatcccccagagagtagattggtgtgctcaggccgcaggctgactcagaggtagggcagtgggctctgcaggccacctggctggggttggtgggggtcctctctcctgccccagcttccactcagccaccacagttgccacaccgtggggtagagct

SEQ ID NO: 166451 - DNA, 761 bp, Homo Sapiens
agctcctaccccacgacagtgatgatacggaacaatttgatcagatctccccgaattactgatggtgtgtctgaatgcacagaagcattaaatataggacctgaggtttggaagtctatctcaataggattggagagactggttgctgcttctcgccaaaggctgcccctgacaggagaccaggctgtcaccatgcagcggtacagccctgcgtctgagacctgagtctggtacattcgatagcggaactcatcctcctgcactttttctaaaacaacgccatccacccgtgatgcatctgtccaattctccagcttcaccacagaatcctggtccagagagatgatgtacttcgtttcattgggactggagaggtcgccgacaggcttctcagccatgatgagaacagagtagcgtggcgacttaatattcttggaagatactttgcaagtcatctcaaatgtatttccggcagcaaagaaaggctttggatccggaaattgaacgtgtctgtatgttccttagaaaaaataaagtctccatcctgggcccgctgcttgctcctctctccatattttagcgtccagtccccgtccatgactgcaagcagctcgctggtcaccacattgtcgctgcgccggttcatcctgtagtaccacgaaaccgtgaatcggacattcgcctccccactcttcgtgtccaccacccggcatgccgtctgtggggtcatccgcagacccgggacatgcgtggtaaagtgg

SEQ ID NO: 166452 - DNA, 371 bp, Homo Sapiens
ttgcttaggacaattgcctccacctgctgattaaaggtactggctgtttttgttcttggctatcttttcaaatatgtttgtgtagaaaatattcttggaagacagggataatgtcttcctttggagcaagaagccagtttgcttactgccttataagatggagatactgtcttcatttggagcaaaaagcaagcatgctcactgcccattataaaaatatttggatctctaacctcagacttcctccccaagcaacccaatgcatgtttataacgtggtccgtgagagaactgaggttcatagaattgactaaaaaatgctgatactttggctactgctaatgctgtaataaactttcctttgtctcgtgg

SEQ ID NO: 166453 - DNA, 591 bp, Homo Sapiens
gttagtccggacacacagttagaaaaacaatatcaaagaaaactgagtcaacatcattttctgcccctcggaaaaagagcccggatttatcttgaagcaatggaaatgatggagtctcagacactactgctgacgctactatccgtaaagatggagaacaatcttgctgagtttgaaagaagggcagaaaagaatttattaataatgtgtaaggagaaggagaagctacagaaaaaggcccacgagctgaagcgcaggcttctcctctctcagaggaagcgggagctggcagatgtcctggatgcccagatcgagatgctcagccccttcgaggcagtggccacacgcttcaaggagcaatacaggacattcgccacggccctggacactaccaggcacgagctgcccgtgaggtccatccacctggagggagatgggcaagcagctcttagacgccctgcagcatgaactggtgaccactcagcgcctcctgggagaacttgatgttggtgattcggaagaacaatgtgcaggtgctggacttactgagcgaactcaaggacgtttacggcgaaaaaggaccttgagctc

SEQ ID NO: 166454 - DNA, 477 bp, Homo Sapiens
taatgtaagatactttcagtatctaattctgtttcccccactgagggtgctaaagagaattagaatctttactaagacatgctcaggaaagcttcacgagagaacagcttcaaaatcctccctatgacactgaatggtagtgaggaaagaattcttggggatgccagttacatacaatagccttattactgctaatcactgtcaataaaaggtcacttcattcacctctatttgaggaaaacaatgagaatgtatctgatgaactagaatccttgtcagtattgggaaattttaatgttgcaatatctagtcaaactttgagtgtactggttctgtgaaccacctgaaaaaacaaattaaatgtattaaaccataatgatcgttgcatatcccccccataagaatctgaaatatatgggcttttatattgtttattttcatctcagtcgtgggtagatactggggatccttctagat

SEQ ID NO: 166455 - DNA, 1029 bp, Homo Sapiens
atctctaccccacgcctaccccacgtctttcagcaggttggttcctctccccagtcagcaattgtgacatttggtgtctgtttcgaatggtgttggttagccaattggctttccacttcacataactgggaagacttccagatgtgagctcctgtcctcagaaattcttgaagatttctaaatccttctgcggcacgggcgcggctgtgtcccagtcattctcagggtaagtttcgaagttggaagtgtcgccgtcaccagctatcttgggcacgatgggaggcttcagttttctctgcggaacagcttcccagtccacggagcggaaccaccgatgatgcttcacatcattcgccccgttcttcatgtttcctaatcgccttgttctgtcaaccacgagcagtttcttaatgaggtcttttacatggaaatccaaatgtctggggaaatctattttgcctgcaagaattttctgataaatgccaaacgggttgtcatcaaaaaacggaggaaacctgtctaccagcttcttggcgaacccaaagtccgtgagcttaatgtggccacccctatccagcaggatgttctctggcttcaagtccctgtagacgatctctttggagtgcagctactcgatggcacagatgatctctgcagagtagaagagccccgtggtgctggagaagcgcccccggttgcgcaggtagctgaagagctcgccgcccggcacgtactccatgagcatgtagaggaagcgctcgtcatgccacgtccagaacagcctgatgaggaacgggtggctgacttccttcaggacagacttctcattgtgtacgtgttgctcctgctttaggcggatgacgtcgggaatgctcatcaccttgagggcgaagaaatgcttggctgtcttctccttcaccaggtgcacccgcccgaacgtcccagtgcccacggtggccagcgtgtcaaagtcctgcaggctgtacgcaggcggcatccgcgacagcgctcagggctggggcagacgcg

SEQ ID NO: 166456 - DNA, 870 bp, Homo Sapiens
ggggcgctgtcgccggagccgcctgtgtacagcctgcaggactttgacacgctggccaccgtgggcactgggacgttcgggcgggtgcacctggtgaaggagaagacagccaagcatttcttcgccctcaaggtgatgagcattcccgacgtcatccgcctaaagcaggagcaacacgtacacaatgagaagtctgtcctgaaggaagtcagccacccgttcctcatcaggctgttctggacgtggcatgacgagcgcttcctctacatgctcatggagtacgtgccgggcggcgagctcttcagctacctgcgcaaccgggggcgcttctccagcaccacggggctcttctactctgcagagatcatctgtgccatcgagtacctgcactccaaagagatcgtctacagggacttgaagccagagaacatcctgctggatagggatggccacattaagctcacggactttgggttcgccaagaagctggtagacaggacttggaccctctgtggaacacccgagtacctagcccccgaagtcattcagagcaagggccacggaagggccgtggactggtgggccctcggcatcctgatattcgagatgctttcggggtttcctccgttttttgatgacaacccgtttggcatttatcagaaaattcttgcaggcaaaatagatttccccagacatttggatttccatgtaaaagacctcattaagaaactgctcgtggttgacagaacacaggcgatttaggaaacatgaagaacggggcgaatgatgtgaagcatcatcggtggttccgctccgtggactgggaagctgttccgcagagaaaactgaagcctcccatcgtgcccaaga

SEQ ID NO: 166457 - DNA, 1031 bp, Homo Sapiens
gagtaaaatatgctgcatccgggcagaatctttaagactgaaccacaaagaggtaaggctctccaaagagatggagcgaccctgggttagcgcagccttctgccccagagaaacactccagagactgctacaaggaggaagaacacctcactcagtcaatcgtcccaccccctaaaccagagaggagtcatagcctcaaactccatcatacccagaacgtggagagggaccccagtgtgctgtaccagtaccaaccacacggcaagcgccagagcagtgtgactgttgtgtcccagtatgataacctggaagattaccactccctgcctcagcaccagcgaggagtctttggagggggcggcatggggacgtatgtgccccctggctttccccatccacagagcaggacctatgctacagcgttgggtcaaggggccttcctgcccgcagagttgtccttgcagcatcctgaaacacagatccatgcagaatgagccctgcgagcaatagagttgaagcagcctctgctggacagtggactgttctatttttttcaataaccaaaaagattaaacaaaaaatactataaaacccctgaccacatttaaaaaatgataataaaagtaaacaaatcagcatctttttccccttccctgcttcattaccccctcttccatctatagactttgtcatttttgtctttagaaaagatctgaaggatggtaaagccccgtgctgaaacccagtagaaaaacctgtctcaggacacacttgccatctagggctagcttgaaagagcctgaggactgcctcttaactgaatttgaattcagcattgtcctttcttcttagtatttgctgcataattgagagcagttcacatcgatttcctggtaggcgtctgcattgcctgttgtgttcctgcttctccttcagtagctgcacacttgcgcagatcgacacactgttgtcacttccttctccccgtctgagaagggtcttgtgttcagtcagagtcgtgactagtgaca

SEQ ID NO: 166458 - DNA, 583 bp, Homo Sapiens
  misc_feature (73)..(73): n is a, c, g, or t
tgtgattgacgggactgttggtattggctagaggttcaaagatattttgctttgtgatttttgtaattttttnatcgtcactgcttaacttcacatattgatttccgttaaaataccagccagtaaatgggggtgcatttgaggtctgttctttccaaagtacactgtttcaaactttactatggccctggcctagcatacgtacacattttattttattatgcatgaagtaatatgcacacattttttaaatgcacctggaatatataaccagtgttgtggatttaacagaaatgtacagcaaggagatttacaactgggggagggtgaagtgaagacaatgacttactgtacatgaaaacacatttttcttagggaaggatacaaaagcatgtgagactggttccatggcctcttcagatctctaacttcaccatattaccacagacatactaaccagcagaaatgccttaccctcatgttcttaattcttagctcattctccttgtgttactaagtttttatggcttttgtgcatatctagatactgtatcatgacagagactgagtacggtgtcgctat

SEQ ID NO: 166459 - DNA, 578 bp, Homo Sapiens
  misc_feature (366)..(366): n is a, c, g, or t
ctgtagaggtccattcagatgaagttcaatccagcaaggagtacttgttaccgtctgccttcggtattctgctccccaccctttcacaaaactcattcttatggtgcacattctagttagctgatagacggcttcaaaaccctgattaacagactgagccagaagagcagcaaattcctggttgttgaagatcttcagattacagcctggtggaattttacacactgttgcagggtgccagccatatctctgattacaattggggctctgcacaaagattgcactatcacttaggcacacagcaataactacttgtgaagcacttactgagtgggaatatctgccacctgttggaccccgcccacncaaaggattcgtggggctgaaaaatgccggtgctacttgttacatgaattctgtgattcagcaactctacatgattccttccattaggaacggtattcttgccattgaaggcacaggtagtgatgtagatgatgatatgtctggggatgagaagcaggacaatgagagcaatgttgatcccgggatgatgtatttggatatcctcaacaatt

SEQ ID NO: 166460 - DNA, 326 bp, Homo Sapiens
atctcctaccccacgggtatctctggcccagagggttgccccagtgctgccctcactgggaaaatacccagctgttcccaggtagttgggattgattttggtttttgtaaggaaaggctctgcaggcagctgtgtgtgtggttaggaagcgaagaggaggctctgcaaacacctcggtgggcagcgggagcgcgagagtggcacacacggggtcacgcagcagcacagcaggtggcacttacttctgttcagcacgaccctcttctgttaacaccggtcatgggagcaaatgaaaatgacaaatggaatgacttgagacaacactg

SEQ ID NO: 166461 - DNA, 593 bp, Homo Sapiens
tctagaagatcccagttctaccccacgatgaccccagacatgagatcatcactaataatagctcagatcctttcctcaatggagggccatatcattcgagggagcagagcactgacagtggcctggggttagggtgctacagtgtccccacaactccggaggacttcctcagcaatgtggatgagatggatacaggagaaaacgcaggacaaacacccatgaacatcaatccccaacagacccgtttccctgatttccttgactgtcttccaggaacaaacgttgacttaggaactttggaatctgaagacctgatccccctcttcaatgatgtagagtctgctctgaacaaaagtgagccctttctaacctggctgtaatcactaccattgtaacttggatgtagccatgaccttacatttcctgggcctcttggaaaaagtgatggagcagagcaagtctgcaggtgcaccacttcccgcctccatgactcgtgctccctcctttttatgttgccagtttaatcattgcctggttttgattgagagtaacttaagttaaacataaataaatattctattttcattttctgc

SEQ ID NO: 166462 - DNA, 556 bp, Homo Sapiens
accggattgacaaacttgaggaggcaatgcaggctgccgttcagtaccaggatggactgcaggcggtatttgactgggtagatattgcaggtggtaaattagcttcaatgtctccaattggaacagatctcgaaactgtcaagcagcagattgaagagctaaagcaatttaagtctgaggcctatcaacagcagatagaaatggaaagactgaatcatcatagcagagcttttgcctaaagaaagtaacagaagagagtgacaaacacactgttcaagacccattaatggaactgaaattgatatgggatagcctggaggagagaatcatcaacagacagcataaactggagggtgctctattagccttgggtcagttccaacatgccctggatgagctccaggcatggctgacacacaccgagggcttgctaagtgagcagaaacctgttggaggagaccctaaagccattgaaattgaacttgccaagcatcatgtgctccaaaatgatgtattagcccatcagtccacagtggaagccgtaataaagcgatat

SEQ ID NO: 166463 - DNA, 594 bp, Homo Sapiens
  misc_feature (553)..(553): n is a, c, g, or t
  misc_feature (566)..(566): n is a, c, g, or t
  misc_feature (571)..(571): n is a, c, g, or t
cctctattggtgtgaacagtgtgatgtacagttctcctcaagcagtgaactctacctacatttccaggagcacagctgtgatgaacagtacttgtgtcagttctgtgaacatgaaactaatgatccagaagacttgcatagccatgtggtaaatgagcatgcatgtaaattaatagagttaagtgataagtataacaatggtgaacatggacagtatagcctcttaagcaaaattacctttgacaaatgtaaaaacttctttgtatgtcaagtatgtggttttcggagtagacttcacacaaatgttaacaggcatgttgctattgaacatacaaaaatttttcctcatgtctgtgatgactgtgggaaaggcttttcaagtatgctagaatattgcaagcatttaaattcacatttatctgaagggatttatttatgtcaatattgtgaatattcaacagggacaaattgaagatcttaaaattcatctaggtttccaggcttcagctgacttgcctccttaatgtagtgactgcttggtgagggtttgggntggagggggtttnttagnccccctcccgtccctgggggcac

SEQ ID NO: 166464 - DNA, 656 bp, Homo Sapiens
  misc_feature (88)..(88): n is a, c, g, or t
actcccttaaaagttacagctttccacagatgtgattaaaactcaaatgtattttcagaaaagaaaaatcagtaatctaataatacancaatcatcacgcctcacaggtgtggctacagaaagccatcctgtttcttcccttttcagactgcatgacagaactcttacaatgcagctgtctgaacgtgcatgccatgcacgcctgtgcatttcttcccacgccagaaacaccaacgttagcagtgagaaacagcctcttgtagaggaatcgtcgttttgttatagatgttatagccacgtgtattctctctgatggacagctatagcagatcagcttatacttgtcctataattcattatatatcaaatggtgagcaaatcactagacagaacattccctgaaatagattttagtacagaggcctgaattcatgtccacaatgacctgtgcttaactactccaaaggtcgctaaagatactgttactactattgagatattattggctacttcacgtttacatagtaaatgtttgcagcatataacattacagactcataaacccataattaacttataagtgttaatggacaactgtgctttgatttttgcctttagtgataagaaaacaaagtagtgaaatgggtcactcctca

SEQ ID NO: 166465 - DNA, 1128 bp, Homo Sapiens
  misc_feature (636)..(678): n is a, c, g, or t
  misc_feature (699)..(760): n is a, c, g, or t
  misc_feature (951)..(960): n is a, c, g, or t
agtactaccccaggggctcgagaaccgagcggagctggttgagccttcaaagtcctaaaacgcgcggccgtgggttcggggtttattgattgaattccgccggcgcgggagcctctgcagagagagagcgcgagagatggagatgggcagacggattcatttagagctgcggaacaggacgccctctgatgtgaaagaacttgtcctggacaacagtcggtcgaatgaaggcaaactcgaaggcctcacagatgaatttgaagaactggaattcttaagtacaatcaacgtaggcctcacctcaatcgcaaacttaccaaagttaaacaaacttaagaagcttgaactaagcgataacagagtctcagggggcctggaagtattggcagaaaagtgtccgaacctcacgcatctaaatttaagtggcaacaaaattaaagacctcagcacaatagagccactgaaaaagttagaaaacctcaagagcttagaccttttcaattgcgaggtaaccaacctgaacgactaccgagaaaatgtgttcaagctcctcccgcaactcacatatctcgacggctatgaccgggacgacaaggaggcccctgactcggatgctgagggctacgtggagggccnnnnnnnnnnnnnnnnnnnnnnnnnnnnnnnnnnnnnnnnnnnagatgctcaggtagtggaagnnnnnnnnnnnnnnnnnnnnnnnnnnnnnnnnnnnnnnnnnnnnnnnnnnnnnnnnnnnnnngaggatgaagaagggttataacgatggagaggtagatgacgaggaagatgaagaagagcttggtgaagaagaaaggggtcagaagcgaaaacgagaacctgaagatgagggagaagatgatgactaagtggaataacctattttgaaaaattcctattgtgatttgactgtttttacccatatcccctctnnnnnnnnnntccaatcctgccccctgaaacttatttttttctgattgtaacgttgctgtgggaacgagaggggaagagtgtactgggggttgcgaagaaaaggatggcgggtgggggtggaataaaatactatttttactgcctagcgggggcctttcgggattatacaaaacatgt

SEQ ID NO: 166466 - DNA, 934 bp, Homo Sapiens
aaagaagtgaaagtttgaaggggtgtttcttctaatttttaaataccaaaatccattttccttggtaacttaacacaacaagcctgcggttttcagctctctggctcataagctcaagagtaacatcagagtcctctttgtagagcgaagcccaccaccatctgtgaagggggaaaagggatgagagatggggaatgtccccagaccagtgccaaaatacgcctttaggttgctatttacaaaccagggcgttggatgcctctagcaggcctgagaaaagcaggtatcatcatgtgaaccaaagcaaaagatatggctggtgctcagcccctcctgggcattgagtaaccaaactgagaccagccacagccttccaaccaacccaagagacttgggaaataccaggaaacgtaagagaactccaaaccatcctctttgagagtcaggaacaaatgctcacttagtgtgtacttagctatcgcatttacagggacaaaaaccggacacaaagaaaaagtaggggaaaaaaataaagagtggcagtaaaaatagtattttattccacccccacccgccatccctcctcctcatcatccaggccctccacgtagccctcagcatccgagtcaggggcctccttgtcgtcccggtcatagccgtcgagatatgtgagttgcgggaggagcttgaacacattttctcggtagtcgttcaggttggttacctcgcaattgaaaaggtctaagctcttgaggttttctaactttttcagtggctctattgtgctgaggtctttaattttgttgccacttaaatttagatgcgtgaggttcggacacttttctgccaatacttccaggccccctgagactctgttatcgcttagttcaagcttcttaagtttgtttaactttggtaatttggattggatgcg

SEQ ID NO: 166467 - DNA, 845 bp, Homo Sapiens
  misc_feature (577)..(577): n is a, c, g, or t
  misc_feature (724)..(724): n is a, c, g, or t
ggagaaaacctcaagagcttagaccttttcaattgcgaggtaaccaacctgaacgactaccgagaaaatgtgttcaagctcctcccgcaactcacatatctcgacggctatgaccgggacgacaaggaggcccctgactcggatgctgagggctacgtggagggcctggatgatgaggaggaaggcgaggagtccatcagcttggctgccattaaaaaccgatataaagggggcattcgagaggaacgagccagaatctattcatcagacagtgatgggggatcagaagaagataaagctcaaagattactcaaagcaaagaaacttaccagtgatgaggaaggtgaaccttccggaaagagaaaagcagaagatgatgataaagcaaataaaaagcataagaagtatgtgatcagcgatgaagaggaagaagatgatgattgaagtatgaaatatgaaaacattttatatattttattgtacagttataaatatgtaaacatgagttattttgattgaaatgaatcgatttgcttttgtgtaattttaattgtaataaaacaatttaaaagcaaancaagaaacaacccacccacaaactgacccaccacacccccccctcgacctccgccaacaccctcaaagaaccaccccttgtcccgccgccctcgccctccggaaaaagtttccaaacacacttccttttgcgcgccgggcccctttngcaataatcaaagccggtcaatatttggttttctatggaaactcctggcaacatacctagcgcttttgagattcccctcctataaaacaacgcccggggggtccaccgacgcttctctgag

SEQ ID NO: 166468 - DNA, 885 bp, Homo Sapiens
  misc_feature (100)..(146): n is a, c, g, or t
ggtttggtgacctgaagggccccttcccagtccaagtgggtttgcaatgggaggggtaggtgcagcgagggtcccagagacagaaatcctctttaaaggnnnnnnnnnnnnnnnnnnnnnnnnnnnnnnnnnnnnnnnnnnnnnnngaaccaactgaacagggagtggagagattagcaaaatgaatctgaacggaagtgccaccttctcccttgtcagacaacaaagcagccattggttgagatatctgagtcgctaagtgaactcccacgtggacacagccagcccacgatctctgccacctacatggtcaagtgcaggcctccgcctctgagatcaatgcgttagtacttcttcaccgtgaaacccgaaaggtcggttgatggagcccttggagctggaaggggcgaggccggtctatctgtacacgagatgggagagctgggtggacttgtagttcagctggttgttgggcatgaacttgtgcagctcactctttttgtagcaggggtcataatggtaagcgctgaggcaggcgtcacatgagacttttgaacactgggtgcaggtgttggtggcgcctgggcggttgcagaagccacagcgggaagtgggcgtggtggagggcttggatttggagtgaaggtgcgggaggcggtcgaggccctgagtctggcctgggtacttctcccgcagagatgccccgtgggccaggctgtcatgagtcgaggccttgctggggaaggcgctgggcttggaagctggaggacaggtgagcaggctgtcacagcgctggcagagggaggagctgcaggacagcccgcagctttggcacttggagagggcagactctttggcagggggcgagcgctgtggtagagggag

SEQ ID NO: 166469 - DNA, 630 bp, Homo Sapiens
acctctcaccgtttagggtgtgtccctaattgacggggtcggggacggagagaagggtaacaccaggctgggtcggagaccggcggaggcgaggaaatcctaagagcgtgaccgttgatgatgcaggcaaccgtcgggtgtgaccattgagagggaaaaggtgcacattaaagatccaaagtcatgactgactccaagtatttcacaaccaataaaaaaggagaaatatttgaactaaaagctgaactcaacaatgaaaagaaagaaaagagaaaggaggctgtgaacaaactgattacagctatgaccgtggggaaggatgttagttctctctttccagacgtagtgaactgtatgcagactgacaatctggaagctaaagaagctctgtgtatctatacttgatgcactacgccaagagtcagccagacatggccatcatggactgtaaacagctttgtgaaggactgtgaagatcctaatcctttgattcgagccttggcagtcagaaccatggggtgcatccgggtagacaaaattacagaaatatctctgtgagccgctccgcaagtgcattgaaggatgaggatccctatgtcggaaaacagcagcagtctgcgtgggtagagg

SEQ ID NO: 166470 - DNA, 443 bp, Homo Sapiens
agttcacccacggcatcaatataagacaaacttgtaatctgatttgtcagcctgtgtcgatacaataatcgacttgcagaacatattgtatctatgcttttcacatcaatagcaaagttgactcctgaggcagccaatcctttctttaagttgttgactatgctaatggagtttgctggtggacctccaggaatgcctccctttgcatcttatattctgcagaggatatgggaggtgattgaatacaatccttctcagtgtctagattggttggcagtgcagacaccccgaaataaactggcacacagctgggtcttacagaatatggaaaactgggtcgagcggtttcttttggctcacaattatcctagagtgaggacttctgcagcttatcttctggtgtcccttataccaagcaattcattccgtcagatgtccgtcaa

SEQ ID NO: 166471 - DNA, 627 bp, Homo Sapiens
ccatgcgttacaagcttggaggcaggctgggggttcccatttggacctgctggaactgggaaaacagagtctgtcaaagctcttggccatcagcttggacggtttgttttagttttcaactgtgatgaaacctttgatttccaggcaatgggccggatctttgtgggcctttgccaggtgggtgcctggggctgctttgacgagttcaaccgcctggaggagcggatgctctcggctgtgtcccagcaggtgcagtgcatacaggaagcactgcgtgaacattccaaccccaactacgacaagacctctgcccccattacttgtgagctgctgaacaaacaagtcaaggtgagcccggacatggccatcttcatcaccatgaaccctggctacgcgggccggtctaaccttcctgacaacttgaagaagctgttccggagcttggccatgaccaagcccgaccggcagttaatcgcccaggtcatgctgtactcacagggtttccgcactgctgaagtgcttgccaacaaaatcgtcccgttttttaaactatgcgatgagcagctctcttcccaaagccattatgacttcggtcttcgggctttgaagagtgtgctggtgagtgca

SEQ ID NO: 166472 - DNA, 1119 bp, Homo Sapiens
ggcaaatcaaagaaatttattggcgttgacaaaaatacataatacagaaaccaaaacaaaacacaacagaaacaaaaccagaaaccccagcctagtgggcccatgtgcctgatgtactgacagtgtgccgacccagactcccacaaagcatggcacttaattcatgaggacctccatctgcaccagcctcgcattggtgtccccagacgttcggtatggtatcattccagcaaaggtaatcagagtgcgggcttgacttcggagttgagagtcgcggtcctcgatgactcgctggggcctggatgacgaggatggacttgtccccttgagcctcttaaactgtgtgaacaagatgttcatggtggcaagaagcacttctgagagttgtgcctgatttcatcactgaaatttctgaaggcagccactctctcttccacactttcctgattcaggggcaccagcttcaagcgctcaatgatatcaaaagctctatcaatatgaccactatgatactcgtcaaaaaggtgatcaagtccaaaagaagatagaacgtggagtccacaaatttatttgcgcttattccttgagccctataccgttcggcaatggagagtgccatgttcttcagcctctccttgttggattgcggggcactgatctgggggacgacagggctcagcagtttgttcatcagctccagtaccttgtcagcattcttggcaaggtcatacagctttgctgcctcttcaaacagtcctttattttctgccacagaagcaactttgttgataataggctttgtgtcactagtaaacttatctatgactccaggctttctacttccgtcattctctagtttcccacagaatcatatcgaactctcggctttcaatcacaagctcactcacacagcgcagaaacatgttttctccttgactatctttctcatccctgaggaaatagaagtactggagggcctcccttgggtccgtggactcaaacttccgggtgtacagcatgaggagccgcacgaagttcagccgccgcaagcaaggagggtcaccaggctcgtggctgaggagctgagcactccggacgcgtgggtcgacccacgcgtcc

SEQ ID NO: 166473 - DNA, 570 bp, Homo Sapiens
  misc_feature (91)..(201): n is a, c, g, or t
cacacttctacccacgggttcaagcgattatccgcctcactctcgagcagctgggaccacaggcacccaacaccaaacccagctaacctannnnnnnnnnnnnnnnnnnnnnnnnnnnnnnnnnnnnnnnnnnnnnnnnnnnnnnnnnnnnnnnnnnnnnnnnnnnnnnnnnnnnnnnnnnnnnnnnnnnnnnnnnnnnnnacaagccactgcgcccagcccctcccatacctcttttggccaaggcagcacaattcagaagaatcttgccagggaagactggtaaatggatgtcaacgtgatgcctatggctcctggtggatttagatacctcctggtgcttattgatatctttaccagttgcacaggggcttttccatgccagactgaaaacgcagaagatcaatgatcaaccttcaacctatttactagcagaacactgagggggactgtgcggtcaccaatacctcctattgcacttggataaacacctcccacggaaatagagatgaatagaaagtacatagtcatacaagcagaatggctgcattccttcactctagagtgtag

SEQ ID NO: 166474 - DNA, 901 bp, Homo Sapiens
  misc_feature (648)..(648): n is a, c, g, or t
  misc_feature (761)..(761): n is a, c, g, or t
  misc_feature (881)..(881): n is a, c, g, or t
ctaccctctacccaggggagacggactctggagtgggcggccgggcggcactaggtactctgatattccgtactaaacacgtctgcaagtcaagatgtcgcacccgtccccccaagccaagccctccaaccccagtaaccctcgagtcttctttgacgtggacatcggaggggagcgagttggtcgaattgtcttagaattgtttgcagatatcgtacccaaaactgcggaaaattttcgtgcactgtgtacaggagaaaaaggcattggacacacgactgggaaacctctccatttcaaaggatgcccttttcatcgaattattaagaaatttatgattcagggtggagacttctcaaatcagaatgggacaggtggagaaagtatttatggtgaaaaatttgaagatgaaaatttccattacaagcatgatcgggagggtttactgagcatggcaaatgcaggccgcaacacaaacggttctcagttttttatcacaacagttccaactcctcatttggatgggaaacatgtggtgtttggccaagtaattaaaggaataggagtggcaaggatattggaaaatgtggaagtgaaaggtgaaaaacctgctaaattgtgcgttattgcagaatgtgggagattganaggaagagatgacggggggaatatttcccaaaagatggggctctggcgaccagtcatcccagatttcccctggagggatgcggatatagaatttaaaaagatgtaggattaanatttttatttaattaacaggaagacctttaaaaaacctttggaaattacctttttttcaaaatcccagaaaactgggaagatgggctatttaaaaaaatattgccagaaagttttttaangataacctgggaccagtttc

SEQ ID NO: 166475 - DNA, 633 bp, Homo Sapiens
ctcccctggatcaaattacacctggtgcactttcttacagcaccttttttcttctccacaattgagtggaatcttgatgctttcaagcctgtatctagatctccaggtcatcaggccgaggtctgctgctggcacgactgctggctctgcttgaaggtcgctggtccacaatggctagtggctgtaattcatgtccagcagctagttttttagaattctggttatcatggggaaatcaaaaggctgtgcatgggagttagagatggtgcttcccgcctgccccattcgattttgttctgcactgtaattagcccagttttgctcacttgcttgcttgttgtaattgcggcaagaagaattgtttctgtcgccagtaaccagcttgtacccaggaggagacataggcgagaggggagcggttggtgaggagcagccattgaaataagcatatttttgagacccacagtctttggcagggctcagcgcaccactggtcgcatggtaagggtcgctctttcccttaacccgatccttaacgcccttgaagaaaacatagaagagttcaatgatattcagggccaggacaccagacaccaccagcatgagatgatgaagatgttttctcctgggtag

SEQ ID NO: 166476 - DNA, 1207 bp, Homo Sapiens
  misc_feature (328)..(344): n is a, c, g, or t
  misc_feature (425)..(440): n is a, c, g, or t
acttattaaagtccctttggaagtcttctaccattactgtagaccaaatgaaaagaggttatgagagaatttacaatgaaattccggacattaatctggatgtcccacattcatactctgtgctggagcggtttgtagaagaatgttttcaggctggaataatttccaaacaactcagagatctttgtccttcaaggggcagaaagcgttttgtaagcgaaggagatggaggtcgtcttaaaccagagagctactgaatataagaactcttgcagtcttagatgttataaaaatatatatctgaattgtaagagttgttagcacaagnnnnnnnnnnnnnnnnnaagcactgtgttttggggtacaagggcatttctgacattttataaacctacatttaaggggaatttttaaaggaaagtggnnnnnnnnnnnnnnnnatgtgtggtttctcgcggagggggccagaggagagggcacagaaaagagttacaccctcttctcttatagagcgtggaaaatatctcataatatagagccataccccttggtggataagtgtgccgagtgtgttatattatactctataatctctattctcccaaagttttgtgccattggaaagtgtctctgtgcactgtgcgcactctcgctttctctttctcagaggacacgaggtgtgttttgtgtggatagtaaaaaactcagcgtggggtttatatatcacaagagctctcttaatttagaggggggcgtcaagaggtttaaagcgcgggcgtctaaaaaacccccagtgtgtgtggccgtgacgtgcgcgtgctgtgagagaaataaacgtgtgggccatgtgagggagagtgtcaaaacagagagacacagagttatcatatcccattgttcgtctttataaagagaaacacttttttatcacacaaacacactttgagtctcctagtgagacgaaactctctattctcataatctgtttctccccgaggggggcaacccctatcaccggtgggagtggtgcggcctcttactaaaagatgacactttatcacaacgcggttatagaagtcttatacaacgaggggggggccgtgggcaaccccatttctcataaatttttatctccatcaacaaaaaacaactgtgggaacaacaaagttggaaaaccccgtggggttcttctttagacaaagaaaat

SEQ ID NO: 166477 - DNA, 903 bp, Homo Sapiens
cagggtcttttcccctcaaaggagaactgtgtttatgaaactgtagttttgcctttggatgaaagggcatttgagaagactttaacaccaatcatacaggaatattttgagcatggagatactaatgaagttgcggaaatgttaagagatttaaatcttggtgaaatgaaaagtggagtaccagtgttggcagtatccttagcattggaggggaaggctagtcatagagagatgacatctaagcttctttctgacctttgtgggacagtaatgagcacaactgatgtggaaaaatcatttgataaattgttgaaagatctacctgaattagcactggatactcctagagcaccacagttggtgggccagtttattgctagagctgttggagatggaattttatgtaatacctatattgatagttacaaaggaactgtagattgtgtgcaggctagagctgctctggataaggctaccgtgcttctgagtatgtctaaaggtggaaagcgtaaagatagtgtgtggggctctggaggtgggcagcaatctgtcaatcaccttgttaaagagattgatatgctgctgaaagaatatttactctctggagacatatctgaagctgaacattggcttaaggaactggaagtacctcattttcaccatgagcttgtatatgaagctattataatggttttagagtcaactggagaaagtacaattaagatgattttggaattattaaagtcccctgtggaaatcttctaccattactgtagaccaaactgaaaagaggttatgagagaatttaccaatgaaattcccgaccattaatctggatgtcccacagatcatactctgggctggaggtcgacgcggccgcgaatttagtagtagtagtcgacc

SEQ ID NO: 166478 - DNA, 486 bp, Homo Sapiens
gctcggtaccccgactggtcccaaccatactatctttacgctttccacctttagacatactcagaagcacggtagccttatccagagcagctctagcctgcacacaatctacagttcctttgtaactatcaatataggtattacataaaattccatctccaacagctctagcaataaactggcccaccaactgtggtgctctaggagtatccagtgctaattcaggtagatctttcaacaatttatcaaatgatttttccacatcagttgtgctcattactgtcccacaaaggtcagaaagaagcttagatgtcatctctctatgactagccttcccctccaatgctaaggatactgccaacactggtactccacttttcatttcaccaagatttaaatctcttaacatttccgcaacttcattagtatctccatgctcaaatattcttgtatggttggactagtcggggatactctaggtcagtc

SEQ ID NO: 166479 - DNA, 627 bp, Homo Sapiens
  misc_feature (45)..(63): n is a, c, g, or t
  misc_feature (139)..(161): n is a, c, g, or t
gttataaaaatatatatctgaattgtaagagttgttagcacaagnnnnnnnnnnnnnnnnnnnaagcacttgttttgggtacaaggcatttctgacattttataaacctacatttaaggggaatttttaaaggaaatgnnnnnnnnnnnnnnnnnnnnnnncgagggggcaaggagggacagaaaagtaacctcttcttaagtggaatattctaataagctaccttttgtaagtgccatgtttattatctaatcattccaagttttgcattgatgtctgactgccactcctttctttcaagggacagtgttttttgtagtaaaatcactgggtttatacaaagctttatttaggggggtaaagttaagctggctaaaaccccatgttggctgctgctgttgagatactgtgctttgggagtaaaaaaagaaagttatttctttgtcttaaagaatttttaaaaaattagtcatgagacttattcatctttccagggaacatactgattggtctaaaaagactagacagttaagtaaaaggtggctggaacatctatttttctacaaaactggaaaaatgaacctggttctagaagaatgtacaccaaaataaaacatgtgaagcagt

SEQ ID NO: 166480 - DNA, 124 bp, Homo Sapiens
acccctaccacgtcatgataccagaaatgttgatggctgatgtaatacctggttcttatcttcttagttaaaaagaatttaaacaagagacacacagcaaaagaagtacagcataatttattgc

SEQ ID NO: 166481 - DNA, 595 bp, Homo Sapiens
gggtctggggaagcatgagcagggcctgagcactgccttgtcagtggagaagaccagcaagcgtggcggcaagatcatcgtgggcgacgccacagagaaagatgcatccaagaagtcagattcaaatccgctgactgaaatacttaagtgtcctactaaagtggtcttactaaggaacatggttggtgcgggagaggtggatgaagacttggaagttgaaaccaaggaagaatgtgaaaaatatggcaaagttggaaaatgtgtgatatttgaaattcctggtgcccctgatgatgaagcagtacggatatttttagaatttgagagagttgaatcagcaattaaagcggttgttgacttgaatgggaggtattttggtggacgggtggtaaaagcatgtttctacaatttggacaaattcagggtcttggatttggcagaacaagtttgattttaagaactagagcacgagtcatctccggtgatccttaaatgaactgcaggctgagaaaagaaggaaaaaggtcacagcctccatggctgttgcataccaagactcttggaaggacttctaagatatatgttgattgatccc

SEQ ID NO: 166482 - DNA, 962 bp, Homo Sapiens
ggaatgtagaccgtagtttaaaaagcaggcgggtacggtccggaattcccgggatattcgtcgaccacgcgtcgaaagacagacatgaagcaagtgggttgcaaggagaccagatccagattctgatgaagatgaagattatgagcgagagaggaggaaaagaagtatgggcggagctgccattgccccacccacttctctggtagagaaagacaaagagttaccccgagattttccttatgaagaggactcaagacctcgatcacagtcttccaaagcagccattcctcccccagtgtacgaggaacaagacagaccgagatctccaaccggacctagcaactccttcctcgctaacatggggggcacggtggcgcacaagatcatgcagaagtacggcttccgggagggccaggtctggggaagcatgagcagggcctgagcactgccttgtcagtggagaagaccagcaagcgtggcggcaagatcatcgtgggcgacgccacagagaaaagatgcatccaagaagtcagattcaaatccgctgactgaaatacttaagtgtcctactaaagtggtcttactaaggaacatggttggtgcgggagaggtggatgaagacttggaagttgaaaccaaggaagaatgtgaaaaatatggcaaagtgggaaaatgtgtgatatttgaaattcctggtgcccctgatgatgaagcagtacggatatttttagaatttgagagagttgaatcagcaattaaagcggttgttgacttgaatgggaggtatttggtggacgggtggtaaagcatgtttctaccattggacaattccggttcttggatttggcaaaacacgtttgttttagaactagaaggaggagtcatctcgggatcctaatgaactgggggtggaaagaggaaaaggtccgcccgggggtggttcagactgggggttaaatttg

SEQ ID NO: 166483 - DNA, 1347 bp, Homo Sapiens
ggcgctaccacttactacccacgtgtgtgcaaacccatggaatcaatcttaaaaggcactaagtggcacataaagaacttaaaagctgcatttccatttttcctctaggcttcctcctccataaagtgcacaaagcagagtaatatgaaaatagacacaggcttgcatctataacagcaaggaaaagaaatgcttccaagagaaatggaagtgtgtttaataatttgaaaccacaggagaggtctgctcatttattacaggggccatgttttagctcttcctggatcgtctcagatctgccattcctctggatatgaacctgtggccgtggcagaaacccagaaatcagtaggggcttgttgtgttcttggttggatcttcacgttaagatgctatggagctttttttatcccagggatggtcttcccaacaaacggcatccctcacagtggccggaagtggaattaccgatatgagaaagaagcctgctccaacacatatgcggcaccaaaatcaatagctccgcccagctcacgatattgaccagaatacctgatgtagccccaggtgaggagtgctattaacagtagtccaaccatacagttgaacaactgggctacaacctcaagacctatgaagccagtgaggcctgaggctatgtacaaagctacaatgcccgtgaacagcactgcaggggttcggaaggtgctgaagacgttcttgctaccattgtgcttgcagaagttctcatataattccttgatgtcctcctccagctcctgctggtaacgaaagctgaaatccttcccacccatcttcttggtcttcttaaaatggtccagagcaagttgtttgaattcacagcgcttctcctctagaatgtctggagacaaataaggtttctctcccccacaaacctcttccatgttgttataataaatgtcccttggcagaggctgcagctgctaagttgttagcttcagcagtggcctgaagcatggacttggggtgaggcagatcttctccttgataaattttaatatatgccttaaaatactccagtagtccccgacaggtgacctttgagccattgatctccttttccattaacttagatgggtttaatacatacggtatcagtgcctgtaactgctctttgaattcaccagccatatcttttaatttcccatcaaagtcagggcttgtggccacctggagtcctggatgtggtaagagaaagcaggtgacatcggagaaacatgagtgaatgtgatttcgaacattctgaatttcctcatgttgatgttccttcacctgtaaacgctatccaaaatcctttccgctacg

SEQ ID NO: 166484 - DNA, 568 bp, Homo Sapiens
gtcgctaccacttatacccacgggtggatgttcactgagcacggcaagatgagtcgtgccaccaagatctggatgggtaaggtcaagatcttttcaggccgaaaacacatgttgtacagcttccagacatcgctgcctcgcctgccggtcccggctgtcaaagacactgtgaacaggtatctacagtcggtgaggcctcttatgaaggaagaagacttcaaacggatgacagcacttgctcaagattttgctgtcggtcttggaccaagattacagtggtatttgaagttaaaatcctggtgggctacaaattacgtgagcgactggtgggaggagtacatctacctccgaggacgagggccgctcatggtgaacagcaactattatgccatggatctgctgtatatccttacaactcacattcaggcagcaagagccggcaacgacacccatgccatcgtgctttacaggcgcaaactggaccgggaggaaatcaaaccaattcgtcttttgggatccacgattccactctgctccgctcagtgggagcggatgtttaatacttccc

SEQ ID NO: 166485 - DNA, 560 bp, Homo Sapiens
  misc_feature (532)..(532): n is a, c, g, or t
  misc_feature (537)..(537): n is a, c, g, or t
tgttacggtgtatgggtgtgatgacttgggatccaagacatatgacggaatccctgccagcgagatctcctccatcctggagaaaggagaacgcctccctcagccacccatatgtaccatcgatgtctacatgatcatggtcaaatgctggatgatagacgcagatagtcgcccaaagttccgtgagttgatcatcgaattctccaaaatggcccgagacccccagcgctaccttgtcattcagggggatgaaagaatgcatttgccaagtcctacagactccaacttctaccgtgccctgatggatgaagaagacatggacgacgtggtggatgccgacgagtacctcatcccacagcagggcttcttcagcagcccctccacgtcacggactcccctcctgagctctctgagtgcaaccagcaacaattccaccgtggcttgcattgatagaaatggggctgcaaagctgtcccattcaaggaagacagcttctttgcagcgattacagctcagaccccacagggcggcnttgantgagggacagcttagacggacaa

SEQ ID NO: 166486 - DNA, 1778 bp, Homo Sapiens
gactctaaggatcccgtagagtgaatgttctgttcacttgcaaaccatggctaaggtcaaacttgtagaaaataaaattccatgtaaatcccaaagatagggccccttggggtttcatccccttctctttctgtgagcccaagctcctctcttttccttgggaatggagcccggcagaggccacagaaggaagcaggaggccaaatgctcctctctcactggggctctgggttggaggttggtgagttgttcaagatggcaacagcagcttccagacactctctgacaacacgaaggccacgtcatatgaggtctcagcttcaagtacaggagttgcagcccactgtagggagcaggagctcccaggagtccacgcactcacatggggtaattgagcacaacatcctgtttggcaagttccagcaacataggatcatcgaagaatttgctgatgctcacatcttcactgaggcccttcctacggcgggttttgatcatgaattcccgggccaggtgaggagctggctgtggctccaaggggcggatgacaatgctcttgtccaggggatcaccaggcacaatctgccagtggtggaagacagacagagaaaaggcttgtccctgggtgtgagtccggagatcagtctcaaagccaaaagagtcgatggccgggataaaagctttgatggtgtacagaggggagcctgggatgggtgcatcctgagtcacgtgccccctgcgcctggccaggacggtataaactgcagagacgcaatctgcaggggcctggacctctacaaagtagtaaggctccatcagacgaggagtagccatgaggaaggcagagtagacgactctcctggctgtggggatgatctggcccccgccccggtgcaggggctcactgggcaaccaccgcatccaggatcttaaacttgacattccgaatcaattcatcacagagggggccctcctggttccccactggaaaccttgaacgatgctgtccttcactgaaccaagaagagccttgtccacctcagagggcagagtatcatccaccagaatgttggggccagtcgcatcagggccaaaagcccagatggaacgggcagccagcagatcccaatcgtacttggtctggaagaactctcccagcttcttcctgttccacgtaatctggaccacctcattctctatgtcctctgccaggcccttctcaagaggctcagcaatcatggtgatcttgttcttcttattaggcgtttcagcaaagcacttgagggaggatgtttccaccaccgtctcacaaaacgtgacaactgggtcagccaccttgatgtctatctctgagtacatcttcctgcaaatcatgcatcacacagtccagtgtagagctccccagtgcccaggatcacatgctcgccagactcctccaccttggtggtgagggatggatagctcttgttgaccttgcgcaggccatcaagcatcttgggcagctctgaggggttgactggctccacagcaatcttgataacagatgtggtattgaacttcaagggtcggaaaatctgagcctcctcattgcctcggggttcggttatggttgctgtcttcacaattggttgatcaacaccttcaatcagaacccagttgccagcaggaacacggttcacctcgatgtggtacctggccacagagatccaaaggcggcccacggtgcatatctgggagtcttcctcatcctccagggtgtagttctcccccagtacccc

SEQ ID NO: 166487 - DNA, 454 bp, Homo Sapiens
  misc_feature (14)..(14): n is a, c, g, or t
tctcaccttcaaantaacaggaattgcaaccccactgttaggaacaggaactcccccagaatccaacggcactcaacatggggtaaattgaacaacaacaccctgtttggcaaattcccagcaacataggatcatcgaaagaatttgctgatgctcacatcttcactgaggcccttcctacggcgggttttgatcatgaattcccgggcccaggtgaggagctggctgtggctccaaggggcggatgacaatgctcttgtcccaggggatcaccaggcacaatctgccagtggtggaagacagacagagaaaaggcttgtccctgggtgtgagtccggagatcagtctcaaagccaaaagagtcgatggccgggataaaagctttgatggtgtacagaggggagcctgggatgggtgcatcctgagtcacgtgccccctgagacagaaaaactc

SEQ ID NO: 166488 - DNA, 563 bp, Homo Sapiens
  misc_feature (34)..(34): n is a, c, g, or t
  misc_feature (107)..(107): n is a, c, g, or t
  misc_feature (117)..(117): n is a, c, g, or t
  misc_feature (157)..(157): n is a, c, g, or t
  misc_feature (241)..(241): n is a, c, g, or t
ccctcaaatgaaaaatgtgagccatcagcaaaancctcggatgaaccctatgttgctggaaacttgcccaaacaggatgttgtgcctcaaattacccccatgtgaantgccgtggantcccctggaagctcctgctcccctaaagtgggctgcaaantcctgtacttgaagctgagacctcatatgacgtggccttcgtgttgtcagagagtgtctggaagctgctgttgccatcttgaanaactcaccaacctccaacccagagccccagtgagagaggagcatttggcctcctgcttccttctgtggcctctgccgggctccattcccaaggaaaagagaggagcttgggctcacagaaagagaaggggatgaaaaacccaaggggccctatctttgggatttacatggaattttattttctacaagtttgaccttagccatggtttgcaagtgaacaaaacattctgacctctgtcttgctctgctcctttcatcctcgtctcccctgccccgtctggtgcttacattctgaatatatgtcatctcccaagaggcttcaa

SEQ ID NO: 166489 - DNA, 574 bp, Homo Sapiens
  misc_feature (454)..(487): n is a, c, g, or t
taccccacggcagaacatctcactgatactcgaattctttggcaaacttcgctgttgtttgtgttccctgattgaaggttgggtggagcaggacatggaccgggaaggggcactggagttggtggtgcctttgatgtgcacttggctattccgcaggaatcctgttttgccttagtgctacagtaatccacacccaggtctcccactccaggtctcccctcaccctcattctccaggaaacttcaggcaaaataattgagaaacaggcattagaacaaggtgagaaatagagggagcaaaggaccatctgtatgaactgggaagcaagcggagggccaagctaccctccccagcatgggaattcttgggttagtggagagcacaaccctcaaattcatgtgtccaagcagagatttggaaacccacctcccaggagagcactatttcccatagnnnnnnnnnnnnnnnnnnnnnnnnnnnnnnnnnngtcaggctttggttccccctgcaggctatattagaaatgacaggtagctgggcgcagtggctcacgcctgtaattccagcacttcgg

SEQ ID NO: 166490 - DNA, 734 bp, Homo Sapiens
atgacaggtggcttctgaccagtcagtcccggaggtgggcgggacggagcagtgatgtttctaggtggcaaagggaccttccacagctcatgagccagagaggtgttcgtaactgaaccaggagaccatgtcaatttggaatcactatttctggctgaagtgctttgtgctgtactgctgaggggaacgttgtagttggaggcacgaatggatgaccaggcactagttgaaggcagcgtggtgttcaaggatgaggatgacccactgttcctgtccctgaggtggtcaacttcccgcacagtattaattgaaagattgtttatgacactgccaggagtgacgtaagggtcagtttcagggtcaatgtttggataacctttccatggctcaccaggacgaaattttgcccaagacttcatgcttaacttttcctcaatcacttctgcattccttctcatccgcacacgtcagtctaagcacgccgatctgggctacatcagtagtaagtccagatgtaacaaaaccatgtttgctggagttttgatccaaagatgtgttcacagaaatgctgtccactgtcgtccacttccttagtcttgactgtggctctttaatactgttcatatccatatttacattcaagtttgagttcaagcctatagggaagttgctgaaagcatttacttggtgatggccctttttgcagctcaggtatgtgagggctcgggggatcc

SEQ ID NO: 166491 - DNA, 747 bp, Homo Sapiens
cgcgaccacttctacccacggcaggatatggtgtcttgatgatatcactaggggggaaaagtatatgggaatgtggcaagatgatgtgtgtcaagggaatggtgtggtggttacccagtgtggattatactacgagggcaactttcaccttaataaaatgatgggaaatggggttttgctttccgaagatgatactatctatgaaggagaattttcagatgactggactcttagtgggaaagggaacactgactatgccaaatggagactacattgaaggttattttagtggagaatggggatctgggataaaaatcactggaacctacttcaaacctagtctatatgagagtgataaagacagacgtaaagttttcaggaagctaggaaacctggcagtgccagctgatgagaagtggaaagcggtgtttgacgtatgttggcgccaactgggctgtgagggcccaggccaaggggaagtttggaaagcatgggacaatattgctgtggccttgaccaccagtcggcgccagcacagagacagtccagaaatattgagtcgttcacagactcagacactagagagtttggaattcattccacagcatgttggtgccttctctgtggagaaatatgatgacatcaggaaatatttaataaaggcctgtgacactcctctgcaccacctgggcaggcttgtggagacactggttgcagtgtatggaatgacatacgtggggtaggagt

SEQ ID NO: 166492 - DNA, 1149 bp, Homo Sapiens
acctcctaccccacgcgtgggggtctctatgataggggaaggtgtgttgaggctcctggaacacggggaggagtacgtattcaccctgcctagtgcctacgcccggtccattctcaccatcccgtgggtggagctcggaggaaaagtcagcatcaactgtgccaagactgggtactcagcgacagtgatattccacacgaagcctttctatggagggaaagtccacagggttaccgcagaagtgaagcacaacccaaccaacaccattgtttgtaaagcccatggggaatggaatggtactttagagttcacctacaacaatggagaaaccaaagtcatcgacacaaccacactgccagtgtatcccaagaagatcagacctcttgagaagcagggacccatggagtccaggaacctctggcgggaggtgacccgatacctgcggctgggggacattgacgcagccaccgagcagaagcggcacctggaggagaagcaacgggtggaggaacggaagcgcgagaacctccgcacaccatggaagcccaaatattttatccaggagggcgatggctgggtatacttcaatcccctctggaaagcacactgatggggtggaggtgcagagctttccagtatagccctgttttcgtaggaatattaaagtagtagagtatcagggttttgttggcattcactgagaccttgtattagcatccaagaaatgatgagagagagagaaattatatactatgaaaagtgcacccccacactctgctagaggaatgaatttattcaagagccattcggggcacgtgtgtgtacacaccgtatacgttcacacacatgcactatgtaaacatctgagtatgattacacatttaaatactgcactccaccaaggttaaagtgggtactcataacgctccttgtatcactgaagtttgaagtttactatctacacttttgccaaaacatgttttacactcaccaaagatattctcacttagtcaacctcctgtcgaacattgaacgtgaactgggcatggccccgaatcactgtcccttaggggagaaagtggctcatactggtagaagtatggcgtggtatcatttccacccttatgcggattctcaccgatccaaacc

SEQ ID NO: 166493 - DNA, 2621 bp, Homo Sapiens
  misc_feature (74)..(74): n is a, c, g, or t
  misc_feature (109)..(109): n is a, c, g, or t
  misc_feature (124)..(124): n is a, c, g, or t
  misc_feature (138)..(138): n is a, c, g, or t
  misc_feature (263)..(263): n is a, c, g, or t
  misc_feature (406)..(406): n is a, c, g, or t
  misc_feature (436)..(436): n is a, c, g, or t
  misc_feature (550)..(550): n is a, c, g, or t
  misc_feature (555)..(555): n is a, c, g, or t
  misc_feature (750)..(758): n is a, c, g, or t
  misc_feature (1014)..(1088): n is a, c, g, or t
  misc_feature (1215)..(1225): n is a, c, g, or t
  misc_feature (1506)..(1515): n is a, c, g, or t
  misc_feature (1595)..(1616): n is a, c, g, or t
  misc_feature (1774)..(1782): n is a, c, g, or t
  misc_feature (2043)..(2057): n is a, c, g, or t
  misc_feature (2097)..(2106): n is a, c, g, or t
cgaggatgcgccacggggcgcgcgcgctcgggccgaccattcccgtcgcgctagcaaccgagctgcatcgggtngcggtgacgccgtcggacagactctgacgagtctncgcgcgcggttctcngcggcggagatgcntctaacacgcgcgcgcgcgggacacccgcgtctcgacgagtaatctatcactgcagcgcgggcgcgcctcaagagactctgcgccgcgggcctgtcgcgcggctgctcttagcaccggttctgcncggtcccgcgctcgccagcagccgctcgcgtctcagaacatgcagagagtggcgcgggcggtacgcgtcgtgtttatgatggacggcggcgatggtgggtatttgattatgttgcggctggtcttctgccgtgcactgcactnaccaggatgtatcatcgctggttcgtggcntcgcacccacaggcggtggtggcgtcgcatcggcaggcgtgtcatcgctagcagaacatctctcgttgtgctcagcgcactccgtgcactgcgggcgtctctgtctctcgtagnggccncgctcggcggccgcgcctaacaccacctgttgttccattctcctgtcgtcccgcggcagagtctcctatctcgggcgcgccgcctcctatcacccccagccatcccgctgtccccgtgccgcccgcacccccggccctccccgtccactccgcggggtgggagctgtcggcggaaacgcgggcggggcgttcgcnnnnnnnnnccgctcggctacgccttgcggaatgggcgtgaggggctcggtctcgcgcctcggggggccccttgcggtgctgcttgctcggcgccggctcatgggggttgttcggagagcgcgccggcagtagagcaagcgcgcggttgggtccacgctccgtggggggggcgcgcccgcgccgccctccgggggcgccttggcccctgtttcggggaggggaaggggcttcggttttcctggggggtgtttcggcgttcttgcnnnnnnnnnnnnnnnnnnnnnnnnnnnnnnnnnnnnnnnnnnnnnnnnnnnnnnnnnnnnnnnnnnnnnnnnnnncgtaaattttcttccagaaatattttaataaaaattggccatttccaagtaacacccactgcatgcccatcaataaaagagaaccataacaaaatagaaaatttaccatatggctatgattttaagnnnnnnnnnnntgcggacacgagcacatgagcaaagtccaatattaaagtaacattccttcttacgggctatgattaggaatctgattagataccagaataaaaatacaaatgctgaactatttaggtcaaagaacctctatagaagcatctgtcttcaaaggcattccagtttgagactcaattttagaataaggcataacaaatatgttaacaaaagacatacacaaagtgatgaaagagggattctataattccccacatactctgaacctaataaaacaaatctagannnnnnnnnnaaacaattgccaagactgaaatcaaagataaatagaaggcacaacagttttgctctggttgttatctgggttttgggaannnnnnnnnnnnnnnnnnnnnnacaaatacaaattaaacatgaaaaaactacttcaaaaaaactaacagttcaagaaaagcctatcagttgcattctagacatttaaaacctattatcacaatttaaatttcaatggtaaaaacagttaggttttagaattgttttgtgatcctttatcnnnnnnnnnttctattccttttattcagtttttaaacataccagtgagaatcaaaattgtcaaattttccaatggcaatttctccacaccagaaggtagtcatgactctcaaagaagaaacaatttgggtttttcctgccttcaaaatattatcaaatcctgtatttcttacaggcttttcaaacacgtagaaaataagaaatattccaatgaatgaaacataccaaatgtcagtaatatgcaagacattcctttggggaaatggctgtnnnnnnnnnnnnnnntccagtctgtatatgcaaagtaagcaaggaaattcagtcnnnnnnnnnngcttctttaaaagtccgttattcctaaaatatcattccacaaaattggaagtgaaagactaaaggtcaggaaagggaagagagggagagggagcacacaccattaacacacaaaaaaagtaaaattatacaaacttaagcagtttataacagactggggtcatactccaagataccaaaggctgtcgaaaattcaccattctgttggaaccagggtttgtatggctgcatgaagatccatgaagattcactgccgtggcgcaagcccccttcccactccaaatcctggtttctgcaccatgcctccacggggagggcctctcattccaccacccagcccacctcgagggcctccaggtccccgaaggcgattatctcgtcggacgccttccctggcagctcgagtcttcttctcttcgacattcagacggacctcacctctgaacatgatgggcctgttgctaaggactttctgaacaggctcagaatcatcaaacacaacaaaaccaaaattgg

SEQ ID NO: 166494 - DNA, 351 bp, Homo Sapiens
acctcctaccccagggaatttgaggagtatttactgcgtatgttccagcagactttctacctcctgcagaaaatcaccaaggataacaatgcccacacagtgaagagcaggctagaagagctcgatgagagctatatcgagaagtttactgactttcttcggctctttgtgagtgttcacctaagaagaatcgagtcttactcccagttccctgtggtggagtttttgacacttttgttcaagtacacatttcatcagcctactcacgaaggttacttctcttgtttggatatctggacgctgtttttggactatctgacaagtaaaattaaaagtcgtcttggagacaag

SEQ ID NO: 166495 - DNA, 358 bp, Homo Sapiens
actcaactgaaagactaaaatccctttgtcacttggccattccctgaagatttgtaaaggacactcatcatcatcaagaataatttctttagcacccttttcatcagaatgctgggctccaggaggaagcataacccgggcgatgcagtaatccctagggttttccttttccagaccatacttctgctaaagcttcagccacagcaaagtctgcaggatctgtagtagacagcaggatcgtcttgtagggaatactttggttttaagactatcctgcataaattctcaatgttccacctgaatcaggccgccacatcctgagctccgaaattcctgcattctcttttccaatttttgc

SEQ ID NO: 166496 - DNA, 860 bp, Homo Sapiens
  misc_feature (24)..(24): n is a, c, g, or t
ggacgcgtgggtcgacccacgcgntcggacccacgcgtgcggggaggccgcggcggggaaaatggcggacgggaaggcgggagacgagaagcctgaaaagtcgcagcgagctggagccgccggaggacctgaagaagaagcagaaaaacctgtgaaaactaagactgtttcttccagtaatggaggggaaagttccagtcgcagcgctgagaagcgatcagctgaagaagaagctgccgacctcccaacaaagcctacaaagatctccaagtttggatttgccataggtagtcagacgacaaagaaagcatcagccatatccatcaaacttggatcaagtaagcctaaagaaactgttccaactcttgctccaaaaactctttcagtagcagcagcttttaatgaagatgaagatagtgaaccagaggaaatgcctccagaagcaaagatgaggatgaagaatattggaagggatacaccaacatcagctggaccaaactccttcaataaaggaaagcatgggttttctgataaccagaagctgtgggagcgaaatataaaatctcatcttggaaatgtccatgaccaagacaattaaatgatgttttgaaattggggtgtggggtgggtgtaaagttaaaaggaacagtttccttttttaaagaatggtataagactatctttggagccgctttttattcttttacatttaataaacagattgacgtggtacactacatacacactgaaagtttgacaattcggaggtacattaggtccggatataccgattccagacattggccaactacgggagcttacatgtgattagtttccaaaggtccagactatacagacat

SEQ ID NO: 166497 - DNA, 338 bp, Homo Sapiens
ctcataccccgcatcatcatcatgtcgtacttccgccagttcttcaaaatagaacttatccatcacaaacagcccaccagcaatcatgggggtttttataggggcgactgggttcccctgccgggaccttctctgctcaggcctcatgtaatcccacttgaataccaagttccaatcaaaaccgcccttcaagtcagcagatgcccccacatactgaaagttgtccatattaatgacatcgatgatgggtgacacaacccgagtcctgtcctccgccaccctttccaggaggggctccagccagtgctcattacactcgcagtgactgtccaggaagg

SEQ ID NO: 166498 - DNA, 618 bp, Homo Sapiens
tcctaccccacgccagggcagcaaccgttgctcagagagaaggtggaggaagaaatccagaccctagcacgcgcgcaccatcatggaccattatgattctcagcaaaccaacgattacatgcagccagaagaggactgggaccgggacctgctcctggacccggcctgggagaagcagcagagaaagacattcacggcatggtgtaactcccacctccggaaggcggggacacagatcgagaacatcgaagaggacttccgggatggcctgaagctcatgctgctgctggaggtcatctcaggtgaacgcttggccaagccagagcgaggcaagatgagagtgcacaagatctccaacgtcaacaaggccctggatttcatagccagcaaaggcgtcaaactggtgtccatcggagccgaagaaatcgtggatgggaatgtgaagatgaacctgggcatgatctggaccatcatcatgcgctttgccatccaggacatctccgtggaaaagacttcagccaaggaagggctgctccatgtggtgtcagagaaagacagccccttacaaaaatgtcaacatccagaacttccacataagctggaaggatgcctcgttcc

SEQ ID NO: 166499 - DNA, 1142 bp, Homo Sapiens
ttatcggcacccacctcctcgaaaactccacaggccagcgtgagcgaggcagagagaaaggcgcaagtatactaccgtgcgtgcatgaacgagaccaggatcgaggagctcagggccaaacctctaatggagttgattgagaggctcgggggctggaacatcacaggtccctgggccaaggacaacttccaggacaccctgcaggtggtcaccgcccactaccgcacctcacccttcttctctgtctatgtcagtgccgattccaagaactccaacagcaacgtgatccaggtggaccagtctggcctgggcttgccctcgagagactattacctgaacaaaactgaaaacgagaaggtgctgaccggatatctgaactacatggtccagctggggaagctgctgggcggcggggacgaggaggccatccggccccagatgcagcagatcttggactttgagacggcactggccaacatcaccatcccacaggagaagcgccgtgatgaggagctcatctaccacaaagtgacggcagccgagctgcagaccttggcacccgccatcaactggttgccttttctcaacaccatcttctaccccgtggagatcaatgaatccgagcctattgtggtctatgacaaggaataccattgagcagatctccactctctatcaaaaacacacgacagatgcctgctcaacaactacatgatctggaacctggtgcggaaaacaagctccttcctcgaccagcgctttcaggacgccgatgagaagttcatggaagtcatgtacgggaccaagaagacctgtcttcctcgctggaagttttgcgtgagtgacacagaaaacaacctgggctttgcgttgggccccatgtttgtcaaagcaaccttcgccgaggacagcaagagcatagccaccgagatcatcctggagattaagaaagcatctggaggaaaacctgaccaccctgaaacggatggaatgaggaaacccgaaaattcagccaaggaaaagggccgatgccctctccccactggtaggattacccccactttatccctggatccccagggagttgggaccaaaggttttacggacctaccttgccgcctgccaaacttcctacttgggac

SEQ ID NO: 166500 - DNA, 878 bp, Homo Sapiens
ggttcatttctacacgcagcatatctgccttttgggaatgtaatcaaggtataatcttggctagtgttatgtgcctgtattttcttaaaatggtacaccagaaaaggactggcagtctacttctaccatagttaaacttcaccctctttaatttcacaacatattctttggaagcaggaagaaatgctcataaagaggatcagaccttctttcccgtgaaaccagtatttggcgccatatataagcctggttaaattggtcatctaaagctgtcaaataagacattctgtgaaaggtaaacatcgaaactggttataagtaaaaccatcaagccaacaacagggtcttgagataacctttgaagcttattgtactggcctgcaccagaagatgtctgcattactcattgctaaaaatgtgtagagttcaatttctacaccgtgtgtgatttgaaggagccacttcagtcctattaaagcccataagagaatcagtgggatgccttggcatggcattttttagcttattatacaacagatataagagtgatactggaaacagaattttcaatagttcaatagttatctgaataaatatctgagttcaataatttttcagagattcaatatgctggaccacgatgtcagctgatttacatatgaaaaagtgtccttagctaatgagatgggttgcaaattgaccaggaataagcaatccaaatttttaaaagtcaagaatgtaaggtgattaatgaaaacagatgatgaggtactaatgatgtaatctggaattcaaaaaccacacctgctatgactgagtgctgtaacatcctcaaatgtgagtagggttggttgtcaacctgcaggcttgtgtagtaa

SEQ ID NO: 166501 - DNA, 1266 bp, Homo Sapiens
cggtacccgcgccaaatgtgaaacacacagataataggaacaaaatgtagttcccatgtgccaaacaaaataaatgaaatctctgcatgtttgcagcatatctgccttttgggaatgtaatcaaggtataatctttggctagtgttatgtgcctgtatttttttaaaatggtacaccagaaaaggactggcagtctacttctaccatagttaaacttcaccctctttaatttcacaacatattctttggaagcaggaagaaatgctcataaagaggatcagaccttctttcccgtgaaaccagtatttggcgccatatataagcctggttaaattggtcatctaaagctgtcaaataagacattctgtgaaaggtaaacatcgaaactggttataagtaaaaccatcaagccaacaacagggtcttgagataacctttgaagcttattgtactggcctgcaccagaagatgtctgcattactcattgctaaaaatgtgtagcacagaactgcactaggattaatttgtttacaagaagaaatttaaactctacgtttggttttcacatacagcagctctattgaataacatgcatctgaattttaagttgcaaaggtatctgaataatttttcatgtgcatcttttgtcgaatgttttggttcaagaaagaatgtttaaagctttttaaaagacttcagttcttaatgtaactgtacccttctgcatggaaaatcataaccaacatggctgcagtagacttcttagtggtatccagcgccacttgcagagggctgctttatcatattgtacttgggtgtaggactctagtgttcttgggtgtattgcatgggctgcattatctacagcattgtacaataacaactagaaaaggcagtatacttcactgatgcttgtctggtaataatcacttctgtgttataatggaaggttttttgtgatgtatgaaacttgtgttttttatatataaatgagtatagttagtgttgtggtaatgcctgttttcatctgtaaatagttaagtatgtacacgaggcactacttctgatttattgcaatgttcagtcctagtttttacttttattcttaaagcattcagttttgctttcaattttatgtaccttagttctgagttagacctgcagatgtgtacagatagttcatatttatgtattgcacataatcatgctattcagcattgatgctatattgtattatgtaaataataaaagccatgtacagaggaa

SEQ ID NO: 166502 - DNA, 945 bp, Homo Sapiens
  misc_feature (479)..(479): n is a, c, g, or t
cggagcttatgctactccacaaacagctcagcgcctgtaagtggtggggaatactggtgtgactaaagtgagccctgagtttctaggctgccctgcctccagccattcaggaggaagtactggcacagcagagagctgagcagcagcgacgagaactagcacagaatgccagctcagacacccctatggaccctgtgaccttcatccagactctgccctcagacctgcgccgtagtgtcctagaggatatggaggacagtgtgttagctgtgatgccacctgacattgcagctgaggctcaagccctgagacgagagcaagaagcccggcagcgacagctcatgcatgagcgtctgtttgggcacagtagcacctccgcactctctgctattctccgaagcccggctttcaccagtcgcttaagtggcaaccgtggggtccagtatactccccttgctgtgcagagaggtggcaccttncagatggggggtatcagcagccataacaggccttctggcagtaatgtagatactctcctccgcctccgaggacggctccttctggaccacgaagccctttcttgtctcttggtcctactttttgtggatgagccaaagctcaatactagccgtctacaccgagtactgagaaatctctgctaccatgcccagacccgccactgggtcatccgcagtctgctctccatcctgcagcgcagcagtgagagtgagctatgcattgaaacacccaaactcactacaagtgaggaaaagggcaaaaagtcgagcaagagctgtgggtcaagtagccatgagaaccgtcccctggacctgctacacaagatggagtcaaagagctccaaccagctttcctggctctcagtatccatggatcaccctaggctgcaggactaatatatttcagatccagcgttcaggggggcgt

SEQ ID NO: 166503 - DNA, 700 bp, Homo Sapiens
ggggccatggcccacatgcgctggcctttcgctggggctgggggggccatcggcctcaggcaacaattcttcccctggatacacatcggggacctggcaggaatcctgacccatgcccttgaagcaaaccacgtgcacggggtcctgaatggagtggctccatcctccgccactaatgctgagtttgcccagaccttcggtgctgccctgggccgccgagccttcatccctctccccagcgctgtggtgcaagctgtctttgggcgacagcgtgccatcatgctgctggagggccagaaggtgatcccacggcgaacactggccactggctaccagtattccttcccagagctaggggctgccttaaaggaaattgtagcctaagtaggtcatggcaagggcctgaggcctgttcctcacaggcttccaggttaggcactgtgaataggctcagctcctctagagagctgaagccatctggttcttagattcctctcccagtcctctttcccattgttctgttgctccaccttattgtctcaaggccgtaatctcatcaggttgggacattaatcttttcaactccttgtaagatttcccggtttggtttctctacatgtcctgcagctgccccacttctcctttacgctgtgtagagaatgctctgcagtttaggcaataaaaataaattgtctcacta

SEQ ID NO: 166504 - DNA, 496 bp, Homo Sapiens
ctctcaagggcattcggggcttgtaaacagacataggaggcctctgtttaccctggaagcaccactgtccagcccattggttcccactggcagcatggtagagctgagagaaacaggctctcagggtacctgacttgaggggaatcgtttcatgaagctgaacttcaagcatatttccagtacattctttcagagtctgttttgccatccaaatataagccccaggccattccacttagtgtcttatcaatgataggcaagaatgatatctgagttgaacttcggtgcttctgttgtatgagtttactgtgcctggtggtatattgggcattctttggattgagtgttctgaggtgagagagtcttcccgaggcatcctgtctgtgcttccaaccctgaacaagaccttacatgagagatggactgatggactgcggcatcctgggctgtcaagtggatagatagttaaaaagcattataccgtcggtaggagtgg

SEQ ID NO: 166505 - DNA, 844 bp, Homo Sapiens
taaggatcatgtcattacatggctttacccggatgaaggtgcacggttgcccacgaagctcacacaaacacgatcttgttggtcagattgagggcacccaggatgttgagtgtgggcccgatgcccagatagtagatggagcgcaggatgagcgccacgatgagggggcggatgctgtagcgcttggtgaacagggccgcgatggagaagcagatgaggatccagaagagcaatgagatgagaggggagtccagcacgcctgtggacgcgccctccatgtaagggtagaagaaggcaatgatgatgttgataaacacggccaggttgaaggagatgctgccccacagggtcatgcggcgggagaaccagtagatcagcggcatgctgcggagcttgcgctgccactccatctcgttgtgcaggaaggaggactggtcgaagaagtcgctcactttgctgccctgctcgtcctgctcagtagtggtgaagagccggtgcttggtttcctccgtcaggaactggcagatgccgggcactgggaacacgatctgctccatgctgcggtcctgccgcacaatctcgatctgggacgtgtggttctcatagtaggccagggggtcttcctcctcctcctgtgctggcgctgaggacttgagcatctgtgacagctgcttgttgttgaggctgagcatggaagagataccctcggcctcctcctcttgaatgcgcttcaccggcttcagcaggtgctgcagctgtttattgtgcctggagagctgcagcgccaggatatagatgttatggcccacttcacgtgggctcacctccgagttctcacgctctt

SEQ ID NO: 166506 - DNA, 944 bp, Homo Sapiens
tgtaccggccggaatttcgggatatcgtcgacccacgcgtcccgcccacgcgtccgaagagcgtgagaactcggaggtgagcccacgtgaagtgggccataacatctatatcctggcgctgcagctctccaggcacaataaacagctgcagcacctgctgaagccggtgaagcgcattcaagaggaggaggccgagggtatctcttccatgctcagcctcaacaacaagcagctgtcacagatgctcaagtcctcagcgccagcacaggaggaggaggaagaccccctggcctactatgagaaccacaacgtcccagatcgagattgtgcggcaggaccgcagcatggagcagatcgtgttcccagtgcccggcatctgccagttcctgacggaggaaaccaagcaccggctcttcaccactactgagcaggacgagcagggcagcaaagtgagcgacttcttcgaccaggcctccttcctgcacaacgagatggagtggcagcgcaagctccgcagcatgccgctgatctactggttctcccgccgcatgaccctgtggggcagcatcatccttcaacctcggccgagtttatcaacactcatcatagccttcttctacccatacatggagggcgcgtacacaggcgtgctggactccctctcatctcattgctctttcttggatcctcatctgctttctccatcgccggcctgttcacccatggcgctacaggcatccggcccccttcatcgtgggctcatcctgtggctccatctactattctgggcttcgggccccactcaacttctgggtgcctcatctgaccaacaatcggttgtgggggctccgggcaccgggccctctccgggcaaagccggctgcctggatcctccccggggctctcctgccgtcggccttggcagtgttcacgtccttggactc

SEQ ID NO: 166507 - DNA, 567 bp, Homo Sapiens
  misc_feature (231)..(247): n is a, c, g, or t
acctcttaccacgatctcaaatagatacaactcctgtagaatggaaggagacgtgaaacaggaaaataaattacagtcagtgctagttaatttagcgacaagggaaaaataaaccaaactcaagtcggtaaagtatatcaaaatattcaatgatgtagctttccccactctctgtcacacacgcttgctaacaagtatattaaattaaggccaaatttaacctgaatgcgnnnnnnnnnnnnnnnnnattaagatctgagataggaacgggcatacttagtactgaaaggcagacaataaaatgggccatgaaaggggggggaaaggtactgtctatggttcgagggattcaaccagagataaaacctatatacaagcatgtgtgtagctcgaaataaaaataaaaggactatttcatgtcatgactgcttgttggcttcctcttcatatgcattccctgtgccattctgtacataggatgaaccagaaccaaggccatacaaatgaccacaatatttggcatcatcaatatgatcttcaaagaacatctaaaaaggaattttgaag

SEQ ID NO: 166508 - DNA, 807 bp, Homo Sapiens
gaccacccaagccagcgggacaaccctggtggtgccagtgaatgcagggcccccatagccacataataggcgatgaggagataccagaaaactgcctggagcagttggagatgggatttccacggggagcccagccagccccactgctgtgctccgttctgaaggcctcgggttctctgcagcagctgtccctggatagtgccacctttgcctctccccaggattttgggcttgtattgcaaacactcaaagagtacaacctagccctgaaaagactgagcttccatgacatgaatctcgctgactgtcagagcgaggtgctctttttgctacagaatctgactctgcaagagattaccttctccttctgccgtctgtttgagaagcgcccagcccaatttctgcctgagatggttgctgctatgaagggcaactccacactgaagggcctccggctgccagggaaccgcctggggaatgctggcctgctggccttggcagatgttttctcagaggattcatcctcctctctctgtcagctggacatcagttccaaactgcatcaagccagatgggcttctggagttcgccaagcggcttggagcgctggggccgtggagcctttggtcacctgcgcctcttccaaaactggctggaccagggatgcaggtcacagccagggaagccatccggcggctccgggctacctgccatggtggttagccgactcatgggactcatcccaggccttcgcagattatgttagcaccatgtgatggggccccgtaacctcaacagttctccatg

SEQ ID NO: 166509 - DNA, 864 bp, Homo Sapiens
  misc_feature (470)..(505): n is a, c, g, or t
acctactacccacgatcgaagtacgcagaaaagcaaatgtcctgctctgttccacgttcgaaattgaaaagtgacagacactttgtcctacccacagagttgcctggcagagccagataactcctggagctcagaaaagtcacagggacagtctgtggctgtggacatgagaaggacacattacccatcatgaggatctgtggttagtgtttcttggctaattcggtaacatccactccattataataaagattttctaaacacccatgaaagcttttacgtctgaatgcccgcgatcttccgggtgtcggaattcccccaaagctcaaaattaagatccaagtaactggaatctcccttagcttggaaatgatgagtgtgtttgtccacggtgaagttgacctgcgtgtcgaggagctcgatgaggacggaatgccagtgctggtcgtccagcaggctgcccagggtgnnnnnnnnnnnnnnnnnnnnnnnnnnnnnnnnnnnnttgcctgaattaagataaaagacaagctttcctttaattaattccagagtaatgtgatttccatgttgtccttctctgtgaagtagaattccattgctctgcatggctttaaatttcaaagaaataacgtctcttattggttttaaaggttttttatcaagtctatacaccagagcacctttgtccatccaatatattaccacctcagattcatatgcacatccgtacacttcgatccgctatcccaatcctgcccctagggttcacaggctaaacgggagaaagcagcaggaacctggcttcataagggaggctggagtctgtagtgcaccacatctgtctgcgtgggttaggtaggt

SEQ ID NO: 166510 - DNA, 1009 bp, Homo Sapiens
  misc_feature (812)..(849): n is a, c, g, or t
atgtggacagcaccgcaagccttcataaagtgcagcacagtagcccttttctttgctgcagtcaagttcaccaataaggatattgtatgctcggaggactttatttttgctatcagtgctaaacctgtgttttcgcagatatgtttctagtgtttctaaaagacaactcgagtcaattaaaactacttcatccctgcattcctgcgacattagttcccatacatccatccaacgacctcccaaaggttttggcttgtgcgtatctaaggagtgcaactgacatctcttattcttcttactttttggaatagcatctatcatgtcatctagtttggaccccatgtacataaaataatgtataaagcttctttgcatcagtcatgcagcttctagttacagacaggactcccttgggccctactgttaggggttcaagagcaggatttccagactctacaagctgggaaaagagacgctccacactgcgacgacaaccaacacatgggacaagctgagaaagtgcactcaggacttcgcgtgatgtcaccaccatggcaatacttagatcctgttgcttaagcataccatgtcgctgaatgaactgctttagctgtgcaccattattctgatgtccatcgagatttaacacattatcaggaaattccatcaccatcgtcagggtgtcgtctatgtagaggggaatctgcctcctctcgaaggggaactcctcctccccgtccctgcacactgccacgagtcgcgccatcgtccccgacgctgccgttgccaccgtcaccacctcctcccagctnnnnnnnnnnnnnnnnnnnnnnnnnnnnnnnnnnnnnntgccgcctcctcccagctcctgcccttctcggaggaggctgtcggttccgaccttcaccgttttcgtggtcgcctcgctaactcccacctctgctccctgttactggctgacgaggcccgcggcagggccggcctgggcgggagcgcagctccgaatgtc

SEQ ID NO: 166511 - DNA, 708 bp, Homo Sapiens
cggtaccccctcctaccccacgggggaatatgtcatttgtgttatttcgtaaacttctatttaggaaattacattaagtattaatgaggggaaaggaaatgagctctacgaggatttcaccttgcatgggagagagcagggttttctcagattcctttttaatctctatttatctggttgtttctgacaggatgctgcctgcttggctctacgagctggaaagcagcttctaagctgccttaattaatgaaagattgaaaataggaagtgccctgaagggggccagcaggtcacggggcagaatctctcaggttgctgtgggatctcagtgtgcccctacctgttctcccctccaggccacctgtctctgtaaaggatgtctgctctgttcaaaaggcagctgggatcccagcccacaagtgatcagcagagttgcatttccaaagaaaaaggctatgagatgagctgagttatagagagaaagggagaggcatgtacggtgtggggaagtggaagagaagctggcgggggagaaggaggctaacctgcactgagtacttcattaggacaagtgagaatcagctattgataatggccagagatatccacagcttggaggagcccagagaccgtttgctttatacccacacagcaactggtccactgctttactgtctgttggataatggctgtaaaatgtttaaaaac

SEQ ID NO: 166512 - DNA, 615 bp, Homo Sapiens
attactaccccacgagtcatggatggcaagaggatctcctccatatgatgacaggtacttgctcctctcctggccccaggcttgatattgaaggagccctatggaagactgagggagagagaaaagctcctggatggtttacgctgtttctaagccttggtggtgggtaaggggccagttattcctctgtgtgccttatgattgggtaggtaaacctgccctgcaggtgtgatgagatgaactgtagacaaccatgtttgtctattcatcattcatcaaacaaaatgataccttgtatttatatagtgccttactgtctagaaaatactggtttagtggaaaggtgggaaagctggttacataagtagctgacagatgtcttcttataacctgaatttccaaacatgcagagaaatttccctaacattctggaaaaaccagagtaaaggtcaaaataacaagtaaaatggagaaacacaacgcatgaataataggactgtacaaaacatggtataatagaaagatcactggatttagaattggaagatctgaatttgagcctcaagtagcactactcattgactttgactgtggaacttttcttagtgaattacc

SEQ ID NO: 166513 - DNA, 812 bp, Homo Sapiens
acctcctacccacggttctatgagtttatcaagcagcagaatatttgctccatcagccagaatctgttatcaggcttcttagagcagctatcattatttcatgtgttcttactcagaccaatctgagaatgaacaccctagtacattataacaacataagcatgagctaaatacatcactggatctttgaaaccttaggcatatttatatacaaaaacaacaaataagaataataataataatggacttaagccttttgttagcatttgtaatatgtccactgaatgcagacatgaacagagcctctttcctttccatctagcttttgaggctttggggaagaagggctgagacgccaagtggcagttgagaaacccccaggagagaccactatgttagacagtcaccccaagagtattgcaaatggggacatcctctgggaggtgagggattcgtgggaatagtgaacggtacccaggagtcacatcccgtatctcttcaactccatcttgtcgtgcataccattccctcctggagttgcccaacactgaaaatcccataccgaaaattttatggctgcctaatatctttaaggcacgacaattttgataattccctactttacaagtcccatcatctcaaggccaagccagaaaacttaaaaccctagactcccttgcaactaggtacaagcagataaaatgggtcccatgaatctgatgaagcctcaccagcacttggattctaaaaagcagcgtttaatttaggggactcatctttgccatccacgatgacgtatccgggtccggcta

SEQ ID NO: 166514 - DNA, 914 bp, Homo Sapiens
ttcagcgtacctcgtcatgaatcgcggtctaataggtacatatcaagatacgatgcagactagcaggaggatatcttcctgtgcctccctcatctcgtatcacaactgctcgaattcgctctcctaactgagaaaccagtccatcaatcatcaagcaatcgggatccacttccctcttgataaacgctcaaacttctgtcgacgactggtgtagtagttctgaattacagggtagttgtagcataaccttgacaactgcacagaatcatctatgccttctggtaaaagcccagaatgagagaaccaaagaaccacttgtgccatactgacagatgaggtgggaaaccacaaacttattgcttaagtctatcagtcctctctcagtgatctctcgggcttctgatgcaaaacagctcaagactatattaagattgctaagaagcaaatagcattgctggatagactgtatagttagtggatccatgaaatggacacgaaccatcaaataatggcacacatagtctgtcaaattcctcttttgtgagaaccactttattccacgtccattcaagaacaaagcgcaaattagtggcagaatttggttgtacttctgttatccatcttcggatataaccagtcaaaagtcccagggaactagtccgaattgctgctgacaatatagcttctaactgttcttcttggcttaaactggaaggctgaacatcaacaaatctgggggaaagaaggccagctacaagacatcgattataaccatcaggaatgagttcattgagtgatggacctgatttctttaaaaaagtcaaagtctccttctgaaagccagtacaagttaaatgaacaactcccgagtttaacaaacaagtggcatcaaaattataagtgcttggattaaa

SEQ ID NO: 166515 - DNA, 443 bp, Homo Sapiens
taccacggtttgacactttcatgtgtgagagtagaatgacagctagacatttgcctatgtacgttgtagtaaagattctaactggagcagcgctgggcatggcaggaggtcaatagtagtgtctgctggaaagggttcagacagacttgtcatcatttcctggcgctgaccctggctcttacctggaaagcccctaaaccacccaccccagggatccacggtgcagggaaggtggtcatgcagaaaacaacctctagcgagttgctcggctgaggccctctgtaggtgaccttgtcttgcctccaaaagactggacctccttttcttcttcagtggtaaaaggagtttcttggtgccaccgtgggctctgggcagagactgtgccttcctcccttttgtgtctgagtcgccccgcatgctttggcgcagggagtttgggccag

SEQ ID NO: 166516 - DNA, 649 bp, Homo Sapiens
ccatgctagtcattcagcgatggaagaaatgagcatgaaaacaagggatgagtatcttcttagagtatgtgcatgttacgtaatacctgtttctgggcaatgctgcttcttctgactcaacaaatggggagagcaaattgaaaatgcgtaaattggaaggcaagttctgaaattaaacgtcgtactcttggactgaccttccgacctttaaggaagcaagagtttgtaaacttccaaatatttactattctgaactgccgtgtaaacctgacgtattcccaagtcaacataccagtataccaataggatgtgaataatgtgtgtgttgagtttaaaaccatagcagttttgctctggcaagtaatgaaagcgttctcgcttcctgagtgtgagctccagcagactgcagagtggccagtccacagttgtagcctgacttcagtgagttctgatgtgtgctttttgcaaatacatgttctcagaacagtgagatcatccagcagtggcctggactgcactcacataaaaatcatgagacagccatggctacttgtttctgtaatacatgcatgtgtgttttttaaaacctatgataggcctctgattctgcagctgcaacttttatggaatgtttccttctcccattcct

SEQ ID NO: 166517 - DNA, 1568 bp, Homo Sapiens
  misc_feature (429)..(441): n is a, c, g, or t
  misc_feature (1220)..(1249): n is a, c, g, or t
  misc_feature (1253)..(1255): n is a, c, g, or t
  misc_feature (1257)..(1257): n is a, c, g, or t
  misc_feature (1259)..(1270): n is a, c, g, or t
  misc_feature (1272)..(1275): n is a, c, g, or t
  misc_feature (1277)..(1277): n is a, c, g, or t
  misc_feature (1279)..(1279): n is a, c, g, or t
  misc_feature (1282)..(1282): n is a, c, g, or t
  misc_feature (1285)..(1286): n is a, c, g, or t
  misc_feature (1294)..(1294): n is a, c, g, or t
  misc_feature (1296)..(1296): n is a, c, g, or t
  misc_feature (1305)..(1305): n is a, c, g, or t
  misc_feature (1310)..(1310): n is a, c, g, or t
  misc_feature (1312)..(1371): n is a, c, g, or t
  misc_feature (1376)..(1376): n is a, c, g, or t
  misc_feature (1392)..(1392): n is a, c, g, or t
  misc_feature (1397)..(1397): n is a, c, g, or t
  misc_feature (1422)..(1432): n is a, c, g, or t
  misc_feature (1445)..(1474): n is a, c, g, or t
  misc_feature (1495)..(1495): n is a, c, g, or t
attttgataaattagtggagaaatggcattttaagaggagtctcttctcaacttacctgagagtcgaattcttctcttccctaaccaatgaagctaagtggttatcccagaaacttgtcttctaaaagggaggactccaggccatcaataaagatgtccaggcagtgagcgtactttttacaccctgtagaattgtgggctgtagcgttactctgattttctgtctagtatcagagaatgctggtagcttaaaatttttattttaggacttgtactctgaattttcaggaaccgtcaaaggagcagcagcaaattcacatattttcgacttgagaaatgcttgtggtatgtgttttccaaactgccccctatatgtaaagttcagtttaaccactgattgccttgttattactaggttttttgagattnnnnnnnnnnnnntccctggtttaaaaccaacaatgatgcctagtgagtatgtgtccacaggccataacagggtagaagagagacatcgtgcaacccaatgagtagtgaagggactgtgttgcttgtgaagcggtgtagtagcatttttgcagattcttggctgggtttagtgtactgatctagaaaagctgtttttctgctcctttgtggaaggcagttatgatcaggctgcatggacaaagcaagtagaggggcaccatcaggggctcttgcactattttcacctctaaatattacatactcagtagtgccctgcttctagggctctgaatacgggcttaaagtcatcttgtcctgctggaatttgctgtgcagagccataagcctcccattttgttagcgtcagctaggccaataggaacagaccgggaccttgtctcacactgatgatacctcacatgttgaccggctatgtgaactgcctatttcctatgctggagttttgatttttaactaaacgcaaatctgtagattctctcctctcccatcccagaaaacaaaacaaaataatgcttttcgaaattgtttctaggactttaaaacataatggtatatccaaaattctttatttcagaatgcaacaatagattccattaatatagactcaagatcaaaacagcatacctgctaagctaagatagatggtgttgattccactgggttttgatcaatacaataacaaacctttttcctttgacatactctgaattttgttgtttggggggaggggnnnnnnnnnnnnnnnnnnnnnnnnnnnnnnatgnnngngnnnnnnnnnnnntnnnntntnttntgnntttttgtntnttggctttnttttngnnnnnnnnnnnnnnnnnnnnnnnnnnnnnnnnnnnnnnnnnnnnnnnnnnnnnnnnnnnngatgntgggtgggtgtcctgntgtgngtgttttggggccgggggctggtcnnnnnnnnnnngctccaccgggtnnnnnnnnnnnnnnnnnnnnnnnnnnnnnntttccctccttgccgcccggntcctcctggcggccggtttgaatttgcgtcttctcttgatcacccgccccgcgacacactcccgtcccatttg

SEQ ID NO: 166518 - DNA, 1599 bp, Homo Sapiens
cccctaactgggggaaaagctgggggggttcccctgcctctttaggcaggtttgttttggggcacgggggtaaagtcggaagaattatattggggaggggaattatcggaaggggaggctcttatgcagggcagttaccctttcctgattggggtatactccccatgtggtaggaggtctaacaggagactgagggtaccaaaccaggaatacaacacctctctcccttttctgctctagaaggaaaaggggaacccttcccccagtatcaattcaggcagcggcttctaaaggctgttaaaaagcatcctaacttaaaaacaaataacaacagtaaccaaataaaagacagaaaagtggcctgaacttaaatcaatcaatggaaaggtagattcataaaaataaaataaaaactggtgaccagtccattaaccatggggttaaatgcctcgtctgaaggaagatgtttacgctgcatccacgatccagcaggcgcggagctgctcttggcaactgtgaatgaatagctaccgtttcccttcaacacaccgcgctgccaccggtgaccgcatgtcaagtgctgaagttagaagagaccccacgttggcaaaggccccccaggcgatgatctgcctgacgcgggccaggtctgtgggaaacaagacttacgatctcaaataatgacccccaagtgccctcgcctcttcctgcttgccctgtgcgcctcgacctcctcacggggagttccaaatgagttccatttccctctcagttctaggcactctggaacatctttgattaaccagggtttttcatttctttccaacgccattggtgacttttgacttggaatgccgattccttctcctggaagaatggctttcgttgttgcctgcatgcttgggtgggctgtcttcagaaccttttgtccctttcctgtgatgccaggagatctctggactgtaggtgccatcttcacactccgagtaggtcttttctcggtgaccatagtgttctgcataccaaatcatgccgtacagacagaggaaagtggtgaaagccacgcaaagaagccaaagcacaacatagagtatttgggtcttagagaagagatcttgtccaaattgtatgcaaacaatggcctccaggaaaccaatgaccccaaacacccagcaattgtgttcctacgcgctttgcactgtgtgtcggtgagggtaagcgtagtacttgtctcactgtgggagctgtgatgccaccaataaagagaattctaccccaacttaatggatgactggcttggaacacaaagatatgcttcaagaagaaggtattcaactcagtcagctgccagatgatcatgaaaaggtacactccagctactctctgaaaagaagatttggggtcaaaccatcgaacataggtccagctagcaggagtgaactgcagaacagctctcttgatcttccaggtggtggtatgaatgtccttgaagcttgcccagtggtaagtcctcatctctaaaaaccggcaaacgaccatgcccagccaaatccaccaccattgcacaacagatgtccagaatgactgtgacccatacgc

SEQ ID NO: 166519 - DNA, 491 bp, Homo Sapiens
  misc_feature (200)..(200): n is a, c, g, or t
  misc_feature (326)..(327): n is a, c, g, or t
acctctacccacgtagtagatggtctaccagctcggacgtgaacgtctgatgggttctccagcacactaggagcccgtcgtgccggtagaagtagataggggatgtcttctttgctctccatgccccgggccttgatggccttgtcaaagaggccacactcgcagatgagctgctcacgggccttggtgttgattgcaantggggttgaatctcacgtgtgccaccagcagcttgaaaatggggtgcacagcaggcagctggcggtaaccattttgcaatgccaaaaacctcagacaccagatgtgttcgcagaaggtgggtgaanntggtctggtggacgtggaagatcactggaacgacacccagcatttaggccaaaagccagtcgtattttgcatccgaagggaggaaaatagggttctcatcacccggggatttggttgagctggatggcaatggggacaatcttgttttggccaaggttcttata

SEQ ID NO: 166520 - DNA, 879 bp, Homo Sapiens
  misc_feature (670)..(682): n is a, c, g, or t
gggttcgttggatggctcttgaaagtctggttaataacgagttctctagcgctagtgatgtgtgggcctttggagtgacgctgtgggaactcatgactctgggccagactccctacgtggacattgaccccttcgagatggccgcatacctgaaagatggttaccgaatagcccagccaatcaactgtcctgatgaattatttgctgtgatggcctgttgctgggccttagatccagaggagaggcccaagtttcagcagctggtacagtgcctaacagagtttcatgcagccctgggggcctacgtctgactcctctccaatcccacaccatcaggaagaaggtgcctgtcggggctcacttgaagcctgtcagggatgctttgtatctaacacaacgccaacagaagcacatttgtcttccaagaacaccgtgcacttagaaatgctttagaatctgaactttttaagacagacttaataatgtggcatattttctagatatcacttttattaggttgaactgaaagggtttttgcaaattttttggccaaaattttttaaaacatacttactttggactaggggtacattcttacaaaataaataaacagtttttaaaattgtttagacacagatatttggaattagctatcttagtgccaactgcnnnnnnnnnnnnnacttcatcaaggtgatgtaagtgactcacctttaaagtttttttagtggtattttttatcactactctgggaaatggtttgtctccaagatgcaatacttttcttagtaaaggaaaaacagcataaaaagatacctggtctgccttgtacaagaaaaggcaatattagaggaagaaaatttaaagaaaagctagagg

SEQ ID NO: 166521 - DNA, 828 bp, Homo Sapiens
agcaggatcccgtcagtcatgtatttgatcaaggtgttctctgaagtgcagtcttcaaagcggatggcatagcccacctcctcgccaaggtttccccccatctcttcactgactctcttggccactgacatggcaagctacacgccgggggctgggtacacccaatcatcccatagtccgtgtaaccatcttcatgcaggtactgcgtcagctgagtggtcttaccactccccgtctccccaaccacgatcacgatgctgttgtctctgataatagtgagcagctcctgctgcactgcaaagatgggcaggtactgcctctgctccaggatggacttcttctttgcaaattcactgctggcttcgctctttctcttcatgtgatctgcaaacttctgctctgtcctgtagtccaccttcccatcctccgtcacagctttatctggctcttcctccttcttgacgcccattatatctcccagtttggtccccgccagttcccagtgtttgtgctgagccttcttgcgctccttctgctccctgtgcttccgcactgtctggctgcctttccgagcaatgatggccaggtcagaagtggcatccttcactggaatcaccggctccggctgcttggtgaagacaatgcgcccatccagaaagggaggcaccagattgtgcaccatcagatgcaccttggccgcgttgtcctcttcaaagtcctcatccacctccagccgatggaccaccccactggtgagcatgcggtttgtctcccagcgctcgttatcctcattgatctgtctccgctgagctgaaatgcgcttctgct

SEQ ID NO: 166522 - DNA, 772 bp, Homo Sapiens
acctcctacccggtgggacacaaagaagacaaatacttgtaatccttgtcaccatgctgggtccggctaaatgagaatgttatggaagaagatctaaaagccgatgattgagagacacttagcagctaaaactccaaccaagagagttagaattgggaaaactctgccatcagaaaaagctgtcgtgacagaaccgagacaaaaggtgaagaggccttccagatgagtgaagttgatgaggaatctggattaaaggattcagaaccagagcgaaaacgcaagaagactgaagactcttcttcaggcaaatcagtggcgtctgatgtccctgaggaattagactttcttgtacctaaggctggattcttctgtccaatttgttccctcttctactcaggtgaaaaagcaatgacaaatcactgcaagagtacacgtcataagcaaaatactgagaaattcatggccaagcaaagaaaggaaaaggagcagaatgaggctgaagaaagaagctctaggtgattgggggaaaggaaagaattcactagaaatttgtttagggtccacttgatttgtgtatttttgttatcatttaatttgtaattttcgtttcagaagcaaatattcgtgttgtacaaatttctgattgccctaaatgtagagagactgatggggaaagtatgatgggtttgatttttatatcaaatcatcaggcatggagaaatatcttttagaagggttaaaataaatgttcctactgtatatttaaaatacc

SEQ ID NO: 166523 - DNA, 833 bp, Homo Sapiens
ggggtgccaattccaccagcagctgcaactgaaaagcaaggttcagaaatgtcagatatcctccgggagctgctctgtgtctctgagaaggctgctaacattgcccgggcgtgcagacagcaggaagccctcttccagctgctgatcgaagaaaagaaagagggagaaaagaacaagaagtttgcagttgacttcaagacgctggctgatgtactggtacaggaagttataaaacagaatatggagaacaagtttccaggcttggaaaaaaatatttttggagaagaatccaatgagtttactaatgactggggggaaaagattaccttgaggttgtgttcaacagaggaggaaacagcagagcttcttagcaaagtcctcaatggtaacaaggtggcatctgaagcattagagcagggttgtgcatcaggatgttgcctttactgacccaactctggattccacagagatcaatgttccacaggacattttgggaatttgggtggaccccatagattcaacttatcagtatataaaagggtctgctgacattaaaaccaaccagggaatcttcccctgtggacttcagtgtgtcaccattttaattggtgtctatgacatacagacaggggttcccctgatgggagtcatcaatcacctttttgtgtcacgagattccaaacaccctcaggtggaaaaggacagggctattgggggcctttcctacatgggggaccaacatggcattccctacagcttcaccatcctttaaaaagaaacgggcagtgaaacaccccactggaaacacccggctcctaaggcagcatttctcc

SEQ ID NO: 166524 - DNA, 582 bp, Homo Sapiens
ccccacgaatcacccttcagtcagagtgtgatgctttccccaacatatcttcagatgagtcttatactttacttgtgaaagaaccagtggctgtccttaaggccaacagagtttggggagcattacgaggtttagagacctttagccagttagtttatcaagattcttatggaactttcaccatcaatgaatccaccattattgattctccaaggttttctcacagaggaattttgattgatacatccagacattatctgccagttaagattattcttaaaactctggatgccatggcttttaataagtttaatgttcttcactggcacatagttgatgaccagtctttcccatatcagagcatcacttttcctgagttaagcaataaaggaagctattctttgtctcatgtttatacaccaaatgatgtccgtatggtgattgaatatgccagattacgaggaattcgagtcctgccagaatttgatacccctgggcatacactatcttggggaaaaggtcagaaagacctccatgactccatgttacagtagacaaaacaagttggactcttttgacgta

SEQ ID NO: 166525 - DNA, 818 bp, Homo Sapiens
gttgagagcagaggagacttggggtcccttccactcacccccgggaacctttaacactcaaatgcccttcaccaaggctgatgtctggggcactgacaccccctgaaacatccgcacctcctttgatttttgggcccttcaagttgatgccaaaatctgactcaggagatgccatattaaaggcaggccccttcacactgatatcaggagcagccccatggaaacctacttctgaacctttcagaccacctttgatttcaggcccagaaatctgcccagttgggagtttcacattcacgcctggcaggttcacatcacatccagaggacttaattccaggcatctggaggtttccttctaggccttgaacaccaatgcctggaagacctcctccgacagtggggcctttgatctcaccagtggccccaaggctccctttcacttttggtccttccaagttaaagtccacattcggtgctgaaatccgaggccctttcaggttcacatccacacctggccccttcagttcgccagaaacctgtggccccttggcattgacgtgcaagtcggaccccggagtagagatgccaaattggggcagcttcattttgggaagtttaatgctgccttcggatgcctccaagcttagatcaggagctcctacggatactttagggcatttgatgtcaccagagacagccagatctccctgcaggcttgggtcccctcagtgtcacatctgggtgccccaacgttaagctttgttgtgggcatcgatccctggcactttcacaccgtctcctcccacctgcattttg

SEQ ID NO: 166526 - DNA, 941 bp, Homo Sapiens
aaagagaggaaaaaaaggatacagttcacatgagcaaaagaggaaaacagaccacggtaccagctaaaataaaagagctggattcctgcttagtaagacagaaagaagtacatagagttgaaatggaagagttgacctcaaaatatgaaaaattacaggctttacaacagatggatggaagaaataaacccacagaacttttggaagaaaacactgaagaaaagtccaaatcacatttggtccaacccaaattgcttagtaacatggaagcccagcacaatgatctggagtttaaattagccggggcagaacgggagaaacagaaactgggcaaggagattgttagattgcagaaagaccttcgaatgttgagaaaggagcatcagcaagaattggaaatactaaagaaagaatatgatcaagaaagggaagagaaaatcaaacaggagcaggaagatcttgaactgaagcacaattccacattaaaacagctgatgagggagtttaatacacagctggcacaaaaggaacaagagctggaactgaccataaaagaaactatcaataaggcccaggaggtggaggctgaacttttagaaagccatcaagaagagacaaatcagttacttaaaaaaattgctgagaaagatgatgatctaaaacgaacagccaaaagatatgaagaaatccttgatgctcgtgaagaagaaatgactgcaaaagtaagggacctgcagactcaacttgaggagctgcagaagaaataccagcaaaagctagagcaggaggagaaccctggcaatgataatgttacaattatggagctacagacacagctagcacagaagacgactttaatccagtgattcgaaaattgaaagagcagagttcagagaacagattcacaatttagaagaccgttgagaaatttgacgcctgga

SEQ ID NO: 166527 - DNA, 905 bp, Homo Sapiens
cagtacgaatctgagatcctgccctccacgcccaacccccagcctccctcctgccaaggggaggcagcaggctcttcactgataggccatttgcagacactgagccctgacatgcagggtgcctactgcacattccctacctcggtgctggcaccggtgcctacccactcaacagtctcagagctcagcagaagccctgtggcaacggccacatcctgctaaaactgggatggaggaatcggcccagccccaagagcaactgtgatttttgtttttaagactcatggacatttcatacctgtgcaatactgaagacctcattctgtcatgctgccccagtgagatagtgagtggtcaccaggcttgcaaatgaacttcagacggacctcagggtaggttctcgggactgaaggaaggccaagccattacgggagcacagcatgtgctgactactgtacttccagacccctgccctcttgggactgcccagtccttgcacctcagagttcgccttttcatttcaagcataaggcaataaatacctgcagcaacgtgggagaaagaagttgctggaccaggagaaaaggcagttatgaagccaattcattttgaaggaagcacaatttccaccttatttttttgaactttggcagtttcaatgtctgtctctgttgcttcggggcataagctgatcaccgtctagttgggaaagtcaccctacagggtttgtagggacatgatcagcatcctgatttgaaccctgaaatgttgtgtagacaccctctttgggtcccatgaaggagttgggttgaagtaacaagatggtgggcttttctggaatttttttggccatgggttccttcactggaccttggactttgggaatgattccttagtcatacttg

SEQ ID NO: 166528 - DNA, 623 bp, Homo Sapiens
tgtatcgctgttctagaggtatccttgtactgagacacgaactcatagtatatttcacatcatctgaaggttggacaaggcccaggagtacaagctcaactgtggtgctgtgaccttagctgtaagacttccagcctgcacatcaattaaccatgcgtattctaaggaatcgcttcccaaaggaagaccttctgctgagaacatagcgtgtgctctcagctggagacctgacaaatcgatgtgaccttccctgagtacttcatccacagggggtcgctgctgatagttatcactgacaaacacattcaggggtgacaggataagtcgcagcatggtctccctaaatcctttttgcatttcaaaacatagtctttccaagaaagctgtaaggcattcaggaccatccagtagtcccatgaacaggaagacgcccatgaactttgtaccaaatcacacacagtacagtactatcccaaggacgcaagcaaagtggatgaattgacttggttgaagcttcattttccttttggtcattttccattccaagagcagtccaaccagagctggctgatgttgacagtgacacaacaggacttgagataacgtcttcaaaatgcatataa

SEQ ID NO: 166529 - DNA, 568 bp, Homo Sapiens
  misc_feature (445)..(445): n is a, c, g, or t
cattggataagcggatgaggcttgtaagtaggcctaggacctgaggcactggacgctggagattttgtagtggaagaagtcgacactttaagacactttggaactgggggatcccaagtactgttactgtcacagacaattgtgtcgctgccatcgaggtaaaaacccttatcgcattcaaacataactgttgctttgtagtaaaatttttttccaaatcctgatatctgttttccattttcgactactggaaatcgacatttgaccactttacactctggagcagcacgactccacactgaattgtcaccacaataaatcgtgctctctccaataagtgaaaatggatctggtccaggtgcaggatcacaactataagttactgcatcaagatacccaaatacttctacttcactaaaggtgtgttttccattttttatttttnggaggtggtgtacacaaaaccttttcacatattggggggcttaccgctccaaattgctactgatcctttaaggttcacaatatagaatttcttcaacaattaaggtattaaccctcattacaa

SEQ ID NO: 166530 - DNA, 608 bp, Homo Sapiens
cttggttgtagaagaattctgaactgttcaagttaaccaacttggttcattttaaatcaggcaaaagccacagtgggttcccctgagaagcttagtcaaagacttctggtcaaggttatgaccgttctgaacactgaatatttctccgcaaggatgtccacaaacagctacttgaatgtatgatggtgtatgcttggtcctggggaatccaccggcaaggaaaaaaaacctttactctttcctgtgctgcagtcggctttcagaaatgaaagaggtggcccggactgtattcacctacgtcctggggttgaagaccaaattcccccaaaggctctcggaatccagactcatgagaaggaacagacactgtccagtttgcctttgttggcagatgtttcttgtgtgaatgcagaccataaatagtaattgaactacagtgcaatacggcgctggttcctaaatacaagtctgtgtgaagatggtgagattctacaactatctccagtagttgtcctgaatatctgtgtttgggagtacccacgcttctgaacagctgttttccgttacgaacctgaatcaaattaaacatcgttcccagttgaaggatt

SEQ ID NO: 166531 - DNA, 1073 bp, Homo Sapiens
gaccatatggttggacgatggggcaaggaaggaagcacttgagtgtccctagcttaggcagccggggatgagacacaggcaggacaacagcacccccgcatagtggggctagaatgtgggacaggggacgggcttatcctcggccagtgactaggaccagccccatggcaatggtgcctgtctccagccttagcaaatcaagtgtgcaacaagcacagggtgtcggcagacctgggctctagccttacaagctctgccagaacttgaatcacacagagctgtatcaccatggtccagccatgtcctgccttggcctgtttcctcctctgtcaatgagggctttgaataagacctcctaggtcatgaaaaggactctgcaggtgaagggaactccaggacctgctcttggcagttaagcagaccctggatggaactggtatgggatggggtgaagtgggggatggaggaggaaggtgttcttgcatggaacctatccccacaaacactacagagtgaggaaaggccactggaagcccttctttgcccagaggaagaaaggccacagagagagtgaatgtggcttggtgcaatcccttcacatcctccaccatctgggtaacacttggcaaggagtggatgggtggcattgtgcaaccctttatgttcttccctgggggtggcactcaaggcctcttgtggcttctgccttcagccttcagtgtagggtcaagagtgttcttttcactgtcgtcctgttctgggaacagcacaagactctgcctggctggcacatgttagttggtgaggaaaggacagagtgggtgagtaagcagacagggaggtaagagtgactctctggctttctcctcttcctcttcagagagcagctcaatcaactgagtcgcagatctcctccaccacagcattgaagatgtgtggctggtcagcatagacatggtgggaggcacccttaatctccatgtcacggacataggaatccggccgctgcatcttcaccttttttcccgtactggatgctatccagtcgtccaaccatatggacgagctcgatc

SEQ ID NO: 166532 - DNA, 992 bp, Homo Sapiens
  misc_feature (951)..(951): n is a, c, g, or t
  misc_feature (954)..(954): n is a, c, g, or t
gtggtagttattccggctggagtccccagaaagccaggcatgacccgggacgacctgttcaacaccaatgccacgattgtggccaccctgaccgctgcctgtgcccagcactgcccggaagccatgatctgcgtcattgccaatccggttaattccaccatccccatcacagcagaagttttcaagaagcatggagtgtacaaccccaacaaaatcttcggcgtgacgaccctggacatcgtcagagccaacacctttgttgcagagctgaagggtttggatccagctcgagtcaacgtccctgtcattggtggccatgctgggaagaccatcatccccctgatctctcagtgcacccccaaggtggactttccccaggaccagctgacagcactcactgggcggatccaggaggccggcacggaggtggtcaaggctaaagccggagcaggctctgccaccctctccatggcgtatgccggcgcccgctttgtcttctcccttgtggatgcaatgaatggaaaggaaggtgttgtggaatgttccttcgttaagtcacaggaaacggaatgtacctacttctccacaccgctgctgcttgggaaaaagggcatcgagaagaacctgggcatcggcaaagtctcctcttttgaggagaagatgatctcggatgccatccccgagctgaaggcctccatcaagaagggggaagatttcgtgaagaccctgaagtgagccgctgtgacgggtggccagtttccttaatttatgaaggcatcatgtcactgcaaagccgttgcagataaactttgtattttaatttgctttggtgatgattactgtattgacatcatcatgccttccaaattgtgggtggctctgtgggcgcatcaataaaagccgtccttgattttatttttcaaggtcccttctgtaaaacaaacaaaaaanaanactccaaggcattctattgtcggggggcgggaaaaaat

SEQ ID NO: 166533 - DNA, 987 bp, Homo Sapiens
gggactctcgcgaggccccagagagcaggcgctgggcagtgtggaggtcgttggagtcacttccgcgtcaccagctcctgtgcctgccagtcggtgcccctcccgctccagccatgctctccgccctcgcccggcctgtcagcgctgctctccgccgcagcttcagcacctcggcccagaacaatgctaaagtagctgtgctaggggcctctggaggcatcgggcagccactttcacttctcctgaagaacagccccttggtgagccgcctgaccctctatgatatcgcgcacacacccggagtggccgcagatctgagccacatcgagaccaaagccgctgtgaaaggctacctcggacctgaacagctgcctgactgcctgaaaggttgtgatgtggtagttattccggctggagtccccagaaagccaggcatgacccgggacgacctgttcaacaccaatgccacgattgtggccaccctgaccgctgcctgtgcccagcactgcccggaagccatgatctgcgtcattgccaatccggttaattccaccatccccatcacagcagaagttttcaagaagcatggagtgtacaaccccaacaaaatcttcggcgtgacgaccctggacatcgtcagagccaacacctttgttgcagagctgaagggtttggatccagctcgagtcaacgtccctgtcattggtggccatgctgggaagaccatcatccccctgatctctcagtgcaccccccaaggtggactttcccccaggaccagctgacagcactcactgggcggatccaggaggccggcacggaggtggtcaaggctaaagccggagcaggctctgccaccctctccatggcgtatgccggcgcccgctttgtcttctcctttgtggatgcatgaatgggaaacggcagggtgctgtggaaatgtccttctgttaagtccacaggaaacgggaatgtcttacttttcaa

SEQ ID NO: 166534 - DNA, 581 bp, Homo Sapiens
cgagtgggtccctgctcactttggacagttggagtgcctcaagcttattgcctctcaaaaaatttacagacaaacgcattggctatttaggggcaatgctgctgttagatgaaagacaagatgtccatcttctcatgaccaactgtatcaagaatgatcttaatcatagcacgcaattcgtacaggggttagcactttgtaccctcggctgcatgggctcctcagagatgtgcagagatcttgcaggagaggtagagaagctcctgaaaacctccaactcttacttaagaaaaaaggcagcactgtgtgctgttcatgtcatcaggaaagttcctgaacttatggagatgtttttaccagcaacaaaaaatttattgaatgagaagaaccatggtgtcctccacacatctgtagtcctcctcacagaaatgtgtgagcgaagcccagacatgcttgcgcatttcagaaagcttgtgccccaattagttcgtattttaaagaacctcatcatgtccggatattcaccagaacatgatgtttctggtatcagtgacccctttttgcaggtacggtgtcgctat

SEQ ID NO: 166535 - DNA, 1141 bp, Homo Sapiens
gagaataaaaatcaacatagaagctgcagatgcaccaataaaaccaaagatattcctaatagtggggacaaagatgacaagtaaattggtaaatgccaagatagacactgtaatgagactatgacgccaccaactgtaaatcttttgatgcacacaacaagtgagttacagaactccggattgggaaaataactactggtactgtcagggtcacagccattaacacagccagacggacaatgagaagaagaatatcagttcccaagatagaagagtaggtatgaagcaattctgactcaacatgttcgtaaaatgttaggtatccaaagagggcggcaagcagatacatgagaaacatagcaaaaaatgaaatcttggacacattcatcattcttctacggctgcggtctttcagttcttcatagatgggaagaacagcaggatgacagacaaatgaaaagatcagaattggcacagcatagacagtctgtgagttgaaaataaaatagtgaggtctgcaagagtcattttcagtcacgttatgtgacaaagcaggtacaagagctgttggctgtgttaaggtggtgtttattgtttcgttaattatcaaagcagcttccacaggacacggaacctgaaatttcttgcaaatgaccacaatcagaaagaacaccatacacaacaaggaaaggccactggtatatcccaaatatcctaaatttctaaacagcgacaaaggaagaatgaccaccaatgacaccaacagaaccaaatagttcccgttcagataccacaatccagttttatcttcaatgttcgttaatgcctggatcaccaaaggcaactcatatttcactatgaagaggtagcttgacatagctccaatgttctgcattgtaattgatccagatgctgcaagctttccaactaatccaaatgccttatatcccaattgttcatataataaagaccctccttcattggcagtcttcaaaaggagatgaacagaatacagggaaaatattgacacaaatgtcaagagaattatgatgagagaaggaaaaggcatagggttataaataagcatggctatatttaaacacaactcgttctggaactgaaatgagtagctcctgagatc

SEQ ID NO: 166536 - DNA, 608 bp, Homo Sapiens
agttcttcagaaggaccagcaggacactactggcacccactgcccctccagtatgtgaagcataatgccgttgctttctacacgaaccatacgtttgtttcctttccacaacaccccacgccattgcatatttaccctcctttatcccaagacatctctgtgattagggactggggtccacatcataaccattgtttctggtttgaggtatccaggtaaaacattttcatttgagttcttaaacagcccaacttggtaaccataaagcattgcattcccaaatttcagaaggtcacccactgtagacagaaatccaccaccagcccatttataggagttatccacgtaaggtgtgttgacaagacgtttctttttattgtaaacataaaatcttgctctattgtaaatcactggctcgttttcttcctgcacagtcgtcagcatatccaagtcatggaatattttctgcatatagtccaaatatttacatcctgaagctctctctactatggctgccagtagggtatagccaaaagttgaatacaaaaactgactaccaggtttgaagaacaaaggatcatttttaaataatcttagggattcaattg

SEQ ID NO: 166537 - DNA, 422 bp, Homo Sapiens
atagcgacaccgtacattctgtctggattggtggcatcacctgaagtgttaaacagacgaagttctaaaggaaaaactacccggtaagagagttttgtatatcgatgaagttgatccatatatttaaatctcttcaggtgtagagctagaatcatgggcagttttttaactttcatccgtttgtgtgcttcctgtttgctgcgacactcttcacagtaatacttgtattcactgcacagagtttctgtgttgctgaaaccccttaagcagtgagtaattgatgtattttgttccacgtcaacagaaaggtctaaaaaatcttcatctttgctgcttatagtttcacaagtaagacatctggtttcattagttaatgttccctgaaaaatctcacgaacccacgttgggtacggtgtcgctat

SEQ ID NO: 166538 - DNA, 501 bp, Homo Sapiens
atagcgacaccgtaccacgatcacacaccttattatcttccttcatgtattttcatgggcacataaacatacacatgtgcctctttttatcattgaagacagctgtggtcatcccaccctacctaggtatttcctcttgttcacattgccaataattataaaatacagctcgatttcagagatgaaaatatgaaaaaatacgaaaattttaaagtgccatcagtaacaagctgcagggaaactgtgctcacggaatcattgaaatgtggtagctgtgccttgccttgctcttttcttttctcctctaacaatctgacctggtgacctctcctgtgagcacaccaggactccttcaccttcacagcagcacagcacagtgtccatgccacacccgtggtctccatcgtaagaaggcactgtgggagatgctactcgttgtagtttcactttgatgctataagcagtgctgcattcaccatgactgtctgtacggtcgcttat

SEQ ID NO: 166539 - DNA, 407 bp, Homo Sapiens
ccaatttctcccatttggaacagctgtatttacccaatacctgtactctcattgtatctaggaagtaatcagcttgctttttattttacaggctcataggcaaaaggagcttgccttgtctcagatgagactttggactggtagacttttgggttaatgctgaaatgagttaatgagtttgggggactgttgggaaggcatgactgggtttgaaatgtgaggacatgagatttggaggggccaggggcagaatgatgtggtttggctgtgtccccacccaaatctcaacttgaattgtatctcccagaattcccatgtgttgtgaatcatgggggctggtctttcccgtgctattcttgtgatagttaaaatgtctcaggagatctgatggggtacggtgtcgctat

SEQ ID NO: 166540 - DNA, 398 bp, Homo Sapiens
  misc_feature (254)..(316): n is a, c, g, or t
  misc_feature (360)..(360): n is a, c, g, or t
tcgatacgactttttccactcttcttttttctcatctcttttctgggttgcctgtcggctttcttatctgcctgttttgcaagcaccttctcctgtgtccttgggagccctgagacttctttctctccttgcctccacccacctccaaaggtgctgagctcacatccacaccccttgcagccgtccatgccacagccccccaaggggccccattgccaaagcatgcctgcccaccctcgctgtgccttagtcannnnnnnnnnnnnnnnnnnnnnnnnnnnnnnnnnnnnnnnnnnnnnnnnnnnnnnnnnnnnnnccctctttctcccagtgggagggaaggtgtgcaagtgtaatttnccctttaaattaaaaaacatatatatataaaaaataag

SEQ ID NO: 166541 - DNA, 877 bp, Homo Sapiens
aattaggcgagctgctggctgactgcagcgagggaagctggtctaggtcccgtagacaactgttcagagctgcaatggccgtttcacactccagctgccctggagccttgtccctcatgcttgtaattagcttcttgatggagtctgagacagtacgggagtggccggccagcaccgaccagctcggggggtcccggggattgactgcgagggcccgggctgtctggatgagtcccccggcactctctaacattgtcttggcagagatcacaatgggctccatggcagcccgaccctcagggctgatctgggcaggaatgctggagaactcagggttggacgcaaaggcactcagattgtccacagcctccagcagaggggctgttgctgctcggcactgggcacggttctcctctgtgaaggccccatctagcgccttgatggtcttgacaagattagctgtgctgttggccacctccttggctgactgtacaaactggcgcttggcagtaggattggtggtacgggcagaagccaggcgacagctgttacacagtgcagaggtgtgtttagccacaatggtggctgcagagagcacctgggcctgggtacagccaggctctcccaaactctggcaggccatctgaattgcctggtttgcacgggcaaactgtgtgggctccactagcccttgctgtccagcttggctattggggtcagagacaccaaccagatatgcagcctgtgcagctgcctcggtgaagccacaaagtgcctttgaggctgtggaaatggcatctcctaactctggcaggtttccgttcttggccggacgcgtgggtcgacgatatcccgggaactccggaccggtaccaga

SEQ ID NO: 166542 - DNA, 609 bp, Homo Sapiens
gggccgccttcggggcccggatctcaaacagccgggaagaagcaccgtggctgctattatctgctctccgcgcctgacccctcccaggactcgtgatgccaaggccgctgcgagcggctacgaagagtcggggttgagccccagctgagccgagggctcgcactcttctggtctcccaggcccaacccacctgaagaaatgagtggtggattggctccaagtaagagcacagtgtatgtatccaacttgcctttttccctgacaaacaatgacttgtaccggatattttccaagtatggcaaagttgtaaaggttaccatcatgaaagataaagataccaggaagagtaaaggggttgcatttattttatttttggataaagactctgcacaaaactgtaccagggcaataaacaacaaacagttatttggtagagtgataaaagcaagcattgctattgacaatggaagagcagctgagttcatccgaaggcgaaactactttgataaatctaagtgttatgaatgtggggaaagtggacacttaagttatgcctgtccgaaaaatatgctcggagaacgtgagcctccaaagaagaaagaaaaaagg

SEQ ID NO: 166543 - DNA, 465 bp, Homo Sapiens
cctacgcgcagctcctgcaggtggcttccagaacatcgcctgtctccgtagcaatgccatgaagcaccttcctaacttcttctacaagggccagcggacaaagcacaagtggcgaatcatcagtcccaccctgctagcagaatatgcctacgtgctaagagttggggggctggtgtataccataaccgatgtgctggagctacacgactggatgtgcactcatttcgaagagcacccactgtttgagcgtgtgcctctggaggacctgagtgaagaccccgttgtgggacatctaggcacctcaactgaggaggggaagaaagttctacgtaatggagggaagaatttcccagccatcttccgaagaatacagatcccgtcctccaggcagtgaccacccataccagcctgcctggtcactgactgcttactctacctttggccgaccgtggatcctctagatca

SEQ ID NO: 166544 - DNA, 791 bp, Homo Sapiens
gggcacgtggatttggtagagaaaccccggactgggatcatggcagccgagactcggaacgtggccggagcagaggccccaccgccccagaagcgctactaccggcaacgttgctcactccaaccccatgggcggaccacaaccctgcgctaccctgtgaagccagaggagatggactggtctgagctatacccagagttcttcgctccactcactcaaaatcagagccacgatgacccaaaggataagaaagaaaagagagctcaggcccaagtggagtttgcagacataggctgtggctatggtggcctgttagctgacaaagatgttcttcctcttccccgacccacatttcaagcggacaaagcacaagtggcgaatcatcagtcccaccctgctagcagaatatgcctacgtgctaagagttggggggctggtgtataccataaccgatgtgctggagctacacgactggatgtgcactcatttcgaagagcacccactgtttgagcgtgtgcctctggaggacctggatgaagaccccgttgtggggacatctaggcacctccactgaggaagggaagaaagttctacgtaaatgggagggaaagaattttcccacccatctttccgaaagaattaccaagattcccggtcccttccagggcaggtggaacttcccccaaacccagccccctgccctggggtccccttgaacttggcctttaaattcctaaccctttaaaccctggggaaccctcccggttacttcccccaggggggaaacctaa

SEQ ID NO: 166545 - DNA, 790 bp, Homo Sapiens
gggggatttggtagagaaaccccggactgggatcatggcagccgagactcggaacgtggccggagcagaggccccaccgccccagaagcgctactaccggcaacgtgctcactccaaccccatggcggaccacacgctgcgctaccctgtgaagccagaggagatggactggtctgagctatacccagagttcttcgctccactcactcaaaatcagagccacgatgacccaaaggataagaaagaaaagagagctcaggcccaagtggagtttgcagacataggctgtggctatggtgggcctgttagtggaactgtcaccgctgttcccagacacacttattctgggtctggagatccgggtgaaggtctcagactatgtacaagaccggattcgggccctacgcgcagctcctgcaggtggcttccagaacatcgcctgtctccgtagcaatgccatgaagcaccttcctaacttcttctacaagggccagctgacaaagatgttcttcctcttccccggacccacatttcaagcggacaaagcacaagtggcggaatcatcagtcccacccctgctagcagaatatgcctacgtggctaaaagttggggggctggtgtataccataaccgatgggctggagctacacgactggatgtgcactcatttcgaagagcacccactgtttgagcgtgtgcctctgggaggaccggagtgaagacccccgttgggggacattttaggcccctccactgagggagggggaaaaaattcctacgtaatgggag

SEQ ID NO: 166546 - DNA, 558 bp, Homo Sapiens
gacggggacatgtatgaatctgcaaacaatcgagcggaatactaccaccttctagctgagaaaatctataagatccagaaagaactagaagaaaaacgaaggaccagactacagaagcagaacatgctaccaaatgctgcaggcatggttccagtttccatgaatccagggcctaacatgggacagccgcaaccaggaatgacttctaatggccctctacctgacccaagtatgatccgtggcagtgtgccaaaccagatgatgcctcgaataactccacaatctggtttgaatcaatttggccagatgagcatggcccagccccctattgtaccccggcaaacccctcctcttcagcaccatggacagttggctcaacctggagctctcaacccgcctatgggctatgggcctcgtatgcaacagcctttccaaccagggccagttccttcctcagactcagttcccatcacagggaatgaatgtcacaaatataccctttggctccgtcctgcgtcaagctccagtgtctacagccatccagggatcctctagaac

SEQ ID NO: 166547 - DNA, 1216 bp, Homo Sapiens
  misc_feature (1141)..(1141): n is a, c, g, or t
cgagctcggtacccatagcgacaccgtactcccaaagtggctgatccttggggaggttcttacatgatggaatgtctcacaaatgatgtttatgatgctgctttaaagctcattaatgaaattgaagaaatgggtggaatggccaaagctgtagctgagggaatacctaaacttcgaattgaagaatgtgctgcccgaagacaagctagaatagattctggttctgaagtaattgttggagtaaataagtaccagttggaaaaagaagacgccgtagaagttctggcaattgataatacttcagtgcgaaacaggcagattgaaaaacttaagaagatcaaatccagcagggatcaagctttggctgaacattgtcttgctgcactaaccgaatgtgctgctagcggagatggaaatatcctggctcttgcagtggatgcatctcgggcaagatgtacagtgggagaaatcacagatgccctgaaaaaggtatttggtgaacataaagcgaatgatcgaatggtgagtggagcatatcgccaggaatttggagaaagtaaagagataacatctgctatcaagagggttcataaattcatggaacgtgaaggtcgcagacctcgtcttcttgtagcaaaaatgggacaagatggccatgacagaggagcaaaagttattgctacaggatttgctgatcttggttttgatgtggacataggccctcttttccagactcctcgtgaagtggcccagcaggctgtggatgcggatgtgcatgctgtgggcataagcaccctcgctgctggtcataaaaccctagttcctgaactcatcaaagaacttaactcccttggacggccagatattcttgtcatgtgtggaggggtgataccacctcaggattatgaatttctgtttgaagttggtgtttccaatgtatttggtcctgggactcgaattccaaaggctgccgttcaggtgcttgatgatattgagaagtgtttggaaaagaagcagcaatctgtataatatcctctttttgttttagcttttgtctaaaatattattttagttatgatcaaagaagagagtaaagctatgtcttcaatttaatttcaatacctgatttgtactttccttngaagctttacttttaaaataccttacttataggcctggtgtcatgctataagtatgtacatacagtttcaccttc

SEQ ID NO: 166548 - DNA, 673 bp, Homo Sapiens
agtgatgtgaatgttaaatacagtaaaatgttaagattgtcatctactttttaaaaaaaaatatcaacttggaattgttttttaaaggctcaatcaaggaagtgaggtgtgcaataaggtagcaagtaaaacgcagttgcgtttttatgtcatgttagagatccatacaattttccactcacgggatttttgttgatggctgaattcttgtggattcataagaggatcatgcccttagcaagtacttttgttttgttttaaattaagagattcccaaatgcctttttccccctcatcttgaaatgagatgagtttttatgtgtaagcaatatttatttaactattctataaaattattgagtgcctactgaggcctttaagcaccgctaacattcctttccatcattcttttaaatgacataaaataattgtgcaatgttcctgatgatgtaccccacaagctgcattcaaactcaaatctgtgggaatgagtgactcgacaaaatgtaattcggatcagatcctcatcccctgactgtgtgaaaaaagtactctccttctagtgaaggattgtcacagagtttcactggatgaaactatgacccagtattcttactgtattttacatatgcctgtaaattatttgcaaaaaagaagaagaagaggaagaaag

SEQ ID NO: 166549 - DNA, 395 bp, Homo Sapiens
tacagatgaatgtagattcctgtatacaacagagggatgttgattccacctcttgattgaaagtgtgtcaaactgctgcactcttatattaccatgtcataaattaaaaaattatagcacagagcagttaagcgtcttgtccagtatgacacaaagtgatgggatagggatgacggtaaatgtctttttcattcttataacaggattagtttttagaacaaatatgctgaagtttcaggtttgagtgatgatggactacaatacattgtcacactcttttaatggtataaaacctctaatgccaacgcagttgcatgtatggagcaaaatagatcaagtactaattatagaatgttctataacacagaagtgaaaagactttcttagattttgaa

SEQ ID NO: 166550 - DNA, 462 bp, Homo Sapiens
  misc_feature (301)..(376): n is a, c, g, or t
tgtctggtatcttggtggatgtcaagaagacagggttcagcaagtgcctatccctctctacctagcttcagggcctattcatgtggtctcttcagcaaagtagccagactttgtaacaagacagttctgtcatttcatgagatgaagtaaccctaccagtaaagtctgagtcaagaaaccagcacagcagtacgtctaccatattctactgggcgaagcagtcacagagggatgtagattcctgtatacaacagagggatgtaaattccacctctttgattgaaagtgtgtcaaactgctnnnnnnnnnnnnnnnnnnnnnnnnnnnnnnnnnnnnnnnnnnnnnnnnnnnnnnnnnnnnnnnnnnnnnnnnnnnnaagtgatgggatagggatgacggtaaatgtctttctcattcttataacaggattagtttttagaacaaatatgatgaagtttcagg

SEQ ID NO: 166551 - DNA, 377 bp, Homo Sapiens
agtgttcttccagaaatatgtatatgtttgtgaatgtataaaaccataaagcacagattctggttactttttaaagaggtaatttatattacttctgagtgaataattttgcctttcactgtgataaatataagtgggtcatgtttacagtattcccttagaagccttcaacttttcataactctcctaggaaaaatcccatagcaaataaagttgggggtgggagaagaatctcctttaaagctttcaaatcataaagttgttcctgtttacacattgaggagcatacttcaaggacatgaagggatctgaattcatgagactaaggcaagcatcactcatcagaaatactcaaacattttataaacacaagaatg

SEQ ID NO: 166552 - DNA, 703 bp, Homo Sapiens
gggagacgctggcactatggtcatggcggaggggacggcagtgctgaggcggaacaggccgggcaccaaggcgcaggatttctataattggcctgatgaatcctttgatgaaatggacagtacactagctgttcaacagtatattcaacagaacataagagcagattgctccaatattgacaaaattcttgaaccacctgaaggccaagatgaaggtgtgtggaagtatgaacatttaaggcagttctgccttgagctaaatggacttgctgtcaaacttcagagtgaatgccatccagatacttgcactcaaatgacagcaactgaacaatggatttttctttgtgcagctcataaaactccaaaagagtgtcctgctatagactatactagacacacacttgatggtgctgcatgtcttctgaatagcaataaatattttcccagcagggttagcataaaggaatcatctgtagcgaaactaggatcagtatgccgtaggatttacagaatattttcacatgcttattttcatcatcggcagatatttgatgaatatgaaaatgaaacatttttgtgtcatcggtttactaagtttgtgatgaaatacaatttgatgtccaaggataacctgattgtaccaatttttagagaggaagtacagaattcagtttctggggaaaaagtgagcatgaagggaatc

SEQ ID NO: 166553 - DNA, 1058 bp, Homo Sapiens
gcaggctgggtacctggtgcggagattccgggatgatcgtcgagccacgcgtgcgctccagccgcctagacgctggcactatggtcatggcggaggggacggcagtgctgaggcggaacaggccgggcaccaaggcgcagtatattcaacagaacataagagcagattgctccaatattgacaaaattcttgaaccacctgaaggccaagatgaaggtgtgtggaagtatgaacatttaaggcagttctgccttgagctaaatggacttgctgtcaaacttcagagtgaatgccatccagatacttgcactcaaatgacagcaactgaacaatggatttttctttgtgcagctcataaaactccaaaagagtgtcctgctatagactatactagacacacacttgatggtgctgcatgtcttctgaatagcaataaatattttcccagcagggttagcataaaggaatcatctgtagcgaaactaggatcagtatgccgtaggatttacagaatattttcacatgcttattttcatcatcggcagatatttgatgaatatgaaaatgaaacatttttgtgtcatcggtttactaagtttgtgatgaaatacaatttgatgtccaaggataacctgattgtaccaattttagaagaggaagtacagaattcagtttctggggaaagtgaagcatgaagggaatcatacggaaccactgtactggttcattattaatttcacacttatgtactgtatatttcattgtaggacacagtcaagccctgtatccatattaatgctcttggtgacgcataggttcgcgcgtgcagggttgcgcggcaaatggccaagacattgaggtgatacaaactgatatgcacagagagaaccgaaggatcactatgatacatacgccaacgccgtaacagacctaggcgataggagaacacaccacaggacaaagaacgggataatacagggcagagccactaagaagcgaaacataacagagaaagcacaagtacaaatacgcagcacaacccaagccacagaaaacaa

SEQ ID NO: 166554 - DNA, 514 bp, Homo Sapiens
tacagagtgaatgtacagagtgaatgtaatcattaaaaaatgactttcagaaacatatacattcaaagaaaaccttttagtattctaagcattgaatactttgggggaagaactggtttcttttttggattgtttaagaagtcagtcttttctcaacagtttcttgataagcaataaatcttcgcaaattcattttcacattgtcaagaacacacagctgatctgtgctatagttacctctcccttctttacgtatcttcattttaaagaccggctggaattctttcagagcagataataatttaatttgaatcgaggctctttcggcttctttaccatctgcaaaaacatcaaagagggcatccaaagcttctcctgctaccacaagggaaggatctttggtggtaacttcaagcagaaagcacccaatgttcttaagagtttcaagtgtaccatcttctttggcaaggacgctgccagtgattcctaaaatgctaacgacattcactctgta

SEQ ID NO: 166555 - DNA, 761 bp, Homo Sapiens
  misc_feature (344)..(345): n is a, c, g, or t
  misc_feature (716)..(716): n is a, c, g, or t
ggtgactctgagcatcccgtttatattggcgcaaacaacaaaaggacaactggtccccgatataaatggactagctacctggacataatatccttgtgaggcatccttaaaggacaaattgcagctggtatttgggtgaatgttgttgctctgtgcctgttgaatgtccatgctacaagaagttatgagccttgttctaagtacagatgaaccttgtatttgtgtaatctcccaagggagagctatggtttacattcaattttttggtctttctgctatgaaacgtgtttattttgcctctgtcaatgtgtttgcaaccttaagtaaggaaagggaaaaaaaanntagccctctgaactctgatcttttgccgcttctgtagattttgattgtgaagttgggagtgaggacattcaaaagcccatggtgaatgcatatgcctttagaatattgtgcctgttttaaaatgtttgagcttttaaaatacgttgttaaaacatgaatccatttttgtaattgtataaatactcataactaattttgaatgctactgattgtgtaactgaatttttgtatccaaaaatacattccttgagtactacttttcctaccttgaaaatctatttcatttactaaatattgttttctttatgctaacttaactttaaaaggaatgttgccaagctgtctctcctcccccatcacaattgttagtntttttttgctttctttcttcaataaatgagagcaccaccaataca

SEQ ID NO: 166556 - DNA, 537 bp, Homo Sapiens
ggtgttcatgaacaagtaccatggacggaagctatcggtgcagggcttcaaggaggcacttttccagttcttccacaatgggcggtacctgcgccgtgaactcctgggccctgtgctcaagaagctgactgagctcaaggcagtgttggagcgacaggagtctaccgcttctactcaagctccctgctggtcatttatgatggcaaggagcggcccgaagtggtcctggactcagatgctgaggatttggaggacctgtcagaggaatcagctgatgagtctgctggtgcctatgcctacaaacccatcggcgccagctctgtagatgtgcgcatgatcgactttgcacacaccacctgcaggctgtatggcgaggacaccgtggtgcatgagggccaggatgctggctatatcttcgggctccagagcctgatagacattgtcacagagataagtgaggagagtggggagtgagcttgctagctgctccagtacttgagagcgactctgtgtcccaggcacagctgtgctgcgtca

SEQ ID NO: 166557 - DNA, 355 bp, Homo Sapiens
tgtttgattctatgccatttggacccaattctgattacttacagaagaaggactgatacaaagaaagtgcatgaggcaatgtcagtattatctgacatctttcttttcaggtcatgtgtccctgaaaagttaaatgtaaaccagattttggtaaatcccatctttcagaagtgaagagggggctagaaggactctgagaagttggtagaagaaaactcccacttgtgaatatttttgtgagaaataaattcttttattacgatttacctctaatttattacacttagtaaattcttccagatttttctatttgtttgacacttccttaaagtaaggaatacacattcactctgac

SEQ ID NO: 166558 - DNA, 440 bp, Homo Sapiens
ggtgtaaccggatcaggttacagctgagaagcccataccactatttgttgagaaatgtgtggaatgtattgaagatacagggttatgtaacgaaggactctaccgtgtcagcgggaataaaactgaccaagacaatattcaaaagcagtttgatcaagatcataatatcaatctagtgtcaatggaagtaacagtaaatgctgtagctggagcccttaaagctttctttgcagatctgccagatcctttaattccactattctcttcatccagaactattggaagcagcaaaaatcccggataaaacagaacgtcttcatgccttgaaagaaattgttaagaaattgcatcctgtaaactatgatgtattcagatacgtgataacacatctaaacagggtgagtcagcaacataaaatcaacctaatgacagcagacaac

SEQ ID NO: 166559 - DNA, 389 bp, Homo Sapiens
atgtcagctaatgtgttctcaccaaatgtcaagttatattaggtctggggtgccaccaaagaacgacgcaatagtttaacatgaccttgccaataatttccccagaacattatttcggctgaacattattcacagacatatttttgggctgaacatttgctctgacctgcctacatttactataccttgtatcttagtcaaatgtatctttaattatggggctaaaagaacagaagtatccagtgaagtatctttagtgatccaagtaagattccctctcatcaaagagtttcacttaacatggtttccgaagactttaaaaaataaaacagcaggcgctgagtgttgtgtttactttcgctctgcctgtgttcacattcactctgtac

SEQ ID NO: 166560 - DNA, 367 bp, Homo Sapiens
  misc_feature (197)..(255): n is a, c, g, or t
gaccgtactatgaggaggtgtgtgttgtactaggctacaatgtaaaatgtttttgtaactgctagtcagaagctagaaaacaagttaaaagccagtgctattatgtttacagcaaaattccattgaaattcttggacaactaaatggtacatcattttggcccatagcacaaaggaatgtgtttcataaagaaggtnnnnnnnnnnnnnnnnnnnnnnnnnnnnnnnnnnnnnnnnnnnnnnnnnnnnnnnnnnnatatataaaaaacaaacggggggcagggaagaaggcaagatttatgacatccttcactactgactggcaaaaaggagtagccatccccaacgtttttgacattcactctgta

SEQ ID NO: 166561 - DNA, 505 bp, Homo Sapiens
tacagagtgaatgtagctacaaatggttgttgctgaagggaaaatttcaaactttgaagatgtcagaaacaaattaaaactacaatgtaatatttaaagagtttttaaactacagtaattttggaactactttaacaaggataaccaatcaattcagatgtgtaatttaaaagtacaaaatgcaaggtaacaggttaccaaagattttaaattaaagaaacagaaatttgtcactatgtatttctgaaccttggctgaaagtaaaccacacaaatcaaaaccaaagtgagatgccacctcgtgcccagcaggatggctattattttttaaatgcaaaataagtgttggtgaggaggtggagaaattggaacccttgtgtattgatggtaggaatgtaaaatggtgtacctgttgtggatccaacagttccacatctaggtatatatccaaaagagttaaaagcaggaactcaaacagatacttgttcattaacattcactctgac

SEQ ID NO: 166562 - DNA, 356 bp, Homo Sapiens
tacagagtgaatgtcaaaactgtcacgattttacaacttctcccaaattttccttctacatataggaagtatatttcatttggtacatttggaccaatcaagtagaccacatgggaaggtaatcaagaaagaatggctcgatgtacctgctgctgcaaatctaatttaggaaatggcgccccaagatataggctgcatattatctactttcctagccacattcaaatacaatataaactttagtctgtgacatcgcacagtaaagaaattacctttatatctactaacctctaactgaaatttaacattctctttcactctgattggaggcaacaaacttacttcattagtttaat

SEQ ID NO: 166563 - DNA, 359 bp, Homo Sapiens
tacagagtgaatgtgttggaaccatgcatatcttcactacctgtacgctgacactgtttccagagctctagaagccaaaacagcgcctgggtacaacatggattcttgccattgtgtttctgggctctttcagcatagctgtctgagctacacggttctggccaaactgatttacaaacacaacacagcattgcaaatcagtcacagtgcaagtctattcagggaaatttcatggattattctaatctagggacagtgttgggggttgttagcagagagctcccttagtctgaccagtcatgacgctgcttggggaaaaagcttccccggccctgcagcagcggccgtcgggtaccgag

SEQ ID NO: 166564 - DNA, 428 bp, Homo Sapiens
tacagagtgaatgtcttcattatcattttcataactgtctaattattttatgagttggcactttgattacttagtgcatgatccctttggcttacgcacctttatctcgttttataaattatatacagaggcagcctgattcttaggccatccaatggagcaggaaattatcttcactacttcgaacactaggggactgctgagagcacaaatgagagtgttttaaattgacttagtggctgggtgaccttggacagtcagcttaactcatgtccttagtgcttcatcaataaaatgacagtgataatgaaaatgcctaaaaacagggaactttgagggcccttttcggttgtgagaggttccataattttatctttcctaccaggataatctcatgtaaaataatggaggtaaatcaaatggctgaa

SEQ ID NO: 166565 - DNA, 590 bp, Homo Sapiens
  misc_feature (482)..(482): n is a, c, g, or t
  misc_feature (513)..(513): n is a, c, g, or t
  misc_feature (520)..(520): n is a, c, g, or t
tttcgggacaggctggcagatatgtcagaagagctgtgccctagctcagcggatacccccgtgcccctgcccttctttgtacgcacagccaaccagggcaatggcactggtgaggctcgggacatgtatgtacccaacccctcctgccgagactttgccaagtatgaatggatcggacagctgatgggggctgcccttcggggtaaggagttcctggtcctggccctgcctggttttgtgtggaagcagctttctggtgaggaggtgagctggagcaaggacttcccagctgtggactctgtgctggtgaagctcctggaagtgatggaaggaatggacaaggagacgtttgagttcaagtttgggaaggaactaacattcaccactgtactgagtgaccaacaggtggtggagctgatccctgggggtgcaggcatcgcgtgggatatggggaccgttctcgttccatccaactggtccanaaaggcacggctagaggagaacaaggagcangtggcanctatgcaggcaggtctgcttgaaagtggtaccacaagctgtgcttggaactttgcttgaccctggcaaga

SEQ ID NO: 166566 - DNA, 448 bp, Homo Sapiens
  misc_feature (34)..(34): n is a, c, g, or t
  misc_feature (65)..(65): n is a, c, g, or t
  misc_feature (74)..(74): n is a, c, g, or t
caaaaacggggtgaacatacttaatacaccgaanaggggttacggccctgaaacgtttaatgtcncccctaaanagctgaagacctaactgcagcatgtctgtatttggagatggggcctctacagaagtcattaaggttacatcggtcctgagggtggggccctcatccaacaggattcgtctttctgagaagagacgcaaggggctcgcctgctctccccccgtgcctgcaccagagaaggaggccatcggcaagccaaggagagccctccccagaaatcacacggaccagcaccttgatctgggacttccagaaaacagaactgtgaaaagacaagtttctgttgtttaaaccacccaatctgaagtattttgttatggcagtcctgggcagactaatacaatatgcaacacatttacaataaatatacaataaacttaaaaaaa

SEQ ID NO: 166567 - DNA, 411 bp, Homo Sapiens
  misc_feature (180)..(180): n is a, c, g, or t
gtgaatgctgcaagtcgaatctagagtatcccacagtgactgtatcaagtggctatcttcacaagtgctgatcataccacattcacttctgaaacacccttgtttgcgatcgctaacctcactgggactagagcaaccgcagtctattcagagaatggaggctcttcatttctttaattncctttactccaaactcagccctccagtttcttcagaatgtaacaccctgttaatcgtcactgtttccaataaggaaaaaaataagtcagtttttggcagcaccttcatctttctagacctcctcctattctgtccttgtggacttatgtttaacatagaaaatgaatgcgttcaaaacaaaaccactttctgcatttaaccagtcctggctctctctctgctgcctcttca

SEQ ID NO: 166568 - DNA, 420 bp, Homo Sapiens
ggcggatcctattataagtgaaggcagcaaggcatagtatttgaatggctacctttcattttaactctacttcttaaattcaaaattggatttgggtttgtttcaagttgtacacaatttactaacgaaatgtgcatctctcattcttcccccaaaagaaagaagtcatccactccagctacatataagtctccaatttctgtcttacaactaaacgtgaataccgaaataccactcattgaataaaaaaatgtacagagaattggcaggctgcatgtttatgtgaaccttcagaaaacatggaaacacgcagccccaactcaccaggaaaatcaacacttgtgatcagactattttgtgacatttaatgtctttaatacatttcacttcatatccagtattccagacattcactctgta

SEQ ID NO: 166569 - DNA, 1262 bp, Homo Sapiens
  misc_feature (56)..(56): n is a, c, g, or t
  misc_feature (73)..(73): n is a, c, g, or t
  misc_feature (95)..(95): n is a, c, g, or t
  misc_feature (120)..(137): n is a, c, g, or t
  misc_feature (456)..(469): n is a, c, g, or t
tccagcaaaaccactcccccagggggccattttacaaaatgcggagcaggggaagncaacacaaaaacagcancagataaatggggcaaacagancaacaaacacaagagttgagcagcnnnnnnnnnnnnnnnnnntgccatctacgccgttttagtgtgagggacactgggaacgatgcccagaggctgctctcctcccagcctcaaaggttgtcagctccaccagagcagggtcttctctcctcatgccaggaactgagagaagtgggggtaggggaccactaggtctttgccactgtatcttgagctgggggactcctaacttctccgagggccacaccccatgcctgccttccccaccccatggaggaatgtgtgcatgaacagaaaaggagaacgagcagcgctaaggtcctcatcaggccccaggcccatctctggcaggcagtgcttnnnnnnnnnnnnnngacaaataaagcccagtgcaggcctttggctgagaggaatgagaattgctaattaatcaccaggcccaagaggatatgaaagaatagcaaagagaagcaacaaactccaggctcttctacctttgagtaccatggcaatgaggatcccgccgcatcccctacccacaggctgagacagggcctcacttggatccttttatcatggaggaaatgaggtatagggctctgcgccttttcaagctttccttcaatcaagccaggaaggacaggggaataagggcgccgaaagttgaagaacacacggagtataatgtgcaacagatgggctgggggaggagggtaccaccaaagtccagactttcaggacagcccaaacttcaaatattctggtctgtcagataacatatcccaatttttggcaaaaatatggtcattaggagaaaagcacgagagaggctgagaaaggaccagtgactttggtatgaagaagatacgtcctgacagcatctctcacctactgtcttgaagccccaaatcaccaagaaactgccataaccaggaactctcctgcttcctcaggctatttggttctctgagggagaaggagttgggtaagtcttggaggaagcaaaggagtgggtacaaaaaggggaaaatccccatttattccctaaagctgtctcccagagcccataaaagggctattgcagggatggcaagaccccaattcctctggccacaaacctttaacacttgactccaaaaactaaaactggaggcctacactagtgga

SEQ ID NO: 166570 - DNA, 403 bp, Homo Sapiens
  misc_feature (25)..(25): n is a, c, g, or t
  misc_feature (110)..(110): n is a, c, g, or t
  misc_feature (127)..(127): n is a, c, g, or t
  misc_feature (146)..(146): n is a, c, g, or t
  misc_feature (169)..(185): n is a, c, g, or t
gcaaaaaacctagtggtccccctanccccaacttcctcctaagtccctggccatgaggagagaaaacccctgctctggtggagctgaacaacctttgaggctgggagganagccagcctctgggcancgttcccagtgtccctcanactaaaacggcgtagatggcaannnnnnnnnnnnnnnnngctgctcaactcttgtgtttgttgttctgtttgccccatttatctgttgctgtttttgtgttgtcttcccctgctccgcattttgtaaaatggccactgggggagtgtttttgctggatctgctccctctcgctctctcactccactactttttggaacaaagtgatggcagaatgcggtggtggtgggggtcttttgtactgttggattaataaaat

SEQ ID NO: 166571 - DNA, 610 bp, Homo Sapiens
ctacagagtgaatgtcagaaagtgtctctctcctagtgggcttttccgcaggccaagtccagcttatagacccaatcaaaaaagaaactagcaaactttttaatgaggaaatggcaagttcttagcgtgcgtgagccaggacgggtttctgcgggtgttcaactttgactcagtggagctgcacggtacgatgaaaagctactttgggggcttgctgtgtgtgtgctggagcccggatggcaagtacatcgtgacaggtggcgaggacgacttggtgacagtctggtcctttgtagactgccgagtaatagccagaggccacgggcacaagtcctgggtcagtgttgtagcgtttgacccttataccactagtgtagaagaaggtgaccctatggagtttagtggcagcgatgaggacttccaagaccttcttcattttggcagagatcgagcaaatagtacacagtccaggctctccaaacggaactctacagacagccgccccgtaagtgtcacgtatcggtttggttccgtggtccaggacacacagctctgtttatgggacacttacagaagatatcttccctcaccaacccctctcaagagcaat

SEQ ID NO: 166572 - DNA, 565 bp, Homo Sapiens
tacagatgaatgtattcttcagcatctgctccatcacaagagtgatcacctgatagcagtcgcctggttgtgatcggtagagatctagcagagcagcccccatttgcattcaacggaaaggaaaactttgtcaggctggttttccaaaacaaaccatttttcgttctgtgcaccgtgccctttcccttcgaacttgttctggatttggagcagcgtagccaggaccgatagcaactccctggtcgacacctgaatcgcgatctgatcgtcccagttgtaggatcgacctcctgaggagacggccgcttcaattcgaatggtatgctcttcgttccttgtttgatcagcagagaaacaaactgcgacctttcccccatacacgtgccgattcacatagttttttgctggttgtagattctgaggttcatcgatcgtggtgagcgggtcacagagatctgttgacgcatttgcactgtcgttggctgctggagccgcttcactgtcgacaggacagttacaagtcgttgtgcatcgccttgtcataagacatccacattcactctga

SEQ ID NO: 166573 - DNA, 575 bp, Homo Sapiens
tacagatgaatgtgtacacagtgaatgtaaatcgaaacgcgtcgggtcgtatttgatttcatgcacgctgtcggcggtgacttcgttgattttcaccggggtgtcgaaatgcatcccctggtgatagaaggacagcttgaacggggtgttctgatcggcccactcggctttttcattacggaaacgaatcttctggtagtcagcgaatttcatttcgcggaattcgttcggcaaattgctgcgcggagcttcgtatttctgcccagccagctcttttgccttggccgacacatcatccagactgaacgcccacagttgacccgcgccgaacaggcaaaacagggcagagcccgtcaccagtgcgtttcgtaaccgtttggcagacaattttggtgcattaaagggattaacaatcacgagcaaccctcgccgaaaacagatcaaaaaaccaacggccagcaatctatatgccaggttggcgagcaatgttccagactcctctggggcgaaatgattccccatgcggttgtcggacaaggctcatacctaagtcaaaaatgacattcactctgtga

SEQ ID NO: 166574 - DNA, 391 bp, Homo Sapiens
ttctatgaggatccccatacagatgaatgtcaggagaccttactctggacacagtcattatcatctctaatagacactccatagtttacgttagtgttcactcttggtgttgcacattctacaggcttcttgacaaatgaacaatgacatgtatctatcatttagtatcataaagaatagtttcactgccctaaaaatcctgtgtgttctgcctgtttgttcctttctctcccctaacctctggcaacccgtaatctttttatggtttccaaggttttattttttctggagtgttctgtagttggaatcacacagtatatcaccttttcagtttggctcatttcccttagtagtgtgcattttttcccatgcgtttagatggattggtagt

SEQ ID NO: 166575 - DNA, 530 bp, Homo Sapiens
  misc_feature (86)..(110): n is a, c, g, or t
agtgaatgtgacttcacggatttcattttatggggctaactgcaatgtgaaactaaagcagatttaaaacctatgacaggctattnnnnnnnnnnnnnnnnnnnnnnnnntattaataactcaggcataatactgtgttacttacaaattggacaacgaaattttaaataaatattcatggtacataattacggcacaaatatgcagcaatttggcaacctttaataccattttttcctcattacagtgcaaaggggaatgacactgccgttaaacaagctgtagctaaatacagttgcaaaattcaaatctaaatacaaaacatcttgcttagacgtttataaaaaaccaacattgctctatgtacacaatctgggtaagaaaagccatttctttcttgttttcatgtgtatttttattaaaaaggtgaataaggctactgtaacaccccaaatccatagacagtaaaatctgaacctatttacagcatcttcactgaaacatgatggtgcaaattccaaagtcgggtg

SEQ ID NO: 166576 - DNA, 372 bp, Homo Sapiens
aaagctcatgccccagccagaacctgaaaaattcagagatggaaaatgaaaatgacaagattgttcccaaagcaacagccagtctacctgaagcagaggagctgatcgcgcctggaacgccgattcaattcgatattgtgcttcctgctacagaattccttgatcagaacagagggaacagatcaagtgtaaagtgcccttctagctacagatgtagagtttgttcaactatggctattcccctaggcgtaccaacccttttggtgaaactgaggatgaatcatttccagaagcagaagattctcttttgcagcagatgtttatagttcggtttttgggatcaatggcagttaaaacagacagcactactga

SEQ ID NO: 166577 - DNA, 389 bp, Homo Sapiens
  misc_feature (43)..(74): n is a, c, g, or t
agttgacacttcagggtcaggcgcacattacacgcacgcacgnnnnnnnnnnnnnnnnnnnnnnnnnnnnnnnngatccagcagcatccttggaacatcctgaagtcaagaaaggcacagctctgtctgccccgtatagaaggaattccagaaaacagccacgaggttgggccacagaatttccaaagagagcaatctacaaactgggggttgatttcccagttcctggatctcagcagtcaacacacgagaaggatttttttctgaagctgccacctccaattctgaaataatcccatgtttcagactggggccgggacggtggcaaacctgcagaccctggcagcaagatgagggcaaggaagggaaaggtcagctgggcacagtcc

SEQ ID NO: 166578 - DNA, 903 bp, Homo Sapiens
accttagatactgtgaaattaggtgattactagttgttatttagccttctaatttctgtataagtctaattacatgaatagaaattggggttttgattttttactttgcttttctgtttggagtgtcattggaactactgtattgtaaatggtggaaaataattgcatttgttactttggggtgtgttatttgcatcagtattttatctctattaatgtttgtgctcatcactgcatattaaaaaaacttggatgtatcagtgtaacttaattttttattttcatactggcattgtagacacttgagaaagctgtatcttgcaggcttgacttaacttttttccttaaaaatctggaatataatcttacagcatttactggaataaacagtacaaagcattggagtgtaaaactctagatgttttggatttacagcgtttctttgataaatgaattgtataccactagtacagctctagtacagcgttcacaataagctaataatggataagttttcttcactccattaacacaagcagtgttttatttaataatcatcaatgaaataaatgtgcctgaaattgattttaaaaattacagtattagatcataaagtaaaaaccagcagtacatttttagtcacactgaaaatgaaggacttaattttccccacaagtttcagtgtttttagtaattaattctatgcattttatacaaatagaaatatatatatataaaaaattaaatgtttaaaaaggagtagcctaagattaatttaaaagattatttacagatgacacatttatggggtcactatttaagaaattgctgcctcccgctctattattttgcacattgtctcttaaaggcttacatcagaatggcatgattaggcactcgttt

SEQ ID NO: 166579 - DNA, 575 bp, Homo Sapiens
ggtacaaatatctcagttggaccatcccttaacttgattgaactgtctaggaactttacagattgttctgcagttctctcttcttttcctcaggtaggacagctctagcattttcttaatcaggaatattgtggtaagctgggagtatcactctggaagaaagtaacatctccagatgagaatttgaaacaagaaacagagtgttgtaaaaggacaccttcactgaagcaagtcggaaagtacaatgaaaataaatattttggtatttatttatgaaatatttgaacattttttcaataattcctttttacttctaggaagtctcaaaagaccatcttaaattattatatgtttggacaattagcaacaagtcagatagttagaatcgaagtttttcaaatccattgcttagctaactttttcattctgtcacttggcttcgatttttatattttcctattatatgaaatgtatctttggttgtttgatttttctttctttctttgtaaatagttctgagttctgtcaaatgccgtgaaagtatttgctataataaagaaaattcttgtgacttt

SEQ ID NO: 166580 - DNA, 821 bp, Homo Sapiens
gcccgtatgactgcgtccacacccctagaacccgttgaactcactctcattcgtctatgagatattccagacagagaaagagctggacccagatgggctgaagaaggagtcagagcgggatcgggcaatgctggctctcacatccactctcaacaaactcatcaaaagactggaggaaaaacagagtccagagctggtgaagaagcacaagaaaaagagggttgtccccaaaaagcctcccccatcaccccaacctacaggtgagagcagtcagacaagaaagagtagcccagtctgttgttttcatccctcagctggttctgttcccagaggggaccctgttccttcccttctgagggtgctcattctctccccactttctggaacactgtcctcacttgcgcctgcttcccaacaccgtcatccctttgcgtgtttacctcctattcatctctctgggaagcagcttttagagcatatctgctggttttctggtttgctcctgtacacccagtgcctagcactctgcctggcacacaatggatgatcagtagctagtaattgaatgcttgtgagtctatatgctgaaaaccactttaggactttgcaccaagagaggccccagctgtcagggcatgaataggagagcccagctgcacatgagccaatagcttggatagactttaaattatttcttcttcttgtatcccattgtgtccatttcatagtgtcctatgggtgtggacatcagatattctaaatggatgttccagtttcaaaccttccattcccactctctctataacattgaatgtcgctaa

SEQ ID NO: 166581 - DNA, 522 bp, Homo Sapiens
ttattgctatgcctccagatccttaatgtagttctcatcctccgcatgccctcagccacaagcgggtgactgactgtttcctgatgatttggcccacctcctgtgtttggacctctagggaggagggttttggtcatactctccttatcctcgtgcacagaaatgctcagggtccccatgtgcctgttgttcagccctctctcttgttccctttctgagcatgtggtccttccccaggctgtgggacagctgccttcccacgaaagtgtaaagcagtattaagatcattactgcatgtgccctaaaaacccaagttttctattcccttaggacagaaaattgcatgtgaggtgggataatcgagtttcagtgacccacgtcagttacacattaaagccagaccccatgataaaattccacaaaatggaaataaaactcaaatttctttagcattgtgtaaataaatctgaatgtgtttaactttgtactggtaattttctgtatatttggaatatttgggtt

SEQ ID NO: 166582 - DNA, 769 bp, Homo Sapiens
gtttacgatgtgtaggtacaaagcgcagactcaccattattgaatgtgggtgtgacattaacatgatgattgatctggctaaagtagcagatctggtaagtgagcaggggcagcctggggtgctgatggagacttacagcattgtgataggttatttaccccgtgatgaagggaagagagtcttataattattaaaagaatcatggtcatcatcagtgatacggtagatatgattgaattgatgataattatggtaataaatgttgttatgttaataataaaaatggaatgtgcacaatgaaatgtgttccaaaatctaaaagcaaatcacaggatggagaaaacctttaatgaacacaactaataagagctcattaacattcatacatatatatgtacaaatatatcatagtaagtaccatttcttcttggatccttcctggcactgtgctaactgctttctacaaatttagcttacataaacccttgatacacccttgaggtgagtaggtattatctatagtttacataagatgaaatagagcctcccagcagttaagtaacttgtgtgaagatgggacccttgttcctaatggttctagaaccttcatccttaatgataatgctaaagtaagtacatgaattgcctgaagaagtggtcagagtttatcaatagaaaatttagatagtactcagcgtgtggaaaatgtacatttatggaaatgataatgttcactatctctgatattctatgatcttttacattagc

SEQ ID NO: 166583 - DNA, 1427 bp, Homo Sapiens
gttcaggatgctaataaaccctgggggtagcggcaatcatctgcatttttaccacatacacttgaataatccaaaatactgagagttgcttccctatgctcaacatccataggaccaaatttggaaaggtgaactgtagttggcttatatgctggccttaggtgctcttatgacctgtgcatagccatatttagctcactggctaagaggctgaaaagattctaccaccttcaggcgtgtggggaacatgaacaggaggctgacaaacaaggagggaagtttctattgtacctggtgagcgaattgacagaaaaggattctgtgaaggtgatgagatttccatccatgctgactttgagaatacatgttcccgaattgtggtccccaaagctgccattgtggcccgccacacttaccttgccaatggccagaccaaggtgctgactcagaagttgtcatcagtcagaggcaatcatattatctcagggacatgcgcatcatggcgtggcaagagccttcgggttcagaagatcaggccttctatcctggctgcaacatccttcgagttgaatattccttactgatctatgttagcgttcctggatccaagaaggtcatccttgacctgcccctggtaattggcagcagatcaggtctaagcagcagaacatccagcatggccagccgaaccagctctgagatgagttgggtagatctgaacatccctgataccccagaagctcctccctgctatatggatgtcattcctgaagatcaccgattggagagcccaaccactcctctgctagatgacatggatggctctcaagacagccctatctttatgtatgcccctgagttcaagttcatgccaccaccgacttatactgaggtggatccctgcatcctcaacaacaatgtgcagtgagcatgtggaagaaaagaagcagctttacctacttgtctctttacgtctctcttcctggacactcacttctccagagactcaacagtctctgcaacggagctgtgggtccaccttagcctctgacttcctaatgctacgaggtggtccgcagcgcaatctcctgggccttacaggcctgcggactcatcctcagccagcgcccatgtcgctgataccagggcgtgctacgtccggactggctccaacaaactaactagcaacacctcaggcccatccaattatcctcacgactctccttgaacactcgacggcctcttcgatcgcccccgcggcccagcgtccaccctgcgcctccctcggccgctacgccccccccacggcccacaccgccacgccacccacgcacacacctcgccgcatcagcaaactccaggccaccttcccacctcccccactccatcgtcgcgcacaccacccaacacacaccaccctagcgaca

SEQ ID NO: 166584 - DNA, 2937 bp, Homo Sapiens
  misc_feature (262)..(270): n is a, c, g, or t
  misc_feature (2010)..(2023): n is a, c, g, or t
gaaactaacccctctttttctccaaaggagtgcttgtggagatcggatcttttctccagcaattgggggaaagaaggctttttctctgaattcgcttagtgtaaccagcggcgtatattttttaggcgccttttcgaaaacctagtagttaatattcatttgtttaaatcttattttatttttaagctcaaactgcttaagaataccttaattccttaaagtgaaataattttttgcaaaggggtttcctcgatttggagcnnnnnnnnncttccaccgtcatttctaactcttaaaaccaactcagttccatcatggtgatgttcaagaagatcaagtcttttgaggtggtctttaacgaccctgaaaaggtgtacggcagtggcgagaaggtggctggccgggtgatagtggaggtgtgtgaagttactcgtgtcaaagccgttaggatcctggcttgcggagtggctaaagtgctttggatgcagggatcccagcagtgcaaacagacttcggagtacctgcgctatgaagacacgcttcttctggaagaccagccaacaggtgagaatgagatggtgatcatgagacctggaaacaaatatgagtacaagttcggctttgagcttcctcaggggcctctgggaacatccttcaaaggaaaatatgggtgtgtagactactgggtgaaggcttttcttgaccgcccgagccagccaactcaagagacaaagaaaaactttgaagtagtggatctggtggatgtcaatacccctgatttaatggcacctgtgtctgctaaaaaagaaaagaaagtttcctgcatgttcattcctgatgggcgggtgtctgtctctgctcgaattgacagaaaaggattctgtgaaggtgatgagatttccatccatgctgactttgagaatacatgttcccgaattgtggtccccaaagctgccattgtggcccgccacacttaccttgccaatggccagaccaaggtgctgactcagaagttgtcatcagtcagaggcaatcatattatctcagggacatgcgcatcatggcgtggcaagagccttcgggttcagaagatcaggccttctatcctgggctgcaacatccttcgagttgaatattccttactgatctatgttagcgttcctggatccaagaaggtcatccttgacctgcccctggtaattggcagcagatcaggtctaagcagcagaacatccagcatggccagccgaaccagctctgagatgagttgggtagatctgaacatccctgataccccagaagctcctccctgctatatggatgtcattcctgaagatcaccgattggagagcccaaccactcctctgctagatgacatggatggctctcaagacagccctatctttatgtatgcccctgagttcaagttcatgccaccaccgacttatactgaggtggatccctgcatcctcaacaacaatgtgcagtgagcatgtggaagaaaagaagcagctttacctacttgtttcttttggtctctcttcctggacactcactttttcagagactcaacagtctctgcaatggagtgtgggtccaccttagcctctgacttcctaatgtaggaggtggtcagcaggcaatctcctgggccttaaaggatgcggactcatcctcagccagcgcccatgttgtgatacaggggtgtttgttggatgggtttaaaaataactagaaaaactcaggcccatccattttctcagatctccttgaaaattgaggccttttcgatagtttcgggtcaggtaaaaatggcctcctggcgtaagcttttcaaggttttttggaggctttttgtaaattgtgataggaactttggaccttgaacttacgtatcatgtggagaagagccaatttaacaaactaggaagatgaaaagggaaattgtggccaaaactttgggaaaaggaggttcttaaaatcagtgtttcccctttgtgcacttgtagnnnnnnnnnnnnnnccttctagagctgatttgatggacaatggagagagctttccctgtgattataaaaaaggaagctagctgctctacggtcatctttgcttagagtatactttaacctggcttttaaagcagtagtaactgccccaccaaaggtcttaaaagccatttttggagcctattgcactgtgttctcctactgcaaatattttcatatgggaggatggttttctcttcatgtaagtccttggaattgattctaaggtgatgttcttagcactttaattcctgtcaaattttttgttctccccttctgccatcttaaatgtaagctgaaactggtctactgtgtctctagggttaagccaaaagacaaaaaaaattttactacttttgagattgccccaatgtacagaattatataattctaacgcttaaatcatgtgaaagggttgctgctgtcagccttgcccactgtgacttcaaacccaaggaggaactcttgatcaagatgcccaaccctgtgatcagaacctccaaatactgccatgagaaactagagggcaggtcttcataaaagccctttgaacccccttcctgccctgtgttaggagatagggatattggcccctcactgcagctgccagcacttggtcagtcactctcagccatagcactttgttcactgtcctgtgtcagagcactgagctccacccttttctgagagttattacagccagaaagtgtgggctgaagatggttggtttcatgtttttgtattatgtatctttttgtatggtaaagactatattttgtacttaaccagatatatttttaccccagatggggatattctttgtaaaaaatgaaaataaagtttttttaactggcaaaaacaacgccaccacaacaccaacacccggctccac

SEQ ID NO: 166585 - DNA, 511 bp, Homo Sapiens
  misc_feature (432)..(432): n is a, c, g, or t
  misc_feature (449)..(449): n is a, c, g, or t
  misc_feature (468)..(468): n is a, c, g, or t
  misc_feature (475)..(475): n is a, c, g, or t
  misc_feature (490)..(490): n is a, c, g, or t
aaaaaattagcagacacaggataatttaaatcaggggtattgacatccaccagatccactacttcaaagtttttctttgtctcttgagttggctggctcgggcggtcaagaaaagccttcacccagtagtctacacacccatattttcctttgaaggatgttcccagaggcccctgaggaagctcaaagccgaacttgtactcatatttgtttccagggtctcatgatcaccatctcattctcacctgttggctggtcttccagaagaagcgtgtcttcataggcgcaggtactccgaagtctgtttgcactgctggggatccctgcatccaaaggcactttaggccacttccgcaagccagggatcctaacggctttggacacgggtaacttcacacacctccactattcacccggccagccacctttttngccattgccgttacacnttttcagggtcgttaaagnccacctnaaaaggttggtcttntttgaacatcacctggtgggg

SEQ ID NO: 166586 - DNA, 801 bp, Homo Sapiens
  misc_feature (439)..(439): n is a, c, g, or t
cttaataaattttattttggtaattgtaaaaagaaaaatcaggaccaaaactaaaggcaacttaaaaagttcaaatatataatccttatgtgatagagatttataatttccaggccctctctggggaaggaatgcccaaaggaaaaaagggaaggcaacaatgccatcacacaattcagtcaatcagaagagaagctggtaggagagttcaacagggcatgaagaaagggagagaacagcaatagttctgccatacagaactcagtccatcttgaggttaacatagatataccggatgaactttagggaagaaaaaaaggagatggtgcccagcatgaggaagaagacataaccagtgagtaaggagtagccgaagaactctactgtctgtactgcccccaaacatgttggaacgccgggcattaatagaaaactgaantagaggaagatgaagaggccggtggagccaacactcagcacagatcgccaccaccagcggtaatccgccccagacaactggaagtaggtgagtgcaatggagatgcaagcccccacactcagcaggatggcgaagacaaagaagaggatgccgtacaaagtgtactgctcccgaccccatactgtggcaaagatgtagtacagctccacagagatggcactgaaaggcaggaagcctccaacagtcatgtggatgacagtagacttgtaccagggctggggtggaatctcccgggcgatgttcttggtgcgacagggtgcatcaaaggggctggcgttgttcttcccaaagatgcctccaat

SEQ ID NO: 166587 - DNA, 377 bp, Homo Sapiens
  misc_feature (28)..(28): n is a, c, g, or t
  misc_feature (36)..(36): n is a, c, g, or t
  misc_feature (85)..(85): n is a, c, g, or t
  misc_feature (230)..(230): n is a, c, g, or t
  misc_feature (232)..(232): n is a, c, g, or t
  misc_feature (234)..(234): n is a, c, g, or t
ccctaactcaacgggtaatgccctcccncccctcangcggggcacccacctcccttttttccttcccctaaagttcatccggtanatcctatgttaaccctcaagatggactgagtcctgtatggcagaactaatgctgttctctccctttcttcatgcccctgttgaactctcctaccagcttctcttctgattgactgaattgtgtgatggcattgttgccttccctntntncctttgggcattccttccccagagagggcctggaaattataaatctctatcacataaggattatatatttgaactttttaagttgcctttagttttggtcctgatttttctttttacaattaccaaaataaaatttattaaga

SEQ ID NO: 166588 - DNA, 592 bp, Homo Sapiens
  misc_feature (49)..(49): n is a, c, g, or t
  misc_feature (53)..(53): n is a, c, g, or t
  misc_feature (58)..(58): n is a, c, g, or t
  misc_feature (71)..(71): n is a, c, g, or t
  misc_feature (76)..(76): n is a, c, g, or t
  misc_feature (96)..(96): n is a, c, g, or t
  misc_feature (101)..(101): n is a, c, g, or t
  misc_feature (124)..(124): n is a, c, g, or t
  misc_feature (134)..(134): n is a, c, g, or t
  misc_feature (146)..(146): n is a, c, g, or t
  misc_feature (192)..(192): n is a, c, g, or t
  misc_feature (502)..(502): n is a, c, g, or t
  misc_feature (562)..(562): n is a, c, g, or t
catgcctgcttgctttgctgcttggcccatgcctgcctgcagctgtggngggncttgncatctgccattgncactncaccctaacttccagttgtnctggnggaggattaccgctggtggtggncgatctgtgnctgagtgttggnctccaccggtcctcttcatcttcctctactcagttttctattatgncccggcgctccaacatgtctggggcagtacagacagtagagttcttcggctactccttactcactggttatgtcttcttcctcatgctgggcaccatctcctttttttcttccctaaagttcatccggtatatctatgttaacctcaagatgggactgagttctgtatgggcagaactattgctgttctctccctttctttcatgccctgttggaactctcctaccagcttctcttctggattgactgaattgtgtggagggcattgttggccttccctttggccctttggggatttcccttccccaganaggggccggggggatttattaaaactctattcacattaggggattataaaatttggaacntttttaaggtggccttaagttttggggccc

SEQ ID NO: 166589 - DNA, 385 bp, Homo Sapiens
tagcttgaggattgagctatgtgttatgattcactttggtaatatttgcctcagaaggatttctgtgattatttctcttttagcgatgtagatgaattctcagggtacaatcaagccttcagccccagtacacacgtgtacccacataaaaagatgtccctgaaatggcactgattataggactagaagtttctaaagagaaacaagtctttcaacaagatagcaaatatttcccacattttgcttttgtctcaaattactgaaaggatataacttaaagatagtaattcttatgccatagatactatccaacagaacatagattgttctgatttatcccttcttgaaaaactgatcttttatttgcctttacaacccctctgca

SEQ ID NO: 166590 - DNA, 122 bp, Homo Sapiens
aatcgagctcgctacccttctcacacctatgcattaacagaacatactcattctctcctcaagaaagacaaccctactgtctcatccaattactgcaaacagctttaaacagaatccctggg

SEQ ID NO: 166591 - DNA, 381 bp, Homo Sapiens
gtgcaaaatggaaaggtacggagggactggccgttggggttgtccacccgctttgagaaggccatcccatgcatagtccagtcacccaaccctctgaaacacactgctcatacttcccatcctgtggtcattttccactgctgctttatgcgctactgattttttgccaacagtctttcttcattcagccatatggtttcaaattccatttgctaaggatgatgcagatcaaccctctggccctctacaaaaatatcctactttacagtgccctgtctcagatgcatctgcttgttgtatcaagacagcatctgtatttaaagtttgctaatatagcccaaataaactgtaaaagaattagatattccgaagtgtcaacgg

SEQ ID NO: 166592 - DNA, 375 bp, Homo Sapiens
aatttcaactcaatggttggctgataccgtgtgtccagcgtggactggatttgtcctggggggttctctggtttgctgcctcctgaccacttcatggggccttcgaggtcgaggacaactgttcccattagattgcaccctctgccctcaggttctctcagggtgtgtggacaccgtaggctttccatgggatgtccctcagccggcccttgattgaggcctcaccatttacagggccgtcttattctgcaaaccgaaacttgggtcacgtgacctgatgggattatgggactccctccaggtgccccagacaaggttgatatctcccaaaatattttggtgatttagtgggacaagcaaatgacaagaatacca

SEQ ID NO: 166593 - DNA, 1979 bp, Homo Sapiens
ggatatgaaaaaggcagaggctcgtctgcttgaggaacaacgaagagttcaggtttaccttcatgaaagcacacaagatgaattagcaaggaaatgtgaacaagtcctcattgaaaaacacttggaaattttccacacagaatttcagaatttattggatgctgacaaaaatgaagatttgggacgcatgtataatcttgtatctagaatccaggatggcctaggagaattgaaaaaactgttggagacacacattcataatcagggtcttgcagccattgaaaagtgtggagaagctgctttaaatgaccccaaaatgtatgtacagacagtgcttgatgttcataaaaaatacaatgccctggtaatgtctagcattcaacaatgacgctggctttgtggctgctcttgataaggcttgtggtcgcttcataaacaacaacgcggttaccaagatggcccaatcatccagtaaatcccctgagtagctggctcgatactgtgactccttgttgaagaaaagttccaagaacccagaggaggcagaactagaagacacactcaatcaagtgatggttgtcttcaagtacatagaagacaaagacgtatttcagaagttctatgcgaagatgctcgccaagaggctcgtccaccagaacagtgcaagtgacgatgccgaagccagcatgatctccaagttaaagcaagcttgcgggttcgagtacacctctaaacttcagcgcatgtttcaagacattggcgtgagcaaagatctgaacgagcaattcaaaaagcacttgacaaactcagaacccctagacttggatttcagcattcaagtgctgagctccgggtcctggcccttccagcagtcttgtacatttgccttgccgtcagagttggaacgtagttatcagcgattcacagctttctacgccagccgccacagtggccgaaaattgacgtggttatatcagttgtctaaaggagaattggtaactaactgcttcaaaaacagatatactttgcaggcgtcgacattccagatggctatcctgcttcagtacaacacggaagatgcctacactgtgcagcagctgaccgacagcactcaaattaaaatggacattttggcgcaagttttacagattttattaaagtcgaagctattggtcttggaagatgaaaatgcaaatgttgatgaggtggaattgaagccagataccttaataaaattatatcttggttataaaaataagaaattaagggttaacatcaatgtgccaatgaaaaccgaacagaagcaggaacaagaaaccacacacaaaaacatcgaggaagaccgcaaactactgattcaggcggccatcgtgagaatcatgaagatgaggaaggttctgaaacaccagcagttacttggcgaggtcctcactcagctgtcctccaggttcaaacctcgagtccctgtgatcaagaaatgcattgacattctaattgagaaagaatatttggagcgagtggatggtgaaaaggacacctacagttacttggcttaacccttctggaagggtctgactgtgtgacccgcagcaaatagttcatgttggaaagaatgaaaacaactcaagttcatagcagccagcctgccgccattggacctcccttttaaaaactgagaccaagactcccatcagctggtctcggatttacatcggaactgctcaggattgatacatttcaagtctgtaaatacggacaccaacgccatttaccctaatttaagaacagcggggactgaccctccgtgccgagggctgcatgctaccgcactaagtcaatacatgggctccccgattcgcagctgtcgtcttggcagcacttgtcacgttggcagcactttgagagcaagtctgagtggacccacatgtaacctgctatgaaaaaccattttgtattagtgtgtttcatttttttattgt

SEQ ID NO: 166594 - DNA, 1553 bp, Homo Sapiens
  misc_feature (374)..(439): n is a, c, g, or t
  misc_feature (1273)..(1273): n is a, c, g, or t
  misc_feature (1279)..(1279): n is a, c, g, or t
  misc_feature (1403)..(1403): n is a, c, g, or t
  misc_feature (1477)..(1477): n is a, c, g, or t
cttccaacatctcatttctcagccccgaggtggaaagcctgcctgtggccagtagctccacgctgctcccgttggcccccagcaattctaccagcctcaactccaccttcggctccaccaacctgacagggctcttctttccaccccagctcaatggcacagccaatgacacagcaggcccagagctgcctgaccctttggggggtctgttagatgaagctatgttggatgagatcagccttatggacctggccattgaagaaggctttaaccctgtgcaggcctcctagctggaggaggaatttgactctgactcaggcctttccttagactcgagccatagcccttcttccctaagcagctctgaaggcagnnnnnnnnnnnnnnnnnnnnnnnnnnnnnnnnnnnnnnnnnnnnnnnnnnnnnnnnnnnnnnnnnnttctgaggaaggtgcggttggctacagctctgactctgagaccctggatctggaagaggccgagggtgctgtgggctaccagcctgagtattccaagttctgccgcatgagctaccaggatccagctcagctctcatgcctgccctacctggagcacgtgggccacaaccacacatacaacatggcacccagtgccctggactcagccgaccggccaccacccagggccctcaagaaaggcagcaaggagaagcaggctgacttcctggacaagcagatgagccgggatgagcaccgagcccgagccatgaagatccctttcaccaatgacaaaatcatcaacctgcctgtggaggagttcaatgaactgctgtccaaataccagttgagtgaagcccagctgagcctcatccgagacatccggcgccggggcaagaacaagatggcggcgcagaactgccgcaagcgcaagctggacaccatcctgaatctggagcgtgatgtggaggacctgcagcgtgacaaagcccggctgctgcgggagaaagtggagttcctgcgctccctgcgacagatgaagcagaaggtccagagcctgtaccaggaggtgtttgggcggctgcgagatgagaacggacgaccctactcgcccagtcagtatgcgctccagtacgccggggacggcagtgtcctcctcatcccccgcacgatggccgaccagcaggcccggcggcaggagaggaagccaaaggaccggagaaagtgagcctggggaagaagggggtttgaagcccaccaagaccgaaactggagaaaggctggacctggacctgnacctgnacctacagcggggacttaaatgccttcttatccaatatatcttctcagatgggatgactgcgggtcagtgtacagggaagagcaagcactggctggctcagctccactccggtggaatggaaantggccaaaccatttagacggacaaggtcctcaccctacccctttcctgtgaagccaggggtggtggtggaaatncctgggagtaaagggacctatgggggagccaaagcccgaccggaggggaaaggaatgggacctggtgaaaaggaag

SEQ ID NO: 166595 - DNA, 1382 bp, Homo Sapiens
  misc_feature (423)..(463): n is a, c, g, or t
  misc_feature (870)..(991): n is a, c, g, or t
  misc_feature (1040)..(1049): n is a, c, g, or t
  misc_feature (1074)..(1166): n is a, c, g, or t
  misc_feature (1225)..(1236): n is a, c, g, or t
caggctaggtggggctttccctaatttatcttcatgtccagtgagcagtgttgcgttttcccttgtagcatttggaaatgatttactggaattacaaaacctatttttcctttaaatttcagcttgggctctggctgctttttagaataatgcaagataaaaatcacacctgagggctgaaaacggagagggaatgggagacttgatatttaagcagcttgaatggtttttcttttctttatttttaaagaaatgcacttgcctatgatactgtctctccagtgaaatgattactcctccattactctattgatacaatattgtgcatgctagtgttgtatttctatacagtagcttgaaattgattaacttatactgtaggtgttatgtattcctatgacaaaaaaaattaagtcttcaaannnnnnnnnnnnnnnnnnnnnnnnnnnnnnnnnnnnnnnnngggggtaaagtttgctctaccaaatagtgattgtaacaaattgatctgttttggatgttgctatagtgacatgcagttatatattttgtttttaaaagggggggagcaaaagaaacaccagtgttagcttaatcttaatgtctggtgtttgtcatggtgaaattataactattacagtgttggagaacaacaaatatgttctctgaatgagcctttgtgctttttgtcatgttatgcagtgaactatttttaaggtctaatcagtgattatttttccagctccgtgtttctctaaggaattatttcacacacggaccatctttagcagtttcctcagtgatggaatatcatgaatgtgagtcattatgtagctgtcgtacattgagcaaataaacttacagatctgnnnnnnnnnnnnnnnnnnnnnnnnnnnnnnnnnnnnnnnnnnnnnnnnnnnnnnnnnnnnnnnnnnnnnnnnnnnnnnnnnnnnnnnnnnnnnnnnnnnnnnnnnnnnnnnnnnnnnnnnnncctggccggccccccccgcccccaaaaaatttttcaaaacattttgttnnnnnnnnnnccccaaaaggaaagaaaaaggggcnnnnnnnnnnnnnnnnnnnnnnnnnnnnnnnnnnnnnnnnnnnnnnnnnnnnnnnnnnnnnnnnnnnnnnnnnnnnnnnnnnnnnnnnnnnnntccaaagggagttcgggggcctttctgggatttatcaaaggggggccagggcacctttnnnnnnnnnnnncccccgcccccgtgccatctgtgcgaaaaaggggggaaaccccaaaaaaccctcgcccccacccggggaaccccctctccaaaccgggtatgaaaaaacccagaaccccccccgggggtaatccacccccgtgggggcgcttgggg

SEQ ID NO: 166596 - DNA, 240 bp, Homo Sapiens
cagaaccctacaaagcaaagcaaacactgtgagtactctttgctttgtagtttgctttgctttgtagggttctgcttgtaagtttatctctttatcagacaaattactgataaaaatgatattgctctatatgtaatatatcctgaaagcattactttttgttgaataggaaataaaattaatgaagacagaggctagaaagcatccattaattaatgagacacaccgagattagacaca

SEQ ID NO: 166597 - DNA, 587 bp, Homo Sapiens
attacggattccccgtccgacgtttgacattatggaaccgacggtaccaccttgacggacacgctgggtttgttggccaattgtctataaactgctgccaaaaaaaggaatggatcagattgtcttgaatagggcagagctaacctgtaatcacctgtgtgatgagaaacagctttgactgcattttactcctgacctggcctaagctttctgtttacataagatttttcaagaattcaacttcaagtagcagccgagagagctgcctcaggattctctcaaaaactgggaataatatgggaacatttgtttcttctaaaaataaggcaaatgttacattgaatgatttggggggtgaggtttaattggaaatggtctctgggggactgaaaactgatgtttttgcagattacctcagggaaaacggaagtttgtttgagtttacagacacattaaaccaaaggccgtgggaaaacccctctccagctccaggggattggtcaggaccacccacatgaattttaggcattttaaacttacttttcttgcccttgccaccaacactaatttcaggagtctcaaggttc

SEQ ID NO: 166598 - DNA, 1024 bp, Homo Sapiens
  misc_feature (253)..(279): n is a, c, g, or t
  misc_feature (347)..(394): n is a, c, g, or t
  misc_feature (462)..(599): n is a, c, g, or t
aaacggtttccccctggggggggattttttccggggctcccttttttaacccgtgccccaaaatagacaattttccaccggccccccgggttttttccttgcccccgggagattataggggctaagaccgccccggggtggggaagggcttccccactttttccccgggatatattttaaaaccctttttcggccggggtttccctatttaggccgaaaaagccccggggggaaattaaaaacattaaggccnnnnnnnnnnnnnnnnnnnnnnnnnnnttccctgaaattccccctgaattggccccccgggttggtgttgaacctttatggtcccccgcgggccnnnnnnnnnnnnnnnnnnnnnnnnnnnnnnnnnnnnnnnnnnnnnnnngggggaatttcaagccttgttctggtcccgtttttgtgcgggccccctaagaacaggtttaaataccnnnnnnnnnnnnnnnnnnnnnnnnnnnnnnnnnnnnnnnnnnnnnnnnnnnnnnnnnnnnnnnnnnnnnnnnnnnnnnnnnnnnnnnnnnnnnnnnnnnnnnnnnnnnnnnnnnnnnnnnnnnnnnnnnnnnnnnnnncactacgtaaagtttatttttatatatatatataaaaaaaagtataacactggagcctaaaaccattctcttttgtagaatacatattggcgttgaaacagtttaaagaaatgaaatggctatctacaaaaagttagttttgattgctgtcttcccccatactctgtgtcttcacacataaagaaaattttcaaagatcttgatattcagcaattttgtaaaaagtacactgtgttccactgctatggtctttataaaggacatgacttaaaatttcaaataaaaaagaattaaggttctaggataactcttgtgtcttttaagagcatctttatacagaacaatttggaccggcatgcaggcaacttcttttgttgttacatacctgtattaggaaaattacacccattttacagaaaaatccc

SEQ ID NO: 166599 - DNA, 611 bp, Homo Sapiens
tcggtgtgtctgatgcaggaagaaaagagagagtcctggtgagacagcgagaacaagttacaactccagaaaatatcaatttggatgtaacgttactcagttcttttcaatttggccagtcagtattcagttaatgaaatgtatgccgaagcacttaacacttatcaagttatagtcaaaaataagatgtttagcaatgcaggaatattgaaaatgaatatgggaaatatctatttaaagcaaagaaattattccaaagccattaaattctaccgaatggcattagaccaagttccaagtgtcaataagcaaatgaggattaaaacaatgcagaatatcggagttacatttattcaggctggtcagtattcagatgctattaattcatatgagcacataatgagcatggcaccaaatctgaaggcaggctacaacctaactatctgttatttggctattggagaccgagaaaaaatgaagaaggcattccaaaaatggattactgttccattagaaatcgatgaagataaatatatttcaccaagtgatgatcctcatactaacttagtaactgaagctataaaaaatgatcacctcaggcaaatggaacg

SEQ ID NO: 166600 - DNA, 363 bp, Homo Sapiens
  misc_feature (227)..(319): n is a, c, g, or t
ctagttttagaagtttcaatagcaaaataacagatagttaggttgtagcctgccttcagatttggtgccatgctcattatgtgctcatatgaattaatagcatctgaatactgaccagcctgaataaatgtaactccaatattctgcattattttaatcctcatttgctattgacacttctaaaactaggtgctattgaaacttctaaaactaggcctagttttagnnnnnnnnnnnnnnnnnnnnnnnnnnnnnnnnnnnnnnnnnnnnnnnnnnnnnnnnnnnnnnnnnnnnnnnnnnnnnnnnnnnnnnnnnnnnntccttgagtttatccatactcaacagtaaaaaatgaactcttgg

SEQ ID NO: 166601 - DNA, 2282 bp, Homo Sapiens
  misc_feature (147)..(147): n is a, c, g, or t
gtccattctcattctgaatctgttgactggagtgaattcagtggtcacaatcccaccatcaaataagaatcactttcctcagagtaaggagctgttccgatcttctcaatagttcacacaggtctctcagatataggcaccatgttntaagtctcacacaaaatgtctgtgtcacttaaattacacaatatggcagtgtttgtcttatggggacatactgaaagggccaaagtagaaaacaacctgtttgcatgttatatgtgagtacattattgtactgtgcatgggtatgagggcattgcagcccttgttaaagaggaattccaccaattgaagcctatgtcagttcccagctgctcttggtgctgagagtatctactcatataaccttattttgttagatcagagccctcttcatctacagtttggctcaaatggtttgaactgagtttggtcgaactgagtttggtcgtttatctcttccatctgagctttatttctcagcctcaggatatgtggggtacttgaccgtttctatcttctctcgaactttgtaggagggatataggcccgtccttcccaatttcctgttgacacctttagaatagccatcccaatgatttccagccacaccaatgatatctccaggttccatgggaatttcatctgcagttcggggttggtgagcataaatggcaatttgattgtgggcattctggcccccaaaatagtagatgtcatctaaagaatggaagtttgcagaggcatcaggatgtagtgtttgcataatttcataagcaactcgacagacctgggatgaaaaagtacacactaggaagtctgcctgagagagaaaatgtatatccaggatcactccacgaagtgaattttctgtgtatcgattgtgcagtccagctgaccaggaaatagagttatcactaataaattcataattggggtactttgtttttgcctcctttaataaagaagggtcatctgtggccaaatacactctttttttgtccacttgcattctgcgtgcaagaagctgaaaatgttcttcaacatgcaccatgtactcttcaatgggatggaaggcagcttctgttcccactttgtctgtgcgtctgacatggactccaataactggatgtttgaagccaagcttcttggtggcttcttctatttctttttctagccaaggctgtgggcggatcaagtatttgacaaactgagacacccaccacactgcagggtcaccatgcactcgtacaagtcgatctgcgaggtcttctggtacagccaagggtaaatatggaggacggggatgaagactgtctacaatgggaagctcgaccacttgaacatttttgtccttcacttcacctgaccagtgtccagtggagatgccagatctgtctttgcatgtctcacttacaggcctaaatacagtctcccatccaccagtagcatagcgccaattctgagattccaagatgagtgttcgctgggtgccatatgcaatcatgaagcagtagaccacatgatggagctgacagccatagccacagcctttgttgatattacacaccagctttttggctttgctgcagtccttgggattctgaagatatgttattctccgctgaaccagttctgtcagatctttggcctctttttcccgccaatcacctgctccatctgtctgactgaggtagtatagatccgtcattatagacctttcatgatgtcctaaatccaaaagaaattcatctgcatgtctttggagttcatttccttctaagttctttaatttcttcaattcactctgtaggaaaaaccagagctctttagctccattttcaatcctcctcctcaggatttcatgatccttccccagaccatttctggtctgtttcttgtaattttcaatctgttctttggccttaacaagctgctcttctaaaacgcgtactcttcctatagctggcccctgatcaatagggccttctggtatccggagagattcggccattcgcctcaagtcttcattctgctgttttaagcgttcaagctttgccagaatcttggacagttctcggctagagtgatcaggatggtcattatctcgtaccaagtgaccacctatataaaacagcaaggtcccccaggcaaaaagaatgagcataatccaacgccaggaaccagtccatgccgcattttcagattttcaactcacttcactggagtctgactgactcggggatacctctagaacagca

SEQ ID NO: 166602 - DNA, 582 bp, Homo Sapiens
gaatcgtatgcgccatgtgtaatctcacggaatgcacagttgatcttgggaagcagtattactagatctggaggcaaccacaggacactaaacttctcccagcctcttcagaaaagaaacctcattctttggcaagcaggaggtgacactagatggctgtgtaatgtgatccgctcactgacactctgtaaaggtcctaatcaattgcactgtctgtctctcctgttaggagtaagccatcccacaagttctataccatatttttagtgacagttgaggttgtagatacactttataacattttatagtttaaagagctttattaatgcaataaattaactttgtacacatttttatataaaaaaacagcaagtgatttcagaatgttgtaggcctcattagagcttggtctccaaaaatctgtttgaaaaaagcaacatgttcttcacagtgttcccctagaaaggaagagatttaattgccagttagatgtggcatgaaatgagggacaaagaaagcatctcgtaggtgtgtctactgggttttaacttatttttctttaataaaatacattgttttcct

SEQ ID NO: 166603 - DNA, 1067 bp, Homo Sapiens
agagccttcgtttgccaagtcgcctccagaccgcagacatgaaacttgtcttcctcgtcctgctgttcctcggggccctcggactgtgtctggctggccgtaggagaaggagtgttcagtggtgcaccgtatcccaacccgaggccacaaaatgcttccaatggcaaaggaatatgagaaaagtgcgtggccctcctgtcagctgcataaagagagactcccccatccagtgtatccaggccattgcggaaaacagggccgatgctgtgacccttgatggtggtttcatatacgaggcaggcctggccccctacaaactgcgacctgtagcggcggaagtctacgggaccgaaagacagccacgaactcactattatgccgtggctgtggtgaagaagggcggcagctttcagctgaacgaactgcaaggtctgaagtcctgccacacaggccttcgcaggaccgctggatggaatgtccctatagggacacttcgtccattcttgaattggacgggtccacctgagcccattgaggcagctgtggccaggttcttctcagccagctgtgttcccggtgcagataaaggacagttccccaacctgtgtcgcctgtgtgcggggacaggggaaaacaaatgtgccttctccttccaggaaccgtacttcagctactctggtgccttcaagtgtctgagagacggggctggagacgtggcttttatcagagagagcacagtgtttgaggacctgtcagacgaggctgaaagggacgagtatgagttactctgcccagacaacactcggaagccagtggacaagttcaaagactgccatctggcccgggtcccttctcatgccgttgtggcacgaagggtgaatggcaaggaggatgccatctggaatcttctccgccaggcacaggaaaagtttggaaaggacaagtcaccgaaattccagctctttggctcccctagtgggcagaaagatctgctgttcaaggactctgccatggggttttcgagggtgcccccgaggatagattctgggctgtaccttggctccggc

SEQ ID NO: 166604 - DNA, 562 bp, Homo Sapiens
acagaggctgatgggaaagaaaaggctccactcacctataggagattatttttaagtggaatccatttaaactcaaaacagttatgaaaagcaaggtgaagaacatgaagctgtgtctgtattcattttattccgaaggagctacgtcttaggtgaaagttatgaccaaccagattaaactctacccacatcctgcattttaaggtctaagtttaactggtcaacatttaaatggattggagctattagtacatcaagtgtgatgggctttgttcccaactcttttacatctccctaccccttcaacctttggcctttcagcccttctttctctcttccatattctttggtttgtatgtggtttctcagttaatacatagctaatagctcttatttttcttatgtttttaaccgcttaggtctatttggatgtaagggtgaaaattcatttgatggaaatacttgtgtatatttaaagacccaattgctcctctggagcttgtactttcaagaatgattaatctgtgtaataaactggttactacagtcattacatataaat

SEQ ID NO: 166605 - DNA, 593 bp, Homo Sapiens
ttctcaggctttgtcacaaccaaggtcccatttccactgaccctccgttttaagcctatgttacagcaaggaatcgagctactcacattagatgcatcctgggtgagttctgcatcctggtacttcctcaatgtatttgggcttcggagcatttactctctgattctgggccaagataatgccgctgaccaatcacgaatgatgcaggagcagatgacgggagcagccatggccatgcccgcagacacaaacaaagctttcaagacagagtgggaagctttggagctgacggatcaccagtgggcactagatgatgtcgaagaagagctcatggccaaagacctccacttcgaaggcatgttcaaaaaggaattacagacctctattttttgaagaccgagcagggattagctgtgtcaggaacttggagttgcacttaaccttgtaactttgtttggagctggcacctcttgaaataaaaaggaggatgcacgagctggcaggcatgcagcaaggcttgttcttgtctgggctgggttcccctctatgtttgaaactagaggaaataggagtatgccggtccacttgtctgg

SEQ ID NO: 166606 - DNA, 845 bp, Homo Sapiens
ggggttcgcgccggaagtggaagaccaggcagcccagctgaaggcagtaagctcggctcacagtcgcaggagagttctggggtacacgggcaaaggggcttgagaaggcccggaggcgaagccgaagagaagcaactgtgccccggagaagagaagctcgcccattccagactgggaaccagctttcagtgaagatggcagggccagaactgttgctcgactccaacatccgcctctgggtggtcctacccatcgttatcatcactttcttcgtaggcatgatccgccactacgtgtccatcctgctgcagagcgacaagaagctcacccaggaacaagtatctgacagtcaagtcctaattcgaagcagagtcctcagggaaaatggaaaatacattcccaaacagtctttcttgacacgaaaatattatttcaacaacccagaggatggatttttcaaaaaaactaaacggaaggtagtgccaccttctcctatgactgatcctactatgttgacagacatgatgaaagggaatgtaacaaatgtcctccctatgattcttattggtggatggatcaacatgacattctcaggctttgtcacaaccaagggtcccatttccactgacccctccgttttaaagcctatgttacagcaaggaatcgagctactcaccattagatgcatcccggggtgaagtctgcatcctgggaacttcctcaagggaattgggggcttcggaagcatttactcctctgatttcggggccaaaataatgccgctggccaatccccaaatgatgccgggaccaaatgaccggaaccaaccatgggccatggccccc

SEQ ID NO: 166607 - DNA, 918 bp, Homo Sapiens
gcaggccagaactgttgctcgactccaacatccgcctctgggtggtcctacccatcgttatcatcactttcttcgtaggcatgatccgccactacgtgtccatcctgctgcagagcgacaagaagctcacccaggaacaagtatctgacagtcaagtcctaattcgaagcagagtcctcagggaaaatggaaaatacattcccaaacagtctttcttgacacgaaaatattatttcaacaacccagaggatggatttttcaaaaaaactaaacggaaggtagtgccaccttctcctatgactgatcctactatgttgacagacatgatgaaagggaatgtaacaaatgtcctccctatgattcttattggtggatggatcaacatgacattctcaggctttgtcacaaccaaggtcccatttccactgaccctccgttttaagcctatgttacagcaaggaatcgagctactcacattagatgcatcctgggtgagttctgcatcctggtacttcctcaatgtattcgggcttcggagcatttactctctggattctgggccaagataatgccgcttgaccaatcacgaatggatgcagggagcagatgacggggagcagccatggccatgcccgcagacacaaacaaagcctttcagacagagtgggaagcttggagctgacggatcaccagtgggccactagatgatgtcgaagaagagctcattggccaagacctccacttcgaaggcatgtcaaaaggaataccagacacctaacaacgaaggacgagcagggatcaacagagctcaggaacaggcagtgcacctcacccggtaaccgctcggagctgccctctgcaatacaacggcgaagacgacggcaagcaaaaacacggcgccacccaaaaaacacaaag

SEQ ID NO: 166608 - DNA, 416 bp, Homo Sapiens
  misc_feature (22)..(22): n is a, c, g, or t
  misc_feature (31)..(31): n is a, c, g, or t
  misc_feature (41)..(41): n is a, c, g, or t
aaaaaagtcgccttccatgttncaggccaancccaatgaantcctgtgggttcaagcttgtaccaggtcaaaaggttacacgggccacatcaatcttccttggcaggcttagtgggacgagggacgtgtgggtgcctcgtcccctgtcagatacttgttcctgggtgagcttcttgtcgctctccagcaggatggacacgtagtggcggatcatgtctacgaagagtgataacgatgggtaggaccacccagaggcagatgttggagtcaagcaacagttctgccctgccatcttaactgaaagctggctcccagccggtgatgggcgagcttctcttcaccggggcgcagttgcttctctctgactgtcgcctctgggccttctctcgcccctatgcccggctcagcaccctcgt

SEQ ID NO: 166609 - DNA, 178 bp, Homo Sapiens
gaatcagctcggtaccattgcacgctcggtatgtcagtggtagtaatataattgtgggacgattagttttagcattggagtaggtttaggttatgtacgtagtctaggccatatgtgttggagtttgagactagtagggctaggctactccttgtcaaaaggtaaaatgcaccttctg

SEQ ID NO: 166610 - DNA, 334 bp, Homo Sapiens
taataatcagccggtaccacctgttgagcagtattgtgcctattgccatactagtctttgccgcctgcgaagcagcggtgggcctagccctactagtctcaatctccaacacatatggcctagactacgtacataacctaaacctactccaatgctaaaactaatcgtcccaacaattatattactaccactgacatgactttccaaaaaacacataatttgaatcaacacaaccacccacagcctaattattagcatcatccctctactattttttaaccaaatcaacaccacccacgccctaattattagcatcatccctctaaaatttttg

SEQ ID NO: 166611 - DNA, 959 bp, Homo Sapiens
ggggggaaattccccagcgccgttgttccttgccccaggattttccctatgggaaacccagttatgggcccctgtttcccttttccctttctgtggccccgcggcccccaaaccgaattgtctaggaaaagctttttcaagggccggaggcggcccgaacaggaattccacgggggtgcttgggggaagcgaaccggttctttttctattttaagggctgagggggtttctatttagtctacaagtgtccgtctgagcaccgtgagaagtcccctcctgaagatttctttttgcacggctggctcagcactgcgggtagctcggcattaacaaaagcgaaaacggtggtcaaaccttcacagggtcccaccctcacgacgacactggtctacgtactccagcacaggcctcagttcttcttgctgtccattctgaggctcactatttgtggtcccttaggcttgttccacacctcgtgtgtacattaatggccccaaagaagacaaacaaggtgcccagccagtgccacagggtgaaggggttctggaagtacaagatggaaaagatgaggctcacaaatttgcgtagggtcacgacgagcgtgacggtgagggaggcgcattctgtggtgaggataaacacaccccggatgcacacgtactgagtgatgatgttcatgaggaggtagaaccacatgatgggcagggtcactccgatgacgggaatttcatataactcagacttattgaatagaactgcatggtcataaatatcagaagccaagaagacgaaacccggaagtggaagggcgtgattataaaacaaagcctccttggagtgtttcccaaatcgtttgtagagagtctcttggaatatccccatccttgctgacatcagaagagcaaaagtcaatgccccaatacctagtaaccaccacacaaatgcctggaatccatcag

SEQ ID NO: 166612 - DNA, 495 bp, Homo Sapiens
acagaggctgaatggaagccagctctgctccagtggctctctgagttgagcatgcatcagttaccttaagggcttgttaaaacatcgctaggctccaccctgtttattcaataagtttgttatgggatataagaagatgcattttattaagttccccagtgatgctgctgttctactataggaaccacacttgaagaactagttctacaattcagctgtatgttgtaaaggagtcaagtcaatgaaggagttataaagagttgctgaaaaatggagtaacagtgtatgggacttcacatcagttctccttattgattgttagtttgatccctcttgttcttttgttgtaaacattttctattaattagggaaatgccatttaaggagtgaggagagggtattatatctatggggccattgtgtttgggtgtttttacaaggaacttttaccatacgggtgtgtaggtccctttctgttacagttttaaaaagtgg

SEQ ID NO: 166613 - DNA, 496 bp, Homo Sapiens
gcagcttgagaaggcgttcagcaccacgcctagcaggcagaccttgaagcctcacctttagtctatctgcagaggtattcagttcctggcacaggggactaggggcatgtagagtatatgaggaggcagtatggctgtgcaggagccttcatttcagcttcaattaatagggaagaatttatgatagctctatagatgctgaaaaggtatttcgtaagatttaaaatccatcccttattaaaactcttagtaaattaagtctggaaagaaacaccctaatctagataaaggtctgtttcagaaaccaacagtgatggcattctaaagagtcagtacgcacaggcattcccattaaagtcagaaactagccaagggcaagctattattcagcagtgtcccggcactactaacccctgcaacaagccagatgaggaacataaggaagaattataattgtcattatttgtagacaataaaactgcctacctgtaaaacc

SEQ ID NO: 166614 - DNA, 543 bp, Homo Sapiens
  misc_feature (43)..(43): n is a, c, g, or t
acagaggctgatggtagagatcaacttcctgtgtgtccacaangaagctgcgttccaagagggttgctccagttctgatccgagagatcaccaggcgggttcacctggagggcatcttccaagcagtttacactgccggggtggtactaccaaagcccgttggcacctgcaggtattggcatcggtccctaaacccacggaagttgattgaagtgaagttctcccacctgagcagaaatatgaccatgcagcgcaccatgaagctctaccgactgccagaggccagtgctgcccccggggtggtgggcagggggccagagagagggcaaggagagcctggcagtcagcagggagagaagggctctggggtggagagggagcttttctcctactggaaaagcgaaccagcccatagtcttcagaatttcctggactttctatttctgttatctgaagccaggatttaatttaagtttaactttctcagttcctcttgagtctgtgcctggaactagcttctctgctggataccttgggtaccga

SEQ ID NO: 166615 - DNA, 811 bp, Homo Sapiens
  misc_feature (571)..(571): n is a, c, g, or t
ggtcatgtatggcaagagctctactcgtgcggtgcttcttcttcttggcatacagctcacagctctttggcctatagcagctgtggaaatttatacctcccgggtgctggaggctgttaatgggacagatgctcggttaaaatgcactttctccagctttgcccctgtgggtgatgctctaacagtgacctggaattttcgtcctctagacgggggacctgagcagtttgtattctactaccacatagatcccttccaacccatgagtgggcggtttaaggaccgggtgtcttgggatgggaatcctgagcggtacgatgcctccatccttctctggaaactgcagttcgacgacaatgggacatacacctgccaggtgaagaacccacctgatgttgatggggtgataggggagatccggctcagcgtcgtgcacactgtacgcttctctgagatccacttcctggctctggccattggctctgcctgtgcactgatgatcataatagtaatttgtagtggtcctcttccagcattaccggaaaaagcgatgggccgaaagagctcatanagtggtggagataaaatcaaaagaagaggaaaggctcaaccaagagaaaaaggtctctgttttatttagaagacacagactaacaattttaaatggaagctgagatgatttccaagaacagaaaccctagaatttcttggaagctaatggaaactttttcttttggctttttccagttggcgacccggtttttccaacccagttccggcaggcataataaaaattctagaaaaagccaac

SEQ ID NO: 166616 - DNA, 368 bp, Homo Sapiens
aagaggctgaatggatttagaagacacgattattgatgtaggtgacaccatagatgtaatcctcaaagacgtcgatgctgaaggggtgacttaggcctcgtttgctgtcagcagccacaatggggtccgtgccattgagccggatgctgccgatgactgaaagcttggcgtctgcccagtacagccgctcattgtgataatccacggccaggcctgtgggccactgaatgttgtcctgcaccagtgtctcccgaagcgtcccatccatcgctgccgtctcaatcttggggtggttgccccagtctgaccagtacatggtcccgagatgagcgtcttgcggttctcgcccctcatccgcttatccaatg

SEQ ID NO: 166617 - DNA, 517 bp, Homo Sapiens
ggcagggaatgcaattctcagagagaccaaagacccgcaaaagatgtatcccaccatctatgagctgaaagaagacaagagctacaatgtcacctccgtcctgtttaggaaaaagaagtgtgactactggatcaggacttttgttccaggttgccagcccggcgagttcacgctgggcaacattaagagttaccctggattaacgagttacctcgtccgagtggtgagcaccaactacaaccagcatgctatggtgttcttcaagaaagtttctcaaaacagggagtacttcaagatcaccctctacgggagaaccaaggagctgacttcggaactaaaggagaacttcatccgcttctccaaatctctgggcctccctgaaaaccacatcgtcttccctgtcccaatcgaccagtgtatcgacggctgagtgcacaggtgccgccagctgccgcaccagcccgaacaccattgagggagctgggagaccctccccatcagcctcggggatcctcta

SEQ ID NO: 166618 - DNA, 191 bp, Homo Sapiens
acagaggtgatggtggcttccacaggatggcagtgagtgccctcactctgctttcttctttgaatccttgcaggtggacaggtagacagcagctgtccaaacactataagaccacatgctttatacagcggcaatgcagtcaagcccgcttttccatggtagcgggcagatattgggacagcgcctcctcc

SEQ ID NO: 166619 - DNA, 594 bp, Homo Sapiens
cgagctcggtaccctgcacacgccgaggccccgacccagtgggaagagtgtgggggaggcgcacagtgtgagcccgcccccacgtcgtggggtaacatctgttatcaagctgctgtcgttgttgtgaaagcatgtagactgtgccagaggccagacccacgggctcatgcacccctgagccagcagggcatcttggaaaaggaactcttggttcgatacctggagcagaggaggggaaagtccagggctatagggtgtgatgaagtcacccctttctgtcccactacatctgggactgactttccgagcctccagtccaaagccggcttgatttccgtgaactctggtgctcctgcatctcatgagtgtgccccatgggtcccctcccctctcagcatttccttgtcccgtctggacctggggagtggttaggcagcaagctttggtttatggttttcattcattggtgaagtaaattaggcagtgctaaagcctgtgggtttggtccttgaacaagatgtgggccttgcaagatgggagagtaaaccttgaagggctttattaaagaaataaaaaagaacttttgtatctttt

SEQ ID NO: 166620 - DNA, 981 bp, Homo Sapiens
  misc_feature (875)..(886): n is a, c, g, or t
aggagcagatgatagggtattattttagggagctactacagaagcttgggccagagatgatggtggcttccacaggatggcagtgagtgccctcactctgctttcttctttgaatccttgcaaggtggacaggtagacagcagcccagcccagtgccttgaagagcccaagcagaagaaaggcagacaggaaaaggcctacgctgtcctcaagggagggccctgaaagacctgctacctccagggtgacctcagcgctgcgccccgaggcaggcaggctgggatggtgaattcgacaggcatagcgtgccccatgctgctcagtggtgactgggggcggctgcaagtgcccagagaggctgacagagccatcggaatggtggcgcagggccgagagccacctctgcccctcggccttctgagagcggccccctgggccaccccggagttcccactccacctccaggcccccagaagggtagaagtggggacaccaggcagagcaattcccggggtgcctcccctggggcggcccgggcaagggttgctggcatcagggacactttggggggtttgtacacagcaagctccagggggactgtccttgcaggtatggcaggggtatgggggccagaataggtgccctcctgaaaagggtgaactctagggagccagaaaggtccccttttccggtccagggggccccatgggttcatctctccttcccaagcaggcaaatggccccgggcccccttttttggggttgcctgggaatttgtggccattccaagcccagggagttgcccaccccaaggaccagaattgccccctttaacccagggggctggtggggtcccccccctcctacccccaaannnnnnnnnnnnaaccccccaacccagaaaaatgagggcgggcccttcggagagggggggcggccctttgtaggcaaaacacttaaaagctcccgagaagaatttcc

SEQ ID NO: 166621 - DNA, 977 bp, Homo Sapiens
tcggacgaggctcgtgggagccgcttctccagtctgctgatgagagaagcgcatgctggtgcagcgtaaggacgaactcctccagcaagctcgcaaacgtttcttgaacaaaagttctgaagatgatgcggcctcagagagcttcctcccctcggaaggtgcgtcctctgaccccgtgaccctgcgtcgaaggatgctggctgccgccgcggaacggaggcttcagaagcagcagacctcctagcgctcccttgcctacctcagctgcctcctgcgcccagtgcccgactgactggaggaggcctgtcccaattctgcccgctccatgggaaagcgggcttgactgcattgccgctgtataaagcatgtggtcttatagtgtttggacagctgataaatttaatccttctttgtaatactttctatgtgacatttctcttccccttagaaacactgcaaattttaactgtaggtatgatctcttctggtgttgactggactgcgtggggtgggggacgatcaggaggaagtgagcagtcgcctgcctgcagcaggcagcttctactcctgcctcatgcgtacgtcccacaaatgcaggtgtcctgagcaccacacccagtgggaagagtgtgggggaggcgcacagtgtgagcccgcccccacgtcgtggggtaacatctgttatcaaactgctgccgttgttgtggaagcatgtaaactgtgccaaaggccagacccacggggctcatgcacccctgaacccagcagggcatcttgaaaaaagaaactctgggttccatacctggagcaaaaggaagggaaaatcccagggctatagggggtggtggaactccccccctttctggccccctacatcgggggacatgacttttccgagcctcaaggcccaaagccgggttggatttccggggaatcctgggggcctcctggcttctctgggagggccccctaggggt

SEQ ID NO: 166622 - DNA, 847 bp, Homo Sapiens
  misc_feature (48)..(108): n is a, c, g, or t
  misc_feature (155)..(157): n is a, c, g, or t
  misc_feature (176)..(238): n is a, c, g, or t
  misc_feature (377)..(385): n is a, c, g, or t
  misc_feature (671)..(671): n is a, c, g, or t
aaaaaaacccccctttttttctcaagggggggccacaaaagacccccnnnnnnnnnnnnnnnnnnnnnnnnnnnnnnnnnnnnnnnnnnnnnnnnnnnnnnnnnnnnngccggttggtaaaaaaggatttttttcccggacagggcggggggagnnnggggccccaccctgtgggnnnnnnnnnnnnnnnnnnnnnnnnnnnnnnnnnnnnnnnnnnnnnnnnnnnnnnnnnnnnnnnatttttgggggccgttccccccctgagggcaagaatttaaaaattttccttttttgcaggccagggcattttctccaattccctccggatcgtccccccacccccaaggcagttccagttcacccccggaggggacctnnnnnnnnngtaaaatttcccagttttttaagggggaggggaaattccccatagaaaattttcccaagaagggttaaaattttcggtgtttttaaccctttaagaccacaagctgtatacaccggcaatgcaggcaagccccctcttccttttattgggcaggaatgggacaaggcctcctccactcactcgggcacagggcgcaggaggcagctgaggaaggcaaaggagcgctttgaggtctccttcttcttaaaaaaagcctttttccgcggcggcagccagcatcctttangcacagggtcacggggtcagaggacgcaccttccgaggggaggaagctctctgaggccgcatcatcttcagaacttttgttcaagaaacgtttgcgagcttgctggaggagttcgtccttacgctgcaccagcatgcgctgtctctcatcagcagactggagaagcggctcccacg

SEQ ID NO: 166623 - DNA, 234 bp, Homo Sapiens
aggctgaatgggtaccatctccattatgggggatacaagtgtttctacattaactcctgccttatctaacactaggaaaattcagtcagagccagcttcctcactgaccaccagattgagggagaccagcacctctgaagagaccagcttagccacagaagcaaacactgttcttttctaaagtgtccactggtgctactactgaggtctccaggacagaagccattcagcctc

SEQ ID NO: 166624 - DNA, 234 bp, Homo Sapiens
acagaggctgaatgggagaaagataagaaagatctcttatcttagacattctgtgtctgcccagcagcctctgctcaaagctcctggaaataaaatggccttacgcctggagattatctcctaccctagaagcctggcagttactgtcctgttctgacaaactctctttcttcagatcccttgattgtaaaataagatacccctagaccttcagccctagtcgccattcagcct

SEQ ID NO: 166625 - DNA, 201 bp, Homo Sapiens
acagtaggtgatggagaggctgatgggcttctacctatttctgtagctcacttatcattctcttctacccataaatatttccccaaatctgttctaccagttgctccttttaaatgctgttaggcctcaatctgagacccccacaggtccattctgtaatcagaatccaggaaaccctttctctttaccattcagcctctg

SEQ ID NO: 166626 - DNA, 551 bp, Homo Sapiens
ctcggtacccgtcagcatttccgtgggaagttatctggacacgttggcggatgatgtcccaggccatcagaccccttcagacttggaccaattcagtgacagctccctcatagaggactcacaggcactacacaagcgtcctaaattggattctgaatactactgctttggctagtgacagttttttgcatgggactggtgtgcaatgaacttgtatttatccttcttctccgctgctatatttttggtgtgatttttattttaataagatgacctttttaaaagaagctgattttgaaactgcttaatggtattgctgttgctcctaatacttctcatctgagctgatttatttttctctgttacatctctattttttatttattacaatgattttctcccttcttttacagtagcacaaacaaagtagggggaaaagaataagcaataattatgtttttgcttttgttttcagagcaatgggtcagggattacaagaaaaactttgctaaattttacaataaaccaaagtctgataacagttaaaaaaa

SEQ ID NO: 166627 - DNA, 973 bp, Homo Sapiens
atggatatccatgcaaaaagaggatgattccaaaaatcttagaaaccagcttgatagactttcaagggaaaatcgagatctgaaggatgaaattgtcaggctcaatgacagcatcttgcaggccactgagcagcgaaggcgagctgaagaaaacgcccttcagcaaaaggcctgtggctctgagataatgcagaagaagcagcatctggagatagaactgaagcaggtcatgcagcagcgctctgaggacaatgcccggcacaagcagtccctggaggaggctgccaagaccattcaggacaaaaataaggagatcgagagactcaaagctgagtttcaggaggaggccaagcgccgctgggaatatgaaaaagaactgagtaaggtaagaaacaattatgatgaggagaacaattagcttaaaaaatcagtttgagaccgagatcaacatcaccaagaccaccatccaccagctcaccatgcagaaggaagaggataccagtggctaccgggctcagatagacaatctcacccgagaaaacaggagcttatctgaagaaataaagaggctgaagaacactctaacccagaccacagagaatctcaggagggtggaagaagacatccaacagcaaaaggccactggctctgaggtgtcacagaggaaacagcagctggaggttgagctgagacaagtcactcagatgcgaacagaggagagcgtaagatataagcaatctcttgatgatgctgccaaaaccatccaggataaaaacaaggagatagaaaggttaaaacaactgatcgacaaagaaacaaatgaccggaaatgcctggaagatgaaaacgcgagattacaaagggtccagtgtgacctgcagaaagcaaacagtagtgcgacggagacaataaacaaactgaaggtccagggcagagggtcgacccgcccgcgaatttagtagtagtagtcgac

SEQ ID NO: 166628 - DNA, 477 bp, Homo Sapiens
gtgtccactgttttaggaaagtatgccaggtttactaggagcatatctatctggtgggtagaaagaaactcaatgcatttgctgcttgtgcttatgtttcaaattccacaaacgcaaatccctttggatctccagtagacttataatgtggtatacttatataaacaacattgccacatttcccaaatactctttcaatccagctgtgattaacatttttgggaagtaactccacatacactgtgcgttcatcctcatcctttggtctttcccccagaggttttttcctccggattctggtgccttccaaatcaagctctacaacagctgaacttctcaatgctctggcaattaacttcccatcagtagtcaattttttcattttgttaaaagacacaagtagtgatatatcaacatatccatctctagatttttctatctgttctcgaagaaatctatccttgtgaagatttgcat

SEQ ID NO: 166629 - DNA, 346 bp, Homo Sapiens
gggacccttctggaggagaacacgaatctttgggaactagttcaggaagggattctgcatcttcagagctgcttctcttcctcttccctgttctgacttcaggatctggacttacctcaattgcttttgctgcttgttcttttgtttcaaattccacaaacgcaaatccctttggatctccagtagacttataatgtggtatacttatataaacaacattgccacatttcccaaatactctttcaatccagctgtgattaacatttttgggaagtaactcctattataaattaaaagcaatattagagtttttcacaatcagaatgtcaataaatttttaactacc

SEQ ID NO: 166630 - DNA, 870 bp, Homo Sapiens
  misc_feature (65)..(142): n is a, c, g, or t
  misc_feature (711)..(712): n is a, c, g, or t
  misc_feature (717)..(723): n is a, c, g, or t
  misc_feature (725)..(735): n is a, c, g, or t
  misc_feature (737)..(740): n is a, c, g, or t
  misc_feature (770)..(770): n is a, c, g, or t
ggagacggaaatgtccgaaggccgcagtacttgaccctgtattttgggagtcgaacggagaatgnnnnnnnnnnnnnnnnnnnnnnnnnnnnnnnnnnnnnnnnnnnnnnnnnnnnnnnnnnnnnnnnnnnnnnnnnnnnnncggtcacgagttaaacaggtgcttgcagatattgctaagcaagtggacttctggtttggggatgcaaatcttcacaaggatagatttcttcgagaacagatagaaaaatctagagatggatatgttgatatatcactacttgtgtcttttaacaaaatgaaaaaattgactactgatgggaagttaattgccagagcattgagaagttcagctgttgtagagcttgatttggaaggcaccagaatccggaggaaaaaacctctgggggaaagaccaaaggatgaggatgaacgcacagtgtatgtggagttacttccaaaaaatgttaatcacagctggattgaaagagtatttgggaaatgtggcaatgttgtttatataagtataccacattataagtctactggagatccaaagggatttgcgttttgtggaatttgaaacaaaagaacaagcagcaaaagcaattgagtttcttaacaacccaccagaagaagcacccagaaaaacctggcatatttccctaaacagtgaaaaataagcccattcccagccttaagagttgtggnngaacnnnnnnnannnnnnnnnnnannnnaaaaacttgtccgggcggcctccggccttnaagaaggcttttctaaaccattcgttttgccgcgcggggcccagtaaggaaagggacctgggccataacctgtttcccataggaaatccctggccatgaa

SEQ ID NO: 166631 - DNA, 1986 bp, Homo Sapiens
  misc_feature (1962)..(1962): n is a, c, g, or t
  misc_feature (1972)..(1972): n is a, c, g, or t
cttgctgaggctggggcaaccaccgcaggtcgagacagcaggcggctcaagtggacagccgggatggcagagcgtgcggcgctggaggagctggtgaaacttcagggagagcgcgtgcgaggcctcaagcagcagaaggccagcgccgagctgatcgaggaggaggtggcgaaactcctgaaactgaaggcacagctgggtcctgatgaaagcaaacagaaatttgtgctcaaaacccccaagggcacaagagactatagtccccggcagatggcagttcgcgagaaggtgtttgacgtaatcatccgttgcttcaagcgccacggtgcagaagtcattgatacacctgtatttgaactaaaggaaacactgatgggaaagtatggggaagactccaagcttatctatgacctgaaggaccagggcggggagctcctgtcccttcgctatgacctcactgttccttttgctcggtatttggcaatgaataaactgaccaacattaaacgctaccacatagcaaaggtatatcggcgggataacccagccatgacccgtggccgataccgggaattctaccagtgtgattttgacattgctgggaactttgatcccatgatccctgatgcagagtgcctgaagatcatgtgcgagatcctgagttcacttcagataggcgacttcctggtcaaggtaaacgatcgacgcattctagatgggatgtttgctatctgtggtgtttctgacagcaagttccgtaccatctgctcctcagtagacaagctggacaaggtgtcctgggaagaggtgaagaatgagatggtgggagagaagggccttgcacctgaggtggctgaccgcattggggactatgtccagcaacatggtggggtatccctggtggaacagctgctccaggatcctaaactatcccaaaacaagcaggccttggagggcctgggagacctgaagttgctctttgagtacctgaccctatttggcattgatgacaaaatctcctttgacctgagccttgctcgagggctggattactacactggggtgatctatgaggcagtgctgctacagaccccagcccaggcaggggaagagcccctgggtgtgggcagtgtggctgctggaggacgctatgatgggctagtgggcatgttcgaccccaaagggcgcaaggtgccatgtgtggggctcagcattggggtggagcggattttctccatcgtggaacccagaaactagaaagcttgggaggagaagaataccggaccacaggagacaccaggtgccttgtggcatctgcacagaagaagctgctagaggaaagactaaagcttgtctcagaactgtgggatgctgggatcaaggctgagctgctgtacaagaagaacccaaagctactgaaccagttacagtactgtgaggaggcaggcatcccactggtggctatcatcggcgagcaggaactcaaggatggggtcatcaagctccgttcagtgacgagcagggaagaggtggatgtccgaagagaagaccttgtggaggaaatcaaaaggagaacaggccagcccctctgcatctgctgaactgaacaaactatcagaggaaaggaagtgggactggcactatttgaggttaagacaaactgcatatgtacttcaattgctttgcacttttccgtttcagcggaagacctgaagagtggtcagaacagagcctttgatttttattatggttattttattgattattactggcaaaaacggccaggtacaacacctttttcatacaaggcccaggaggcttagtccagtctgtgctcctgggctacaaggacccagcctgagatggtcccatctgcagggccccgcaccagttggagcagatgcctccccaccaccaattgccaaaggtccaataaaatgcctcaaccacggaaaaaacccntccccccccnaatacaaaaattgt

SEQ ID NO: 166632 - DNA, 872 bp, Homo Sapiens
cagcaggagaaaggataagaaagggagtgggactggcgcctacggtggccgaagtgggacgcgccgagccggaggctgcaggatgatgcggttcatgctattattcagccggcagggaaaactgcggctgcaaaaatggtacctggccacttcggacaaggaacggaagaagatggtgcgcgagctcatgcaggttgtcctggctcgaaagcccaagatgtgcagcttcctggagtggagggacctcaaagttgtctataagagatatgccagcctctacttctgctgcgccatcgagggccaagacaatgagctcatcacactggagctgatccaccgatacgtggagctcttagacaaatactttggcagtgtgtgcgagctggacatcatcttcaactttgagaaggcctacttcatcctggatgagtttttgatggggggggatgtccaggacacctccaagaagagtgtgctgaaagccatcgagcaggctgacctactgcaagaggaggatgagtcgccacggagtgtgctggaggagatgggtttggcatagcccctgctgggccggggtgtggcgatggggtcctggcagcgtggcgggaacggctgcttctcctctgcccagggccctgttcttggtgggactcggctgcccctcctctgctgcctcacctttcggagtgagctgtgggctcaggcccttcaaacattccctgtccctccacgacgcttaaatccaattacaccatgttcccactgaaggttagagaagctacgaagcaggaaaatgtgaccagataggcgagctaatcgcattgaattcctggccttggcaaaagatgtgagcccagagtcctaccaacgca

SEQ ID NO: 166633 - DNA, 1199 bp, Homo Sapiens
  misc_feature (1121)..(1146): n is a, c, g, or t
ggaggctgcaggatgatgcggttcatgctattattcagccggcagggaaaactgcggctgcaaaaatggtacctggccacttcggacaaggaacggaagaagatggtgcgcgagctcatgcaggttgtcctggctcgaaagcccaagatgtgcagcttcctggagtggagggacctcaaagttgtctataagagatatgccagcctctacttctgctgcgccatcgagggccaagacaatgagctcatcacactggagctgatccaccgatacgtggagctcttagacaaatactttggcagtgtgtgcgagctggacatcatcttcaactttgagaaggcctacttcatcctggatgagtttttgatggggggggatgtccaggacacctccaagaagagtgtgctgaaagccatcgagcaggctgacctactgcaagaggaggatgagtcgccacggagtgtgctggaggagatgggtttggcatagcccctgctgggccggggtgtggcgatggggtcctggcagcgtggcgggaacggctgcttctcctctgcccagggccctgttcttggtgggactcggctgcccctcctctgctgcctcacctttcggagtgagctgtgggctcaggcccttcaaacattccctccctccaacccctacctccaatttccccttttacccacgtgaaggtttaagaacctaggaggcaggaaaatgtgacccagatgggggtgctatttggcttttattccctgcctttgcagaactgatgtcaccccagatgtccttccctccctaataactgtaaatatataaatatgtcaggttaaagggaaaaggtgttcagggcacttcttgtcctctctgtcccataacctacctccaccctccccctagccagccaggcagcttctctgcctgggaggggagcctggacccccctctttctccttggctgcagtggggcctttatccagtgccaggaggaacaacatagttaatttttttctaaccttgccactttgagggaaggaagggttgggggaagggcaagctttatgggaccttggtcctggccctggcctttcactccagttctgggtgaggcaggagcnnnnnnnnnnnnnnnnnnnnnnnnnnaagtgtctgcctttatgtcctttcttctgaaataaaagtaaaagcatttctgg

SEQ ID NO: 166634 - DNA, 443 bp, Homo Sapiens
ctagttatatttatgtaaataggggcatttggtaatatattatcataatttaatgagtcgaaatcgtgcgttttgtttaaactatataccatttcggctcagtctaatcctttttgtagtcactcataggccagacttagggctaggatgatgattaataagagggatgacataactattagtggcaggttagttgtttgtagggctcatggtaggggtaaaaggagggcaatttctagatcaaataataagaaggtaatagctactaagaagaattttatggagaaagggacgcgggcgggggatatagggtcgaagccgcactcgtaaggggtggatttttctatgtagccgttgagttgtggtagtcaaaatgtaataattattagtagtaaggctaggagggtgttgattattaaaattaaggcgaagtttattacctc

SEQ ID NO: 166635 - DNA, 701 bp, Homo Sapiens
tatcccggggagggtagagttggggaccgaggagaaacacagaagggtcatggatgacagggagggaagaggagctggaacaacggtgcccggtttccaaaggcttcctcacgtttgatgaatcaaaactgtgggaagaaaccggagcttcctccctctctgagacaacggtgccactgagactgcgtgagatgcgacataaattctctgcactgtactgctcatcctccccacactccccgctgaggcctcggcaaggtgtagcctgagaagtacgcactgttctggcttcatggagaccatgctccatttctgctgttgaagtttttgagagaccaggatcatgggctgagtgcaacctcctccccatgccatctgcagagcctgtttggctaagtgggtgccaggcggtatcctgctgcccccatccagaacagccagcttgagaagcctgaagactggcctgatacagagactccaattctgaggtctcctgctctgtgtcttggttccaatgtggatgcaaaaggatgtgatttctctctggataggttacacacgtactgggaatcatgaggggaggacttcattcctggcctaggtgcaatcctcaactaacctacactgccacactaccagaaagaagcaagggccttcaggttcctcacactcagtcctggagtgatcttttccattcagca

SEQ ID NO: 166636 - DNA, 544 bp, Homo Sapiens
  misc_feature (60)..(104): n is a, c, g, or t
tgaaagctcacccactgctggagggcacagggcgaatggagaaaaatgtcggactcacgnnnnnnnnnnnnnnnnnnnnnnnnnnnnnnnnnnnnnnnnnnnnncactcatgcattgtgcacaaggggttgtgtatgacgatgatcgcacagaactgtttgtaatatcaaaagattagaatactgtaaatttccattaacagcagaatggctaaactcacagacatacagtgcagaagttgaaaacaatgagggcagttctctgtgtactcccaggcatctccctactgttaaatgaaaaaaagtaatcaataatgtacaggacacaatagcattttaccacttctatagaaaagaaaccatgcaacacgtttttcagatacaaatggaagtgaataaggcgaggtgtagcaggaaacacagcaaactggtaacactggttacccctctggagggtgggggattggtagtgccaacgttgttgtcgtcaccattcaactctgtgtaaggagaaaacacccacatatcactgtgagcagcgttgg

SEQ ID NO: 166637 - DNA, 447 bp, Homo Sapiens
cagaggctgaatggccgtatgtttcgtgtttcccctgatgtgccctgttactgttcctcttgccatggtgtttcttcctgtggcaaacatttcctttaccatttttgccttggcagcgttgcactttcatccactgcttaacagtatggttgtgcgggctgacacagattcttctgcgcttgacatgaaggatgacagcagccaagtcacaatccccatcagctctctggatgcgacacatattcactctttccaggagccttctggaaatatgatgtgaaacctccgtgcaacagctggaggcaatgggaagtatggcttctgaggcatgtagggccgcacagacagccaaggccacgatggcgagtcctctctgctgcattcctgcctgccctactggcactgacagcaacacaagtgagggggataaaccgagaggggatcctt

SEQ ID NO: 166638 - DNA, 241 bp, Homo Sapiens
atcaactcatacacagattagtacgagtgacaataatacaactcatttgtccagcatggaatcggtgcacaatctggtctacgcccagctgcaattcacctatgacacgttgcgcggttacatcaaccgggcgctggcgcaaatcgcagaagcctggtgtgtggatcaacggcgcaccctagaggtcttcaagggaactcagtcaagatcaacccgtcagccattctctcggccatttaca

SEQ ID NO: 166639 - DNA, 516 bp, Homo Sapiens
  misc_feature (12)..(12): n is a, c, g, or t
  misc_feature (22)..(22): n is a, c, g, or t
  misc_feature (45)..(45): n is a, c, g, or t
  misc_feature (51)..(51): n is a, c, g, or t
  misc_feature (63)..(63): n is a, c, g, or t
  misc_feature (79)..(79): n is a, c, g, or t
  misc_feature (85)..(85): n is a, c, g, or t
  misc_feature (171)..(171): n is a, c, g, or t
acgaaaaaaccnaaaaaccccncgctttggctcccccgggctgtnccttgnccgtgtgtgttnccccgtcctcaaaaanccgggntcccctactttccccccatctggcattgtcccccccggcacccgcttttggcttgtccctgcctcagtcttcgttcagggaacagncttccctcttaaatgtcccttttgcaggtttttagaaaccggttttcttggataaaagttggcagtgaagtggcagtttgcaagtggccagtgattcccccaactccaaagacagatttttacctttctggttatttttgttcatcttttgggcagggcaaaggttacctgagacacaattactttgggaatgtagattaagatacgttacatggaaacttgcaactggcatccgaaagaaaaactgtttttatcctgttgtacaaatacagtttttaaagcatttttctggcttgtttctatttcttaataaatacttggaagagagatttttgtttactcctg

SEQ ID NO: 166640 - DNA, 748 bp, Homo Sapiens
  misc_feature (13)..(13): n is a, c, g, or t
cttcctccctggnaataagagtgagcgctcgtgctctctaaacaccacacttgcctctttatgttcaatgcttgatgtgtttcttttctcagcagccaagtcctcagtcccaaggatttatgtggaagcacacgcgtcccctgggctgctgggaaggcactgctggcgagctcatctgtctcttgtgtctggcccccgctgggtggcaccgcctccctctttcctcccatactctcttttctcgtggactcgtaatgaggtggtttccatagccgcccccgggcccgtcatcatcagctttatcgtctaaatttaaacgatgaggcattcatcctttcatgagttacgagaagccagaactcctcgcttttgctcccgggctgttctttgggcgtgtgtgtttccgtctcacaacccggctcctactttccccatctggcattgtcccctggcaccgcttttggcttgtcctgctcagtcttcgttcagggaacagcttcctcttaaatgtcccttttgcaggtttttagaaaccggttttcttggataaaagttggcagtgaagtggcagtttgcaagtggccagtgattcccccaactccaaagacagatttttacctttctggctatttttgttcatcttttgggcagggcaaaggttacctgagacacaattactttgggaatgtagattaagatacgttacatgggaaacttgcaactggcatccgaaagaaaaactggtttt

SEQ ID NO: 166641 - DNA, 658 bp, Homo Sapiens
  misc_feature (126)..(227): n is a, c, g, or t
  misc_feature (276)..(285): n is a, c, g, or t
gaataaagaaagaaaagtgcgatgcccagtcaattcacaaattaagatcatcctggtttaaatctactctcacattggattcacagtattaaattttctatgtgctgtgtttggtccgttggtatnnnnnnnnnnnnnnnnnnnnnnnnnnnnnnnnnnnnnnnnnnnnnnnnnnnnnnnnnnnnnnnnnnnnnnnnnnnnnnnnnnnnnnnnnnnnnnnnnnnnnnttgagccactgtgcccagcctgttctatgtttttaagctacacgagaannnnnnnnnnaattaattctcactgttggtccagtctgtcttcatctaagtttggtgttgcagtttaaacgttaacagtgacttttaaagggccacattcacctgagactagggtaatcatctttacttctgggttcctgaaattcatattttcccagtggaccatcctccagtggctgtggttgttgagcatgctttcagaacacctatgtggcttaaaacttagttaatgtttggtgttcaacactacgtgtaatattttaaaactgtttaatgtgatgtgaatacatttatgtacatttatttttaaatttgtaaatagctttaaattgctatggcaatgtttcttttataaatcatcaaaataaacctttgtgaattga

SEQ ID NO: 166642 - DNA, 1611 bp, Homo Sapiens
  misc_feature (896)..(904): n is a, c, g, or t
gttcagagtcacccgtggctcctaaggaaaaaacagcatcatgaaaggcaaaaagtatttgaaacgtaattgtttcaattttccacgcccgttctcacatgccccctttagctttatttctgggaacatgtcactagacctcagctagcctgacaccgcaataacccgttaggctttgaggcttttcagtgaattcttgacatttaaatcttcttatagaattctttatgaagccttaactaattcttgtttttgcttcctcagaaactttttattgcatctgccatccttcattggatttttgttttggtttgttgttgccattctagcaatgagcttagtccttgtacatctgcattaaggtgccgatgcagaaggcaaattggaaacacgcgccagcggcagtggggctcaaagccgacctccatgcatcattctctagagttgaaaggattgacatttctcagtaactacccggcaaaatatatattttcataatgtgaattgccttttaggaaaacaatgtttcatgaaacactgtaagatacttatttgaaattaattataaggcattcatatttttaggactgaattcaaagggaaatgcttctttgactttttttcatgttcggttgactttcagctttctggagtgacaaagcagcagtgatgggtgctattcctggttctgtggtggtttacttgtctactaagtgatttactttcaaacctcattacagataatcttactaaaagacttaacatgcacactgctaaaaggtgtttaacggttttccattaacgctgtgtatgaacaatatttggtgacatgttgtcttttgtcctgtagattgtcatatctgttatgtagttatccttttggcaagtcctttgannnnnnnnncctctagaaaatcctcagactgtcaatcttccatattttgaatattataatgctgtggccatttctatagaaagattacttgcaagtgtgtgtcttgaaaataacctctgtgtatttgtgtgtttatgtgagttctgtctaagagatcagataagctctggaagcttcatcatctgtacctacatgtaactgtatctgggttacatgggcaggccggtaccaagtcctgctcttcgatggggtggctgagagataaaggttcctgaactctccttgcttgtgtatgcaccacatctgtacttcagagaggtggaaaatcatctacaacactgcgtttcttgtggttgtgctgttactggtataaagtcaagtgccttcaatgctaaaggctcagaaatttttcttaaactgatttcatgtcctatgcaagtgttttctacaacccgcataaccagtactttgtaaaacttgtttacgcttcaattgtacatagtgatttttaaagaaatatatagtatttttatttaggtacctccaaacttgaattcgtctgtgtgaagcattgtaaaacgatacatttctcttttgagtaccattacagttgtacagaggttttcactgcttctatttttctactgttactgataagcatgtaacactgactttatcctacatatagttggcatttcaaataaatggcttgtata

SEQ ID NO: 166643 - DNA, 1567 bp, Homo Sapiens
atgaatcccgtctcatgttgaagcctgtcccgggagttagctgaacaaatctgtgatataacatcaatgctgtgtaagaaatatattgataatcctaaattaagggagcttctgataattggaggtgttgcagcccgggatcagctctctgttttggaaaatggagtagatatagttgtaggtactccgggaagactagatgacttggtgtcaactggaaagctgaacttatctcaagttagattcctggtcctggatgaagctgatgggcttctttctcaaggttattctgattttataaataggatgcacaatcagattcctcaggttacctctgatggaaaaagacttcaggtgattgtttgctctgccactttgcattctttcgatgtaaagaaactgtccgagaagataatgcattttcctacatgggttgacttaaaaggagaagactctgttccagatactgtacaccatgttgttgtcccagtaaatcccaaaactgacagactctgggaaaggcttggaaagagccacattagaactgatgatgtacatgcaaaagataacacaagacctggtgctaatagtccagagatgtggtctgaagctattaaaatcctgaaaggggagtatgctgtccgggcaatcaaggaacataagatggatcaagcaattatcttctgtagaaccaaaattgactgtgataacttggagcagtactttatacaacaaggaggaggacctgataaaaaaggacaccagttctcatgtgtttgtcttcatggtgacagaaagcctcatgagagaaagcaaaacttggaaagatttaagaaaggagatgtaagattcttgatttgcacagatgtagctgctagaggaattgatatccacggtgttccttatgttataaatgtcactctgcccgatgaaaagcaaaactacgtacatcgaattggcagagtaggaagagctgaaaggatgggtctggcaatttccctggtggcaacagaaaaagaaaaggtttggtaccatgtatgtagcagccgtggaaaagggtgttataacacaagactcaaggaagatggaggctgtaccatatggtacaacgagatgcagttactatctgagatagaagaacacctgaactgtaccatttctcaggttgagccggatataaaggtaccagtggatgaatttgatgggaaagttacctacggtcagaaaagggctgctggtggtggaagctataaaggccatgtggatattttggcacctactgttcaagagttggctgcccttgaaaaggaggcgcagacatctttcctgcatcttggctaccttcctaaccagctgttcagaaccttctgatttttacatttactgaataagatttgagtaatgaaagtctgtagtcttaaaactctaaaacagttgtactgcttccaagcagcagtatttatagtaacgtaagctattaatgctaactcttgcatgtcaagaaacattagtcttaggaattcttcaaaaaatggcatcccaatgaaaataaatttgatgactataa

SEQ ID NO: 166644 - DNA, 398 bp, Homo Sapiens
cccgtcctactagtgttatgtagagatttgattgagcagctaatgtttctgaactttacttactaattttcagtgtccttaagggttctgtagtgttatcaaagcaaaaagaaaatgctgcataaaaataccaaacttcagcaactgttaatactcagatcatatacctcttaataaatagcatcttatgctaattagccctgctaaactatgtacagaggaaactgttcaagtattggatttgaaagtaagtgacttatgtttaacagaactaatgatgtattgaaacactgtattatgaaaagctaaattatacatcattgtaactatgtagaaagtgtagactaatgtataatcaaaatgctaacgacacccggaaataagggggatgctcgaca

SEQ ID NO: 166645 - DNA, 862 bp, Homo Sapiens
ttaaacaaataaaattctttatttaaatttctcttgtggggaaaatatttttctttaaagcacacttaaaagtaatttgcatttacttcctgtaaagcatttccatttcacaattagcaaaactaaaaggctatgtctcttcatgcatttatttttgttagaaaaatgtcccatggtgctatcaaaccgattttaaccatcatcaagcttaactttgcctctgttgacaacatgactacaaacatgaatcaaaaaggagttaaggaattttaagccataaggtttcaattatagcttaccaattatgtaattagctgacaaaaatcaagtctgatgtagaatagctgtcatctacttaactgcagataatcatggcattttcatttaagatgatctgaacttatgaaataaaggatccagtcccaagaactcaataatctcttatgttttcttttgaagacttatttcaaatattaactatttcggtgcctgaatggaaaaatataaacattagctcagagacaatgtggtacctgtttggaatccagctggcagctataagcaccgttgaaaactctgacaggctttgtgccctttttattaaatggcctcacatcctgaatgcaggaatgtgttcgtttaaataaacattaatctttaatgttgaattctgaaaacacaaccataaatcatagttggtttatctgtgacaatgatctagtacattatttcctccacagcaaacctacctttccagaaggtggaaattgtatttgcaaaaatcagggcaaaatccacacttgaaaagcatttcacaatattatatctaagttgcccgccaatcgaagggtaccgagctcgc

SEQ ID NO: 166646 - DNA, 849 bp, Homo Sapiens
gtaaagaaccaaaaagatagaggaacttggatgtgtgcatgagcaactgtgtcaggacaatgagctatgccttatgacatcccatttggagagcaccagagggcatgctgcggaacgaatgaatcagttaaaaatggttttaaagaaaatgcaagaggctccagagtcagctacagttatatttgcaggagatacaaatctaagggatcgagcaggttaccagcatgtggtggtttacccaacaacattgtggatgtctgggagtttttgggcaaacctaaacattgccagtatacatgggcatacacaaatgcaactctaatcttggaataactgctgcttgtaaacttcgttttgatcgaatatttttcagagcagcagcagaagagggacacattattccccgaagtttggaccttcttggattagaaaaactggactgtggtagatttcctagtgatcactggggtcttctgtgcaacttagatataatattgtaaaatgcttttcaagtgtgggttttgccctgattgttgcaaatacaatttcccccttctggaaaggtaggtttgctgtggaggaaataatgtactagatcattgtcacagaaaaacccaaccatgatttatgggtgtgtttttcaaaattaacatttaaagattaatggtttatttaaaccaaacacatttccttgccttcaggatgtgaagggccattttattaaaaaaggggcaccaaagccctgttccaaagtttttcaacgggggctttttaacttggccaacctgggatttccaaacaagggtcccccccttggtcctctgaaaccatatggctttaaaacttttt

SEQ ID NO: 166647 - DNA, 244 bp, Homo Sapiens
tccatacatgtgtcaagcaacagcataagaatttactctccgagcatgaacaactggtagtgactttggaagaccacaagagtgcactagctgctgcacagactcaagttgcagaatataaacaactgaaagatactctgaataggattccaagccttcgaaaacctgatccagcagaacagcaaaatgtgacccaggtggcacattctccacaaggttacaacactatgaggacgggtaccga

SEQ ID NO: 166648 - DNA, 1215 bp, Homo Sapiens
  misc_feature (96)..(97): n is a, c, g, or t
  misc_feature (99)..(99): n is a, c, g, or t
  misc_feature (102)..(105): n is a, c, g, or t
cggcgtatggtaataaggttccccggggcgggtaaaaggttatacgtctggttttttgacttacgtacggattggccacgtctctgccacgtgttnntnttnnnnaccagaggaagcagcttttattgatgggttatctccagaaaccagaaagactatatgtactcactttcagttacccccgtgcctccagaatcgcatgttgctccacctgggggcggatataaattacctctagattgtccaaagcccagtctttcccttccctgtgcagccttagaaactaagtagcagtactgtttggtgtgtgtttgtttcttccccagcaatgcctactgcagctacttagtaacaactagaggtggagggtgtccggggaagcagttagatgagttaagtgtgatgcacaggaaaatagtatcgtagcctatcaaaggtccctctgccctgcctcagtggcttgattcttcattggttgcatttctctttgtgttggatgacgcccttctgaatcagatcagggatttccactgccagccatggacccagccccagagccatgagatgagctagtccaaatttgggcacattcctggcccacaaaggtttgaaatgatccgtcaggcatattttgccacccctgtacatctttgctgtctttccatccagctcaggaactgcaatttctggggcagtagtaggatatgtgataggaatgtcaaactcgatgtcaaactcatatttcaggaggtcatggatataccagcattttccaaaccaccgagttccttccttgttggactccagtcggaaccaatcgttgtcagcattcttgttgttctccacataccggataagggactgatattcctccttcagtcgctgcacccacaactcacgatctcggggtccggcgttagtcttcagcaccgggatctcagacacaacacgtcgcgtggcttcatccgccatcttggaccagggcgcaagagaaacgcggaagtggtgttgcctgtagcttacctcaaggcgccgtcatctttactatgggaagatgagacgttgggttgctgtaagacctcttttgaataagatctttgttttcttgtcacctagttacccgcttgtgagtgcatcgagaagaacagaatgtaaacagattactccgtcctatatatgacacctatcatcgacgcgtgggtccgacgcgtgggt

SEQ ID NO: 166649 - DNA, 428 bp, Homo Sapiens
  misc_feature (16)..(16): n is a, c, g, or t
  misc_feature (26)..(26): n is a, c, g, or t
acccccttcctagccntcttaccccntcagcaggatcacttgacactttcctatggcattcctacatctcagcacaaccagcaacacacaaacacaaaggaaaccaaacagaaacacaatcaaaggccctgaatcctctagaaatagctgtgttcaagtgaaaataagatgcctcctagtgacaagcaaaaccagggttttagggcaggcacttcttcaatggtattcaacttaaggagcactcagtctggtctataaaaaaagcaggtggaatctttcaagtgtaggatttcagaaactcatatctcatatcatcactgacacttttaatcttgttaagatccaaactacacatttttcccattttctctctctctctttttcagttgttcttgtctgtcaattacttaggtaagagggctaggagg

SEQ ID NO: 166650 - DNA, 929 bp, Homo Sapiens
gctacccaaactcgtacagtttgaaccgctatgatgtgtagagtccaaaggacaggaccagactgttggtgactccttccccggcccccacagcagtatcagaaacttctgacaatcagtgaatgtacaacccagccgaggggacggtgcataactctccatcagaagccctggggttcctggccccccgtgagccgcaggaggatgcgttgcctgcagtgcagacggccgtgagctctgggcaaacctaaacagagaccagtgtctcatgctctttcttcctggagtctgtcatctgagggcgtgtccctgcggagatcttggccacgttgtacctttccatgtggaattattccccaagcagtgtagctcagagcacttgtgtctgcattccagataacattcaggacctgtgtgaaaagctggggtcactgtggctgtagaccatgaactggcagtgggggtgtccagggcggtgcttgagaacgtcagactggctagtttaattccctggcgcagatacgcataggaccaacagggtcaccaagcagacagggagcccgcgagaatcattcaaaacatccccagccacagagatggatccagtttcctggtcatccccttagcagttcacaagttcctggcaaatgttccaaagcaaaaagcgattgcaattagcatccagttcctgcagcctggtgctctgccctgcacgtcagggttggcatccacccagatccagatggaagggaaacttctctcttctcctttgcctcctcttccctcaccagagcagggcgcttctcttggggtggtgagaaggatcttcgagaaatcgtgttcagtatttcaagctctatttctgtggcacatgtcttttgagaggcatcttcacctcttctgtgatgacagtcacccggggaccggcc

SEQ ID NO: 166651 - DNA, 832 bp, Homo Sapiens
  misc_feature (193)..(202): n is a, c, g, or t
  misc_feature (634)..(642): n is a, c, g, or t
caaggatatagggtaatacaaagacttactgtctaggattgaacaggccactagtaaaactgacagagatcatagtagagaatttatctaggcaagatagaacaaaaacggttataattttttaaaagtggtaattgttaactagcagtatataaacagtgtccacaatttggtggctggccacggttttaannnnnnnnnncaagttatttctatagcagacatatttttgaagtctacccacccctgagttcagcaattatactttgagtgtaaaattatatgcccttaattaacaacatgtacaaagctacaaaatgtcatctatacagattaaaaacaattttaaaatattatttaccaattattgattgaatggttttactggggtacgtatttcaaacctttcagccaactggctttcagttttaagcccaaattgattcatacattcactgcaggatatttcaaaaagagtgcaacaataaggcattagtaaaaataacattgtagtagaaacagattttgcatatgtgaaaaggtaatttataaaatacattaatcactttttaaaaagaacttagttgtagtatcattaactcacatggtactgagaactggacctttcaacaannnnnnnnnctatagaaagtttcatctagctgtaagcaaagtcttttcaacaacaacaaaacaaaaccctccaggaaaaactatatggctgtgtgagacaaataagcaaccatttgatagtgacttttgcctaaattttaaaataaaaatgtccacactcttttgttaaaacattaagcctctgtcaaaaatgtatttc

SEQ ID NO: 166652 - DNA, 932 bp, Homo Sapiens
  misc_feature (857)..(857): n is a, c, g, or t
  misc_feature (859)..(859): n is a, c, g, or t
  misc_feature (884)..(884): n is a, c, g, or t
  misc_feature (889)..(889): n is a, c, g, or t
  misc_feature (892)..(892): n is a, c, g, or t
  misc_feature (897)..(897): n is a, c, g, or t
  misc_feature (910)..(910): n is a, c, g, or t
  misc_feature (918)..(918): n is a, c, g, or t
tttttcatagaaagttcatctactgtaagcaagtcttgtcaacacaacaacaaaccctccaggaaaactatatgctgtgtgagacaataagcaaccatttgatagtgacttttgcctaaattttaaaataaaaaatgtccacactcttttgttaaaacattaagcctctgtcaaaaatgtatttcttattttagggtacaggattaaaggacaagatgatactcacaagtaaagaaaatttacaagaaaaaacttaacaaaagtttcaataaaagtattgtaacattcaaacttgacttataacaaagaaacaagattgcaaacaaaaatgtttacggggtttccaaacataaataaatgaaatagtgtttaggcagtagggctcatgctgatggctagcaggaagttaacagagtgtaacttacttggaaaaaatctttaatgtacaaataacaagcccaaattatggactgcagcaatttaatcatcactgccatttttcttacttccaaaataaagccttgattaaaccattcataccctatattactcatacctttacttcagagattgaggaactatatacaacaaattaatttattttcaccatagggataacatactgtacctctctgccaatgttacttgaaaatcttccatgtcaaaacaacttgacagtagatataaacaattcaataaatatgcaatgatctttcattacagtcctttaaagacgcatgttaattcatgctgttaaccttaggatcacagtgcatagaatccaaatataaacagttggcggacgcgtggtcgacgatatcccgggattccggaccgtacgcctggccgtgttgttntntttgatcaagccacagagcgggtgnttttnctnaattnaagtggtttcaanccccctanaagttaggcccttc

SEQ ID NO: 166653 - DNA, 1581 bp, Homo Sapiens
  misc_feature (969)..(978): n is a, c, g, or t
  misc_feature (1516)..(1516): n is a, c, g, or t
ggtagagaagcttacttttggctaaggcaaaatacagatgaacatgcacgagtaatgtcttggtgggattatggctatcagatagctggaatggctaatagaactacgttggtggataataacacctggaataacagccacatagcactggtgggaaaagctatgtcttctaatgaaacagcagcctataaaatcatgaggactctagatgtagaatatgttttggtatttttggaggggttattggctattctggtgatgatatcaacaaatttctctggatggttaggatagctgaaggagaacatcccaaagacattcgggaaagtgactattttaccccacagggagaattccgtgtagacaaagcaggatcccctactttgttgaattgccttatgtataaaatgtcatactacagatttggagaaatgcagctggattttcgtacacccccaggttttgaccgaacacgtaatgctgagattggaaataaggacattaaattcaaacatttggaagaagcctttacatcagaacactggcttgttaggatatataaagtaaaagcacctgataacagggagacattagatcacaaacctcgagtcaccaacattttcccaaaacagaagtatttgtcaaagaagactaccaaaaggaagcgtggctacattaaaaataagctggttttaaagaaaggcaagaaaatatctaagaagactgtttaaatgcactgttctggttcctaacttgaagcagttgtccttgtgagaaccggtctttgcctttagctcatgtcgtgtttcacagcaaagagggtacagaaccatcactggtccaggttaatgtacaaaattttctggcaatgcctgattaaaaaaataaaattggcttgttgagaacagctgttttcgatttctaatgtgaagcaagacagagcactgctgtaaatgtctagcagcagannnnnnnnnnattggtacatattatccttcaaatctgagaatttggactaactgcaccaaagaaccctctaatttggtccctggcacatgcatacttgtcaatgtttttattcttttacaagacctgcattttatttgaattacccgaatagcaatatgtaaaatacaagtgacaaaatgtgatgagagcttcttgaaccggtaaactagtacaggtctgagaaagacatattagaagaatcattatacttccttgaattatatttattttcatgtttctctaatgcaaagaatgtttcatcaaatgtatattttctgtggcttactgtttgctctgagaagaagctgctgtttcaaagatggacctctgagtagctaatggattcaagtagtttttttatgtggacacattattactgcctgttagcagtcgttttcaccaagtacttacagagcagatttcatacatcatttcttcaagggcttaatttatatttttttgggaaatcatggcaaactacacaggaattttgctttacccggaacgnagttttgggtatcttagtactgaaggttaaccctatgtttacctgccaaaagattaaaggaaaca

SEQ ID NO: 166654 - DNA, 561 bp, Homo Sapiens
ggatagtttttcttttaaaaagtaaaattcagcactgtgacttgaacccccaaatctttcacatacaggtgaaacattaagccacaaataaaaataatgaacaagaaagaagacaagatcctaattcctgtcattagtgacctaagtaccccatatcagaaactttgcaaaacagatctagggacagaagggctttgaaagacatttttctttggggcaaatttcgtgtgccagaactacagtttaaatgtttttatgagcaagggaaggtagcattgattcccatagctttctaattagatacatgctgtcatggatgtaagccttaaaggagttaatactaatcttgtacatacacaaattttcctcaggtttttttattttaaaaaatgatttgttaaaagtactgtctgctagacccttgcctttgagtggctttgaaacttaatatagtttttaaaaagtgcaatgggatgagattatgctattagtatattaaaagcatgtttctgttttactccaatttgtaagatcatttaatggaataaagatcacaacacc

SEQ ID NO: 166655 - DNA, 857 bp, Homo Sapiens
  misc_feature (44)..(53): n is a, c, g, or t
  misc_feature (206)..(206): n is a, c, g, or t
  misc_feature (208)..(208): n is a, c, g, or t
  misc_feature (211)..(215): n is a, c, g, or t
  misc_feature (217)..(219): n is a, c, g, or t
  misc_feature (222)..(226): n is a, c, g, or t
ttggggattttttttaaaaacccttcgggttccccccggggggnnnnnnnnnngtggggggaattccaacccctttttctttgcccggggttttccttgggaaaaagttttggcccattttccctttcccttaggggccccggggccccaaaggaaatggtttaggaaatttttcgaggggcgaaggcgggccgccaagttttttntnttnnnnntnnnttnnnnnttttaaaaagtgttagcattaatgttttattgtcacgcagatggcaactgggtttatgtcttcatattttatatttttgtaaattaaaaaaattacaagttttaaatagccaatggctggttatgttttcagaaaacatgattagactaattcattaatggtggcttcaagcttttccttattggctccagaaaattcacccaccttttgtcccttcttaaaaaactggaatgttggcatgcatttgacttcacactctgaagcaacatcctgacagtcatccacatctacttcaaggaatatcacgttggaatacttttcagagagggaatgaaagaaaggcttgatcattttgcaaggcccacaccacgtggctgagaagtcaactactacaagtttatcacctgcagcgtccaaggcttcctgaaaagcagtcttgctctcgatctgcttcaccatcttggctgctggagtctgacgagcggctgtaaggaccgatggaaatggatccaaagcaccaaacagagcttcaagactcgctgcttgctctctccctttataaactggcacgcccggcgtgcgtgtggcgggggcgcgcgcgcccggccggacctccgcgcccgtcgctccc

SEQ ID NO: 166656 - DNA, 802 bp, Homo Sapiens; identical to SEQ ID NO: 71567
  misc_feature (565)..(668): n is a, c, g, or t
  misc_feature (670)..(696): n is a, c, g, or t
  misc_feature (699)..(699): n is a, c, g, or t
  misc_feature (701)..(708): n is a, c, g, or t
  misc_feature (710)..(733): n is a, c, g, or t
  misc_feature (735)..(735): n is a, c, g, or t
  misc_feature (744)..(762): n is a, c, g, or t

SEQ ID NO: 166657 - DNA, 917 bp, Homo Sapiens; identical to SEQ ID NO: 71566
  misc_feature (456)..(464): n is a, c, g, or t
  misc_feature (682)..(691): n is a, c, g, or t

SEQ ID NO: 166658 - DNA, 550 bp, Homo Sapiens
  misc_feature (11)..(11): n is a, c, g, or t
  misc_feature (33)..(33): n is a, c, g, or t
  misc_feature (43)..(43): n is a, c, g, or t
  misc_feature (46)..(46): n is a, c, g, or t
cattttattcncaatttccggtaagtgaaaggnaaatgcgccnttnaagggtaagaaatagggtttggttttggtccatggtttggttttaagtcctatgacctagctaattataaagaggtagataaaacctcttccattagtaatttaattttatcaataactcatatcccattacttgctcagtgacattcagaactattgcgtctagtactgaaatggggaaagaaatctcttcactaaaggagttggctttaagttagtcttggtgataataaatgttgaaatacaagtatcagtataaaaactggattactggtatcactgtttaggcattgtaatactttaaatgttatctttttttctaaatcagagggaaaaaaatgttgtgaaataacagtccttcccaagggaaacactgtgtacttggagaaatgattgatttattattggcatgcttagttttaaacctgagtttgccaactgtatgttttttaattagaaataaaataaatcttctgatggtgggggaaaaagtaagcttaatacc

SEQ ID NO: 166659 - DNA, 425 bp, Homo Sapiens
ggaaaatatgtataatatgccatacaatatccccaaggttggcaggaaggtggagattggagtgttgtgggggcagtgggaacagcagttacgaaggtgtagtgcccagcaggatatatttgggggatggtaagttctccgatggtgaggtataaggcggagtggcaaggatgaggtgaacagacaaccgcttctctttccccattctttagacaaatagtgttatgttacatgctgttatgcaaccctcccttttccccttaatttgttttggatatctttcttaaggaatttagagccaccttttttaagggttccatagcaattaattgtttctaatctttagctattacaaatgatgcagtaataacttcttacgtatgtcatttatatctggtgaaaatatatctgaaacacagtaggac

SEQ ID NO: 166660 - DNA, 733 bp, Homo Sapiens
  misc_feature (163)..(190): n is a, c, g, or t
gtcactcatttactcccggggactaagcgaccccacctttagtgaggccacaagctgtttggcatctattggtcactataccaccattatcattctacagtcagtttactgtcattacctagacaacctggtaactggaagccaccatacatttgtttttttnnnnnnnnnnnnnnnnnnnnnnnnnnnntagtatatctcaacaataaaactggcacaaagaaacatttctatcagaaaggcaagttgatactcagctttctccttaacagtgttcagacctttacgaaagcaattcaagaaagtcttcaaagagtcttgacacaacataggatattaagttatccccagtactacattagtggtcagtcaaatctggtatgtaaaagtaatgacattagggaagttatgcttagacacagtacaacaaacattcatataaaaaaagtaaactccacatggtgaactgtggttttttcccttggtttgacacattttatacattaaattcatggtagtgtttgcatttaaatgctgtcatatataaaattaaaagtgcaatttcaaatccacagaaatcatttccagaatggtggtataacatgacaatgtgcatgaatttgccctaggtggggagacacctgaaactcttatttccataagaaaaaaaatgctacattttatgaaaacacctaacaagagaaatgtatcatttccattttctgtataaaac

SEQ ID NO: 166661 - DNA, 265 bp, Homo Sapiens
tcctactagtgttgggactataggcacacaccactgtgcctggcccggacatgtattaaaatcatcctatattctgattcagtatgtgtggatagagtccaggaaattatgtttttaacaagtatcccaggtaatttttaccttcagggaagtttaagaagcactggtagtggaagggatggacttgtggagtcaaagcagtgagcttgaagtggaatgagtcgagtctaagataggagattgaagcaaaggattatggaagctg

SEQ ID NO: 166662 - DNA, 328 bp, Homo Sapiens
  misc_feature (60)..(70): n is a, c, g, or t
ttccaagaatagtgatatgtattttccaatgctagtcgttactactatgtctgtctgagnnnnnnnnnnnttgaatgaaaataaaaaggcatacatgccaaaaataaagaacctatttgtgtccgacacactagagaaattgcttaatgagtagttttgcccaaaaagtaatacttgtcatattgcccaagttaaccaaacttctggtgttttgctgatttaagcagtccacatagataatgtcgcttaaggattgccacgatgcattctgttattctttttactaagaaaattaaatattgttcgactgcttggattacaggaggat

SEQ ID NO: 166663 - DNA, 904 bp, Homo Sapiens
  misc_feature (316)..(550): n is a, c, g, or t
  misc_feature (574)..(582): n is a, c, g, or t
atgccaaacaccaagggaagtttacaaaatttaagttgggaaactaagttggtggtaaaaactcaagaaacccaactctaccccatctaattcccattgtgggatcagttgaattaacttttgctttctttaggatgaatcctgggacaactttcctttaaaaaagcactaaaccttagtttagacacttaataagtttaagaacacttctcacagaataaggtaaaacttccatggctatcattactattttgtacaacagccctagtgttgtcaattaaaatgtgtttgcaggccgggcacggtggctcacacnnnnnnnnnnnnnnnnnnnnnnnnnnnnnnnnnnnnnnnnnnnnnnnnnnnnnnnnnnnnnnnnnnnnnnnnnnnnnnnnnnnnnnnnnnnnnnnnnnnnnnnnnnnnnnnnnnnnnnnnnnnnnnnnnnnnnnnnnnnnnnnnnnnnnnnnnnnnnnnnnnnnnnnnnnnnnnnnnnnnnnnnnnnnnnnnnnnnnnnnnnnnnnnnnnnnnnnnnnnnnnnnnnnnnnnnnnntgacaaccgcgagacttcatctcnnnnnnnnngtgtttgcaacagcaccatttgtcaaattcaaagatgctcaaaaggtgttccctactttgcatgagagggagagctttgtaacaggaaattgtataaggcaaactctctattcattcctaaggcctctgttcattcctaatgtttacatggttctctactctgaagggcaccaacatggacctcaccttcttaacatggaaaatcaaaatctaaatgaatacaattaaaaggaggcagcaagcttcttgcagtgggtcccttaaacattatgaaaacatcagtgcattgtgtagtctgttacgctataaactgaggtctctt

SEQ ID NO: 166664 - DNA, 1463 bp, Homo Sapiens
  misc_feature (316)..(550): n is a, c, g, or t
  misc_feature (574)..(582): n is a, c, g, or t
atgccaaacaccaagggaagtttacaaaatttaagttgggaaactaagttggtggtaaaaactcaagaaacccaactctaccccatctaattcccattgtgggatcagttgaattaacttttgctttctttaggatgaatcctgggacaactttcctttaaaaaagcactaaaccttagtttagacacttaataagtttaagaacacttctcacagaataaggtaaaacttccatggctatcattactattttgtacaacagccctagtgttgtcaattaaaatgtgtttgcaggccgggcacggtggctcacacnnnnnnnnnnnnnnnnnnnnnnnnnnnnnnnnnnnnnnnnnnnnnnnnnnnnnnnnnnnnnnnnnnnnnnnnnnnnnnnnnnnnnnnnnnnnnnnnnnnnnnnnnnnnnnnnnnnnnnnnnnnnnnnnnnnnnnnnnnnnnnnnnnnnnnnnnnnnnnnnnnnnnnnnnnnnnnnnnnnnnnnnnnnnnnnnnnnnnnnnnnnnnnnnnnnnnnnnnnnnnnnnnnnnnnnnnnntgacaaccgcgagacttcatctcnnnnnnnnngtgtttgcaacagcaccatttgtcaaattcaaagatgctcaaaaggtgttccctactttgcatgagagggagagctttgtaacaggaaattgtataaggcaaactctctattcattcctaaggcctctgttcattcctaatgtttacatggttctctactctgaagggcaccaacatggacctcaccttcttaacatggaaaatcaaaatctaaatgaatacaattaaaaggaggcagcaagcttcttgcagtgggtcccttaaacattatgaaaacatcagtgcattgtgtagtctgttacgctataaactgaggtctctttatgaaagattattttagcacaaattcagaatgaagccagtccaagaaaaaaagaattggaagctatttgaaggttagataggaaatataccaaaaatagaagagcgtagagagggctgcaccacatcctaccacgcaagcacacccactgaactgagtaagagtggcgtggctgaggtgccgtcagcagctgactatgtcactcttatgagttctgctcaggaacaagcataaaactgaataatatgacatcacagtccaagacctggtaagagttggtttctttttatttggaaataactatggtcaactttcattaatgtggaagttgactgataatgttaagagtcaaagtgaaaaagaaagccgatacccatattcaacagtgctttcagttacaacatttttgaatttccttctctaaaacattcacagcagaggtgtccatttcacttgcctgtttcacctctagataccaccacagttgctggggtcatgtgaggtaaaggaatatatccaattgactgttagcccaacatgactatctgcaattctgacc

SEQ ID NO: 166665 - DNA, 809 bp, Homo Sapiens; identical to SEQ ID NO: 14932
  misc_feature (115)..(123): n is a, c, g, or t
  misc_feature (147)..(381): n is a, c, g, or t

SEQ ID NO: 166666 - DNA, 772 bp, Homo Sapiens
ctcccgcatcctgagagacacagcaggctggctagccatggacccagacagtgggcaggtcacagctgtgggcaccctcgaccgtgaggatgatcagtttgtgaggtacaacatctatgaagtcatggtcttggccatggacaatggaagccctcccaaccactggcacgggaacccttctgctaacactgattgatgtcaacgaccatggcccaagttccctgagccccgtcagatcaccatctgcaaccaaagccctgtgcgccaggtgctgaacatcacggacaaggacctgtctccccacacctcccctttccaggcccagctcacagatgactcagacatctactggacggcagaggtcaacgaggaaggtgacacagtggtcttgtcacctgaagaagttcctgaagcaggatacatatgacgtgcacctttctctgtctgaccatggcaacaaagaacagctgacggtgatcagggccactgtgtgcgactgccatggccatgtcgaaacctgccctggaccctggaagggaggtttcatcctccctgtgctgggggctgtcctggctctgctgttcctcctgctggtgctgcttttgttggtgagaaagaagcggaagatcaaggagcccctcctactcccagaagatgacacccgtgacaacgtcttctactatggcgaagaggggggtggcgaagaggaccaggactatgacatcacccagctccaccgaggtctggaggccaggccggaggtggttctccg

SEQ ID NO: 166667 - DNA, 617 bp, Homo Sapiens
ccaacgctgctcacagaaagacatctgtagatatccaagacagctgtgaaaaccagagtgtgcagaaaggattttccagaatccagtcttaagctagtcagcaccactctatttgggaacacaaagcccaggaaggagaaaacagagatgccccccagggagcacatcaagggcaaagagaccaccccctctagcctagcagtgacccagaccatggccaccaaagctcccgagtgtgtggaggacccagatatggcaaaccagaggaagactgccctggagttctgtggagagacttggagctctctctgcacattcttcctcagcatagtgcaggacacgtcatgctaatgaggtcaaaagagaacgggttcccttaagagatgtcatgtcgtaagtccctctgtatactttaaagctctctacagtccccccaaaatatgaacttttgtgcttagtgagtgcaacgaaatatttaaacaagttttgtattttttgcttttgtgttttggaatttgccttatttttcttggatgcgatgttcagaggctgtttcctgcagcatgtatttccatggcccacacagctatgtgtgtgagcagcgttggggggagtcc

SEQ ID NO: 166668 - DNA, 838 bp, Homo Sapiens
cgcagcggccagaaacccggctccgagcggcggcggcccggcttccgctgcccgtgagctaaggacggtccgctccctctagccagctccgaatcctgatccaggcgggggccaggggcccctcgcctcccctctgaggaccgaagatgagcttcctcttcagcagccgctcttctaaaacattcaaaccaaagaagaatatccctgaaggatctcatcagtatgaactcttaaaacatgcagaagcaactctaggaagtgggaatctgagacaagctgttatgttgcctgagggagaggatctcaatgaatggattgctgtgaacactgtggatttctttaaccagatcaacatgttatatggaactattacagaattctgcactgaagcaagctgtccagtcatgtctgcaggtccgagatatgaatatcactgggcagatggtactaatattaaaaagccaatcaaatgttctgcaccaaaatacattgactatttgatgacttgggttcaagatcagcttgatgatgaaactctttttccttctaagattggtgtcccatttcccaaaaactttatgtctgtggcaaagactattcttaagcgtctggtcaggggttatggccatatttatccccagcacttttgattctgtgatggcactgcaagaggagggcccacctcaaaccctcccttaagcacctttatttttctttgggtcagggaactttaaatctggatggataaggccgtgcagctgggcacctctctcccacaaatttactagcagggaacctttggcatccaaaagaaccgaataaaatgggttcctttctt

SEQ ID NO: 166669 - DNA, 920 bp, Homo Sapiens
ggggggcgccgaggtttgcaaaggctcgcagcggccagaaacccggctccgagcggcggcggcccggcttccgctgcccgtgagctaaggacggtccgctccctctagccagctccgaatcctgatccaggcgggggccaggggcccctcgcctcccctctgaggaccgaagatgagcttcctcttcagcagccgctcttctaaaacattcaaaccaaagaagaatatccctgaaggatctcatcagtatgaactcttaaaacatgcagaagcaactctaggaagtgggaatctgagacaagctgttatgttgcctgagggagaggatctcaatgaatggattgctgtgaacactgtggatttctttaaccagatcaacatgttatatggaactattacagaattctgcactgaagcaagctgtccagtcatgtctgcaggtccgagatatgaatatcactgggcagatggtactaatattaaaaagccaatcaaatgttctgcaccaaaatacattgactatttgatgacttgggttcaagatcagcttgatgatgaaactctttttccttctaagattggtgtcccatttcccaaaaactttatgtctgtggcaaagactattctaaagcgtctgttcagggtttatgcccatatttatcaccagcactttgattctgtgatgcagctgcaagaggaagcccacccccacacctcctttaagcactttattttctttgtttcaggagttttaatctgattgataggcgtgagctggcacctcttcaagaattaatagaggaaatttggatcaaaagacagataaatgttttccttctagaaacacagttaaccccccttggctttcatctaattggctagaaaactattctcctttgcgctatccggggtattagaac

SEQ ID NO: 166670 - DNA, 2038 bp, Homo Sapiens
  misc_feature (1284)..(1284): n is a, c, g, or t
  misc_feature (1287)..(1287): n is a, c, g, or t
  misc_feature (1289)..(1289): n is a, c, g, or t
  misc_feature (1292)..(1292): n is a, c, g, or t
  misc_feature (1297)..(1318): n is a, c, g, or t
  misc_feature (1434)..(1495): n is a, c, g, or t
  misc_feature (1678)..(1788): n is a, c, g, or t
cgcagcggccagaaacccggctccgagcggcggcggcccggcttccgctgcccgtgagctaaggacggtccgctccctctagccagctccgaatcctgatccaggcgggggccaggggcccctcgcctcccctctgaggaccgaagatgagcttcctcttcagcagccgctcttctaaaacattcaaaccaaagaagaatatccctgaaggatctcatcagtatgaactcttaaaacatgcagaagcaactctaggaagtgggaatctgagacaagctgttatgttgcctgagggagaggatctcaatgaatggattgctgtgaacactgtggatttctttaaccagatcaacatgttatatggaactattacagaattctgcactgaagcaagctgtccagtcatgtctgcaggtccgagatatgaatatcactgggcagatggtactaatattaaaaagccaatcaaatgttctgcaccaaaatacattgactatttgatgacttgggttcaagatcagcttgatgatgaaactctttttccttctaagattggtgtcccatttcccaaaaactttatgtctgtggcaaagactattctaaagcgtctgttcagggtttatgcccatatttatcaccagcactttgattctgtgatgcagctgcaagaggaggcccacctcaacacctcctttaagcactttattttctttgttcaggagtttaatctgattgataggcgtgagctggcacctcttcaagaattaatagagaaacttggatcaaaagacagataaatgtttcttctagaacacagttaccccccttgcttcatctattgctagaaactatctcattgctatctgttatagactagtgatacaaactttaagaaaacaggataaaaagatacccattgcctgtgtctactgataaaattatcccaaaggtaggttggtgtgatagtttccgagtaagaccttaaggacacagccaaatcttaagtactgtgtgaccactcttgttgttatcacatagtcatacttggttgtaatatgtgatggttaacctgtagcttataaatttacttattattcttttactcatttactcagtcatttctttacaagaaaatgattgaatctgttttaggtgacagcacaatggacattaagaatttccatcaataatttatgaataagtttccagaacaaatttcctaataacacaatcagattggttttattcttttattttacgaataaaaaatgtatttttcagtgngancnaancaagnnnnnnnnnnnnnnnnnnnnnncagcgcggcccggaaccccccgagtcaaaagaaaatttagacaaacacgccgtgcttggcggccccgtcgcccacaacccccatgttcaaccccggcgcccaacccggcccgctannnnnnnnnnnnnnnnnnnnnnnnnnnnnnnnnnnnnnnnnnnnnnnnnnnnnnnnnnnnnnggccgggtaccgcaatcccccctcgcgctcttacggcgaactttcccccacccccgctccctgtttgtcccccacctacttccccctcgtgttttcacgcgggcgccccgtccctccctgcctcgccgcttcccccatgcattaatcccccctcagcgtgtcgcccacgccttcgggctgcgnnnnnnnnnnnnnnnnnnnnnnnnnnnnnnnnnnnnnnnnnnnnnnnnnnnnnnnnnnnnnnnnnnnnnnnnnnnnnnnnnnnnnnnnnnnnnnnnnnnnnnnnnnnnnnntttttttcctgccccctgttaaacccgggcgccggccgcccgtatttccccctccccgctttcccgcacccgcctaatattcctcccctccagcgtcggtcccgccggggcgggcgacggcacctccttggcgactccgcggtgggcaacaccgcgtcccattccgcctgtgtacgcctaccgcccctccccgttcagcccctgctgcgctcctcgcgctggttgatatcgcgccccgtactcccgcccc

SEQ ID NO: 166671 - DNA, 1028 bp, Homo Sapiens
  misc_feature (461)..(470): n is a, c, g, or t
agctaaggtgaagttgcagagtacatgtacagtaatgaagttcactgtgtttataaattgaaaaggtaccaggtcttacagcattttatatatcacatctttacagaataacatgatggcaatatacaagtggtattgttaggtggtttaacttagaataaaatgagaattcttcagttatattttgtactatggtttagggctatgactaatatttcaggccatttccggtgaaagaaacttagttttacaagaaaaaccatttgctactgaatgcttaaactaattttagtgtttaatgttacatgcttaaatttttttaagttttaacagtggcatatttaggcatggaaatattattatgaaatttattttcaggatctgctataaggttgaaatttagcccagctctaggcattttacaaattatttttcaagcagtcattcttgattgtttgacnnnnnnnnnnaaattaaagattgggaatgtatgtgagagtatgcatatgtatgggtgtgtgtgtgtgcgcgcaatcaaactgtggtgtaaatagattctcagtgaattctggtattcagactctattccactagtgaaagaaccattttttaaacttcccttgccttttttatttatttaattttcttggtttggagatgtcagtcccaaacaccagagtctgtacttttctataacacagctcagattaaggtagggcatatgccaaggaggttctcacctccctaaagaagggacttgaattttagggactttaattcacccctccttcaatacaactttcccccttcttgtttgcacatgccaagataactgcttttatgcaggctgtacccccttgaaaaatcctttctacagtgctgctcacaaaagagcccaaggtcgcctccttacctgccattgctgaccttgaattcccaagtcgccggagtctacctaggcttttcttgggaagcagtctagccaaaattttctatttggtaccgttcacctaaattattcttcaagg

SEQ ID NO: 166672 - DNA, 262 bp, Homo Sapiens
caacgctgctcacaaacgaaataggccctgtcaggaaggtatttgcattctaatagaggagataagacctgctaggatatccctaatatacagtatttgatcaaagtcttagtaattattctgtgaaatgtctctttcctttctatttccacttcagcccagtgggtatttaaattacacagtgtgccacaatgcttcaggctgttcccaactacagtatcagacaccagcaaaaggtgacttgaatgtgagcagcgttggg

SEQ ID NO: 166673 - DNA, 358 bp, Homo Sapiens
gaagggtggaagacccagaggtagggaaccgactgagaggcgagacgcagccccatttttgggaagttcccattctgaaagagagaaccaccaacccgcattccttcatccttggatcctctaaggcactcactgcattcaagtcacaaaactgaggaagaaatactagtataaattaatactgtccttgaagtttgaaaggacagcagaatatgagaagtaacacagagacatgggatagagccaaggtgggctgctccacacctgaagactcatcctattactgaacctcagcactgtttacacatctggcctcagaggcctcagagcccctccacacagccacagctgtgagcag

SEQ ID NO: 166674 - DNA, 708 bp, Homo Sapiens
ccaacgctgctcacagatatacttgcccatgtacataaaaacccatgtacacagatatgcggtatagccttatctacagtaaaaattgctgaaacaacttaatggttccccaaaaagggaatgggtaattcaaacacggctaccacacagatgttgaaaagaccaaggcacacacgaatacagatatgcggtgcttacctagatgtactagtaactcaacagtccacagtgcaagacaggctgtgtggtgtacccacgcctgtacagctttacacatacacaggttctctggaaagaaactgcagcaactggccatgacggtggcctctgtgggaagggaggctgggggttagagaaagatgccactgaatcacccacagggtttgaagttcaaacatgtgcaggtatggctttgaacagttttcgcacatctattcataggtgaaattaactggaaggaaactagcaaagcatttgcctttggggtcagcacaggagcagaggcccaggcagggccttgctttgacacacagatgatgggtcacacagttgtcaccttgacagaagagtaacagggacagcacaccagtcactctaggagctgaggccagaggaactcaggtatttccttctagaggtagtaagtccaccgaggcagatgccaagccgggtggtgcctcgctgtgtacatgttctgctcctgtcccg

SEQ ID NO: 166675 - DNA, 331 bp, Homo Sapiens
ggatttctagggtcttagggagcagaacattgtacacagcgaggcaccacccggcttggatctgtctcggtggacttactacctctatgaaggaaatacctgagttcctctggcctcagctcctagagtgactggtgtgctgtccctgttactcttctgtcaagggtgacaacctgtgtgacccattcatcttgtgtgtcaaacgcaaaggccctgcctgggccctctgctcctagtgctgaccccaataggcaaatggctttgctaagtttccttccactcccacctttttacaattttcactttttgctgggctcccctaagaacctag

SEQ ID NO: 166676 - DNA, 378 bp, Homo Sapiens
tgagccggtcacgggttgcacaaagatgttgaaaagaccaaggcagacatgaatacagatatgcggtgcttacctagatgtactagtaactcaacagtccacagtgcaagacaggctgtgtggtgtacccacgcctgtacagctttacacatacacaggttctctggaaagaaactgcagcaactggccatgacggtggcctctgtgggaagggaggctgggggttagagaaagatgccactgaatcacccacagggtttgaagttcaaacatgtgcaggtatggctttgaacagttttcacacatctattcataggtgaaattaactggaaggaaactagcaaagcattgcctttgtgcagcccgggccgagctcgc

SEQ ID NO: 166677 - DNA, 412 bp, Homo Sapiens
agatataacacattaaaaatgcagagagcctgtcctgcatggatattcactctacaagtggtttaataaaagctgtagttggagatggccatggtggggatggtagaaccatatttaaatgaggaggagaaaagactaccccatatcaaatgatattctaagacaatatataaataaatgttgtaaagactataagagtttagacaacagaacaaaagagaagaggaagtggccctgtaaatattcatgagatgggacatgatctgggtctggaaggatgtgaagatcagaggcatggaggggatgaggatggcctttcaagtaaaaatcagcaacagaggctggaactgacagattttgtctatgaacttctgaagcattcagagacaggcatagtgtgagcagcacttgg

SEQ ID NO: 166678 - DNA, 491 bp, Homo Sapiens
ccaacgctgctcacagcacaattcagaattgcaaagatatggaaccaacctacatgcccatcaactgatgagtggataaagaaaggtaagtacagaaatatagactaagacaactaaaataccttaaaagtaccttataacgttggatttggcaaggatttcttggatatgacaccaaaagcacagaccacaaaagtaaaaacagataaattagactatttcaaaactaaaaacttctatacatcaaagaacacaatcaacaaagtgaaaaagtaaccttatggaataagagaagatatttgcaaatcatatatctgataggggattaatatccagaatatagaaagaaactcctacaagtcaacaacaacgataactctaataacccaatttttaaaatagtcaaaggacttgaatagacatttttccaaagacaacatacaaatgaccagtaagcatatgaaaagatgctcagcatcacacctctgaca

SEQ ID NO: 166679 - DNA, 404 bp, Homo Sapiens
  misc_feature (36)..(37): n is a, c, g, or t
  misc_feature (39)..(39): n is a, c, g, or t
  misc_feature (378)..(378): n is a, c, g, or t
gcggggctgggaggataggcttctcatctccttctnncngcgcccaccgcctccccgtgcgtcttgcaggagacctacaaattgccgcaccggcgcatcgagaaaaagagacgtgaccggattaacgagtgcatcgcccagctgaaggatctcctacccgaacatctcaaacttacaactttgggtcacttggaaaaagcagtggttcttgaacttaccttgaagcatgtgaaagcaactaacaaacctaattgatcagcagcagcagaaaatcattgccctgaagagtggtttacaagctggtgagtgctgattctggctatgctctctttaagagtttgagtgcaaatagagagcccgtgggttaaaacatcttgntgttaattaaacatttacttggcaac

SEQ ID NO: 166680 - DNA, 1208 bp, Homo Sapiens
cttagcataagggtgagacagaggagccacaaggggctggttcaatggacaggggaaggaagtagggttaaccaagagggtggcgatgggaatagtctggggactctgggccacagccgcattgacaggctggatcatgttacagccaccgccaaggctcacaatcttcacagtggtagcaggaacagtgaagataacagatgcagggtggataacaggggcaggtttgatacagcgaaaggccctggctccccttctttttgagggtctccgtctcacatatggctttcgaaacatggaagaggcaggggagggcatcattaccttgggcacaggggcagaagagagcaaagtctgggactcagacagagggaagcttgtcctggcctcagggggcatagcaggcagtgctgcaggagactcaaaactctcacctccactgacccccagtggagggacacctggaactgtctgtaaaacagtggctggctgtattgggtgaggaatccggagcaccattttgctcggaggggcttctgaatgagttgattgggctggtgttttcccagggttgaagctgggctggagagaggggctgggttggataaggaggggtttcaggactgatgaacgcttctgtctccaagccttcttggggaaacggtcggcaactggcttcagtttcaggactacacccttagacaatagcagtgggtaccgagtttcactccccaactctgagttgtctttttctaggccttgatctgagttgatctcagtggttccagtcatatttcctacctctctagcaccatcagccatgtgccgcagttcttcctggatggatggcagactggcccttaaccagaatgggagccggtgttcttctctctctataggtggcttccactgatgtggctggatctcttcacagcattttcctaggactggcagctgtttggtcttcttataaaatttaatgatgttgtcaggagctctgttcatgttgaggttcttgattctcactgtcagttggcgggcagtcttgcaggttagaaggtacttgttgtcctcagccttggtgaagaggatcttatcctggggattctttgccttcagggaacacactggaagtaactctggatacatgaaaaccttgcttgtggccaggatccaagccacttgctttggcaaacagggaaattccc

SEQ ID NO: 166681 - DNA, 416 bp, Homo Sapiens
cctcctccagtcgataaacagtgccaagaaggattgtcagagaacagtgcctatcgctggaccgttgtgaaaacagaggagggaaggcaagctctggagccgctccctcagggcatccaggagtctctaaacaactcttcccctggggatttagaggaagttgtcaagatggaacctgaagatgctacagaggaaatcagtggatttctttgagctaggagaataagagtctggagactgggagccttcacttcggcctccgattggtggcgcatagggtgtaaccaataggaaacccctaaagggtacttaaaccccagattttgcaactggggctcttgagcagcttgctttagcctgctccccctctgtggaatatacttttgcttcaataaatctgtgcttttattgcttcc

SEQ ID NO: 166682 - DNA, 945 bp, Homo Sapiens
acagctggtacggtccggaattcccgggatatcgtcgaccacgcgtcgctgcccctgttatcaccctgcatctgttatcttcacgtgtgcctgctaccactgtgaagattgtgagccttggcggtggctgtaacatgatccagcctgtcaatgcggctgtggcccagagtccccagactattcccatcaccaccctcctggttaaccctacttccttcccctgtccattgaaccagccccttgtggcctcctctgtctcacccttaattgtttctggcaattctgtgaatcttcctataccatccacccctgaagataaggcccacatgaatgtggacattgcttgtgctgtggctgatggggaaaatgcctttcagggcctagaacccaaattagagccccaggaactatctcctctcgctgctactgttttccccaaagtggaacatagcccagggcctccaccagcagataaacagtgccaagaaaggattgtcagagaacagtgcctatccgctggaccgttgtgaaaacagaggagggaaggcaagctctggagcccgctccctcaaggcatccaggagtctctaaacaatcttcccctggggatttagaggacgtttgcccagatgggaccttgaagatgcttcagaggaaatcaggcatttcttttgagctaggagaataaagtctggagactggagccttcactcgctccgaagtggcctagtggtccaatagaaccctaagggtattaacccggatttgcatgggtctgcgccctgttaccgtccctccggggaatattgggtccaatcgctttgccctgttcaacacaaggggggcaacccggcactgccccctttcaggccatagggtaagaccggcacggaacagtccaccttccgaccccccctatttctgcttcttgcttcggttcgtcag

SEQ ID NO: 166683 - DNA, 798 bp, Homo Sapiens
  misc_feature (696)..(696): n is a, c, g, or t
ggggaggcgcggaggggctggctgggcaggaggggttggcggggcagcagggccgcggccatggggagcttgaaggaggagctgctcaaagccatctggcacgccttcaccgcactcgaccaggaccacagcggcaaggtctccaagtcccagctcaaggtcctttcccataacctgtgcacggtgctgaaggttcctcatgacccagttgcccttgaagagcacttcagggatgatgatgagggtccagtgtccaaccagggctacatgccttatttaaacaggttcattttggaaaagattgaatacctgcttaagaagcttacagaagctatgggaggaggttggcagcaagaacaatttgaacattataaaatcaactttgatgacagtaaaaatggcctttctgcatgggaacttattgagcttattggaaatggacagtttaccaaaggcatggaccggcagactgtgtctatggcaattaatgaagtctttaatgaacttatattagatgtgttaaagcagggttacatgatgaaaaaaggccacagaccgaaaaactggactgaaagatggtttgcactaaaaccccaccataatttcttaccatggtgagtgaggatctggacggataagaaaggagacattctcttgggacgaaaattgctgggtaaagtccctgccctgaccaangatgaaaagaaaggccctttttctcgcgaaaacggcttggaatacaactttttgaaaaccagggccttccgcattcccagaagaaaccggggatgggattcc

SEQ ID NO: 166684 - DNA, 583 bp, Homo Sapiens
  misc_feature (382)..(420): n is a, c, g, or t
actcctccccctactccaccggacctcaaccaggacttcagtggatttcagcttctagtggatgttgcactcaaacgggctgcagagatggagcttcaggcaaaacttacagcttaacccattttcaagcaaaacagttctcagaaatgtcatgattgccggggtgaaggcaagagatgaattgcattattttatatattttttattaatatttgcacatgggattgctaaaacagcttcctgttactgagatgtcttcaatggaatacagtcattccaagaactataaacttaaagctactgtagaaacaaagggttttcttttttaaatgtttctcggtagattattcataatgtgagatggttcccaatatcatgtgannnnnnnnnnnnnnnnnnnnnnnnnnnnnnnnnnnnnnncagactgtgcaatacttagagaacctatagcatcttctcattcccatgtggaacaggatgcccacatactgtctaattaataaattttccattttttttcaaacaagtatgaatctagttggttgatgccttttttttcatgacataataaagtattttcttt

SEQ ID NO: 166685 - DNA, 1261 bp, Homo Sapiens
gcgcactccttgttatgttgtgacaggggacgggtaggagaaaaattaaggagtaacgctttgaaggggatacgggtatgtaggaattagtgtataggaggttgtagccccggagaggtaagaatgagttagttaaaaaaaggccgcgacccccccttgtagtagaaaatcaacccttgctctcgccgtaatttgtgtgcgatcggggacctacaaaaatggtcgctgtccctgcccccacatcttcaaattaacattttcaggtcgcaacagtaagtcttcccaaaggggaccttccggaaaaataagctatttcctcggctcatattcccctctttttgtagcatgcaccaacagtctatccaagacgtatatattggggagtaaggagggcatccaccagcaagaccacagttgttgacagccataagattggagacaagcacaaagggataggtcaacatactcgcaaaaaatcctgtgacagcttgagaataactcttcatttcattcatggtagaaaccccactgtccagtgcataggtattgacgaggtaggccagtgagttacacagccacaaagaaaggatgtcacctagaaggcgaggaacaagacccgcgaaaaatcctagaatgccctcttcccgatagatggttattatggaatcacaaagtccacagtacttggattctctgccaatgaactgtaccatagatctcagagtgatcacatggaagggatgtgtgatgagggtagcagcagaacgagcgatcatctctcgagttgtctccttgataacgtggtcaaaggaagatgagacttctttctgtacatttccaggtcctaactcctcacccttgtcactctcctggtaatgctgtaaaactttaccatggaccacagttccaaggactcccgaacacagtcttggagttaagcctgtgaacaacccgcgcctcccatcgatactggcaatgtgctgagcataactaaagagaccaggaagctgacacacttgccgcccaaaaatatttcgtcctattgttggaggaagaggctcatatcccacctggatgagcactttcacgtacatgagcggctgggacaggatggtgagaccggagcccaggagcacctgactggccgcgtccgccatgatggcacccgcgggcggacggacagacagacggagccaccaagcgacccggtgagccggtcctaggtcacgtgccagggccgccggtttcactggcccgcccc

SEQ ID NO: 166686 - DNA, 788 bp, Homo Sapiens; identical to SEQ ID NO: 72291
  misc_feature (706)..(706): n is a, c, g, or t
  misc_feature (723)..(723): n is a, c, g, or t
  misc_feature (735)..(737): n is a, c, g, or t

SEQ ID NO: 166687 - DNA, 771 bp, Homo Sapiens
ctggtttttgtgttcccaagattaaatgattattaaaaaagcgcgccacactgtatagaaatcaacattctctcccataattctgtgcatctgggactacagaaatgtcactgtccctgccccacatcttcaaattaacattttcaggtcacaacaataagtcttcccaaaggggaccttccggaaaaataagctatttcctcggctcatattcccctctttttgtagcatgcaccaacagtctatccaagacgtatatattggggagtaaggagggcatccaccagcaagaccacagttgttgacagccataagattggagacaagcacaaagggataggtcaacatactcgcaaaaaatcctgtgacagcttgagaataactcttcatttcattcatggtagaaaccccactgtccagtgcataggtattgacgaggtaggccagtgagttacacagccacaaagaaaggatgtcacctagaaggcgaggaacaagacccgcgaaaaatcctagaatgccctcttcccgatagatggttattatggaatcacaaagtccacagtacttggattctctgccaatgaactgtaccatagatctcagagtgatcacatggaagggatgtgtgatgagggtagcagcagaacgagcgatcatctctcgagttgtctccttgataacgtggtcaaaggaagatgagacttctttctgtacatttccaggtcctaactcctcacccttgtcactctcctggtaatgctgtaaaac

SEQ ID NO: 166688 - DNA, 1076 bp, Homo Sapiens
gaggatcccccgcgttctcctaccaggggaagactgagaagcatgcctcccagaaagactactccagtggttttggcggcaagtatggcgtgcaggccgaccgagtagacaagagcgcggtgggcttcgactaccagggcaagacggagaagcacgagtcacagagagattactccaaaggtttcggcggcaaatacggtatcgacaaggacaaagtggataagagcgccgttggctttgagtatcaaggcaaaacggagaagcacgagtcccagaaagactatgtgaaagggtttggaggaaaatttggtgtgcagacagacagacaagacaaatgtgcccttggctgggatcaccaggagaaattgcagctgcatgaatcccaaaaagattataagactggttttggaggcaaattcggtgttcagtcggagaggcagactccgctgctgtggggtttgattacaaggagaagctggccaagcacgagtcccagcaagactactccaaaggattcggcgggaagtatggggtgcagaaggatcggatggataagaatgcgtcaacctttgaggatgtcacccaggtgtcctctgcctaccagaagacagtacctgtcgaagctgtgaccagcaaaacaagtaacatcagagctaactttgaaaacctcgctaaggagaaagagcaggaggacaggcggaaggcggaggcggagagagcccagcggatggccaaggagcggcaggagcaggaagaggccaggaggaagctggaggagcaagccagagccaaaacgcaaacgccccctgtgtcgcccgcacctcagccaaccgaggagaggctgccctcgagccccgtctatgaggatgcggcttccttcaaggcagagctgagctacagaggccctgtgagtgggacggagccggagcccgtgtacagcatggaggccgctgactaccgagaggccagcagccagcagggcctggcctatgccacagaggctgtctatgaaagcgcagaggccccgggccactatcccgcagaggacagcacctacgatgagtacgagaacgatc

SEQ ID NO: 166689 - DNA, 440 bp, Homo Sapiens
tccacgacacacgcgtgcatagtattgtggtgtgttgaattcaatacgttacaaccccacgatcacatagtctttctgggactcgtgcttctccgttttgccttgatactcaaagccaacggcgctcttatccactttgtccttgtcgataccgtatttgccgccgacaacctttggagtaatctctctgtgactcgtgcttctccgtcttgccctggtagtcgaagcccaccgcgctcttgtctactcggtcggcctgcacgccatacttgccgccaaaaccactggagtagtctttctgggaggcatgcttctcagtcttcccctggtattcaaagcctacagcagactgatcaactctgtccatctggacaccaaacttgcctccgaagccacggaccgagtccacctgcgagcagtgcttggaaagtttcgactga

SEQ ID NO: 166690 - DNA, 198 bp, Homo Sapiens
gagatagatagggcatggaacagaagacaaaatgcagccaatatactacaaaccactagatggagcgcagatgtacagtggagggtgggcacagtgggaaaagactacacagaaggtaaaacattggggatctacatagtaattccaaataaaatattagatcagttacataataaaatttcctgtgagcagcgttgg

SEQ ID NO: 166691 - DNA, 986 bp, Homo Sapiens
  misc_feature (568)..(568): n is a, c, g, or t
  misc_feature (598)..(599): n is a, c, g, or t
  misc_feature (601)..(601): n is a, c, g, or t
ccaacgctgctcacaatgagcattagactctgggggatagaacacgggctgccctgagagcttcatgttggagctgaagttcaaggttcacttcctttgggtttgtacttgacccttcttcatgtgtctctcccgttccctctaaaaacaagtgtgtttcccctcatttttgaggctgtcaatggtgtgagagccaggatcatcacggggcctgaggttttactccagaaaagcagaggagtggcaaccttggcttggggtttggcagcccaggaaaggcagggaggagagctcaaagccggtttcatgtttcacccaaggtctaattgtgggagaggacaaatccagatccccctgtttgacagaattagttcacaaatgtcctcttggcaaaaacatgtgaccccctaaccatggataattgaacttaattcccaagaaagaacttctggtaagggcaggaacaaataggaaaatcctctcctttccgggtatggggccgaaaccctcttttgccccctcattaccatagtccccctggtccgtcccgcccttcgcggccctgccngagaaaccttttctcaaaacaaagggcccnncnggccggccggggggcccccgcgcagggaaaggctgaaccatcggcagcgaaggtctggtttcccctaaggggaaattccttggcccgataaccacctatgacacttgggagaattccccccacctgatatacaaaaatatagtgcgcgggggtcgggtgccacggcgagccaagcgtgtctgacgagccaaattgtcgacgaagcctacgagaatttgttgggagttccttcgttcccggccgagacctcataatttcaccctctatgctcccccaccagatatacggagcgcgccagtgtaattatactaaaattagtcgtcatctcccaggaatgtccaagttataactcatggattgtagtgcggcgcgctgcgcctgtctt

SEQ ID NO: 166692 - DNA, 549 bp, Homo Sapiens
tcctacataggttgggattacaggcgtgagccactgggccctgcctgtattttttatcagccacaaatccagcaacaagctgaggattcagctcataaaacaggcttggtgtcttggtgatctcacataaccaagatgctaccccgtggggaaccacatccccctggatgccctccagccttggtttgggctggagtcagggcctggatacagctattttgaatttgtatgccactggtttgcattgctggtcaggaactctagtgctttgcatagccctggtttagaaacatgttatagcagttcttggtatagagcaaactagaagaaccagcaatcattccactgtcctgccaaggtacacctcagtactccccttcccaactgaagtggtatgaggctagctctttccaaaagcattcaagtttggcttctgatgtgactcagaatttaggaaccagatgctagatcaaataagctctgaaaatctgaggaacattgtaggaaaggttgttaaagcatctcttaagtgccatgatcgagcataac

SEQ ID NO: 166693 - DNA, 836 bp, Homo Sapiens
gcatgtcctcaatagcaacttcaattggtgttaagatgatctcttctttatgagtgacattgacccttgttttaatataaggaaaggcatgagacgtagtcagaatggtcttccttttgaattgttcatgaagttccccatgggcacggccatctaaagtaaagggtgtacagtacatgaatcgacgaagattgtaatttttgtcgaaataggtgattctgtccttcatctcatatgtgtcaaagtatggctccacataggtaatctgaatatatgccttgttaggatctaatttacacttgtctacgggattagagtctttgattacttcaaccacatcctctccaaatctttctccgtaaaatccctccaatctgtgagatatctctgcaagtttggttattgcaggctccttgtaaacaaattcttgttcatccaaatccccgaacttggttccataaaaacctacacgaaaataggtgccaaacatccgcttaccatcctgatgaacaattttgctgaatgcttcttgaagtttaccatgaattgtggatagtttctttgcatcccgattagcttcatgaataggaataagtactttgtaaacttcattaactgcttcatacatgccagccatagagaaggaagcagctgcttgttccagtaatcccacaagtcctgactcagtaaagtattttccagagcagataccttcttcatctggagataccacatcatctgagaccgcagattcttctaaaacattagatgaaatattctgaaatgttacacatcccacggaagatatttccggtcctccagcacgctcttatatc

SEQ ID NO: 166694 - DNA, 506 bp, Homo Sapiens
ggaatagacaccactctcatttcctgagctcacgctcacagacaggagtcgagagtacagctgcagcacctgctaagccagaaggaagacggcaaacttacaacttactcgcgacagtcctcagtgtggaaaatcaagagttgtggatctaatttcttggatactgaagttggtgctctgtcccttggccttctgtggtaggatgtataggatgccctagggaagtcactccacaatacggagtggtcacattcatttgaaggcaccactcctttccatgttatgcacctaactcaaacccagtaaagagggactccaagcataattactttctttatatcctgctagtgaaagttctgtcactacaaatgcagggaaccagagacaagcatgagaagagaaaaatctgcgtttcttacgatgagtggctgtgtgaaaggtttctgctgggtttggctaaggcatctaaaactccgtgtctgctccccattagtctaccttagaac

SEQ ID NO: 166695 - DNA, 718 bp, Homo Sapiens
ggccaggccggagcgaggcagcgcgcccggctcccgctgccttggggcggctggtggctgtgggcttgctggggatcgcgctggcgctcctgtggcgagagtgcttctgtgcactcaggaaatcgacttaaagcctccagagaagtagaactctgtagaccttccacactgccacctgattaaaggaattgaagctggctctgaagatattgacatacttcccaatggtctggctttttctaggagtgggtctaaaattcccatggactccactagctttgcaccagataagcctggaggaatactaatgatggatctaaaagaagaaaaaccaagggcacgggaattaagaatcagtcgtgggtttgatttggcctcattcaatccacatggcatcagcactttcatagacaacgatgacacagtttatctctttgttgtaaaccacccagaattcaagaatacagtggaaatttttaaatttgaagaagcagaaaattctctgttgcatctgaaaacagtcaaacatgagcttcttccaagtgtgaatgacatcacagctgttggaccggcacatttctatgccacaaatgaccactacttctctgatcctttcttaaagtatttaagaaacatacttgaacttacactgggcaaatgtagtttactacagtccaaatgaagttaaagtggtatatctatgtcgctgacatattgg

SEQ ID NO: 166696 - DNA, 994 bp, Homo Sapiens
  misc_feature (340)..(403): n is a, c, g, or t
  misc_feature (978)..(978): n is a, c, g, or t
ggagggtggagtgattccaagtgggatggttgtggcattagtttaagctgaataaataatttcaatttggggcagttattctgctttttgtaaagccgtggccaattgtctcctgtaatgactgttggttcaggcatgttgtactttgtagggacaaatgtgcatttgtttgtggcaaaagcctacaattgacaaacttgtaaatttctttgtatataaactagctgtaacctgactatcctttgtgtttactgtttttgtaaatttttttcctctataaatgaaagggtgtctggttcagaatggcactttgaataatgtaaaccagtgaaaagtggannnnnnnnnnnnnnnnnnnnnnnnnnnnnnnnnnnnnnnnnnnnnnnnnnnnnnnnnnnnnnnnaaagtgcctcccacctaggcgtaggccatgaccatttggggtacgagagcctaattttgtaggacttaatctgttgaaaagtgcagctacttctggaaattaacctcaatattaggtcaccatgtgaaatgttggatttgacatgtcaggtagggttcagggactgattggtcccatttgccctcaggtcagttgtttaatctcaagacctgttactactgattttattaaatcagagtctttaattcttgcatgtttgtatctaatttctgaacgaatgagcacactttaaccccgtaatttacagcttaccctttttcctttcaacgggattgtgcaagccttcctgtattttttaatttacaatccggtggtttttaaggggtccctgagccatgaaactgggcacataagccgggcaagggactcattttttttcacccatgggctgggctggaatttcctcccctaagaattggataaacccggaacttttggggcaatccttggccttccccctgggaaattttggccatccaagcttgggcttacacccttttcaaacccctgaaaancgaaacgggggcaaaa

SEQ ID NO: 166697 - DNA, 756 bp, Homo Sapiens
tcccatatccttcacgcggttaaaggtttctaaccttaaaccttctctcctttcttctcacctatttagtgcatactcaaaggctttggttggaagtcactaggtaccactaggtacaatgctttagggctctctcaaagcccacaatggtggagttctgtgaaagaaaacttaagtttctttctctttacccctctcccctcactcagctcaaagttaaacagctgatgcaaaactacagagaagcaagataacaaaatactgttatcaatctatggagaaatcagccagccatgatgaaaaaatgagtcctgccgactatctgccagcttcacgctcagaacccttaaaaacacagaatctaaattaaaatacatgaagctttcacaatccggttaaaggaaaaaggtaactgtaaataactggttaaagtgtgctcattcgttcagaaattagatacaaacatgcaagaattaaagactctgatttaataaaatcagtagtaacaggtcttgagattaaacaactgacctgagggcaaatgggaccaatcagtccctgaaccctacctgacatgtcaaatccaacatttcacatgctgacctaatattgaggttaatttccagaagtaactgcacttttcaacagattaagtcctacaaaattaggctctcgtaccccaaatggtcatggcctacgcctaggtgggaggcactttaaaaataataaaacttcaaaaagaacaaaaaccacccc

SEQ ID NO: 166698 - DNA, 557 bp, Homo Sapiens
  misc_feature (409)..(409): n is a, c, g, or t
tacagatgaacaaacacctacatgtctttaaaatcttgtttagaaaggatgtggaggaaggctacaaaaaccaggataggagacatgttttggttaaaattaaaatgcagcatttcagctcaaaatgaacaattaagagctaagaatgaatgataaggcctcagcacagacctctgcaggcagtgactaagcatggagtgccgggagtggccctgctgggaagatggcagggccacaccctggctactctgcccttccagtggcagagagcaccaggacacagtgtgttcatgggatggctaccttggcgggctgaggcaggatatgggacgggaagtttccctagcacagacattgctcaggggcatggtaaaagcagaatcatatgattctgtgatttcttcctganagtgaagtacagttttatattgtgggaaactagaaggattaaactgaggaagggcaggaaatgaatccaggcccccatatgctggggctccacagaggccaccttcccctgtagcagcaaagctcacttctgaaaaggacccaggtag

SEQ ID NO: 166699 - DNA, 945 bp, Homo Sapiens
  misc_feature (770)..(785): n is a, c, g, or t
  misc_feature (867)..(875): n is a, c, g, or t
agccggacgacctgccggccttcccgctcttctctgcctttggccgggcgctcaggtaccacacaggctccctggcctttggcgcgctcatcctggccattgtgcagatcatccgtgtgatactcgagtacctggatcagcggctgaaagctgcagagaacaagtttgccaagtgcctcatgacctgtctcaaatgctgcttctggtgcctggagaagttcatcaaattccttaataggaatgcctacatcatgattgccatctacggcaccaatttctgcacctcggccaggaatgccttcttcctgctcatgagaaacatcatcagagtggctgtcctggataaagttactgacttcctcttcctgttgggcaaacttctgatcgttggtagtgtggggatcctggctttcttcttcttcacccaccgtatcaggatcgtgcaggatacagcaccacccctcaactattactgggttcctatactgacggtgatcgttggctcctacttgattgcacacggtttcttcagcgtctatggcatgtgtgtggacacgctgttcctctgcttcttggaggacctggagaggaatgacggctcggccgagaggccttacttaatgtctaccaacctcaagaaactcttgaacaagaccaacaagaaaaggcagcggaagtccctggaaggcccccgttgctccccacccttctcaaggaagtcttcaatggccggcaaggggtggctcaagtaagacttggggtcctggttnnnnnnnnnnnnnnnntttgggccttcaccttggaaagtcctttatttcaatggtccgcgttcttgcgccccctccccccactggaggccacaaatannnnnnnnnacttttttcctgtggaccgtgggcaaacaaatacttgtggggggaattctctcgcccttatctttaaaag

SEQ ID NO: 166700 - DNA, 773 bp, Homo Sapiens
  misc_feature (67)..(67): n is a, c, g, or t
  misc_feature (76)..(76): n is a, c, g, or t
  misc_feature (89)..(89): n is a, c, g, or t
tggagggtccagaccaccctaaaattaggccagcctgttggggataaagagttgaattgtttttcantttttttgnaaaacagaaaagncatgggggaatgcatttggccattacaatgcctaattgagtttgtgtatattacatatatggcagttaacactgtaatattccttttacattctatatacacagaatgatatcaaggttctatggtcaacagaatattccaacttcagtcttaatgctgcttgtagtgatttctgaattcattataggggctttccctaaaaataattcaagtctatgttaagtgaaataaggcacaattaatatagacttgaattatttttagggaaagcccctataatgaattcagaaatcactacaagcagcattaagactgaagttggaatattctgttgaccataaaaccttgatatcattctgtgtatatagaatgtaaaaggaatattacagtgttaactgccatatatgtaatatacacaaactcaattagcattgtaatggccaaatgcattcccccatgcttttctgttttcaaaaaaattgaaaaacaaatcaactcttatccccaacagctgcctaattttaggagtctgaccctccacatctcactggtgtgggtgcatggggctgtggagtgggtgtcagtatggatgtgtctgaatgtgtgaggccttggaagggactctttctgcagatactgtaaatacaagtaccattttaataaagcatgtacaataaaccaaaa

SEQ ID NO: 166701 - DNA, 710 bp, Homo Sapiens
  misc_feature (605)..(605): n is a, c, g, or t
  misc_feature (655)..(655): n is a, c, g, or t
  misc_feature (674)..(674): n is a, c, g, or t
tgtctgaaggacacttcctgcctaagggagagtggtatttgcagactagaattctagtgctgctgaagatgaatcaacgggaaatactactcctgtaattcctacctccctgcaaccaactacaaccaagctctctgcatctactcccaagtaaggggttcaagagagtaatgggtttcatatttcttatcaccacagtaagttcctactaggcaaaatgagagggcagtgtttcctttttggtacttattactgctaagtatttcccagcacatgaaaccttattttttcccaaagccagaaccagatgagtaaaggagtaagaaccttgcctgaacatccttccttcccacccatcgctgtgtgttagttcccaacatcgaatgtgtacaacttaagttggtcctttacactcaggctttcactatttcctttaaaatgaggatgattattttcaaggccctcagcatatttgtatagttgcttgcctgatataaatgcaatattaatgcctttaaagtatgaatctatgccaaagatcacttgttgttttactaaaaggaaaggatttacttaggagggaaataaggaaaaattcatgtttngctctcccgggtttctttccagtgggtttgaggacactgggttttacacntttatggccgggtgtggcnttttctccaatattcagtgcttcaaggacaacagtg

SEQ ID NO: 166702 - DNA, 557 bp, Homo Sapiens
  misc_feature (420)..(441): n is a, c, g, or t
  misc_feature (463)..(463): n is a, c, g, or t
ccttattttttccccaaagccagaaccagatgagtaaaggagtaagaaccttgccctgaacatccttccttccccacccatcgctgtgtgttagttcccaacatcgaatgtgtacaacttaagttggtcctttacactcaggctttcactatttcctttaaaatgaggatgattattttcaaggccctcagcatatttgtatagttgcttgcctgatataaatgcaatattaatgcctttaaagtatgaatctatgccaaagatcacttgttgttttactaaagaaagattacttagaggaaataagaaaaatcatgtttgctctcccggttcttccagtggtttgagacactggtttacactttatgccggatgtgcttttctccaatatcagtgctcaagacacagtgaagcaaattnnnnnnnnnnnnnnnnnnnnnnccctgaatgatgattagagacntcaccgctaaaaaactacatttataagctaggatttgttatatgcaaatattttctgcctcttcttttgttctgtttaaaacaataaaatgcaa

SEQ ID NO: 166703 - DNA, 322 bp, Homo Sapiens
tctacagtgttgagacatgcatatggcttaggagaacattataattcggttacacagttggtaaacatagttactgaaaattgcagctaatctatacaatgttgtacaattatgttttaatacagtgtgctgaactgagtatttctaccaagtgttgggttgttctaaatgctactgaaaaacacaactaccttatatcagttttatggcaaagctactaacaggtgtttttagaaatatgtcagagataaactttaaccagtgtcttcttagtggaattttaaaaatttgttaagttcattgtagagaacactatgtagga

SEQ ID NO: 166704 - DNA, 426 bp, Homo Sapiens
atcccacttgatcgatgggatgttattaactggaggagggaaagacagaaaaataattctgtgggatcatgatctgaatcctgaaagagaaatagaggttcctgatcagtatggcacaatcagagctgtagcagaaggaaaggcagatcaatttttagtaggcacatcacgaaactttattttacgaggaacatttaatgatggcttccaaatagaagtacaggctcatacagatgagctttggggtcttgccacacatcccttcaaagatttgctcttgacatgtgctcaggacaggcaggtgtgcctgtggaactcaatggaacacaggctggaatggaccaggctggtagatgaaccaggacactgtgcagattttcatccaagtggcacagtggtggccataggaacgcactcaggcaggtg

SEQ ID NO: 166705 - DNA, 243 bp, Homo Sapiens
  misc_feature (186)..(186): n is a, c, g, or t
  misc_feature (189)..(189): n is a, c, g, or t
  misc_feature (198)..(198): n is a, c, g, or t
ccatatttcattggtatcagcagaaacaagggaaactcctaagctcctgatctatgctgcatccactctgcaaacagggatcccatctcgattcagtgacagcggatctgggacagattacactctcaccatcagcagcctgcagcctgaagatgttgcaacttattactgtcaaaagtacaacantgnccctcacantttcggcggagggaccaaggtagagatcaaacgaactgtggctgc

SEQ ID NO: 166706 - DNA, 372 bp, Homo Sapiens
ttatacaacatctgcctaaaggagtttatgaccctggaagagatggatcagaaaaaaaagatccgggagtgtgtgatctgtatgatggactttgtttatggggacccaattcgatttctgccgtgcatgcacatctatcacctggactgtatagatgactggttgatgagatccttcacgtgcccctcctgcatggagccagttgatgcagcactgctttcatcctatgagactaattgagccagggtctcttatctgacttcaagtgaaccaccattttggtggtcttgatcttttgtcactgagcccaaagagacagggattaggaattaagatcgtgcacaaaagtttccttaaaattcctggatggct

SEQ ID NO: 166707 - DNA, 706 bp, Homo Sapiens
  misc_feature (11)..(11): n is a, c, g, or t
tcttcacaggnacatactcccgcatgtctataccattaggcacatttgctccttgtaagaccacattcgtactttatgatcctgacacaaagcaaagatgaaggcatcatgctccacacaatgaacagcaagactgaggggacgatctgaaggcgactggtcacccctgatagctgttggcatccagcctgtaagcaatcgttgcattactgaactctgtttcagttccacgactgacaccataccaggtatgtcataaggaggtagcttaagaacaaagattcccccagaagcacatggtaaggcaaacagggcctccccatcactgctgagccaggctgtagaggcggtggaattaggagatattccaggtactgctggaattaactgatagttgcaaggatctgtgaaatcaacttttccaatgtcagtgaatattgactgcatctgactgtcaactaccaactccaatgaatgaacctgtttctggttacggagaacaacttgccactctccacgtagtaaaagcctcccgcgctttcactgtattttacggcgccagccacggcatttgcagtcccaatgctgcagactgtgaattcccgaaagtgcctcggcctttcgcgctcagctccgcttagctccacgaagctccgttccagggcgtcccgccgccgccatcttcccgcatccccggggatcctca

SEQ ID NO: 166708 - DNA, 301 bp, Homo Sapiens
agatcccatgctcatcctccttgatgcagcatcaggcaaaggataaaggacagacagccagagcaaccaaaatttttagccttggacaaatgcttaccacatagagattttcttcagatattagagatagaacatgaccccagtgctcctgattacttgcgaatatgatattgaatggctcactaattctcagggctacggatgatcttattaatgtgactgggacgcctgtggaatatgccagaaaataatggcctgcatgcaaggtgggattatagtgcaacagaaggagggatgagca

SEQ ID NO: 166709 - DNA, 1100 bp, Homo Sapiens
  misc_feature (449)..(450): n is a, c, g, or t
  misc_feature (452)..(459): n is a, c, g, or t
  misc_feature (461)..(463): n is a, c, g, or t
  misc_feature (466)..(467): n is a, c, g, or t
  misc_feature (652)..(664): n is a, c, g, or t
  misc_feature (674)..(682): n is a, c, g, or t
  misc_feature (898)..(906): n is a, c, g, or t
atgactgagttagatgagactagggggcgggctgggggtgcgagaaggaagcttggcaaggagactaggtctagggggaccacagtggggcaggctgcatggaaaatatccgcagggtcccccaggcagaacagccacgctccaggccaggctgtccctactgcctggtggagggggaacttgacctctgggagggcgccgctcttgcatagctgagcgagcccgggtgcgctggtctgtgtggaaggaggaaggcagggagaggtagaaggggtggaggagtcaggaggaataggccgcagcagccctggaaatgatcaggaaggcaggcagtgggtgcagggctgcaggagggccgggagggctaatcttcaacttgtccatgccagcagcccctttttttccagaccaagggctgtgaacccgcctggggatgaggcctggcaaanncnnnnnnnncnnnccnncaccaaaaacatggtcggccgccctcggcccctcgaggaagccttcctaaacccattccgtttggccgcgccgggcccccacgtagggtaaagtggaaacatgggttcataagcctggttttccctagggaagaacccctggggccatggaactaagagggccttggggaattccccccaccccnnnnnnnnnnnnnccgcgccccnnnnnnnnncaaaccccgaagggggtttccttgaaaccacaaattccccaggaattgggggatgttcccttggaggggcgcccttttatacctggggaaattcccaatccccacaaccgggggagaggttccccaaagcggcaggagcctccctcataatatatcaaaattttaacggcccccccgccgcccctgggccaccttttcattttgaaaagaaaactnnnnnnnnnaatattcctccattaaagacaatttttcttcgcccgaacattggtgaaaacaccccctctccaccaaccggggggattggagagagaaaccccgtgaatccccgcccccgcgggcaatttaaccccccttgtggcgcgcccctggtgcggaaataaatatttttccccccgggggggagaaacacggggcggac

SEQ ID NO: 166710 - DNA, 650 bp, Homo Sapiens
agcggggccggtgctgcacaaagctagcctggcaaaagtggaccctttcccctcagactggatggtgatggtgtgcgttcgcctctgcagaatctggtctatgtcttcttcagagaacttggagccttcatcttcttcatccattaaggctccataagcacctttccggagtaggtcctccacctccatttttgagagctgctgtaccccattggtgccgccctttcggttgatgtcctgaagaacagccttgtccagccccagctttaggctggccttgtcaaacatctcgcgctcgtaggaatttcgagtgatgaggcgatacaccttcacagctttgctctggcctatgcggtgacatcgggcctgagcctgcaagtcattttgtgggttccagtcagaatcaaatatgatgcaggtatcagcagctgtgagattgatccccaggcctcccgctctggtgcacagaagaaagacaaagcggtctgaatctggcttacagaaccggtcgatggctgcctggcgcaggtttccccgtactcgcccatcaattcgctcataggtgtatcttctctggatgaggtaatcttctaggatgtcgaggcagcgcaccatctgggagaagatgagtactttgtgcagaccggcca

SEQ ID NO: 166711 - DNA, 562 bp, Homo Sapiens
acgttgacacttcagcaggcttgatgggtccatgtcttactcagagagagaaaaaaaacatgcacagcttcaacacggatccagaggtgtttatcttcttagtgagtacacgagctggtggcctgggcattaatctgactgcagcagatacagttatcatttatgatagtgattggaacccccagtcggatcttcaggcccaggatagatgtcatagaattggtcagacaaagccagttgttgtttatcgccttgttacagcaaatactatcgatcagaaaattgtggaaagagcagctgctaaaaggaaactggaaaagttgatcatccataaaaatcatttcaaaggtggtcagtctggattaaatctgtctaagaatttcttagatcctaaggaattaatggaattattaaaatctagagattatgaaagggaaataaaaggatcagagagaaggtcattagtgataaagatctagagttgttgttagatcgaagtgatcttattgatcaaatgaatgcttcaggacctattaaagagaagatggggatattccagata

SEQ ID NO: 166712 - DNA, 988 bp, Homo Sapiens
ggtctcaaccttagggaaaccaggcaggttgagaagtcctagttagggttgcccaccccaaaccctggatggccagcagcaactttccagcttacccattcactgcgccaggtctacagctttaagacacttaactataaggtaaaagcaaaaggaccaagtaaatacaaaagtttcttattaaaaaacttggaagcccaacattgaaagcatggtatgtacacaacaacatttttggaaggacatataaagtgaatacaaccaatatattaaaatggtaacaattaccagcattgaaacagtagcaaaaaaaagccaaatacaattgcacagatagtggactcccttagatcttgaaagtgaacttgattcctgacctctcccattgtacactccaagtgaaaaatgaaagcatggggcttttcttgcttcttggttagtatgagacattgtgttcatctgagagcaaaatcaacactagcatcacagcagaagtgcccatttcagcaaatccggtaaaaattgtaagttggcatcaagggaaccaatggataccttagggcactgacaattctcaatacatagaaatgcttgagggttgtgtcggttccctggccacagtttgtcaggttgtttagccagatgccccattggtaaggtagactgaaatctcggtttagggctgaccccaagaaacagtctggttcgtgctatggtatggtggactccagtgtgcatagcagctgctgtcttgctaccaagttactcagcttaagttcagattgtgattggtggctcatttcaaaagtttggagattgtactgattgatcttggcattttcaagtttggatttcatgtccagtggcttttcaaaaaagttgactaatgactgttcagtcagaagtgaagctaaaatatgttcaagggagacagtccagtccccttctgccgcctctggaaatgcctgggagtcctggggcgtcttcc

SEQ ID NO: 166713 - DNA, 811 bp, Homo Sapiens
  misc_feature (432)..(461): n is a, c, g, or t
  misc_feature (510)..(510): n is a, c, g, or t
cccacgcgtccgctgcaattacgaagcatctgccaacccagcagaccatagggtccatcaggttaccccacagacacactttatttcctaagggctgcccaaggctcccatagaggcgctgtgtcagtgaagatgtacgactacctgttgggaaggacaaagggatgaggctccagagagagttggctgccacagcctctgccaagctttgtctttggggcttgctgcagaaacctggcctacggaagatacgacaccactgggagggttgtgtaggtgccaggggaccatcgtggttctctagggcgctgtggaaattgggtcttgggctgggtggcatctggcagtcatgggtaacacttgcttttccagttaatgtggccatgtgattccaagtgtcatgttgctttgtggcaagattgttgtgtgacnnnnnnnnnnnnnnnnnnnnnnnnnnnnnnaaaggaaactatttgtgggctataggaaactttctgatgcctccggatngtgttagtagtagccatcaggagggtctccaactaaaacacttgttcctgcttgctcctttcccctctcattgttcagcattcttgtcaagttgcccagcttggagttgtctgtcacgcacatgtgtcctgtggttatagctagaaggacaggagtctcctgctgatgcgtgatagcttaagcttggggagaaggtcttttccactgcctagctaagcagtctggggagagcatggggatcatttctatgtgtgtgggtaatctggtccagaagattgagacttagttaagattccccttc

SEQ ID NO: 166714 - DNA, 311 bp, Homo Sapiens
aatcagtttacacaacagaacactatacagaatgaagctgtaaacttaccagatccaggcagttcctatctgctacaggagccacctagaacagtttcaggcagatataaaagcacaaccagtgtctctgaagaagatgtctcaagtagatattctcgaacagatagaagtgggttccctagatataacagggatgcaaatgtttcaggtactctggtttcaagtagcacactggaaaagaaaattgaagatcttgaaaaggaagtagtaagagaaagacaagaaaacctaagacttgtgtaaacagactg

SEQ ID NO: 166715 - DNA, 1118 bp, Homo Sapiens
aatcagtttacacaaattacattgtcatgaaaaacagaagaaaaagccccaaagtctttttcagacctcccctccttacccaaaatacagacacacaggcaagaactctcataaattcaaattcatcatttgagaggttgaagcctccaaggattcttctagctccagggtacatccactgtatgcttccagatgttttttccagatttcaatgtagtgtggctcttctttttctttcagggctggggggccatcttctgcagggcagctggggccctgtgtgggtaggctgggaggtgcctgaggcctgggctctcccaccagctcctgctgcacattctccagcatggtcttgtacgcctgtcgggccgccactgtcagctcaaccatcttgtggaactgatcctgggccccatcatagctgaagatccccaccacactgacaggaactgccttattcaaactgcgccccagagctttgcggttgagagcaaacacaaagggaatgttctgctcacaggcataatcaataattgtgtgcaaagtgtcatccagcccaccttttgactgtatcttctcacagttgggagaaataatgacacatttcagttttttgagcttcaggtgtttgagaacctccctcaaccccaacacaagtcgacgtttagtcttggccttgactggatctttctggtacatacggtcttggaaacggaccagttctttgagtaggtcggtaacacaagcatccacttctttactaagcatctggctgcagtaatccctgaatctgcggctgtggatcttagggaaggtggtgtgattgggagcaaggtgggaggcctctgtgtccctctggagctctgtgcctggtggctcttcagacttgtcctcaaccgaaggagtggagatcagttcgtccatcccctctggccctgacagctctgcctgctcgtgaaactggtcatcaccaccactctctccatcttgtgtgtcatcactggtaaaagctggactcacagcattttcttggagacgctgctttctctcttgccgttctttcaaaataatcttcttcagtgaggttggcttcttggccttgggggcaaagaatcgtg

SEQ ID NO: 166716 - DNA, 271 bp, Homo Sapiens
aatcagtttacacaagactagatggagaattaatgaagaagaaatagaaatgaggcttatttaaggtacaaaattcttgtatttgtaataacctagatttatagatataaaacaagtcttttaaagacttccctaaaatactcaatataaaacaggagttacttatcctagatcatccttagttaggtacacatgattctctgtgcaactagctggtggacatgaataaaagctgctgggcctataatgtactaaaacatttttctccccc

SEQ ID NO: 166717 - DNA, 1427 bp, Homo Sapiens
cttaatagtggacactctttgagtaagcaccttatttcagttacataattttgatctgtgaaattcctaaaacgagactataaaaatcacacattttagatggtaaggtatcaacaagtgggtttttaaagttaaattcctattataagactttttggtatatctttttttacagtataaaagaagactattttacaattttcttagaaattcagtgtaaaagctaccaaagtgctaaaatatcacaatagcatgataaaaatacttgaataggatttcaaaaaagttcaaatacatataagcttattttcaaatatgtataaaaagatacaaggataagatttaaatacttcagcaaagaaatatcttgattttatatcaaaaaagtaaaatagcatagtacatcttaaaatactcttaccaagagtagaatcttcataaatagaaaaggaagattcctctaactctgtcctcccacactattaaaaaatattattaacctgcacatttctgttttcaggtatattgttgtcattaacctttgtgtgaaatgagtcatattattcttgaactctattttttccagtataacagtaggcaatgcaactttaagtgcaaaagaagaacgtaacagtgattcttacaaaacagtgcataggtcacttccagtgtaacacaaatttgcttctgagtaacggagagaaaatgttcttcaagtatctgaatgacaaccacctccctgctcttttctcactcctgaaactgggtgaacaagcagagatgtggaacctttgaggctgcttggttctgaagaactggggacctgcaaattgttgctctgtgccaggccagtgtcagtaatatcactctttggactaatccttccttcacttccgcgcactttcagatacactgcctgcctggcccttcccgtcgacctgttccccagagagtctggagatggatgctgctggcgaggcaggttcaccacagtcctgttctcttaacctgggggtgctagctccgtccgctttcacctctctcattgatgtttctggtgaggtttggatttctgtcaaagtttcttgtcctaggtaatcatggctagtaattgctactgcagaagtgccactgatttgctgtagctcctgtgctggttcccatggatttggaaatgaccttcagcttgtgtgaacttggtttatagtgcttctttttgtgtttaactttagaattgtgctttaagaaaaactcacatgattcctgtatttttaaaaggatttgttcattttttaaaattctcttttctattttggtctgactgggttaattcgaaaaatgcctctcctacatccacaacagtggactgagggagcaggagatgacccccctctacatctgttaccaaccaccagtaccaccccatt

SEQ ID NO: 166718 - DNA, 378 bp, Homo Sapiens
aatcagtttacacaaatgaccagcccactcaactggatgtcgagctgatttcctcgttttaaaatgaagagaattctgaactcagaggtcataaatcagatggtatataaaaatgactggcacagtatctggtacccagtcaccaccaaacctatgcaccagttttagaatgcattctagaaacgcgtgactcacacgggaaacctgaagctgcgatgtaggtttaattgaagttgtatagttgaaaagtaaaaatcttattttctttttgacattttctacattaatactttgatataggaataattaattcctttgaatcagggattaacattataagaaatgtaaaaccgttccataaatacgtgcttgtgtaac

SEQ ID NO: 166719 - DNA, 1135 bp, Homo Sapiens
  misc_feature (983)..(983): n is a, c, g, or t
  misc_feature (1093)..(1093): n is a, c, g, or t
ctagttctagatcgcgagcctgtacactcacagttttttcacctgaagaaaaccctgggtcaccttctagagaatcacctctttcagcaccttcagatcattcttaggtctaaggtgtaacacctttgcagtacgtcatgggtgatctaatacttccccttcagttgtatcttcttacagtgattggtacagttattagatataaaggtaactgatgttattcgtcttgtatggcttttagtatgtttatcaagtggctaacaaatgcattctgaaaatgtatttaacatagctgttttaacaaatgaaaaaaagacgtagaaaaatgtttagatgtctttttgtgatgttatataaaattgtagatgactgtggtaaatgtgtaattatgtccattatgcttcaaagttgagttttcatctttgactccaaaatgtcagagggaggccgctctaaactaaaaataacgaaaggttgccaagtattaatactagttacctccctcttttcgtagtttttgtcatgtctgtcaacttactcgattgtgtggttgcattcagaatatttgaagtttcttacgtagacagaaataataaaaatattaactaggaaaaaacagtatagcaccaagccagtatttggtatctctctctagagcgagcaagagagggagagaggaggaaaaaatacacataatacaaacatacatgcatgcacacatacatacatatgtatacacacacataatttgaaaactgattggcacttcaacgatgctgaaattgtttttaaattgaagtttctttcttccacaaagcagccgtttctattcaaatggaaattcagtaccagagaataaatgtctatgtagtcatactgaatttagatagataagggctacagcatactaaatcgacaaacaaatttgtcatgtgactaaaacgttacttcagatgaagcttacattactggtttctgcttgnggtattttctgtaaagtactttttacacagatgggtaaagttcagggtttcagagaactgctttttgtgcaaaaaatttaggttccttttttccaccctttttggccagntaaaccttaatggaaaaagccaagaaaaaaattatcctgaaa

SEQ ID NO: 166720 - DNA, 364 bp, Homo Sapiens
aatcagtttacacaactattgtactgggttacttagtctaagaaagaaaaggtgctctacagagatttcccacacacacaaagaatcagcattaatttagcataatctctatcattcacagatctggcagattcattaactcatttaaaatgaataaggccaataggatgcaggaaggtgtggctgactgagctccagggctgtatcgcagcttattgatggcaccccattaggtaactgaatacaaaggactggtttactttctttttcttttaatgctgtgatacttaaatgttaaatcagcattttcatgtgatctgaagtatttcaattacatatgagcattcatttgtgtaaactgatt

SEQ ID NO: 166721 - DNA, 141 bp, Homo Sapiens
agttgttaatatggtgaattatggaattcttccttggtggaattcgttaaaatggagaattattttgattattgaatgttaagccaatcctgtattgtttcaaaagaaacacctcagtctgatgtagtattgcgtttatta

SEQ ID NO: 166722 - DNA, 255 bp, Homo Sapiens
atcgagctcggaccaatctgtttacacaatagtaggtggtttaagaactgattttacgtaagacaaactgatagcaacattctgttgttttaaaggaagtgggtccgtgacattctgcagctagtccactactccaaggtaactatcgacttggtttcagtgaatctattttgtttttaactacagtgatttattagctcagtatctagaaattacgtatattttgtgctactgtcatcgttgtgtaaactgatt

SEQ ID NO: 166723 - DNA, 502 bp, Homo Sapiens
tgctcgagagaaagacaagctcacaccacacgcacaccacagaacaaagaatgggtacgaagggcacacacacacttttgcagttctcaccaaaccagaatcaaaaccaaaatcagagtatccagaaatccaagccaggtcaaaccaaaaccaaagtatcaagcaatccaagtcaagtcaaaaacaaaaaccaaagtgccaatacaggcacaccataggtgatcaggccacacttccactcaaatggagtgggcaagttccaaagaccagtcttaccaagtttcaaatgtccagactccaagtgccacttccttcccggtgttcagccactgtgttgatcttccatgggggcctaccacacactgctttgacgaggcattcctccggggcaattgcctacccgggagagctctcaggatccgcgtcgctcaagctggccggagtccccctcagggatgctccacagggcaggcctaagccacctaacgggctgccttgactt

SEQ ID NO: 166724 - DNA, 363 bp, Homo Sapiens
cggtccagtctgtttacacaactggtaggtgtggacatatggaacatcacacccttaactaagaatgcaaaccttggcctgcacttagcacacaaagcaacttaccaagttttatcttaaagttaaaaattgctaggagttaattaaaactactagaaatagatttacatgcagggtgtgtaagaacagtaaaatgttttttttagtaaaaggttataagaaggcttggaaatgtaaacttttgcctatgggttataagtaattgttttgagttaaattaggaaaaagctgaaggttcataagaagtggtgaaagaactgtggaaattaatctttcagaagaggttctttgtgtaaactgatt

SEQ ID NO: 166725 - DNA, 451 bp, Homo Sapiens
tttctctgatcgctcaggtggaagcgagacaggagatgggatgaggagagagagccgtgactcccaaggagaactgaggggccactggtgcggaggcgatctgggggatgttacaggaaagttgctgtcacccaaccagcgggcatgcctccgtgagtttattcagaacattggctgaggattccagatggcaactaggtccaccactctcaacactcattaaagctgtaatccaggggctgtgcactttcacaggtcatgtttcattaaacttttttggatagtagcgtcaaatgtcattgttttatttttaggtagagaaagggctgtatgcattttaagtcatgggatattgtccgttatgaatcaaacacaaacggctgcaaattcacaacatgaagaagatgaggacacctaagagttaagtgtactttgagagcgacagaaagtc

SEQ ID NO: 166726 - DNA, 1088 bp, Homo Sapiens
gggtgcagaggtctaccatacactcaagggagtcatcaaggacaaatacggcaaggatgccaccaatgtgggggatgaaggtggctttgcccccaatatcctggagaacagtgaagccttggagctggtgaaggaagccatcgacaaggctggctacacggaaaagatcgttattggcatggatgttgctgcctcagagttttatcgtgatggcaaatatgacttggacttcaagtctcccactgatccttcccgatacatcactggggaccagctgggggcactctaccaggactttgtcagggactatcctgtggtctccattgaggacccatttgaccaggatgattgggctgcctggtccaagttcacagccaatgtagggatccagattgtgggtgatgacctgacagtgaccaacccaaaacgtattgagcgggcagtggaagaaaaggcctgcaactgtctgctgctcaaggtcaaccagatcggctcggtcactgaagccatccaagcgtgcaagctggcccaggagaatggctggggggtcatggtgagtcatcgctcaggagagactgaggacacattcattgctgacctggtggtggggctgtgcacaggccagatcaagactggtgccccgtgccgttctgaacgtctggctaaatacaaccagctcatgagaattgaggaagagctgggggatgaagctcgctttgccggacataacttccgtaatcccagtgtgctgtgattcctctgcttgcctggagacgtggaacctctgatctcatcctcctggaaccttgctgtcctgatctgtgatagttcaccccctgagatcccctaagccccaggatgcccagaacttccctgattgccctgctccgctgctccttggcttacctgacctcttgctgtctctgctcgccctcctttctgtgccctactcattggggttccgcactttccacttctccctttctctttctctcttccctcagaaactagaaatgtgaatgaggattattataaaagggggtccgtggaagaatgatcagcatctgtgatgggagcgatcagagaaa

SEQ ID NO: 166727 - DNA, 511 bp, Homo Sapiens
agctatggagcagtgatgcccggagcacggcaggcccagaaaagcgaaggaaaagagagattcgagggcaagacttctatctgctacgagatcgacagaagagtaggtaacatagagagtgaaagtactacaagaagtgaagaatcaacaaactgtagtgtaatacatcagaaaagcatattaactctgctgaagtaccactgaatgaaacaaaaatgaagctgtgaagtagcaatctgattagcaggctggcttctatgtcccatcactctcgtagtcttctattattatgttttcttccatgtctccttgggctgaaaagggctggggctggctagcaggcagttcactggcactattctgactcaaaggaagagaccaggtttccggcacagtggcttgagtgggttcacccagagattcctctgcagaatgtcctccattaagctgggcttcatctccgctgtcagggtctatcattccatgttccctgtcagagcgatcagagaaa

SEQ ID NO: 166728 - DNA, 918 bp, Homo Sapiens
tttcatctgatcgctgcggatgcgtgcgatgctgaggtacagggcgggatggagggggcacacatgcctccaggggagcgatggagaactcgttgaaatctccatgtttcaatccgcttcgaaatcacgtatggtttccacaaagccgagtcgtgtcacgtggcaggtctacgtcaatagtccctctctctgctcctccattcgcaagtgtcttcctgggccagactcccctccacctcatgtacttgctatattgaggatgaagttttctatggtgggacactaaatataaagctatatagagaaagaatgtacggtcagttccctatggtttctgtagatcatcgtcatcttgtatattccccacaaagccgttcgcagcttccgggagaaggggccagagcccggtggggccagtttctcacagagggaggaggtggcctttgtcccctggagcccgatcagccagttggtgctactgctgtggccagctggggggcttcctccagaccaccggcctcggccccggcatccctgttgggcgtcagcctgagagtccctactgtgcgtcagaatccaccttgcgtgctgtgcgtatctgtgaacctggagcggttacttattttgacagatatcactttgggtccttttacattaaatttcttttctctaaggaatataagacataccccataacctctgtgttgagcccagcaataaccgctgccccccctggcgaacgggggcaaaaccaatggatggcccaaggcagcttgttcacaaccccctaaaaaatggggcttttcaatttgtggaattctgaaagcccccttggcaccgcctttggggcccccttcccacaaaatattaaaatggggccccagcaaaaagtgggggtccaaggggaaaaatgtgaat

SEQ ID NO: 166729 - DNA, 1096 bp, Homo Sapiens
cagttcctatggttctgtagacatcgcatcggtatatccccacaaagccgttcgcagcttccgggagtaggggccagagccccgtggggccatttctcacagagggaggagttggcctttgtcccactggagcccgatcagccagttggggcttactgctgtggccagctggggggcttcctccagaccaccggcctcggccccggcatccctgttgggcgtcagcctgagagtccctactgtgcgtcagaatccaccttgcgtgctgtgcgtatctgtgaacctggagcggttacttattttgacagatatcactttgggtctttttacattaaatttcttttctctaaggaatataagacataccccatagctctgtgtgagccagcaataccgctgccccctggcgacagggcagaccaatgatgccaggcagctgtcacacgctagtattggcttcattgtgatctgagccctgcacgctgggccttcagaattaatggccagcagtgtcagggatgagcccgtcagccagggcacaggcctggctcacagtcctgcacacctgctggcctggggagctccagccaggcagcgagtcctgccccgcccgcagctccctcccacaccccgcctggccaagatgactgcttcagggggctttggggaaagaattaggaagggtcagaaccaaacaatacctgctcatttacactgaggattcagggcgggagacaggagccttggggtcctgttaaaccacagacagttatgaactgaaagtcataaccggggagaggtgcctggcttctacctgggtgctcaggaatggtcctcgtcacccctgccacctctgtggtcgggtgccctggcttcctcctccaatcctggccgccttctcccgcgccgaacacccaacatgctcagtcctccaaaaaggctggcaagggcctgtgaaatctgaaaaaaacccgccacctctaggcccaccgtcccagggccccctcgataggaaaacaaccggcggcatttcggcgggagtcgggacccacccctaccggatacgtaggtgggccaacacctccaccttaatcat

SEQ ID NO: 166730 - DNA, 847 bp, Homo Sapiens
gagctcggtaccctacggattctagcgacccaagggtgtttcttgaggaggggtggctctctctgcctccagctggaggccctggtaccctgttctaggtcactcttcaagatggggcctaccttgcatcaatcccacaaagggagctgtatggtgggtggtggggaatctgggagagaaaccttagtaatgctgggaaggagcagcagagtctggggaccacccggtaaatggcacattcctgacacctggctgttttgatgttgcttatttcagaagcagaattaggtaagcaaaactcccccggtgtgactgagacacacagaaggcacccatacccccacctccagcctgttgacagtaccattttgtagcagttttactactgtgtgatttttgtttggacatctgaagtagagcttgttttgtttttaaataagaatattcacaaattaaaaaccagcggtcctatttgaatcctggggttagctgagtgagcggctgacgatagaaatgagaaatagaacaaaatagtatgtgccgtaggtagcttaagaaagtctcagatattttgttgctgatcaaatactgtttttttgtggcttcacttgtaatcccccctgtacttacctactcacattggagagttctgaggccggagtaactgtgtccttgaaacacgtttctaattggaatgccagggttcagtagccgtccccccggaaaggggtgaccttttgctgtgcttgatgttgcatcagcagcctaggggtctgtttagactaaaatctttggcagagcttcttgccatctgctaagaagactgtggctgagtagttaagccagg

SEQ ID NO: 166731 - DNA, 984 bp, Homo Sapiens
  misc_feature (49)..(57): n is a, c, g, or t
ggttgctgaaaatgcactgcattcatttttctaaagtaacaaatttggnnnnnnnnnaaaccattaaaatctatgtgtgtgcgtgtgtatgtatgtgagcagttggtcttaccagaatcattgttgaactacctgaaacaagtctttagaatactaaatataatgctgttgtctcttcctttgtgacatggtcgtgatttttttcccccaaaacgtcagttaatatttacccactatgattattgatgtcctgccttgaacagttttaaagaaaacaattttgggaatagctcaaatttcaattgatggcacaaatcagcattttgttgttgttactgtattacaattagtattctaaaggcagaagcagaagtagctgctttttagcaatagaattgtttcagtattttgctgcgtgtttaatgcgcatcttcagaaaacttcccagtggcttcaaggaatttggggatctctctggcaacaaattgtgaaacatgaaatttctgctgactttaatatatgaaacctaatcctacccctttttaacaaaaagaaactagtacatttgtgaaaattgtgttgtgttgtccattgttgctctagttctgacccagaggtagctctggagtgattttagacctactcactcagttgtgtgtaggttttatgtatgtttgagagagaatttttctctccttaatagaagcatcctttttaaagagaagttgcctggtccacacactaagcagaaaaccaagttatcaggacagagatatttcccaattactcctaatcaatgaagaaagtgagttggatatttttaaagcagttaactaattttttcttacctaatcttttgggagtttgcttgttgatataacctttttagttaacctgaaagattccaaaaatgttcttaagtgcttgagactggaaccaaaattaattgtcttcataaaatcctcttataggagttactctgcc

SEQ ID NO: 166732 - DNA, 964 bp, Homo Sapiens
  misc_feature (577)..(620): n is a, c, g, or t
gatgactctagaggaccccgagtgtcttcaagaagcagaagaagaaaacagactcctgatagttcaggatgcttcagagagggcagcacttatacctggtggtctttctgatggtcagttttattcccctcctgaatccgaagcaggatctgaagaagctgaagaaaaacaggacagtgagaaaccacttttagaactatgagtactacttttgttaaatgtgaaaaaccctcacagaaagtcatcgaggcaaaaagaggcaggcagtggagtctccctgtcgacagtaaagttgaaatggtgacgtccactgctggctttattgaacagctaataaagatttatttattgtaatacctcacagacgttgtaccatatccatgcacatttagttgcctgcctgtggctggtaaggtaatgtcatgattcatcctctcttcagtgagactgagcctgatgtgttaacaaataggtgaagaaagtcttgtgctgtattcctaatcaaaagacttaatatcttgaagtaacacttttttagtaagcaagatacctttttatttcaattcacagaatggannnnnnnnnnnnnnnnnnnnnnnnnnnnnnnnnnnnnnnnnnnnaacactctacatttcccttgttttttaactcatgcacatgtgctctttgtacagttttaaaaagtgtaataaaatctgacatgtcaatgtggctagttttatttttcttgtttgcattatgtgtatggcctgaagtgttggacttgcaaaaggggaagaaaggaattgcgaatacatgtaaaatgtcaccagacatttgtattatttttatcatgaaatcatgtttttctctgattgttctgaaatgttctaaatactcttattttgaatgcacaaaatgacttaaaccattcatatcatgtttcctttgcgttcagccaatttcaattaaaatgaactaaatt

SEQ ID NO: 166733 - DNA, 1037 bp, Homo Sapiens
  misc_feature (622)..(622): n is a, c, g, or t
  misc_feature (716)..(716): n is a, c, g, or t
  misc_feature (942)..(942): n is a, c, g, or t
  misc_feature (952)..(952): n is a, c, g, or t
  misc_feature (999)..(999): n is a, c, g, or t
gggggaggtcccggggctgctgggtgcgggcggtgggctgcgcgttgtccgctggactgggtcccggtcacgccccgccaagccccgcccctcaggccggggcgcgaccgcggatccgcagttcccgggccagcctggggcggccggccaggaaccacccgttaaggtgtcttctctttagggatggtgaggttggaaaaaggctcctgtaaccctcctccaggatgaaccacctgccagaagacatggagaacgctctcaccgggagccagagctcccatgcttctctgcgcaatatccattccatcaaccccacacaactcatggccaggattgagtcctatgaaggaagggaaaagaaaggcatatctgatgtcaggaggactttctgtttgtttgtcacctttgacctcttattcgtaacattactgtggataatagagttaaatgtgaatggaggcattgagaacacattagagaaggaggtgatgcagtatgactactattcttcatattttgatatatttcttctggcagtttttcgatttaaagtgttaatacttgcatatgctgtgtgcagactgcgccattggtgggcaatagcgttgacaacggcagtganccagtgcctttttactagcaaaagtgatcctttcgaagcttttctctcaaggggcttttggctatgtgctgcccatcatttcattcatccttgncctgagattgagacgtggttcctggaatttcaaagtgttacctcaagaagcagaagaagaaaacagactcctgatagttcaggatgcttcagagagggcagcacttatacctgggtggtctttctggatgggtcagttttattcccctcctggaatccgaaggcaggatcttgaaggaagcttgaaggaaaaacagggacagttgaggaaaccactttttaggaantatggagtantactttttgtttaaatgtggaaaaaccctcacaggaaagttcttcgngggcaaaagggggcgggcgttggagttttccctgttcg

SEQ ID NO: 166734 - DNA, 361 bp, Homo Sapiens
ccgactgttctcaagatgtgttgcatcctcatcctctgctagtgttctccaagaaggaatttgtttggacatagagaaatcttctttattacaggtgaaaacctatccataggggtgaaaaattttctgtctcagatttttcctggagagcataaagacaaataattgtactatatgatctgtaagtgctacaacatgaattagattatacttctctacttctgtaaataaatatgtcagaaagataatagaaataaagccttgaagtagaagggaaagaaaagaagaacagatgagtaaggggatattatttaaaggaagcagaagacaacattgagtcagcttgtcttgaagaacacta

SEQ ID NO: 166735 - DNA, 717 bp, Homo Sapiens
atgctgaggtgactctagaggaccccgagtgtctcaagactgctgcttggtcaccttcatcctcatcttcacagatatcagtcttttttccttttgggtcttctttatcttcttcatcctcatcatcttcatccccttggtcatcactgtcatcgtcatcatcatcgtcataatcacagtatcctcccttccttctacgcttgcatcctggagtgggagtgaccaagggatgctgctctgctcccagatcaatgccacgctgaagtgtctctttagcctgtatacttagcatgaatgattctgagcttgcggagttgaccttctaccacccatttatctctcctcaagtctgacatataatcaatgttcttgtcgatttcactgaccacactcttgctgcatgccagttcattgatcaggaaagccaggactgaagctttctgtgctggagtgtgagcctgaaaagctttggtcttcagactttcagtaagctcagtttgtccacagtgggcttccataaatatctgtaaaatctcggaaacattgtctcgattcacaccaacattcagcaaatgttctccaagagctgttttagccttgtatcctgttattagacctggatcacatacagcagctgagaggagcctcacaagcaagtcttgtacttcaccacatgctgtccacctatatttgagcaatccttcttgaagtacagct

SEQ ID NO: 166736 - DNA, 430 bp, Homo Sapiens
tgacatagcagtagtgagataactaaagaataaacagaaatgccttggcaaattatttttacacctggcttgaattgaagacattaacagcacaaatgaaatgctgtaaggtgtacactagttttccaaatgcgttgtcaagtttattggtaagaaatagactcctaaatagatgcagaaagcacttaagtgttctgctcaattcaactatatgatttttgtctctcagttgaaaatttgtccacctatgtttcaggatatgactacagacgaaaacgatttgtgcttagctgtaatggatgtccgtggtcaggatgcctcccacagtgaattaaaatgcctgatttcattaagaaaaaaacattagacatctgctaaccaagtgctgcattgaatgaaaccacctaagacagaaaaaggggtaccgagc

SEQ ID NO: 166737 - DNA, 500 bp, Homo Sapiens
agtgttctacagagttgattcggaatggaactaagtaggctttggaacaacttgtgacaaccattgcatcagtgtgcagatacaatagaagaaaaatttgtcccatattatgatatattcatgccctcactaaagcacattgttgagcttgctgttcagaaggaactcaagcttctgagaggaaaaactatcgagtgcattagccatattggtcttgctgttgggaaggaaaaatttatgcaagatgcatcaaatgtgatgcagctgttgttgaagacacaatcagacttaaataatatggaagatgatgaccctcagacctcttacatggtttcagcatgggctagaatgtgtaaaattcttggaaaagattttcaacagtaccttccactggttatcgagcctcttattaagactgcttcagctaaacctgatgttgctctcttagacacacaggatgtggaaaatatgagtgacgatgatggctggcaatttgtaaa

SEQ ID NO: 166738 - DNA, 367 bp, Homo Sapiens
caaaaagatgaaaaaattacccaacaagaagagaaatacgaagctattatccagaaccttgagaaagacagacaaaaattggtcagcagccaggagcaagacagagaacagttaattcagaagcttaattgtgaaaaagatgaagctattcagactgccctaaaagaatttaaattggagagagaagttgttgagaaagagttattagaaaaagttaaacatcttgagaatcaaatagcaaaaagtcctgccattgactctaccagaggagattcttcaagcttagttgctgaacttcaagaaaagcttcaggaagaaaaagctaagtttctagacatctgtagacactcggggtcctctagagtca

SEQ ID NO: 166739 - DNA, 822 bp, Homo Sapiens
tcgtgattggtatgagtctgtgacagatatcggaattcctgagtaagccagaagcagtgtttaacatgctctggagaaaccaaatcttcagccactttgatgcagctatataagttatgaacctgatgtggagctcctgccgggataaacaccacatccccaagaaactgtacaatagcccagccttgaactccatactcttgatgaagacgttttcttaatgatcggtctaaataccagctttgatcatgaataggatcgtggtctgctgggttttcttgaccttgctcttctgatacctttttaagaaattcccttatcttctccgtgtcctttgcagcatatatgtgccacagtgctcctggcttctcttttccttcaataaatcgctttattgtgagttcgtcagaatctccatcttggatggtcttaaggacttcttcttcttgctcacactgtcctttgggaattcccacatagaccatgacattagctgcatcagatacatctaagtgaagatttgttgttccatatttccgatcttcaggagtgattaatccataagcattatacatcttggggcccagatctggccgaacaaagtagtttggcagcctagaggccaaattcagtttgccatctcgccttgtgtactcgggcagtggaatgttggccatcagatcatcaaacctggaaggcatcatatctctaaaatcttctcctggtggccagtccttaagtttcaacaccattggttctttttcatttttcaaacgatttggcacatcttcaaatcggacgcgtgggtcgacccacgcgtcc

SEQ ID NO: 166740 - DNA, 1117 bp, Homo Sapiens
  misc_feature (14)..(14): n is a, c, g, or t
  misc_feature (23)..(23): n is a, c, g, or t
gacgtagcccaacntgttacaantctcagagtcatgaccgtgaggagatcacagagcggcttgatacaacccagttctactaggtacttgatctgttcagctgatcctccagaagttgcatttgtgatggcccaaaggaatctatcaaaaaggaagcatgttggacgatatctaatattacagctggaaatagggcacagatccagactgtgatagatgccaacattttcccagccctcattagtattttacaaactgctgaatttcggacaagaaaagaagcagcttgggccatcacaaatgcaacttctggaggatcagctgaacagatcaagtacctagtagaactgggttgtatcaagccgctctgtgatctcctcacggtcatggactctaagattgtacaggttgccctaaatggcttggaaaatatcctgaggcttggagaacaggaagccaaaaggaatggcactggcattaacccttactgtgctttgattgaagaagcttatggtctggataaaattgagttcttacagagtcatgaaaaccaggagatctaccaaaaggcctctgatcttattgagcattacttcgggaccgaagatgaagacagcagcattgcaccacaggttgaccttaaccagcagcagtacatcttccaacagtgtgaggctcctatggacaggtttccagctttgaagcaatactctgctttcacgttcctgtgtcagaccaggctacccagtcgagtcctcttgtggagcccacagtcctcatggagctaacttctcaaatgtattccataatactgtttgcgctcatttgctagcattgcgcacctgctctcttacacacatctggaaaacctccggctctctgtggtggcaatacccttctaataaaagggtaaccagaacggcccactctcttttacggaaaaatccctaagctttggagatccgcacttacattagagttatgggaatatacacatattaatgtggctccctttttcttgtgggggaataaaagaggactcctcctcattccctttaacatggggaaaaaaactgacattaaaagatgagactaaatctttatctgaagaacactg

SEQ ID NO: 166741 - DNA, 1024 bp, Homo Sapiens
  misc_feature (391)..(444): n is a, c, g, or t
agtgtctgcagagatgttaaatatttatatgcttgttcgactagctaaaatgtgaattctgttagtgttgactagagaatctggtagttgcttaattgggcaattaaacaatttatggctctattttgtaaaacaaactactggtaattatttttaatacctattttcattctgattactctttttttatgttaaagactatcagttaattaagattgagtttttatgatggttaaaaataattctctattggtttttcaatatatttttctgtgtgttctcagattatatatttccctcaatttagagtttgctaagtgaaataaactggttcactagtagagaaagaattacgtcgcttaatacctaatatcatagttgtacaatatgnnnnnnnnnnnnnnnnnnnnnnnnnnnnnnnnnnnnnnnnnnnnnnnnnnnnnntagatgccttaatagtatatacgtgaaatactcagctgtccctgttaaaaataattccttggactgcctggtggttaaaatacgattcctcatagtccaaggctacttttgatagatcccttctgccaaaaatatatagtctcactgtatgctaaagtgtgagagctgcatagatccagtaatgtacataaagcctgaatgatgagcctatgtccctgcctaacgctggtgtctcactcatctcttttacctaaattgtcctgaactttgttaagtgttctggacaaggccaagcttttctttattaaaacctcagcatgtctcccggatctgaactatttgctttctcttcaagataagttgtattttaccatggaaaaatacagtatctaacattaccattcacgttaaatgaagtttcctcataacatttatctttagttttatgaagtcatcgtgaccaatgttacagtaatttctgttagctgattgtggtaaacaatgtttaatgtgaaaagaaattaaaactttcttcatctgttgtagaatatttctcttctttaaaatggcttctattcat

SEQ ID NO: 166742 - DNA, 243 bp, Homo Sapiens
tgactcgtagagtatccccgagtgtcgttcaagatgaaaagacgtgtgacacaacatgaagtgcaaactgagttcattcacagaatgaatccaaatctaagaaaactacgtatatccaaattctaggaaatctaactacactgaagtcatgttaaccaatgaggtttaataaacaatgatcaatgctataaagcattgcttccttcatgacatccagattctttcgtggtatctctccagtct

SEQ ID NO: 166743 - DNA, 518 bp, Homo Sapiens
gctcggtacccccagccccttacatacctgcccaagtatccagcatccacagtgcagatccttggggctgaaaaggccctgttcagagccctgaagacaaggggtaacaccccaaaatatggactcattttccactccaccttcattggccgagcagctgccaagaacaaaggccgcatctcccgatacctggcaaacaaatgcagtattgcctcacgaatcgattgcttctctgaggtgcccacgagtgtattcggggagaagcttcgagaacaagttgaagagcgactgtccttctatgagactggagagataccacgaaagaatctggatgtcatgaaggaagcaatggttcaggcagaggaagcggctgctgagattactaggaagctggagaaacaggagaagaaacgcttaaagaaggaaaagaaacggctggctgcacttgccctcgcgtcttcagaaaacagcagtagtactccagaggtatgtgagggctgggggatcctcaggtcacc

SEQ ID NO: 166744 - DNA, 1182 bp, Homo Sapiens
  misc_feature (625)..(653): n is a, c, g, or t
  misc_feature (976)..(976): n is a, c, g, or t
  misc_feature (1039)..(1039): n is a, c, g, or t
tgggcttgaaaggcccctgttcaggtaccagtgagggcacctgcccacaatcaggtgccacttctggtgcccactgcttgttgggggatcacggtgatggctgaccagggctccctgacctatgacaggcctctgctatgggggtgatggccagtcctggtgtctgagtgattcccagggcccagcaaagggaccaagtttccagagccctgaagacaaggggtaacaccccaaaatatggactcattttccactccaccttcattggccgagcagctgccaagaacaaaggccgcatctcccgatacctggcaaacaaatgcagtattgcctcacgaatcgattgcttctctgaggtgcccacgagtgtattcggggagaagcttcgagaacaagttgaagagcgactgtccttctatgagactggagagataccacgaaagaatctggatgtcatgaaggaagcaatggttcaggcagaggaagcggctgctgagattactaggaagctggagaaacaggagaagaaacgcttaaagaaggaaaagaaacggctggctgcacttgccctcgcgtcttcagaaaacagcagtagtactccagaggagtgtgaggagatgagtgnnnnnnnnnnnnnnnnnnnnnnnnnnnnnccccaggaggttcctcaggagaatggaatggaagacccatctatctctttctccaaacccaagaaaaagaaatctttttccaaggaggagttgatgagtagcgatcttgaagagaccgctggcagcaccagtattcccaagaggaagaagtctacacccaaggagggaacagttaatgaccctgaagaggcaggccacagaagtggctccaagaaaaagaggaaattctccaaagaagagccggtcagcagtgggccctgaagaggcgggttggcaagagcagctccaagaagaagaaaaaagttccataaagcatcccaggnaagattagaatgcaaatgggacatcctcctggggaggtgggggcataaccatagcccaaaggntgacattttcccacccctggggcccgtggttcccccaaattaaaaaccaaatttcccccccgaattcaatcaaacattaccacggagaattcggtcggtcctcctttgtttctggggccgcccccttcggggcccccctccgt

SEQ ID NO: 166745 - DNA, 531 bp, Homo Sapiens
  misc_feature (16)..(16): n is a, c, g, or t
  misc_feature (24)..(24): n is a, c, g, or t
  misc_feature (49)..(49): n is a, c, g, or t
tggcattgcctgggtnttcagaancacagtagtacttccaaagagtgtnaggagatgagtgaaaaacccaaaagaagaaaagcaaagccccaggaggttcctcaggagaatggaatggaagacccatctatctctttctccaaacccaagaaaaagaaatctttttccaaggaggagttgatgagtagcgatcttgaagagaccgctggcagcaccagtattcccaagaggaagaagtctacacccaaggaggaaacagttaatgaccctgaggaggcaggccacagaagtggctccaagaaaaagaggaaattctccaaagaggagccggtcagcagtgggcctgaagaggcggttggcaagagcagctccaagaagaagaaaaagttccataaagcatcccaggaagattagaatgcaaatggacattctctgggaggtggggcataccatagcccaaggtgacatttcccaccctgtgccgtgttccccaataaaaacaaattcacaagaaaaaacaaaaagtaacgg

SEQ ID NO: 166746 - DNA, 260 bp, Homo Sapiens
gacgtgttcttcaagatgacaaacttgagaaaccttcctagaatgcagaagaaaagcaaaaacagattaaagtgatgacagaaaaagtgacatataggacaaagaatggagatctaatgtatcaggacagcagaaattactgaagaaaagaatagaacaaagagagtatttgcactcaaaggcatataaggtgaaaacttttctgcttcaaagatacaatgattacgttaatgccaaatcagtgctcttgaagaacactg

SEQ ID NO: 166747 - DNA, 499 bp, Homo Sapiens
gactctagaggacccgagtgtctcgaaggacagttggatccaagccaggcattgctgaaggttctaataattcttgctagatcatgaaacaactagacaaattagaatagattgacaatagtctttaaactaatctctgcaaggcatatcagctacaggaccagctgcgcttcccgatgacccaagagatgttcctttgcaaatgtcatggtctgtgttgatgcaaccatgtgaacagaaactccttcaaggcaggatgtaccgttttattaactatctcaggtaccctaaaatagagcctcagcacgtggtggcatgcttcagtggtttcatgatgggatcacggaatgcatacttatgctagtgtcgcctccgacttatccccagccttctaggtgaaggaggatcagatccacacatcgaaggatgtggtcacttgtaaggatatataatcattcttaagacacactttgtcttgacgaaacacctcgggtacccg

SEQ ID NO: 166748 - DNA, 405 bp, Homo Sapiens
agtgttcttcagatcaaaacctgactagtttgtgggatgtgcatatctgtagtgcccgtacaactgcagcaattgtttgaaaactgtagccgtagacaatgatcggtctgtaaggttgaatcaaaacaaaacccacaaacagctgtatttatatatctcaatattacataaaaagctgttagtgctgttaaaacttttaccattaaaggacagaataagagcacatcggagcagactgtgaccaaactttattctaggggcatgcgtgctagcaattgatgtcacttagtcactcataaaggcaatacctggtacttgtaaattctacaaatcgcctcccactactgccatattcaaagtaaaaaacaaacgagactacccaggtactcgagctaccgagctcta

SEQ ID NO: 166749 - DNA, 192 bp, Homo Sapiens
tgtgcttagatcatacatactgattcccaaacataataagctaattgagccctaaccaacactaaaataatcctttaactcaagttgtttaactaccaaagctctgtcatcgtgtagccaagtgtagagtatgagaggaaaagacagttcaccaatgaagtacatcagaattaaaacaaaacataaatagca

SEQ ID NO: 166750 - DNA, 556 bp, Homo Sapiens
agtgtcttcagaagttgaagtacagaatgaggagatggcagctttttgtcgatccattacaaaattgaagaccaaagtttccatataccaatcaccgcacaaacccaggctatttgttaagtccagtcacagcgcaaagaaacatatgcggagaaaatgctagtgtgaaggtctccattgacattgaaggatttcagctaccagttacttttacgtgtgatgtgagttctactgtagaaatcattataatgcaagccctttgctgggtacatgatgacttgaatcaagtagatgttggcagctatgttctaaaagtttgtggtcaagaggcaagtgctgcagaataatcattgccttggaagtcatgagcatattcaaaactgtcgaaaatgggacacagaaattagactacaactctagaccttcagtgcaatgtgtcaaaatctggcccgaaacagcagaagatgatgaaacacccgtggatttaaacaaacacctgtatcaaatagaaaaaccttgcaaagaagccatgacgagacaccctactgaagaacgg

SEQ ID NO: 166751 - DNA, 558 bp, Homo Sapiens
ggggtaggaaggcgccggccgtggaggcgccacgtcccttgcggcggcgggagagaaatcgcttggacttcggggcggcctcggacggccatggcctttaccctgtactcactgctgcaggcagccctgctctgcgtcaacgccatcgcagtgctgcacgaggagcgattcctcaagaacattggctggggaacagaccagggaattggtggatttggagaagagccgggaattaaatcacagctaatgaaccttattcgatctgtaagaaccgtgatgagagtgccattgataatagtaaactcaattgcaattgtgttacttttattatttggatgaatatcagtggagaaaatggagactcagaagaggacatgccagtagaagttattactttggtcattattggaatatttatatcttagctggctgaccttgcacttgtcaaaaatgtaaagctgaaaataaaaccagggtttctatttatctgtttgttatattaatgttgcacttgtagtttcattacaaaagatcagatcatgaaaggcagtttcatcg

SEQ ID NO: 166752 - DNA, 1247 bp, Homo Sapiens
  misc_feature (717)..(718): n is a, c, g, or t
ggagagtgggaagagtatgtgcagatccggactctggttgagaaaatacggaaaaagcaaaaaggtctgtccgttacttttgatggaaaaagagaagattactttcctgatctaatgaaatgggcctctgaaaatggggcttctgtcgagggttttgaaatggttaacttcaaagaagagggctttggtttgagagcaacaagagatatcaaggcagaagaattgtttttatgggttccacgaaaattgctaatgactgttgaatctgctaaaaattcagtgttggggcccttatattctcaagaccgaatccttcaagccatgggaaacatcgcactggcctttcatttgctgtgtgagcgagccagccctaactccttctggcagccctatattcaaaccctccccagtgaatatgacactcctctctactttgaagaagatgaagttcggtatcttcagtccacacaagctatacatgatgtcttcagcccagtataaaaacacagctcgacagtacgcctacttctataaagtcatccagacccatcctcatgccaacaaactacccttgaaggattctttcacttacgaggactacaggtgggcagtctcttctggtatgacgaggcaaaaccaaattcccacagaggatggttcccgcgtgaccctggctctgattcctttatggggatatgtgtaaaccacaccaacggnncctgatcactactggttacaacctggaagatgaccgctgtgagtgtgtggctctgcaggattttcgggctggagagcagatttacattttttatggcactcgatccaacgcagagtttgtgatccacagtggttttttctttgacaataactcacacgacagagtgaaaataaagcttggagtgagtaaaagtgacagactctacgccatgaaggccgaggtcttggctcgtgccggcatccccacttccagtgtttttgcattgcattttaccgagccgcccatctctgctcagcttttggcttttctccgagtattctgtatgactgaagaagaactgaaagaacacttgctgggagacagcgctattgatagaatcttcaccttggggaactcggaatttcctgttagctgggacaacgaggtcaactttggacatttcttgaagatagagcctcacttcttttaaaaacatataaaacaactattgaggacagataaatccgtcttgaaaaaccacgatctttct

SEQ ID NO: 166753 - DNA, 612 bp, Homo Sapiens
  misc_feature (90)..(90): n is a, c, g, or t
  misc_feature (459)..(459): n is a, c, g, or t
  misc_feature (461)..(461): n is a, c, g, or t
  misc_feature (497)..(527): n is a, c, g, or t
aattagtggtgggacagagtcctacattgtaccaatgttgaacaaaaggcccacaggggggaccttttgttcaaagtagccccaatccanacctgattgtgtttccaacattaaccttcctgttgactctatcattggcactgtgaatggaacttctcctgcataactgaggattcctacgcagactaagcacactgtgttgctaaactctctacaaagtgtggcagcatcaacccgggaaatggcacattcgaaccaggatcgccctgacatgggcttgcctttttgtatgtgttttccccaccccctgacctagctggtatcttgtggatgtttctgtgacagtggtaaaagtaaataaattgcatttaaggggtaagcaggtgtttaaaaacacaacaaaacaaaacgaaagaatgtggtcgcagctcaggatgttttctcattttgtttgttctncngtaaagtctgatccagcatctgatgcatactaaggnnnnnnnnnnnnnnnnnnnnnnnnnnnnnnnctaagtcatcaatgcttttctccaatttagttactgaccatttcgcaaactcagcccgagtctcagcctgcttcagctttgcgga

SEQ ID NO: 166754 - DNA, 460 bp, Homo Sapiens
  misc_feature (449)..(449): n is a, c, g, or t
ggcaacagctttgcagaagctggaggaagctgagaaggcagcagatgagagtgagaggtgagaatgcctcatcagccatcttttgcagctgcctttcctggtggaataaaccggagggctcctgtgatctttgaggtttaagaatttttcagtcccctggtggtgggatcatttcctctattgatcccaggtataactcggttggttttgttcatttagcattagtgaaacacctactatgtccaaagcactgtcctaagccctaaggttacaaagaagaagatgatcttgttcctgcccttatagaactcaccatctaatgagggagacagacatgtaaaggagaaatgtcagggatacaagttggccctttcactcctactgaccacagagcaattgtgcattttttaaagcgtaactttattttataatatacaaggaggcttagntgtaaataaag

SEQ ID NO: 166755 - DNA, 496 bp, Homo Sapiens
ctgagctctcagaagccaatgtgccgagcttgaagagaattgaaaactgtgacgaacaactgaaggtcactggaggctcaggctgagaagtactcgcagaaggaagacagatatgaggaagagatcaaggtcctttccgacaagctgaaggaggctgagactcgggctgagtttgcggagaggtcagtaactaaattggagaaaagcattgatgacttagaagacgagctgtacgctcagaaactgaagtacaaagccatcagcgaggagctggaccacgctctcaacgatatgacttccatgtaaacgttcatccactctgcctgcttacaccctgccctcatgctaatgtaataaactcaccaccatgccttccttgctccctaatctccatctttgcactcttgtgttcaccctttttgtcataacctagaatagtcattgttttttcactttctgctaatataaaggccaattagattaagtctgtctatgc

SEQ ID NO: 166756 - DNA, 693 bp, Homo Sapiens
  misc_feature (642)..(642): n is a, c, g, or t
  misc_feature (650)..(650): n is a, c, g, or t
  misc_feature (656)..(656): n is a, c, g, or t
atttgttttatttttttgtcctacaatgtgcattttattccatatcattatacaatgtttacatatagttaaaactctcaagaaaacgtcctttaccagttgtatgtggtgtctaaatctttaacatgaaggactgaaaagagtggaaatccacactgattgttatcctacagattgtcatgagctgcacgtgtgccaatcagaaaggaatggaagtctcagaagagcagcgtggcttacagacccttggctttagtgaattcaggcatgcgggatccatagtctcatcttgtagtaaaactcaagacaaaataaattagtgttggacagagttctacattgtacaatgttgaacaaaagaccacagggggaccttttgttcaaagtagcaccaatccacacctgattgtgtttccaacattaaccttcctgttgactctatcattggcactttgaatggaacttctcctgctttagtgaggattcctacgctgactaagcacactgtgttgctaaactctctacaaagtgtgggcagcatcaacccggggaaatgggcacatttggaaccaggggtccgccctggacatggggcttgcctttttgtatgtgtttttccccaccccctggacctagctgggnatcttgtngggtgntttctggtggacagttgggtaaaagtaaattaaattg

SEQ ID NO: 166757 - DNA, 1161 bp, Homo Sapiens
  misc_feature (973)..(1003): n is a, c, g, or t
  misc_feature (1021)..(1021): n is a, c, g, or t
  misc_feature (1132)..(1132): n is a, c, g, or t
ggggctcgcactcccgctcctccgcccgaccgcgcgctcgccccgccgctcctgctgcagccccagggcccctcgccgccgccaccatggacgccatcaagaagaagatgcagatgctgaagctcgacaaggagaacgccttggatcgagctgagcaggcggaggccgacaagaaggcggcggaagacaggagcaagcagctggaagatgaactggtgtcactgcaaaagaaactcaagggcaccgaagatgaactggacaaatactctgaggctctcaaagatgcccaggagaagctggagctggcagagaaaaaggccaccgatgctgaagccgacgtagcttctctgaacagacgcatccagctggttgaggaagagttggatcgtgcccaggagcgtctggcaacagctttgcagaagctggaggaagctgagaaggcagcagatgagagtgagagaggcatgaaagtcattgagagtcgagcccaaaaagatgaagaaaaaatggaaattcaggagatccaactgaaagaggcaaagcacattgctgaagatgccgaccgcaaatatgaagaggtggcccgtaagctggtcatcattgagagcgacctggaacgtgcagaggagcgggctgagctctcagaaggccaagtccgacagctggaagaacaattaagaataatggatcagaccttgaaagcattaatggctgcagaggataagtactcgcagaaggaagacagatatgaggaagagatcaaggtcctttccgaaaagctgaaggaggctgagactcgggctgagtttgcggagaggtcagtaactaaattggagaaaagcattgatgacttagaagagaaagtggctcatgccaaagaagaaaaccttagtatgcatcagatgctggatcagactttactggagttaaacaacatgtgaaaacctccttagctgcgaccacattctttcannnnnnnnnnnnnnnnnnnnnnnnnnnnnnnaaacacctggcttacccncttaaatggcattttatttacttttaccactgtcacagaaacatccacaagataccagctaggtcagggggtggggaaaaacacctacaaaaagggcaaggcccatgtcanggccggatcctgggttcaaatgtgccctt

SEQ ID NO: 166758 - DNA, 377 bp, Homo Sapiens
gagtgtctaacaagagtgatggcatcattccatttgcccacgccatctggcacctgtttgtggccacggcagctgcagtgcattactacgccatttggaaatacctttaccgaagtcctacggactttatgcggcatttatgaccaatctgtactaattctccaaaccagtattatttcaattatggcacttgggagtggggtgagagctaaacattgcacagggaaagaaaaaaaataactgcactgactttatatcttttgaatataattactgtgaaagtataaaggctgtgttctggaattttctgcctcacagcaaataaataaggtagtgaattaattattcattccattccacatatcttgaagacactc

SEQ ID NO: 166759 - DNA, 274 bp, Homo Sapiens
cgaggaccctaatgatgagggatctgtgctgtccttcaaatgcagccagtctactccatgtcctgttaacagaaagctatggattccctggatgaaatccaaggagggccatcttcagaatggaaaaatgcaaactaaacccaatgccaactgtgtgcaacctggagatgctagtcctaagccacacacctgggcagccacttcatatcaaggttactccagaccatgtacaaaacacagccacatctgaagacactcggggatccgtctagag

SEQ ID NO: 166760 - DNA, 1027 bp, Homo Sapiens
gggttgttggattttttgctgttctcttttttttgtggagaagttttagatcggttaggagtcggctttatgtgggacgagagaaaaagcttgctctaatgctttctggactaattgaagaaaaaagtaaactacttgaaaaatttagccttgttccaacaagagtatgaaggctatgaaggtaaagtcatcttttaaaggatgccagctttgagaaggaggcaacagaagcacaaagtttggaggcaacctgtgaaaagctgaacaggtccaattctgaacttgaggatgaaatactctgtctagaaaaagagttaaaagaagagaaatccaaacattctgaacaagatgaattgatggcggatatttcaaaaaggatacagtctctagaagatgagtcaaaatccctcaaatcacaagtagctgaagccaaaatgaccttcaagatatttcaaatgaactgaagaacgactgaacatagcaataaaagatactttgaatgaaaattctcaacttcaggaaagccagaaacagctttagcaatgaagctgaagtatggaaagaacaagtgagtgaacttaataaacagaaagtaacatttgaagactccaaagtacatgcagaacaagttctaaatgataaagaaagtcacatcaagactctgactgaacgcttgttagagatgaaagattgggctgctatgcttggagaagacataacggatgatgataacttggaattagaaatgaacagtgaatcggaaaatggtgcttacttagataatcctccaaaaggagctttgaagaaactgattcatgctgctaagttaaatgcttctttaaaaaccttagaaggagaaagaaaccaaatttatattcagttgtctgaagttgataaaacaaaggaagagcttacagagcatattaaaaatcttcagactcaacaagcatctttgcagtcagaaaacacacatttggacaatgagaatcagaagcttcaacagaaacttaaagtaatgactgaatta

SEQ ID NO: 166761 - DNA, 1023 bp, Homo Sapiens
  misc_feature (945)..(957): n is a, c, g, or t
tttgtgacactaattagaaacacacgcttgtgggtatttaaaaaaaagcaggctggtaccggtccggaattcccgggatatcgtcagcactttattccttgtggtttttattgcctttctctggaagcactgggacgccctcttcagctatgtggaacggttcttttcatcccctagatgatgctggcacagaaggcattgttccctaccctctggcgagtgcatgcagcagagagttagacagcaacttacctactctgaagttttctacaacaaaaaaagagttgagtgaatctgtttacatttagaataatgtttttttcttcaagagacgcaattgcaatagtattttttagattttatccaagaagttttttgggcgaaaatcttggatcatttttatgtagcatgattttccttgggatgcaaatcttaaaacagtcctttaatatgaaccaacaatctggagcacaccgaagggcaatctaaattgtggcttgaaggactgcactaaaacccactaaaaagatgcgaaaacctgatgagggcaaaccagttaaacctaacaccctgccttgtctgggctcatcacctctccctatcccagactaactttactgtgaaatcctaccaccattccatgtctgaatttttggattcggggtggattttcgttgtccgtggaagaacacatggatctctctggctttctcacccaagttggccacttacgctaatctggagtatgatcacttttgactggccctttaacttgacgagatacaaacagtgaagatcatcccaagggtcactgcacagtctaatacagattttagtagccctaatactaattaagcaatcctgggcgacttaaggtttatttttgtccacctaaaaaaaccgacgtttgaagtatcacccggcccgggaaagagaaggaaaaannnnnnnnnnnnntccaaaaagtgaacaagggcttcggggcctttagatgggagaggatcacaataagcatataaacgg

SEQ ID NO: 166762 - DNA, 223 bp, Homo Sapiens
agtgtcttcaagattgtagtgttgatcagcgcaacaattcaagtgtgcaaagtaacaggatagtttgcctcttcactttacccctggataaaggcactttcactgcctgtcactgatcagcagatactgacttgttgccattaagtgaacttgacttcttatgtgtgctctatgagtttgttgtaattgtcttcttgaaattgtgatttttcactgacagtaa

SEQ ID NO: 166763 - DNA, 967 bp, Homo Sapiens
ccgtgtcttgcaagaagagagctgatatgaagcactgtattaggagtgctgcaaataacagtagtgtctttctctttgagataggatttagtgaagatattttccaaacattccagagttgagtatagttcagtaatgtcatctgtggcaataaaacagcaaacaccaaagcaagttgcacaagtttgcctagcctgcatactagctgacccatcacaaatgattttctttaggataggtccaagagttttcaaaatctcttcactttcaattccagggcccagctgaatacaaacgaacagatgctaacgctgcagctgcacgttgctcatcactcttaccttttgttcaggcagcgttcaatgctatcagttaaagtcattctcctttccagaataaattcatacagcatttttgaagccagtgcatttttaataccttcaagagctgcttgccttgtcttcgcactcttatccagggttaggtcaattaatcccttcaacttgtactctaggtcttcttgagttccttcctcatcaaggacttctggtccatcttcagcaaaactggaaggatcgctataaccactgcaatggctcattgtttcaattgatgcatcttcatcactaaaaggctgaacatttcgatgctggccacctgctgtcgccgccgtcgctgcggctgctcctgacccgccgccgccagcactgctaccgcggtggggagtgttccgcttcttgttcttcggcatcgtgggacgcccggtgccgcccagagtcggagcttagcgaggatcagccgatggagctgcactttttactcgtgcgtctgtgcggcgggcggctgagaggcgagtcttcggctaacaacagagtcgagaagcggcgggggtaagagtgggcggtggcggcagcagaaatccccgtgaagagctgtgatcgaaaacgatacatgtttctctctagcg

SEQ ID NO: 166764 - DNA, 647 bp, Homo Sapiens
  misc_feature (340)..(408): n is a, c, g, or t
atcagaagaactcactggaggatccacaatgtgaccccctctgtgaaacaactgatctgtacattgcaaagtactgaatgtcttcaagaagagaggaagggcaagactgttctagactaagaataatgcatgaaacaattaaatcatgtgttgaaaacagagttacctagacttttttgggaggatgggatgtcatggaattaatgctgatcattttatgaaagggtaagggtactctagctgtgggaagaacaccttccttgtaaggagcattagtatgccccaaagggtctaggagtgaagtgttatatgttggtgaagtgtcacatggtctgacaannnnnnnnnnnnnnnnnnnnnnnnnnnnnnnnnnnnnnnnnnnnnnnnnnnnnnnnnnnnnnnnnnnnntatgacaaggtgttaatagctggagaaccaaggacaggggcatatgggtattcactctactctcaatttttctatgggtttgataattttctacattaataaaaataaacaaaatgaagacaactgctagaagtaacattctcaggctacaggtatcgcaaataagaaaaaaatgaacactcaattttcactttggtgaccctgcagtagaaggaaaagctggtcatcttgagacactg

SEQ ID NO: 166765 - DNA, 352 bp, Homo Sapiens
  misc_feature (41)..(94): n is a, c, g, or t
gtgaagtgttatatgttggtgaagtgtcacatggtctgacnnnnnnnnnnnnnnnnnnnnnnnnnnnnnnnnnnnnnnnnnnnnnnnnnnnnnngaaggagggataagaaatatgacaaggtgttaatagctggagaaccaaggacaggggcatatgggtattcactctactctcaatttttctatgggtttgataattttctacattaataaaaataaacaaaatgaagacaactgctagaagtaacattctcaggctacaggtatcgcaaataagaaaaaaatgaacactcaattttcactattggtgaacctgcaagtagaaggaaaagctggtcatcttgaagacact

SEQ ID NO: 166766 - DNA, 384 bp, Homo Sapiens
  misc_feature (268)..(268): n is a, c, g, or t
gagaagacaccagaggtgattgatgctactgaggaaatagatttggaagaaactgaaagagaagtatccccacaggaaaatggactagaggaggtcaagcctctaggtgaaatggagacggatttgaaagcaactggaagagacagtttcccaagggggaagacaccagaggtgattgatgccattgaggaaatagagatagatttggaagaaactgaaatagaaatatccccagcaggaaaatggctctagaggaggttaagcctcntaggtgaaatgcaaacagatttgaaagcaaccggaagggagattttccccaagggagaagaccaccagaggtgattgatgccactgaggaaatagacaaagatcttgacagacact

SEQ ID NO: 166767 - DNA, 558 bp, Homo Sapiens
acaaaaaacaggttgaaaatcagaatcttttacttcaagttgaagaagtatctgcaaacatgtagcaaagtgaaatccataatgaaaaagagaaaatgttttataaaggaacatgaaaacctaaagccactactagaacaaaaagaattacgagataggagagtagagttgagtactattaaaggattccttagcaaaatcaccttctgtaagacatgatcctctgtcttcagtaaaagagttgtgaagaaaaaatagaaaatctgggaaaaagaatgcaaagaacaggaggagaaaatacaataagataaaatgagttgcccgtaaaggctaagaaagaactagattccagcagaaaagagacccagactgtgaaggaagaacttgaatctcttcgatcagaaaaggaccagttagtctgctgccatgagagatctcattcaaggagcagaaagctataagaatctgttatgagaatatgaaaagcagtcagagcaactggatgtggaaaaagaacgtgcaaataattttgagcatcgtctcgaagaacactcgggt

SEQ ID NO: 166768 - DNA, 265 bp, Homo Sapiens
agtgtcttcaagatccacttttcgtctataggcatctgcatctgctcgcatttctttggcaagagcttcttgattttcagtaagattcttctcataaagtctcttttgtgattcgagttccagctgtctcatttctaggtctctggctgtggcagcaatttctcgatctctcatatatacctttctcccaatttcatcatccagtcttcttagttccatttcctgttgatcttgctgaagcttcagaaaacgccttcttgcagcg

SEQ ID NO: 166769 - DNA, 103 bp, Homo Sapiens
agtgtcttcagaggccttggctttttgtaaagatcttagggactgcaggaggagaactgtgcagatgcagaggtagacctagtaagcttccttccccagcttc

SEQ ID NO: 166770 - DNA, 304 bp, Homo Sapiens
agtgttcttcaagaaatgcaaaggaaaccatagaatttaaaaggaaaataaaaagtgctctcaggggatctgagaaaacagcaccaaatatattatttaaaaaattaaatattatttacaaaagtatattttacaagcaactgtttcttttatatatatccacttgaaaatctctttataaagggtcatctctttcgcacacactgatccaccagtaaaaatgcactctagcctatcctcgtgaactcttgaagaacactgggttcccggctctcaattctggtattctgggccttgcttggtt

SEQ ID NO: 166771 - DNA, 293 bp, Homo Sapiens
caattcaatggagaaatataagagtcagctcaacaaatggtgctacaactggagcaaaagaacttttaccatgagaaaaataactttaacctgacttcatataaaacaacaacaaaaaaatgaactcagaatggctcacacaaaaactaaaacttacagaagaaaacaaaagagaaaatctttgcaaccttggggatagggcagatttcttagcataccaaaccatagaagaaaaatatttttaaaatggacttaatctaaattaattaataacttgtgctcttgtagacact

SEQ ID NO: 166772 - DNA, 1156 bp, Homo Sapiens
  misc_feature (1084)..(1084): n is a, c, g, or t
  misc_feature (1124)..(1124): n is a, c, g, or t
ttggggattaactcccctcccgcctacccccatcgcaaactgcatttataattttgtgactgaggatcatttgtttgttaatgtactgtgcctttaactttagacaactttttattttgatgtcctgttggctcagtaatgctcaagatatcaattgttttgacaaaataaatttactgaacttgggctaaaatcaaaccttggcacacaggtgtgatacaacttaacaggaatcatcgattcatccataaataatataaggaaaaacttatgcggtagcctgcattagggctttttgatacttgcagattgggggaaaacaacaaatgtcttgaagcatattaatggaattagtttctaatgtggcaaactgtattaagttaaagttctgatttgctcactctatcctggataggtatttagaacctgatagtctttaagccattccagtcatgatgaggtgatgtatgaatacatgcatacattcaaagcactgttttcaaagttaatgcaagtaaatacagcaattcctctttcaacgtttaggcagatcattaattatgagctagccaaatgtgggcatactattacagggaaagtttaaaggtctgataacttgaaataggtttttaggagaattcatctacttagactttttaaatgcctgccataaatgaaattgaaatggtagaatggctgaccacagcaatgaccagccctcattagggccctggatgatttttggtctaataacgcatgctagtggtgatgttttttggtcaagagggtatgaacaggaagaattaaatgcagcaggctttattttaaatgccgattcacattactctggtcaagctgcgttgagatgttaaactggcttactatagacttcgtaaaaatggctccagaagagtaacaaactgaaatctttgagatcacacaggttggaaatatgtacataactgcacaaggtgtcaattctgctctacagtgcagttttagtcagttttagttgcataggtttccattggatttatagtctggttatgctaaatctggccaaagatgagcattgtcaccactnaaatgcctctgcactttgaatctgggctcttttggggccnaaagcgggatcaaaacctcctcttttacaggg

SEQ ID NO: 166773 - DNA, 1019 bp, Homo Sapiens
  misc_feature (541)..(553): n is a, c, g, or t
  misc_feature (937)..(937): n is a, c, g, or t
cccccgcgcaactaccccaccacgccccaacagtctatggtacgaggcctgggtcgcgtattccgcacgaggggagcagagaggaggcaatggccaccatgggagaacaaggtgatctgcgccctggtcctggtgtccatgctggccctcggcaccctggccgaggcccagacagagacgtgtacagtggccccccgtgaaagacagaattgtggttttcctggtgtcacgccctcccagtgtgcaaataagggctgctgtttcgacgacaccgttcgtggggtcccctggtgcttctatcctaataccatcgacgtccctccagaagaggagtgtgaattttagacacttctgcagggatctgcctgcatcctgacgcggtgccgtccccagcacggtgattagtcccagagctcggctgccacctccaccggacacctcagacacgcttctgcagctgtgcctcggctcacaacacagattgactgctctgactttgactactcaaaattggcctaaaaattaaaagagatcgatattnnnnnnnnnnnnncgcgcggaggccgcgacggacgcaagatggcgacggcgaccatagctctcgtcaatggccagcaaggaggggggtccgagccggcggcggcggcggcagtggtggcagcgggagacaaatggaaacctccacagggcacagactccatcaagatggagaacgggcagagcacagccgccaagctggggctgcctcccctgacgcccgagcagcaggaggcccttcagaaggccaagaagtacgccatggagcagagcatcaagagtgtgctggtgaagcagaccatcgcgcaccagcagcagcagctcaccaacctgcagatggcagcagtgacaatggggctttggagatcctctctcaccttttgcatcgatggcggctcancggcagcgggcgctgggccatcatgtgcccgcgtctacctggggctctattctactatggagcttgggggagggacaacctt

SEQ ID NO: 166774 - DNA, 574 bp, Homo Sapiens
  misc_feature (12)..(12): n is a, c, g, or t
ctcctcattttntcaatcccatctctcccccgatccgtctggactcatctcctgggagcgaggcctgcgtggcgaataccgcacgaggcagagaggaggcaatgtttcccatggagaacaggtgatctgcgccctggtcctggtgtcatgctggccctcggcaccctggcgaggcccagacagagacgtgtacagtggccccccgtgaaagacagaattgtggttttcctggtgtcacgccctcccagtgtgcaaataagggctgctgtttcgacgacaccgttcgtggggtcccctggtgcttctatcctaataccatcgacgtccctccagaagaggagtgtgaattttagacacttctgcagggatctgcctgcatcctgacgcggtgcagtccccagcacggtgattagtcccagagctcggctgccacctccaccggatccctcagacacgccttctgcagctgtgcctccgctcacaacacagattgactgctctgactttgactactcaaaattggcctaaaaattaaaagagctcggatatttttcgcccaaaaaacccacctccc

SEQ ID NO: 166775 - DNA, 893 bp, Homo Sapiens
  misc_feature (271)..(271): n is a, c, g, or t
tggaatttgaacaccctggtgcaagttaatgtacaatatttccaaaccctggtgtgatcttcaaagatttcaggtttgttactcttcctggagccattttttacgaagtctatagtaagccagtttaacatctcaacgcagcttgaacagagtaatgtgaatcggcatttaaaataaagcctgctgcatttaattcttcctgttcataccctcttgaccaaaaaacatcaacactagcatgcgttattagaccaaaaatcatccagggccntaatgagggctggtcattgctgtggtcagccattctaccatttcaatttcatttatggcaggcatttaaaaagtctaagtagatgaattctccctcgtgccgaattcggcacgaggcgcctttggagcagagaggaggcaatggccaccatggagaacaaggtgatctgcgccctggtcctggtgtccatgctggccctcggcaccctggccgaggcccagacagagacgtgtacagtggccccccgtgaaagacagaattgtggttttcctggtgtcacgccctcccagtgtgcaaataagggctgctgtttcgacgacaccgttcgtggggtcccctggtgcttctatcctaataccatcgacgtccctccagaagaggagtgtgaattttagacacttctgcagggatctgcctgcatcctgacgcggtgccgtccccagcacggtgattagtcccagagctcggctgccacctccaccggacacctcagacacgcttctgcagctgtgcctcggctcacaacacagattgactgctctgactttgactactcaaaattggcctaaaaattaaaagagatcgatataaaagaaaaagccacccaggcctcgctacctag

SEQ ID NO: 166776 - DNA, 499 bp, Homo Sapiens
tgacagacagactgtgatcccggctatcaccactgaaactcctttcagttttcagaaacaaactgtaggtgaccagaagcgttatcagctaagcgcaccactttaagtccctgactcagagccacaagtgtactgtttaccctattgttactactcttttcactctggcaaacagattaattcacacaaaattttatttgaatggcttatcaatttatcataacaatggttactaaaaagtgagagaatatgtactaagggttgagtacaagtaagtgctagtagaaaataagagccctaatagagaaaaaactagtcctaatcaaagactggattgagtcaatgactgttcatatctttagacttacatttactagcttcaggaaacatgttgttactgatattcctatcataattattgtttcaaaaattctctagtccctaaccttccttttttcattaaacaagggtttcaagtttaactgtgatcttgcagaac

SEQ ID NO: 166777 - DNA, 664 bp, Homo Sapiens
gggggaagaggcgtgatctggccttcgactcgctatgtccactaacaatatgtcggacccacggaggccgaacaaagtgctgaggtacaagcccccgccgagcgaatgtaacccggccttggacgacccgacgccggactacatgaacctgctgggcatgatcttcagcatgtgcggcctcatgcttaagctgaagtggtgtgcttgggtcgctgtctactgctccttcatcagctttgccaactctcggagctcggaggacacgaagcaaatgatgagtagcttcatgctgtccatctctgccgtggtgatgtcctatctgcagaatcctcagcccatgacgcccccatggtgataccagcctagaagggtcacattttggaccctgtctatccactaggcctgggctttggctgctaaacctgctgccttcagctgccatcctggacttccctgaatgaggccgtctcggtgcccccagctggatagagggaacctggccctttcctagggaacaccctaggcttacccctcctgcctcccttcccctgcctgctgctgggggagatgctgtccatgtttctaggggtattcatttgctttctcgttgaaacctgttgttaataaagtttttcactctggcaaaacaaaaacacagagcgac

SEQ ID NO: 166778 - DNA, 1140 bp, Homo Sapiens
ggggtgaccgggatggcgcattttcttgcaccaactaatgcggtgtcgctggcggctgaggagggcggagagttctgtggtgaaatagtgggaaggattcatgtaggcatcgggaagagcctaagtccacattataaaataggaagttgatgcggggtacagttactcccggaccggcggcgtgaaagtcgtgatatcatcgttgaactattagctttgaagtttaaatccaatggagaagactcaagaaacagtccaaagaattcttctagaaccctataaatacttacttcagttaccaggtaaacaagtgagaaccaaactttcacaggcatttaatcattggctgaaagttccagaggacaagctacagattattattgaagtgacagaaatgttgcataatgccagtttactcatcgatgatattgaagacaactcaaaactccgacgtggctttccagtggcccacagcatctatggaatcccatctgtcatcaattctgccaattacgtgtatttccttggcttggagaaagtcttaacccttgatcacccagatgcagtgaagctttttacccgccagcttttggaactccatcagggacaaggcctagatatttactggagggataattacacttgtcccactgaagaagaatataaagctatggtgctgcagaaaacaggtggactgtttggattagcagtaggtctcatgcagttgttctctgattacaaagaagatttaaaaccgctacttaatacacttgggctctttttccaaattagggatgattatgctaatctacactccaaagaatatagtgaaaacaaaagttttttgtgaagatctgacagaggggaaagttctcatttcctactattcatgctatttggtcaaggcctgaaagcacccaggtgcagaatatcttgcgccagaaaacagaaaacatagatataaaaaaatactgtgtacattatccttgaggaaggtaaggtccttttggaatacactccggaaaaccccttaaagaaacctggaaggctaaagccctaaaaaaacagaattggaagcaccgtggggggggagaacacccggaaccctaaggagccctttaagtaaaaaacacctttaat

SEQ ID NO: 166779 - DNA, 530 bp, Homo Sapiens
ttgaccaactgataaaactgttgttgctgtagctacattgctgctgctagtaacactggatgttaacatagtcactgttgatgtagtaccaggtgtggtcagacttacgggaactctgagcacccataagaggagaagttgctgtgctcatcacattcctccccaaagtattagtgttgttatcactgctgtcttcggctctagattgcatgtatgttcgtggcaggtagtccgtgctatgtttgccactctcctgacaaaactctccaagctagatgtttctcttgaggacaggttaggtacacttgcactagagctcataggggccccagcagccaacaaagaactcactgacagtctgttacttgctgaagagctaagaggtcgttgtgaagctgcttctttattagttaattcagatactgaactaacatcaggagaactaacactgacaattcccatggatattgcactagactccccaggagtacgaacagaactatcagggcctaacttccattcagcctctg

SEQ ID NO: 166780 - DNA, 491 bp, Homo Sapiens
  misc_feature (73)..(98): n is a, c, g, or t
gatgttcttagagaatgatgcatgagtaaagtatgagattacacatgctatgcataggtatatagtgtcaaannnnnnnnnnnnnnnnnnnnnnnnnntatataaggcagcccagaggtctgtggcagaagacacgtgcaaatcactcagtgatacactacatttgcaatctctcatttataccaaaaaagaaacaagtttccagtttgttttcaacaaaaacaacaaagaaaaaagggatggaccaaaaggcatttatacaaatctagggtgaggaatactaagaaacttgcttttaataataaaaaaagattacagagattaatgaacaaaaactggttacagttaagaacattatttaacaacagatgaccataccctttgaggaaagctccaacaacctattttaaagaaggtacacttggaataaaaaacaataaaagacttttatgaagtttaaattaaaccctctccttacaaaacaaataatt

SEQ ID NO: 166781 - DNA, 265 bp, Homo Sapiens
tgttcttcaagactgagggcatgtcagtagaagtatgggggaagcttgggatgttatcacttctctgctttgagtgctgattcacatatactgtagagtacatatattctgtacaattaaacacttcaacagagtaagaagtattctaagtcactctgtgaatcacatagagggctctaggagtcaacgacgaagatagaactgtcttctagtagctgcaaatacaaaagcagaattttctcaggtgtgagagcagtaacgttag

SEQ ID NO: 166782 - DNA, 1016 bp, Homo Sapiens
gggagcagcaggaggaggcagagcacagcatcgtcgggaccagactcgtctcaggccagttgcagccttctcagccaaacgccgaccaaggaaaactcactaccatgagaattgcagtgatttgcttttgcctcctaggcatcacctgtgccataccagttaaacaggctgattctggaagttctgaggaaaagcagctttacaacaaatacccagatgctgtggccacatggctaaaccctgacccatctcagaagcagaatctcctagccccacagacccttccaagtaagtccaacgaaagccatgaccacatggatgatatggatgatgaagatgatgatgaccatgtggacagccaggactccattgactcgaacgactctgatgatgtagatgacactgatgattctcaccagtctgatgagtctcaccattctgatgaatctgatgaactggtcactgattttcccacggacctgccagcaaccgaagttttcactccagttgtccccacagtagacacatatgatggccgaggtgatagtgtggtttatggactgaggtcaaaatctaagaagtttcgcagacctgacatccagtaccctgatgctacagacgaggacatcacctcacacatggaaagcgaggagttgaatggtgcatacaaggccatccccgttgcccaggacctgaacgcgccttctgattgggacagccgtgggaaggacagttatgaaacgagtcagctggatgaccagagtgctgaaacccacagccacaagcagtccagattatataagcggaaagccaatgatgagagcaatgagcattccgatgtgattgatagtcaggaactttccaaagtcaagccgtgaaattccacagcaagaaatttcacagccatgaagaatatgctggttgtaaaccccaaaaggtaaggaagaagataaacacctgaaatttcgatttctcatgaattagatagtgatcttcagatccaaatcaggaccggc

SEQ ID NO: 166783 - DNA, 795 bp, Homo Sapiens
ggaagaccgtttgaaacgggtcagtggattcccggtgtctgaaaccaagggccacaggcgttcggattttttaagcggaaagcccatgtttagagccatgggcattccgatgtgattgatggtcaggaactttccaagttcagccgtgaattccacagccatgaatttcacagccatgaagatatgctggttgtagaccccaaaagtaaggaagaagataaacacctgaaatttcgtatttctcatgaattagatagtgcatcttctgaggtcaattaaaaggagaaaaaatacaatttctcactttgcatttagtcaaaagaaaaaatgctttatagcaaaatgaaagagaacatgaaatgcttctttctcagtttattggttgaatgtgtatctatttgagtctggaaataactaatgtgtttgataattagtttagtttgtggcttcatggaaactccctgtaaactaaaagcttcagggttatgtctatgttcattctatagaagaaatgcaaactatcactgtattttaatatttgttattctctcatgaatagaaatttatgtagaagcaaacaaaatacttttacccacttaaaaagagaatataacattttatgtcactataatcttttgttttttaagttagtgtatattttgttgtgattatctttttgtggtgtgaataaatcttttatcttgaatgtaataagaatttggtggtgtcaattgcttatttgttttcccacggttgtccagcaattaataaaacataacccttttttactgccga

SEQ ID NO: 166784 - DNA, 849 bp, Homo Sapiens
ggagcagcagcaggaggaggcagagcacagcatcgtcgggaccagactcgtctcaggccagttgcagccttctcagccaaacgccgaccaaggaaaactcactaccatgagaattgcagtgatttgcttttgcctcctaggcatcacctgtgccataccagttaaacaggctgattctggaagttctgaggaaaagcagctttacaacaaatacccagatgctgtggccacatggctaaaccctgacccatctcagaagcagaatctcctagccccacagaatgctgtgtcctctgaagaaaccaatgactttaaacaagagacccttccaagtaagtccaacgaaagccatgaccacatggatgatatggatgatgaagatgatgatgaccatgtggacagccaggactccattgactcgaacgactctgatgatgtagatgacactgatgattctcaccagtctgatgagtctcaccattctgatgaatctgatgaactggtcactgattttcccacggacctgccagcaaccgaagttttcactccagttgtccccacagtagacacatatgatggccgaggtgatagtgtggtttatggactgaggtcaaaatctaagaagtttcgcagacctgacatccagtaccctgatgctacagacgaggacatcacctcacacatggaaagcgaggagttgaatggtgcatacaaggccatccccagtggccccaggacctgaacggcgccttctgattgggacagccgtgggaaggacagttatgaaacgagtcagctggatgaccaggagtgctgaaacccacagtcacaagcagtccagatatatag

SEQ ID NO: 166785 - DNA, 618 bp, Homo Sapiens
ggtagtagaggaaataaaacattttaaatttaggtttaatatgtaaatactctgagatgtttaggtagtgatttttaagtttatactctaggtgagtaaccatatttttgcttactgaaatatctggattatttagttattttctgcattttgatgttttattacttactaaatagtataaacatggactacctttctaaggaatcattttagctagattattagggttatccctaattaacatttgtatttagatcacttgggcacttgctactgctatcaaccaaatggcattggcaatctaacagttacttatgtaggatcaaactgcgatagtgcattgtgttaaaatgtcatgttagtataaatcatgcatatcatagaatattatgttgctatgaattaggaaaaatcatttaattatggaaaagaacacactgaattaccaggataggaaaacctatcttaaataaagacttaactttttatatatacttaaagctcctttttcttcttaaagcttctcttttatgtctctggaaaagctcccttgagtgatgaaattgctgtttgaccttttagtagatggtatacctaaggtcatatattctgtgtcgg

SEQ ID NO: 166786 - DNA, 235 bp, Homo Sapiens
ataaaaccgatttaatagtacttcactgaaatcacacaactacttgatataatctaggctttcccaccatttccttttgagctctcaagcatatctgcctgtagcaagttctcatctgcacacgtcctagaaaagccaaaagcaaattctctactctgaaaaactgaggccagaaggccacatcctgtgataaagccaggacgcataatttcagtccaggatctcttgagacact

SEQ ID NO: 166787 - DNA, 1515 bp, Homo Sapiens; identical to SEQ ID NO: 3471
  misc_feature (944)..(945): n is a, c, g, or t
  misc_feature (1024)..(1024): n is a, c, g, or t
  misc_feature (1180)..(1180): n is a, c, g, or t
  misc_feature (1205)..(1223): n is a, c, g, or t
  misc_feature (1274)..(1274): n is a, c, g, or t
  misc_feature (1320)..(1320): n is a, c, g, or t
  misc_feature (1325)..(1325): n is a, c, g, or t
  misc_feature (1361)..(1361): n is a, c, g, or t

SEQ ID NO: 166788 - DNA, 165 bp, Homo Sapiens
tgatgaactggaagaagccaaggacaaagcccggcggagatccattggcaacatcaagtttattggagaactctttaaacatcaaaatgctgactgaagacatcatcatctgctttatctttttcaaactccttctggcaacggttcagtataccttccaggcgg

SEQ ID NO: 166789 - DNA, 204 bp, Homo Sapiens
agtgtacttcaagataaatgttctaagtatataagcatgaaaattaaaaatttacatgaggaaaaaatgcctgggattttgtccacttggtaatattgactcacaatgtccaaaaaaataatgtggtaacataaacttgatctaatgcatgatggcactgagatattttattatggcttctcaattaattaacagtagagaata

SEQ ID NO: 166790 - DNA, 1074 bp, Homo Sapiens
ccaaatgtgaaatctttttggtagtagttttcaaaactgcaaatgtgaaacctgatccaataaatttctagttattcatcctacagaaatacccacacaagtagcaaaatacatgtacaggaatgttaattacacttctatctataatgaacctaattatcaatccataggggattaaataaattacagaatattcatgcaatggaatagtatatagttatgaaaaaagaacatcttcaatgtggggggagaggacgcaagtctcagtgtagtgcatgtgaaatggggttatgtcctactttatacggtagctgaggattaagagttaatccatgataaagcacttcaaatagtgcctgtcacagcaaccacaggtgtcagctgttaacacattattgattaaataagtatatgcctaaatctggaagaacaaacgaaattatcatgacttctcggtaacactgtgaaaggaaatatcctttttcattttacatttctgcactgtaaaaaattcaaaccagcaatgtttaatagctttcacatttgttaaccataaacacaaatttatcaaggtttaatagccaccacccatggcatggtgaatatgtccctggagtctacagaaccagatttgaattttatctctaggccacatgcaagtcacatgatctctgaatcttgctttcctagtccacaaatctaagtgagataggtacggtgtctaagccaatgcctagcatgcagattatttcagtacatgtaaccctcccttcaatttacatgaatatgagacatattgctaaagatcaagtaccaactgggtatgactacagagagcttaacctccaagaaagccagaagaaaaaaccagcaaatgctcagtggctactgggcagatatcagcaatctgcatgacctaaaatgactgctcatttgctaaccaaacagatactctggcgatgccactgcttggaaactgccatatcaccacttcatcagaagctaggcactcccccaaatttctatgattatctgtgtgggtaatgaatgtgtgggtgcgacttaaaaatcact

SEQ ID NO: 166791 - DNA, 225 bp, Homo Sapiens
tcgagtgttcttcccagaggaaaagacgggaattatgttgaacgggatactgtaagcaaacagtaattatggatataagggacttatagcattttttgcctgacagaagaaagtgtgtgtatttatatgtgtttacaggtgtttaaaacttgatgatgttattgtcttgaagtacactcagaatagagagctttccaactgctgtatacataatttctcagaatt

SEQ ID NO: 166792 - DNA, 263 bp, Homo Sapiens
ttattccaacgtgaactgtctaagctgcgctttctccactccaccctgtctgtttctcttcccgtccttcctccatgtctaggctgtatcttctgtctctcttctatatcattagcccctccccaaagtaactcttcgttcagtgagaacatgcaaaacatgtttggttctcacccacccatccattgagcaagaaagtggggagggaaagaagagctactactcttgcctttccttctcagtaaagcatctaaagaacagct

SEQ ID NO: 166793 - DNA, 257 bp, Homo Sapiens
agtgtctcaagacatgcacgaagaaatagcagttatgctacactacgtatgtactaaagaagcacacctagtttagtttaattggatgaagtctctgggggagaaaaagggctctgtctggtcagaaaactattctttgttaacattcaacggttaggaacttgatgagtaatggcttaatgtgtaaacctcttttaaaaatgagagacatcatgctatcttatctcgttaaaactcaggattctctcctctaaagc

SEQ ID NO: 166794 - DNA, 769 bp, Homo Sapiens
ggggcacttccgggatctcgctatccggccgccacccgcagctgcagcacagtcatggcccaggcgtcgccgccccggcccgagagggtgctcggcgccagcagcccggaggcccggcccgcgcaggaggcgctcctccttcccaccggtgtctttcaggtggcagaaaagatggaaaaaaggacatgtgcactctgccccaaagatgtcgaatataatgtcctgtactttgcacaatcagagaatatagctgctcatgagaattgtttgctgtattcttcaggacttgtggaatgtgaggatcaggatccacttaatcctgatagaagttttgatgtggaatcagtaaagaaagaaatccagagaggaaggaagttgaaatgcaaattttgtcataaaagaggagccaccgtgggatgtgatataaaaaactgtaacaagaattaccactttgtctgtgccaagaaggacgacgcagtaccacagtctgatggatgttcgaggaatttataaactgctttgccagcaacatgctcaattccccgatcatcgctcaaagtgcctaaatttttcaggaaagagacaaccacaatacaccccatcaaaacacaacccttggtgcgggcccgccctccgggacccctcgaaaaaaaccttttttctaaaaaccaattttccattttggggcagcccgcccgggaccccctcaagttaggggtgtacaaagtgagaaaccacctggggaaccccaataaaagaccttcgatca

SEQ ID NO: 166795 - DNA, 562 bp, Homo Sapiens
ttcttcagaaatagtaggatggcagaaagcagatcgcattgaggttgtttccaactgacagaccaagcagtaatatgtttctctccccactgatagtaaaaataaagtggaaataatttagggctggggcttctgtgattatctggaacttaaagtatgagggtatgagagccatcagatctacccctgtggagctttttaagatgcggtccataacagaagcgggccccaaggagtagagtagccacatggaaggtgccatgtttcagggatgagtctcgattcttctctccctgtatttcatccatgcctgtaagaagttctcacgtctctccacatgccacgtcatctgaaccgccaggcgataggttattcgtattttattccaaagtccataggacacgatgtggacttgtttttccacgtgcccttgtagatggtgccatccagtgtctgtgattttccacctcctctgttgggttgtcacctcccccagagaccttctggtctcactgcttttctgtttgtatccagcaaaacactcaacaattcttacaagaca

SEQ ID NO: 166796 - DNA, 609 bp, Homo Sapiens
atgacagcaacaccatagcaattcaagtccattccgcaggttcgtgtataatatttctatttgttaacctgaaagttcgaacaagacttctaagtggtgtgtaaatatctcccaaggtaatctgaagaggaaccagaagcccaggcaacactttactcaacttgtcaagtacgatgcgttttctaatctggttctgggaactggagtctatcagtggaaaggtggaatcatgctcttctgagtcttgtgatatggtgctttcttcacccaaaacataccgtcctctgtaaaactcccctgatcctcagatctaacgttccagtttcttgtttcaaattactcgtaacttggcagtggtttaatggctgtacctgagcccctaaaaggtaaagactcatccaagctgttctgagattccctccaggcagggaaatgactatctggatctgagattatgtcatcttctatcaagttcttcttgaacccagagaggccttcgggtctcagacacacagaagcataattctggccatacgacaacctcaatgtttcttctgtgcttgccactcaatctaactctttacaacactggggatgcctcgggagtcc

SEQ ID NO: 166797 - DNA, 1345 bp, Homo Sapiens
acatattttgttgatttctttgttgcttcaggttagtcaaacaactttattaacatagtcaagcagtgattaacattcacatctattatgtcacatcatacaaatgtaaatacaaaattactacagtacaatatatattctctgcatgatccaaaatatttggtggccccaaaaaactctctttaaaattcagcagcttatcaaaaattaaaaccgtattctatttaaaatggagatctgttagcacagagttagacttcaagaaatatcaatttagtacagtttgagaagttgcaggaggatatgtttgaaggacacattctaacatagtgtggcaggtacaggaaacatcagatttaaagcttttaagcataactcatacaacctaagttgtcagcagaaagatccagttatatttgtaactaaagctaatgctactaaattattgcacccaatgttaacatattaagtgtaaaactgttttgtaatatgaagtgatttaccacgtttaaacatctcttctcacaagatgataatctattaagtaaaactaattatacagtattgtctaattattgtctccataaaaatcacccaagctcaatttgcttatatatccacaaaggaaaacaacaacacagtaatatgcggaaagtacagtggaacccctttatgaggccaatattagaaggggaccaacactgccttataggctaaccatgttataataggcttttaaaaagatgtaataccagcgaaatagctaatcttgaataataccaagccacagtataaggaaattctatggcagataaacaaaaactgcaataaaaggaaaaactgcttttcttattagtgatacactgcttggcaaatagatttggcctggttttaaaatgtacaagaggtgaaaaaaaatcaccattttaacttctttcaaagtcatgcatacattcagctattatgcatcttttaaaaaacacaacacattctgggatacaaaccacaatgaacaattgtgtaatttaaatgtataccttaaaaattaatatgtataataactaggcataaagaattatctacgtaagtaatgctaatgggtgaaagatctatgtaagattgaaaaaattagtcacaattcacttggaaagcctaaaggtgaataaaactaacttttacgtaaaatttaattttagagaggcattagaagtatctccatatttaatacagtataaaatgcactaagttggtatacaacgctatattgcatggtattattaccagataatattgttaacaacacagctcattactgatctcacttttcacttaaattatcccaagc

SEQ ID NO: 166798 - DNA, 1172 bp, Homo Sapiens
ggggccgtcacccggtgcgaacccgcgagaggcctagtgcagctggcagccccgccccggcacccgcctactcttctcgcgggtccggaccgcgagcgcgggggccgacgggtcgccgctgcgccgggccgggatggcggccaccgcgctgctggaggccggcctggcgcgggtgctcttctacccgacgctgctctacaccctgttccgcgggaaggtgccgggtcgggcgcaccgggactggtaccaccgcatcgaccccaccgtgctgctgggcgcgctgccgttgcggagcttgacgcgccagctggtacaggacgagaacgtgcgcggggtgatcaccatgaacgaggagtacgagacgaggttcctgtgcaactcttcacaggagtggaagagactaggagtcgagcagctgcggctcagcacagtagacatgactgggatccccaccttggacaacctccagaagggagtccaatttgctctcaagtaccagtcgctgggccagtgtgtttacgtgcattgtaaggctgggcgctccaggagtgccactatggtggcagcatacctgattcaggtgcacaaatggagtccagaggaggctgtaagagccatcgccaagatcccggtcatacatccacatcaggcctggccagctggatgttcttaaagagtcccacaagcagattactgcacgggcaacaaaggatgggaccttttgtcatttccaaaaacatgatgtatgggggaataaaaagaaattcaaaacactcctgcttgataccgaacaaaaagaacttaacagggaacaaccggggcttagccccagaccttgacggtaacagaaaggtgccccataggtaaatagggaagtttttctttccccggacatggttttggttttcctggaaaaaacactgggtggggggccttacaagggaaaagcaatcccttgtgagtgacgagccacaagcacccgaaacagcttccgagggtttctagggcgggggggcgaaaaaacgagggtttgggaaggggccctatggctcacaaccttgttccccgagcccacgctgttctgtgtgaacagggggtgaacaaccgtgccgggccccctccaaataaggggaggcggtattaatatgcgcctaaacgccgcggttttctcg

SEQ ID NO: 166799 - DNA, 1096 bp, Homo Sapiens; identical to SEQ ID NO: 15012
  misc_feature (924)..(924): n is a, c, g, or t

SEQ ID NO: 166800 - DNA, 786 bp, Homo Sapiens
atggccggtgaagagtagatataaacaactgcgaacagagtagatcattggtgttgaatatttaacatgaatagcccaaaatgagttccaaagtttttccacctttacaaataaaaaaaggtgtcctttccacagtttgggaatatgcattgtacatccctcccaacaagtgtatgagtaaggatttaaaaatgttgccaatattaagttcttcagtacctaaaattaattagaggacagcaatattacagtggcaatggtgcatcaattctcaaaacgtagttatgatccaacacgagttgtggtggttcttttatctgagaaaaagcttttcaaaagaaatacctgccctatgctaaccaccagaagaatgagggcttctcctactgaccaataggccactcttgtatttagatcctctgctcggcttcggccttgagcttctcttaaacggaaatgagtctgataatcgatgacagacttcagagcttcgtgaattgaaacacaggcagattccatctgggtaagagcactgactcggttctcactaggaaacaaaggtgggtcttctccaacttgaaaatcaaaatatacagttttatgtgtgaaagtagaaaattcattgctgaagcaaaatttgtatgtcccatttttggaggctgtgaaggtaaaactatcatactgtttctttatctctttgtataacacttagccatcaggatcttctaatcgacaatcacatatagtgaccaccagtaatcacctggactccagggtgcacttgtg

SEQ ID NO: 166801 - DNA, 1298 bp, Homo Sapiens
  misc_feature (33)..(33): n is a, c, g, or t
  misc_feature (347)..(347): n is a, c, g, or t
  misc_feature (499)..(499): n is a, c, g, or t
  misc_feature (603)..(603): n is a, c, g, or t
  misc_feature (626)..(639): n is a, c, g, or t
  misc_feature (901)..(946): n is a, c, g, or t
acaggcgctccctgtcagtgctgctggcacgtngggacgcggcaggtgacagccgtctctcagcatgttttagaagcttgcctcacagacttccatgcctctccattcagccgatgacttcagggtgtcaaactgttttaatttttcaaacaaatggaacagaagccattgtggttcatcctgattacttgaacgttgcacttggtggaccgtgcctggggagcgctcgcatgccccctggcttcagaagtcatgtcagtgtctctgtagacaaactccactgtacatcttcgattaatcttctgattcattgttcattttctcaagactttttgtggaattctctngataaaggaagcttttaggatggtatctatcaggccaccagcaggaattgaaaatgttttcacaaaaatccttttccttagaaataaaagctggtgacagagatggtttccttgtaccgataaaacaaaaccaaatccatattatacatcanaaccttgtgagacattcacttgctcttttgccatatttagatgtgttagtggaatcagaaacctgttttgatatgtgttctccatgaagtaagtctgatttgtncttttatttcatgatgcatgtcnnnnnnnnnnnnnngtcaggataacgtcatatagcatcttgtttagtttttccttatctctatgtacatatctatctacttctgactgtagatgggtatatagatagatgccaagcttcttatgttctgggggtagtatgcatcattattggggtctctgccttaaaacacatcaaaattcattttagacaaaaaaacttctgccctgtctttggtcattagggagctctaatgtgtgtttgtggcaccaagttacattttgtgtttcattgatcnnnnnnnnnnnnnnnnnnnnnnnnnnnnnnnnnnnnnnnnnnnnnnaaattttgtatcatcaggactgacacccaatttgacactttttgtatctagaagaccctccaaaaaaggaaccacataagcacacaagaaaagagtgctatgatgttcttagcatttgctatcatgcctatttttatctagatttttaaatgtagcttgtcataacaaaattttaattacaattggcttgtatgagaagaaaaagtatttttattgttttgagtgatgacgcagagactcagtgaacttgaaaatagcattgcttggtgcactttgaataccaatcaggtgccctctgtgctactagttgtcacgttgcattaaagttcacctcctgggtgtgcttcacaga

SEQ ID NO: 166802 - DNA, 154 bp, Homo Sapiens
ttcttcagatagttcccccatgtgacaaaaaaacatcaaaatatcaacctaaaatatggaaacaaaaatacttaaactggtttggccacatttaaggaaccattaatgatacttcacttgagaagcatcaataccctattgaaaaaaattggaa

SEQ ID NO: 166803 - DNA, 348 bp, Homo Sapiens
ccttgacagacgcaactttataggcatgagggaaataccgttttcacatattttacactgcccaatgcgagaagagttttttctaactttaatcccatctctactctgaatgggaagaatcccattaagctggtgacctcgtggagagtatagaattctgaatactttttcacttgttcaatgcaagctcttaaaattttctgttggataaaacacgtagttcttttaaacttggagccatggaatgatctttataattttctcgagagcaaaatgtcttaaggccatttttgggggacatatcccaattcagtcctggttcacttatgcaccatccttaagaacagc

SEQ ID NO: 166804 - DNA, 330 bp, Homo Sapiens
ctacgaaggtctgcggcttcactcctgaagtcagcgagaccacgaacccactgggaggaacaaacaactctggacgcaccaccttgaacagctataacactcactgcgaaggtctgccgcttcactccccaagtcagcaagaccacgaacccacccggaggaacaaacaactgcagacgcgccacctttaagaggtgtaacactcatctgcgaaggtctgcggcttcactcgctgaagtcagggagaccatgaaccgaccggaaggaagaaactccagacacatctgaacatctgaaggaacaagctccggacacaacgtcttgaaaaca

SEQ ID NO: 166805 - DNA, 448 bp, Homo Sapiens
  misc_feature (210)..(218): n is a, c, g, or t
gactggctggcaaacaccataatgcacgttctcctgtagtctcacgtggacttcagggtccgggcacctgaattgccttgtctagtttgggctgtaatcaagtttcacttgctgatgaaattttatgtggaaagctgccaaccgccaacttacagctatgtcattcaaaatctgataaacatttcttcttttggcggtatctgtagattnnnnnnnnngttgcattgtagcttctcatctttctgaatttaaaagccggcacgcatcatgcaggtgccaaagacttccctactcttgtttatatctagtatccaccatacactgagctacattaggtggttacagattgtaacttaataaactgaactgtgttagtttgttaaattgtatactcattcacttgggaggaagtcacaagtgaaataacatctccttcttgaagacactc

SEQ ID NO: 166806 - DNA, 472 bp, Homo Sapiens
  misc_feature (421)..(421): n is a, c, g, or t
  misc_feature (430)..(430): n is a, c, g, or t
  misc_feature (436)..(436): n is a, c, g, or t
  misc_feature (445)..(445): n is a, c, g, or t
atgaggaaaagttgtcggcttatgtactaaggctggagcctttgttacagaagctggtacagagaggagcaattgagagagatgctgtgaatcaggcccgcctagaccaagtcattgctggggcagtccacaaaacaattcgcagagagcttaatctgccagaggatggcccagcccctggtttcttgcagttattggtactaataaaggattatgaggcagctgaggaggaggaggcccttctccaggcaatattggaaggtaatttcacctgagtctcagggaaccacgaagggatatggcaatgagtagagcatgaaggtagaacagtctatatactcttgtgacacatacaatccctaccttgtgctgcccaagtaacttcatttttgtgcatttttcagtattaagcccttttgtncgttttctntggccnatttttaangttttccttaaaggtgtaatttgactt

SEQ ID NO: 166807 - DNA, 332 bp, Homo Sapiens
cggtacccagtgttcttcaagaccggttgtttctgagaagacactgtcccagatttttctccatcctttatttctgtggctatattcgaaacagaatcgtcctcgtcacttgtagcctccaaggccggttgtttctgagaagacactgtcccacattgtagtccatcctttatttctgtagctatattcaaaacagaatctgccttgccacttgtagccttcaaggctggttgtttctgagaagacactgttccagatttcccaccgcccgttattcttgtggcaatattcaaaagagaaactttctttttaaatataaccttccaggctga

SEQ ID NO: 166808 - DNA, 824 bp, Homo Sapiens
tctggatgcaagatgtcagaaagattcgtatcgaatatagccacagaaataaaggatggacaaatacgtgggacagtgtcttctcagagacaaccagccttgaagactacaggtgatgagaaagattctgtttcgaatatagccagagaaataaaggatggagaaaaatctgggacagtgtctcctcagaaacaatcggcccagaaggttatatttaaaaagaaagtttctcttttgaatattgccacaagaataacgggcggtgggaaatctggaacagagtatcctgagaatctgcccaccttgaaggctacaattgaaaataaaaattctgttctgaatacagccaccaaaatgaaagatgtacaaacatccacaccagaacaagacttagaaatggcatcagagggagagcaaaagaggcttgaagaatatgaaaataaccagccacaggtgaaaaaccaaatacattctagggatgaccttgatgacataattcagtcatctcaaacagtctcagaggacggtgactcgctttgctgtaattgtaagaatgtcatattactcattgatcaacatgaaatgaagtgtaaagattgtgttcacctattgaaaattaaaaagacattttgtttatgtaaaagattaacagaacttaaagataatcactgtgagcaacttagagtaaaaattcgaaaactgaaaaataaggctagtgtactacaaaagagactatctgaaaaagaagaaataaaatcgcagttaaagcatgaaacacttgaattggaaaaagaactctgtagtttgagatttgccatacagca

SEQ ID NO: 166809 - DNA, 872 bp, Homo Sapiens
gggttgtttaatgcctttcttatagctgctactggaacactattatgacctaatttatgagccatccttactcatctacaagtgctgaagcaatgttacatactttttttgctaaactcagattttttagcctaatttcttgtcctcctatccacctgcatccacacatggcctgcatggggctgccttccctgcagtgttctgcagccatgcttcagggtatagctgttggtggacagcctcaggtcttgggggcactatagccactaaacgaggtgtgaaaggctcaagaggatgaccagcaattaattatccccagaaagtgaaggaaaagagacctttagggatgttgctggtcaagtcttgatttgaccggagtcaaatcaatcttcaagcaatcttggaatcctcaactgcagtaagcatttcaaaatgcaaacaaactgcttaacaactgacaagacaccagcccatacgctgctcttccaacagtgggttctagctttgaacaaaagtgctaaacatttccttgaatatattcttcctctttttgtcctcatcactcaatactggtgctcttgtcacaggtagaacagcttgtttcttttccatctattcaagtgtgtttctaattctaaaatgctgatcttctctggagtctatggtaggcaattatggtcactggaataggttgtcttgttttaaaatattattggtgcatgtacaacagcatccaacatatctgttcttgttcctagatatatagctctgattttaagcccttttgtgcataccattacaatatggtggggtaagacattctacagtagcctgtgctgaactgatctcttaaataaacttgcttctggtta

SEQ ID NO: 166810 - DNA, 381 bp, Homo Sapiens
cagtgtcttcaagaccagcatggttctagattcatacagcaaaaactagagagagctactccagctgagcgacagatggtatttaatgaaattctgcaagcagcctatcaattaatgactgatgtttttggcaactatgttatacagaagttttttgagtttgggagtctggatcaaaaattagccctggctactcgtattcgtggtcatgttctacccttagccttgcagatgtatggctgccgcgttattcagaaagcattagaatctatttcttctgaccagcaggtaattagtgaaatggtaaaggagctggatggtcatgtgctcaaatgtgtgaaagatcagaatggaaaccatgttgtacaaaaatgtatcgca

SEQ ID NO: 166811 - DNA, 253 bp, Homo Sapiens
aactttccaatattgtgatggttggaaattatgcttcagaattgggaactggaccccatgaaggatatgctcatcctctctgcactgaggcagatgctgcgggccgcagatgatttattagaagattcgcctcttgaggaaactggtgcaattgagagagcgttacagcctagcattttatggacattcatgacccggctttgagaagtcatagatctactcatgttgtaaagagttgtcttgaagaacacgt

SEQ ID NO: 166812 - DNA, 996 bp, Homo Sapiens
ttacccaaggcacctgtgctaaagcttctgtgaattacccagataaagtaaaattccacgctgtttctcaaagaactcacaatctgtttaagaagcagatgtctatacaataattttataactattattcaatgtgattagtactcacatagctctatatagagtgttatagaagaataaattagagaatatctcatttttcctccagtggtttaaaaagatgtcacagaaactgaattgtaaatggtacggaaatatggaggggtggtttgcagtaggacctatcttagcccaccgcttctcaggttttggcctttgaacttgagatatgactgttccaaggacagaaggcaaaacgaacaaaagcaaaatctgaagcaggctgtcaatagagattgactctcattgcggcacaccagtacaggctgggccaaatgtcagaatcaaggcaacttatctcaaatgcagggctgtaacgcactctcaatagcaccagtttcctcaagaggcaaatctatctaaaaaatcatactgcagcccgcagcatctgcctcagtgcagagaggatgagaataatccttcatggggtccagtaccaaatactagaagcataataatccaaccatcaaaatattggaaataggaatagcctagcatttaatggacatacatgacccggctttgagaagtcatagatctactcatgtttaaaaagttgtcttgaagaacctcactgcaatcatccactttagtaagcaaggccacatatgctataccacagtataatacttctttgtgaacttgcttcaatttagccaacatttaagagtagagattgtcaataaagtagatgtctaagacataagccacacagtgaatcctgtcctgatatctagtctggcatacaaacttttaagatgtggggcatgtcatccatgcacagtacctgctcattctgccccatctagacccatagtgtcacacaaaataaatggc

SEQ ID NO: 166813 - DNA, 819 bp, Homo Sapiens
  misc_feature (697)..(697): n is a, c, g, or t
  misc_feature (750)..(750): n is a, c, g, or t
  misc_feature (764)..(764): n is a, c, g, or t
  misc_feature (800)..(800): n is a, c, g, or t
acagatctcttaagaactttctgtctccaaaccgtggctgctcgataaatcagacagaacagttaatcctcaatttaagcctgatctaacccctagaaacagatatagaacaatggaagtgacaacaagattgacatggaatgatgaaaatcatctgcgcaagctgcttggaaatgtaactttagagtcttctctataagtctagtgtacatggaggtagcattgaagatatggttgaaagatgcagccgtcagggatgtactataacaatggcttacattgattacaatatgattgtagcctttatgcttggaaattatattaatttacgtgaaagttctacagagccaaatgattccctatggtcttcacttcaaaagaaaaatgacaccactgaaatagaaactttactcttaaatacagcaccaaaaattattgatgagcaactggtgtgtcgtttatcgaaaacggatattttcattatatgtcgagataataaaatttatctagataaaatgataacaagaaacttgaaactaaggttttatggccaccgtcagtatttggaatgtgaagtttttcgagttgaaggaattaaggataacctagacgacataaagaggataattaaagccagagagcacagaaataggcttctagcagacatcagagactataggccctatgcagacttggnttcagaaattcgattcttttgggggggtccagttggggtctggaaaggccagntttttcaattcagnccaggctatttttcatgggcatgtgacttgggccancccgtaatgggggtctgat

SEQ ID NO: 166814 - DNA, 776 bp, Homo Sapiens
gggacagatctcttaagaactttctgtctccaaaccgtggctgctcgataaatcagacagaacagttaatcctcaatttaagcctgatctaacccctagaaacaggaattaaggataacctagacgacataaagaggataattaaagccagagagcacagaaataggcttctagcagacatcagagactatatggccctatgcagacttggtttcagaaattcgtattcttttggtgggtccagttgggtctggaaagtccagtttttttcaattcaatcaagtctatttttcatggccatgtgactggccaagccgtagtggggtctgatatcaccagcataaccgagcggtataggatatattctgttaaagatggaaaaaatggaaaatctctgccatttatgttgtgtgacactatggggctagatggggcagaaggagcaggactgtgcacggatgacattccccacatcttaaaaggttgtatgccagacagatatcagtttaattcccgtaaaccaattacacctgagcattctacttttatcacctctccatctctgaaggacaggattcactgtgtggcttatgtcttagacatcaactctattgacaatctctactctaaaatgttggcaaaagtgaagcaagttcacaaagaagtattaaactgtggtatagcatatgtggccttgcttactaaagtggatgatttggcagtgaggttcttcaagacaacttttttaaacatggagtagatctatgactttctca

SEQ ID NO: 166815 - DNA, 806 bp, Homo Sapiens
  misc_feature (81)..(81): n is a, c, g, or t
  misc_feature (84)..(85): n is a, c, g, or t
  misc_feature (87)..(87): n is a, c, g, or t
  misc_feature (89)..(92): n is a, c, g, or t
  misc_feature (94)..(98): n is a, c, g, or t
aactggggattaacagggcccgtggcccttcataccccaggtaattttttggggggttgggtttggtcctttcctaatttnttnntntnnnntnnnnngccagtggagatgggggtttcatcatgttgcccagggctagttttccctttctatatacagaaaaatttaaagtgaatgtgatgttggagagagtgggaaggaaaagtaatggcaagtatgcttgctcattaccaggcactgtgctaagctctgtgaatacacagataagtaaaatccacgctgtttctcaaagaactcacaatctgtttaagaagcagatgtctatacaataattttataactattattcaatgtgattagtactcacatagctctatatagagtgttatagaagaataaattagagaatatctcatttttcctccagtggtttaaaaagatgtcacagaaactgaattgtaaatggtacggaaatatggaggggtggtttgcagtaggacctatcttagcccaccgcttctcaggttttggccttttgaacctgagatatgactggttccaaggacagaaaggcaaaacgaacaaaagcaaaatctgaaacaggctggcaatagagattgactctcattgcggcacaccagtacaggctgggccaaatgtcagaatcaaggcaacttatctcaaatgcagggctgtaacgctctctcaattgcaccagtttcctcaagaggcaaatcttctaaaaaatcatctgcagcccgcagcatctgcctcagtgcagagaggatgagaatatccttcatgcc

SEQ ID NO: 166816 - DNA, 796 bp, Homo Sapiens
  misc_feature (29)..(29): n is a, c, g, or t
  misc_feature (42)..(42): n is a, c, g, or t
  misc_feature (52)..(52): n is a, c, g, or t
aaactgacctccaagaataactttaacanctgcccatgtccngaaacccccncctccctcagagaaacccagggcacccaggcttccaacacggcccatggaaagccaggttgcccacttgtaccccaaacctgtaagaagagtgagggtttccttatctcccctcccctaggagcaggaattgcaaatagcatcattgtattaatatgattggtaaatgtttgaacaactttggaaataaagttctcaagttcctaccagtaatatgagtctgtgtgtgaggagagaaatggggtgggggaaatgcctctcatttcccatacttctttaaatttgggggaagtaagagtagaggggatatatacggatatgttgtgtggataggtgagaatggaacccaatatatgccccccaaaagcataaacagagccttggctggctggctaccaatgtaagacacaaaagctatttaattaatcatgtatggcagagaaagagaggaatccgggacccatcttgtaaagaaagagaaatagggttcaactattctttctttctcaagcgaataccaaggttctacgtgaagataccacctcatctctgtttagaaaatgcacaaatatcaatgctgaaaaccctcacatggaagtgacaaaatatgcaagaattagtcattggggctcagattactcacacttaacctgcgatgctaattatcctctgctcctccaggtctcctgagcagattaacatcctaagttccaaggaaagtcaaaaggctacaaggaagggcagg

SEQ ID NO: 166817 - DNA, 768 bp, Homo Sapiens
  misc_feature (418)..(427): n is a, c, g, or t
tcctcagaggggcgtcttcttgtggagagaaattgtttggtaccaccccagaacctgtgggcaggaacaattgttttttggaagggaggtgcggccttttaaagaaatggtcattttttgtccgcggaacccaagtttcagggacagccctgctctctggtgaaagcccaaattcagtgtgaaacccctcgcaggaggtacaatatggcaagaattagtcattgtttctcagattactcacacttaacctgagatgctaattatcctctgctcctccaggtctcctgagcagatttacatcctaatttccaatgaaagtcaaaaggctacaaggaagggaaggagggagaatgcaaaaggggaaatcagtgttggaattgaggagttaaaaggtctgaaaaatgactggtggagattnnnnnnnnnngtggcaagaactgaggagtctcaaatagactgtaaacccctggaaggggtctgtgcttcacacccgggggcctagcacaaaccaaagacacagtaaatgctacttgagtagcagaggtgaagaaaatacattgttagagacttcatggttgaaactctaatacccaaggagtcattctacctccactgcccctaacagcataaaatggctttgaaaggtcttggcaaagaagctgcctctggtttttctgtagttgtcatcatggccacactgatttctggggctttcaaagcagaggaaaatgctgtcgaagggaatgatgactccagaatattaagagg

SEQ ID NO: 166818 - DNA, 312 bp, Homo Sapiens
cgtaacggtcagagagggaggtcagcttctccaggtcagcacgcagggcgtggaatccactcaggagggtgacgtccgcgatggccatgccagacagccccaccttgccgttccgccagatgcacacggtgtagtgcaccctggactcctgctcctccaccaccttgggcgcctccctcctgcggcggttcctccgaccctcaaacagctgcaggggtgtcacgggctgcagaggggcatctgggtcatccttggctggaagctcatcgtactcatagtcctcatagtcctcgcttgcttccatcgtgtact

SEQ ID NO: 166819 - DNA, 953 bp, Homo Sapiens
ttgaatgtgacgggatgaacataataagcaatgacgcagcataaactcaacaggagcaggaaagcgagggtatcctacaaagtccagcgtaccataaacgcaagcctcaacgcagcgacgagcacgagagcggtcagtagcaatccaaactttgttactcgtcagaaaatcgaaatcatcttcggttaaatccaaaacggcagaagcctgaatgagcttaatagaggggcatgtgctgtaggccagcgcaaccctgtacgactactacaaccccgagcgcagatgttctgtgttttacggggcaccaagtaagagcagactcttggccaccttgtgttctgctgaagtctgccagtgtgctgaggggaagtgccctcgccagcgtcgcgccctggagcggggtctgcaggacgaggatggctacaggatgaagtttgcctgctactacccccgtgtggagtacggcttccaggttaaggttctccgagaagacagcagagctgctttccgcctctttgagaccaagatcacccaagtcctgcacttcaccaaggatgtcaaggccgctgctaatcagatgcgcaacttcctggttcgagcctcctgccgccttcgcttggaacctgggaaagaatatttgatcatgggtctagatggggccacctatgacctcgagggacacccccagtacctgctggactcgaatagctggatcgaggagatgccctctgaacgcctgtgccggagcacccgccagcgggcagcctgtgcccagctcaacgacttcctccaggagtatggcactcaggggtgccaggtgtgagggctgccctcccacctcaactgggaggaacctgaacccgggaaccatgaagctggaagcactgctgtgtccgcttccatgaacacagactgggaccagggcatattaaaggcttttggcagcaaagtgt

SEQ ID NO: 166820 - DNA, 535 bp, Homo Sapiens
tttttatgtcattcttcaacatttaatggtgccacagggttaaataatggccttacttttttggcctgaattttgccaaaattagcttcaaactctttttttgatccatttagatttgctagatgtccatcctttattctgtagcctgaggaattcagtttccttatcctgtactgtactatctgtggtgttaattcaagaaccattggcgtctctcttatctgagctatggaaattccttctctcaataacccttgcattctctcttctaaaactggaacagaataatataaaagggcaggacatttcaaaactaattgcttcaggtcatgatctgtgcatttcaaagcatttttagagaaggaaatactattctgtatacttcttgggcaaagttgaaaaagaaatcctttgagtttggatagaagctggagaatttcaaagctggtgaaaccttgctcctggagaaattctagtgtttcctttatagctgtgggagaatttgacaaaataaatgggttttggcttaacaatt

SEQ ID NO: 166821 - DNA, 709 bp, Homo Sapiens
  misc_feature (22)..(22): n is a, c, g, or t
  misc_feature (31)..(32): n is a, c, g, or t
tacttctaatagtagtaatgcntcaaatgcnncagttgtaccacagaattcttctgcccgatccacgtgttcattaacgcctgcactagcagcacacttcagtgaaaatctcataaaacacgttcaaggatggcctgcagatcatgcagagaagcaggcatcaagattacgcgaagaagcgcataacatgggaactattcacatgtccgaaatttgtactgaattaaaaaatttaagatctttagtccgagtatgtgaaattcaagcaactttgcgagagcaaaggatactatttttgagacaacaaattaaggaacttgaaaagctaaaaaatcagaattccttcatggtgtgaagatgtgaataattgcacatggttttgagaacaggaactgtaaatctgttgcccaatcttaacatttttgagctgcatttaagtagactttggaccgttaagctgggcaaaggaaatgacaaggggacggggtctgtgagagtcaattcaggggaaagatacaagattgatttgtaaaacccttgaaatgtagatttcttgtagatgtatccttcacgttgtaaatatgttttgtagagtgaagccatgggaagccatgtgtaacagagcttagacatccaaaactaatcaatgctgaggtggctaaatacctagccttttacatgtaaacctgtctgcaaaattagctttttt

SEQ ID NO: 166822 - DNA, 758 bp, Homo Sapiens
ggaactagagctggtagacacgagcttctcagatggcagtggccagatcctccatctgtgagaatccgccacttgaagtggtttcctgagagtgttcacttggcagttgctgcgtttctcaagcccacctggcaaggtctcgccggacccttccctccaagtgcacttacttcttcatccccatgtacatctctaactttgaaattgtttacctctcctacaaaaatcttaccttttgacctgagcagagtagcaaagccctgttcactctgagggagcagctggcgtgttgaaggggaaaggccaggcacagcactgtcctcagaccacaccatatttggagcagaattgtgatacatgtcatctgtgtctattctggaaggttctttgttcatcactgtactcgcatcagcaaattttcagggtcctacctgtcactccaggctactgagctgaaccctcagaagctgaggtctccgagcatgctaagtaaccttttagaaaagctggaggcaaactgtcgaatgctagcaggctttatgaaaggaaacataaggagtttgtgtagtcagaacttgcttaaatttgcttcggaattaggcaccataaactttagttggagaatgggacttaaattttcacatatatgtatacttaattttcagcaattatgacacaataaaaagaatatgcaaatttattgttgttttcagaagggttttgcagggactggggaacgcttttagtggtcatcaaac

SEQ ID NO: 166823 - DNA, 905 bp, Homo Sapiens
ggccggtggcccggggcgcctgggaatttgaagcaaacaggcagcgcgcgacaatggcggtcgctcgtgcagctttggggccattggtgacgggtctgtacgacgtgcaggctttcaagtttggggacttcgtgctgaagagcgggctttcctcccccatctacatcgatctgcggggcatcgtgtctcgaccgcgtcttctgagtcaggttgcagatattttattccaaactgcccaaaatgcaggcatcagttttgacaccgtgtgtggagtgccttatacagctttgccattggctacagttatctgttcaaccaatcaaattccaatgcttattagaaggaaagaaacaaaggattatggaactaagcgtcttgtagaaggaactattaatccaggagaaacctgtttaatcattgaagatgttgtcaccagtggatctagtgttttggaaactgttgaggttcttcagaaggagggcttgaaggtcactgatgccatagtgctgttggacagagagcagggaggcaaggacaagttgcaggcgcacgggatccgcctccactcagtgtgtacattgtccaaaatgctggagattctcgagcagcagaaaaaagttgatgctgagacagttgggagagtgaagaggtttattcaggagaatgtctttgtggcagcgaatcataatggttctcccctttctataaaagaagcacccaaagaaactcagctttcggtgcacgtggcagagctgccccaggatccacccaggtgcatcggaaccttctcaagcttatgcaaaagaaggagaccaatctgtgtctatctgctgatgtttcactggccagagagctgttgcagctagcagatgctttaggacctagtatctgcatgctgaagactc

SEQ ID NO: 166824 - DNA, 340 bp, Homo Sapiens
  misc_feature (293)..(293): n is a, c, g, or t
tcctcgctattatcggcacggcgtcagatcgtcaaggcccttcaggttttccgcattgataatggtgggccgtggtgcccgctccaccagctgccttagtgggcggagtgggcgagacaatcccagcctgttttcttttccgtcttggtcattcatctggaactgtctaaaaggaactcgaggttcaaggcggagctgaggaaggggaaaagagcctcgttccactgtaccctggttttctgatgacttcggcgaacacataaaagcaggaagcatgtcatggtatgtaggtnggtggtatacatttcccatgaactgtgaagccccttttcggacaggc

SEQ ID NO: 166825 - DNA, 1038 bp, Homo Sapiens
agctctcagatgtgaggtcttccatagacttaccacatcctgtatatgacaaatggtggcttctttttcccaagattggtacctcttccaccaccttctttacggttggaacaggtgcaagctaccctccgaagtctttttccttcttgatgttgttggtccccttcttcatctaccacctgtactcttaagtgtgttagttcattggtattcaaggtagaatcaccactgagctggcactcttcaggatcaggttcttccttcctgatcctaatatctgcaggactgtcagcattctctcctggatgtagctgtataccagcagaatctatagagttcactgtaactgtttgtagatttggcaactgaccagtgcttagactaactggagttgaagtgaaggctccacctgccgcaacttgaccaagtgtgagggtttgaacaggcgtcaaagttatttgttgggcagcagtattctgtatttgcaaattctgcaagttctggaccccttgtacttgaaacgtttgccaagttacctgtccagaaggggtcactgtctgtgcctgaattaaaaaggttccaggattcagctgcaactgaagattttgcaaagcctgttgtgatatattttgaccactggcttgacaaccatggattgtctgtggtgtaataccttgcacaatttgggcttgactggttggctgctgagactcttgaagttgtagatgctgtacaacaggctgtgctgtagaaacctgaatattctgtgcctgtgtctcttcagaaacaggcgaatggataaatttgctgaagatctcaccaatagatgtaatgtttttatacagggcttcttgtatgcatatagtattagtaccattattaaaaccacaatgaatctctacatgtccatgcaaaagccaatgaacaaaaactcagttaaggcattgtgcaggcttgttgaacttctccaggcaatagagcatatgttctacaggagcagcctggatgtggctgattcaggttcccatattacccagg

SEQ ID NO: 166826 - DNA, 597 bp, Homo Sapiens
  misc_feature (585)..(585): n is a, c, g, or t
gctgatctagaggatcccgatgtagcccaactgtgtagaaggagaaattagaacaatgggagccttggttccctctcgtctcctcccctccttcttgtcactggctttgatgaggcccacttcccagaggctcctgggcctgtgagtgcaggagctcattctcccctcactgctgaagtctgtgacagcttcttcctccagttatgtctttcttccaaagcaatttcttaaccatcagccatgtgctgctatttctagggcttctgggctttgtcccttactgagagattagggactccacagctgccttgaggtagggcctggctgagagacaagggtagcagcaggtggcaggctgttaaaagacaggctgcctgaggagcctggagcaggtgggtacccacctgctgctgccatgaggcaccttggggccttcctcttccttctgggggtcctgggggccctcactgagatgtgtgaaataccagagatggacagccaatctggtagagaagttggcgccagcacctcttaccttggatggaccggctttccctggagcacttgaaccccagcatctatgtngggctacgcctc

SEQ ID NO: 166827 - DNA, 284 bp, Homo Sapiens
acgtagccccacctggccggacacagagcgcccttttaaaatgcggctttgctatccaggccctgcatctaccgattgtccaaatgttgctggtagcaaaattaagtgtctcctccctcagtgacttcatgtgcacacagcgcatatgctcagtgcatagttttatggatacgtttgcttccctttactctaaacctaaagattacatggtgaaagtaaactccaagagtgagccttttagcccattcacctcttggcagagcgaaccattcaggtgggctagt

SEQ ID NO: 166828 - DNA, 454 bp, Homo Sapiens
gggggaccttccggggttcctaagccgcggggcccctcgctgcccctcgaggccctttccctgacctaggctttggcctgggctactcgttccggagccgccatgtcgtccgacttcgaaggttacgagcaggacttcgcggtgctcactgcagagatcaccagcaagattgcgagggtcccacgactcccgcctgatgaaaagaaacagatggttgcaaatgtggagaaacagcttgaagaagcgaaagaactgcttgaacagatggatttggaagtccgagagataccaccccaaagtcgagggatgtacagcaacagaatgagaagctacaaacaagaaatgggaaaactcgaaacagattttaaaaggtcacggatcgcctacagtgacgaagtacggaatgagctcctgggggatgatgggaattcctcagagaaccaggtgggctacg

SEQ ID NO: 166829 - DNA, 705 bp, Homo Sapiens
  misc_feature (52)..(67): n is a, c, g, or t
agtagcccaccagggataaaagggcagtttacttcttccaatgcagatgacnnnnnnnnnnnnnnnncttgccatatgggatggaagggaaccttaagtatagggcgagagtgaacatccttgtcttgtccctgtttttgagggaaagtatacagtctttcattattatgtaaatattagctgtaggtttttggtagataccctttatgggtttgaggaaattttcttgggttggctgtttttaccaggagtagatgttggatttggtcaaatgcttttggtgggtctgatcgagataatcacacaattttaatatagtgaattacatgacttgaattttcaaatattaaagtggtcttgtatttctgggttaaatcacatttgggtcatgcaatattatttttttaacccttttggcatttagaaaaaaagctgcagctggctgccagttctcatgtaatttcacataaacacactcttggaggctgaagcaaatctgattttcagtgtgaaattaaaatataaaaactgtcctgggagttatttctaaacagaactaacatcagaatcatctgactcatcagaatcatctgttgtggaaaattcagtattcatcaaattagtcttcggccaatctgagaacattgtttacattacctttaggaatgttatacaggttagtttattattgcaaaaagtgtgtca

SEQ ID NO: 166830 - DNA, 1466 bp, Homo Sapiens
ccctcacacatttgactttagaacgtgtgcttcatgacccgttgtacagacggaggagcgagcaacacacgtctaacagcctagacaatctcgtcagatgctcatactggaccatcagcctccccattttagctgactttcccagggtcgttggcaaattttttgttctgtcttttccttgactaattgtagaactttgtgtgaggactttggttatccaaaatcacagaaatgaaccgttttgcagctgcgcagtctaaagggcaggccagtgtctggaagcagggcccacgtggcggtccgctggcaggctggtcctggggagcattctgcggacccggtcacgggcttggttagtcatgcgtacatgtgtgccttggggtgctctgcactccacggcccttctcagccacacttcccaccccagggggtgcccccaggctgatctcatttctgatgttgagggctgtttggctctgtctgtatagcttgtaacaggagccttgggctaggggctggggaaggaaagccgagctggcattcgttctctggactttttatgcctgccatacccgctaatgctcctcgaggtgcaggagcaggttgctgagccagtggctgccccgtgccctccttcccagcactatcatgtgtcacgtttcccggactctgcccctacatctcagctgaatctccagggaggctgcagagcattcgtgggagaccactttctgcctcggcctttaaatgctgactcacctcctctcggaggaggcgtcctgtcttcacggggggggtcccggtggcctccagacgtagccatttcctgacatcaagatgttgaatgtaatctggtctgagctgggcctgtgggaggggccgcctgaggcctgtgcgctgttgtcctcgcagatgtacttatttttgttcatgatacgggcgttccgttccttaaagatgtatatattttcttactgtacataaagatgttccttaagtcgtacagaaggtggcgcggcaaagggcctcgtgcagtgtgttcagattgcccctggggatcttctgtgtcttcagcgcccagccctgcgtgttcctggtgaagcagtttcacatcagtctctccagatagcactacgatgtattccgcttctgaacaggatcccatgccagtgtggaacaccttcccaatcttagttcagaagtggcttgtatgacctgttcaggggtcacatgaggtctcgccagttttcctgggtcctcttcagaggccagaaagttctaagttctgagtccccggccagggtcccttaacacctcggcacagaggctgttggcaagtgtagaggctgcctctgtgtgtggtttaagtaaactggaaatgagacattgacgtgctgctcctccagaggtctgcacactccacttcacatgccgtttgactctcacagtcttaagacttcagggcc

SEQ ID NO: 166831 - DNA, 956 bp, Homo Sapiens
  misc_feature (822)..(822): n is a, c, g, or t
agctgaagcctgtgtccaggtccttcagtgagtggtttggcctcggtctcacactgatcgacgcgctggacaccatgtggatcttgggtctgaggaaagaatttgaggaagccaggaagtgggtgtcgaagaagttacactttgaaaaggacgtggacgtcaacctgtttgagagcacgatccgcatcctgggggggctcctgagtgcctaccacctgtctggggacagcctcttcctgaggaaagctgaggattttggaaatcggctaatgcctgccttcagaacaccatccaagattccttactcggatgtgaacatcggtactggagttgcccacccgccacggtggacctccgacagcactgtggccgaggtgaccagcattcagctggagttccgggagctctcccgtctcacaggggataagaagtttcaggaggcagtggagaaggtgacacagcacatccacggcctgtctgggaagaaggatgggctggtgcccatgttcatcaatacccacagtggcctcttcacccacctgggcgtattcacgctgggcgccagggccgacagctactatgagtacctgctgaagcagtggatccagggcgggaagcaggagacacagctgctggaagactacgtggaagccatcgagggtgtcagaacgcacctgctgcggcactccgagcccagtaagctcaccctttgtggggagcttgcccacggccgcttcagtgccaagatggaccacctggtgtgcttcctgccagggacgctggctctgggcgtctaccacggcctggccgccaggcacatgnagctggcccaggagctcatggagacttgttaccagatgaaaccggcagatgaagacggggctgaatccccaagatcgggcacctctaacctttaccccccaacgggccggtcggggaacgtggaaggtccaagc

SEQ ID NO: 166832 - DNA, 975 bp, Homo Sapiens
  misc_feature (137)..(140): n is a, c, g, or t
  misc_feature (145)..(164): n is a, c, g, or t
  misc_feature (276)..(276): n is a, c, g, or t
aattcccaagcccttgttcatggccagggtttttcttagggaaccaggtaaggcccagttccctttaccttctggggcccgcggcgccaaaagaaatggtttagaaagtttttcaggggcggaggcggccgacaggnnnnttttnnnnnnnnnnnnnnnnnnnntccaggatgttctgtgatgtttataattagaaaagttgctcggaacaggatagaaccttgggaaggctgatggggaagcagtccagactaggctggactttgaaaggagggncccacaggaaggaaaggaaaggtggggcagggggcggcggtgttctaagtcccaaggcaggttgctaggaggggtgctgactcaggctggagtgtaatctggaaacatcatctttgcccagtccctgtagggctggggcccactgggcaggtgtccccagggctgtgagacatctttatgaagttctccaggtggctgttacaggcagtgggcattctctggctgtcactgggtcttctgcaggtcctcaggcccaaaggaggagggcagcagctcctggaccgtcatgacaatatacgtaccatccggcttggtcatgtacacgggccagttggtgccaaactctctcatgacttgcctgcaggccccacatggagagataaaatcatcttgcatgtcactggcgatagcaattgccctgaaatccttgtacccttctgagacggccttctggatagcggtccgttcagcacagatgcccagcgggtagcaggcattttctatgttgcaccctttgaagattctcccctcctgggtgagcagggcagcccccacaggaaagtgactgtaggggcagtaggctgactgcttggcctcctgggagcaaaccagcagctgctggacacactcaggcttcagggtgcaggcaggacgcttctgggccatgttggtaccccgggcaggcagcagagcagcccc

SEQ ID NO: 166833 - DNA, 829 bp, Homo Sapiens
  misc_feature (690)..(691): n is a, c, g, or t
  misc_feature (755)..(755): n is a, c, g, or t
  misc_feature (767)..(767): n is a, c, g, or t
  misc_feature (774)..(775): n is a, c, g, or t
ggatccttcagtggggctattggactgacttttcttatgctgggatgtgccttagaggattatggcgtttactggcccttattcgtcctgattttccacgccatctcccccatcccccatttcattgccaaaagagtcacctatgactcagatgcaaccagtagtgcctgtcgggaactggcatatttcttcactactggaattgttgtttctgcctttggatttcctgttattcttgctcgtgtggctgtgatcaaatggggagcctgcggccttgtgttggcaggcaatgcagtcattttccttacaattcaagggtttttccttatatttggaagaggagatgattttagctgggagcagtggtagcactttattctgattacagtgcattgaatttcttagaactcatactatctgtatacatgtgcacatgcggcattttactatgaaatttaatatgctgggttttttaatacctttatatatcatgttcactttaagaaagacttcataagtaggagatgagttttattctcagcaaatagacctgtcaaatttagattatgttactcaaattatgttacttgttgggctgttcatgtagtcacggtgctctcagaaaatatattaacgcagtcttgtaggcagctgccaccttatgcagtgcatcgaaacctttttgcttgnngatgtgctttggagaggcagataacgctaaagcaggcctctcatgaccccagaagggccggggntggatcccctcntttgggnntgtagtccatgtctaattaaaaagtgtgggccccacagaacaaggaagcctcca

SEQ ID NO: 166834 - DNA, 1605 bp, Homo Sapiens
  misc_feature (988)..(988): n is a, c, g, or t
  misc_feature (1067)..(1086): n is a, c, g, or t
  misc_feature (1290)..(1299): n is a, c, g, or t
gggggggctgggagttctcctgagggaagaggagtggagtagggggaacgcggcggcggcgttgacaatgagttttcttggaggcttttttggtccaatttgtgagatcgatattgttcttaatgatggggaaaccaggaaaatggcagaaatgaaaactgaagatggcaaagtagaaaaacactatctcttctatgacggagaatccgtttcaggaaaggtaaacctagcctttaagcaacctggaaagaggctagaacaccaaggaattagaattgaatttgtaggtcaaattgaacttttcaatgacaagagtaatactcatgaatttgtaaacctagtgaaagaactagccttacctggagaactgactcagagcagaagttatgattttgaatttatgcaagttgaaaagccatatgaatcttacatcggtgccaatgtccgcttgaggtattttcttaaagtgacaatagtgagaagactgacagatttggtaaaagagtatgatcttattgttcaccagcttgccacctatcctgatgttaacaactctattaagatggaagtgggcattgaagattgtctacatatagaatttgaatataataaatcaaagtatcatttaaaggatgtgattgttggaaaaatttacttcttattagtaagaataaaaatacaacatatggagttacagctgatcaaaaaagagatcacaggaattggacccagtaccacaacagaaacagaaacaatcgccaaatatgaaataatggatggtgcaccagtaaaaggtgaatcaattccaataaggctatttttagcaggatatgacccaactccaacaatgagagatgtgaacaaaaaattttcagtaaggtactttttgaatttagtgcttgttgatgaggaagaccggaggtacttcaaacagcaggagataattttatggagaaaagctcctgaaaaactgaggaaacagagaacnaaactttcacccagcgatttgaatctcccagaatcacaggcatctgccgaacagcctgaaatgtgaactgaacaggagnnnnnnnnnnnnnnnnnnnnctcctgtaacccttgagattaagttcagcaggttaaagatggttgcagctggagggggcggaaaaaggccaaaactccatatatgttagtcttcctttatcttacagcgcagcatttattttatgatataatgaaatgttcgttcatgtatatacatttttaaaagtgctttctttgcaacactggaactttgttaagctgccnnnnnnnnnnaacttcctactttgatgataagcactccaatatatatcagcgtaaacctgaaaaattttcctggggagtaaggctggcatttcgtaatttaggctttcctttctgcataacggttgaatataaaatcctcctccttttcacggctactggatcaccctctttaatcctcctcccttgccaaaacaacttacatatttctggcggccgccgtgaatgcgctgcactcaccttccacactccaatgccctcttgcacttactctccccttcggcaccatcgcagaaaaagctttcttctagacaccac

SEQ ID NO: 166835 - DNA, 714 bp, Homo Sapiens
atgctgtgctaagttgacatggaaaggcaggggatgtcgtatagacaagggacaacccctcccatatggcatttgacagacaagaagcgagagaggatgcaaatcaagagaaatacgaacagtgttcctgaaaccgctccagcgtgcaatccctgagaccagaagaaacgcagagttcctcacctgtaatatacccacatcaaatgcctcaaataacatggtaaccacagaaaaagtggagaatgggcaggaacctgtcataaagttagaaaacaggcaagaggccagaccagaaccagcaagactgaaaccacctgttcattacaatggcccctcaaaagcagggtatgttgactttgaaaatggccagtgggccacagatgacatcccagatgacttgaatagtatccgcgcagcaccaggtgagtttcgagccatcatggagatgccctccttctacagtcatggcttgccacggtgttcaccctacaagaaactgacagagtgccaagctgaagaaccccatcagcgggctgttagaatatgcccagttcgctagtcaaacctgtgagttcaacatgatagagcagagtggaccaacccatgaaacctcgatttacattccaggttgtacatcaatggccgagagttaccccaggtgaagctgggagcaagaaagtggcaagcaggatgcaaatatgcaaaagcatgaaa

SEQ ID NO: 166836 - DNA, 735 bp, Homo Sapiens
  misc_feature (198)..(219): n is a, c, g, or t
  misc_feature (277)..(285): n is a, c, g, or t
ccagccaagttatcaggtgtccaaaatgtgagtaaacattaccttatatttacactgttagtttttattgtttagatttattatgcttcttctggaagtattagtgatgctacttttaaaagatcccaaacttgtaactaaattccgacatatctgttactgctgactcacattcattctccgccattcaaatactannnnnnnnnnnnnnnnnnnnnngttcccaaactgtaatgtacaaggatatgtgtgataatgctttggatttgagtaatannnnnnnnncttccaagaaaactgctttggatatttttagataatttaaacataatttaggataatgatattgctcaatctgaccacaattttaggtaaaacattaaatgtgtcaagaaatcttggcaacagagactctgcagcttgcagtggacatagataaaatgttacagagatactatttttttggttggaattactatattaaatttagaagcagaaactggtaaaatgttaaatacatgtacaattgcttttagttagcaattgattgtagcatgggttcctccaaggtttcaagcaatgggcagagtttaaaattatatcagattcgtttacttcgtttattattttacagtaaatttgaataaatcttaggggtcattatcacttaaataatactgtacctaggtctttcaaattaaaattatacctgaatgcgtccgtcggggtaccgag

SEQ ID NO: 166837 - DNA, 250 bp, Homo Sapiens
cctggtccagcaggcgtgggccccagattaagatgtcagaatttagttacaagtttgggatcttttaaaagtagcatcactaatacttccagaagaagcataataaatctaaaacaataaaaactaacagtgtaaatataaggtaatgtttaactcacattttggacacctgattaaactcagctctaaaagtacagataaaaaattatatactcgttcgtgacatcttaatctggggcccaagcctgct

SEQ ID NO: 166838 - DNA, 874 bp, Homo Sapiens
acgtagcccacctgtgaggctgcttccaaggaggaaaacaaggaaaaaaatcgatatgtaaacatcttgccctatgaccactctagagtccacctgacaccggttgaaggggttccagattctgattacatcaatgcttcattcatcaacggctaccaagaaaagaaccaattcattgctgcacaaggacccaaagaagaaacggtgaatgatttctggcggatgatctgggaaccaaacacagccaccatcgtcatggttaccaacctgaaggagagaaaggagtgcaagtgcgcccagtactggccagaccaaggctgctggacctatgggaatattcgggtgtctgtagaggatgtgactgtcctggtggactacacagtacggaagttctgcatccagcaggtgggcgacatgaccaacagaaagccacagcgcctcatcactcagttccactttaccagctggccagactttggggtgccttttaccccgatcggcatgctcaagttcctcaagaaggtgaaggcctgtaaccctcagtatgcaggggccatcgtggtccactgcagtgcaggtgtagggcgtacaggtacctttgtcgtcattgatgccatgctggacatgatgcatacagaacggaaggtggacgtgtatggctttgtgagccggatccgggcacagcgctgccagatggtgcaaaccgatatgcagtatgtcttcatataccaagcccttctggagcattatctctatggagatacagaactggaagtgacctctctagaaacccacctgcagaaaatttacaacaaaatcccagggaccagcaacaatggatagaggacgagtttaagaatgtcaccacggggag

SEQ ID NO: 166839 - DNA, 997 bp, Homo Sapiens
catagaaaagaaggattcagaggactcggaacttgggttggagaccgaaggaacagaaaggagagaaagaagaaagatttgggatgagtcacattgggagcagagactagggagggaccaatgtgtaaaagaatgcctggacgtcaggcacctcagaccatttgcccattttacgacaagaattatttagaacttgtaggatggaaaaattgaaagtgccgttttctggctatttggaaccattgtcgagtttgtattggggccaagcggtgttgcagaagaaaataagacaattaggttttaggtcaggtgtgagttgaagaggttttaagtttttgagaacacaggctaagggagaagaaggaggaatggagggtggaagcttgcccatagtgaaggaggtaaacccgagaaaagagagggtagaggcacggagaaggcgggtggggcagcggggggcattgagcagccctgggctgcaatgtgggtgagcagccaaagcaggcatccccgcaactgacttgccaccaagggaatgtgggtgaatgaccaaggcaggcatccccgcagtgatcagacaccaatggagtgtgggtgaataatcaggcaggcgtccccacagtgattaaacaccaagggaagaatgtcttcccaagtccataactgacactggagttttgggtccacagataaaatgagtctccttagtctctactagaaaggaaaaagaacgggaattggaaggacagggagattgaaggatagcaagagagggagattgaagggtagcgagaggctggagaagagagtgaaaagaccacttacctgatttgaaattggcgagatgttcctcgggctggttgatctgaggacccaaggtcataggtggatctcctcatggagtgagggcgatgacaggggaccgatctcgtgaagcagtcctcctgtcccgggtttcggctcccgaagtcatgtgcctcccagtggtacgagactc

SEQ ID NO: 166840 - DNA, 449 bp, Homo Sapiens
tgtattcactaaatctgcaattctgcatttctaacaagcttcctgggaacaccagtgctgccggtctttgtgctacactttgaggagtagggaactgaagggcccctgcttgcctccctggcctcatttcttgacacttccccaactctgttccagccatgcctcagttattccagctcccaaagtgcatcctgcttttgctcactgcaaagcctttggacaggctggcctccctccccagagcactctcaccctggcctggctgctcctacaggattggagatggcactttgcttagaagccttccctgattctctaagccctggaaacaaagagcatgtttgtggcctgggtgagaatgatctttatgctcagtgataaggggtgagagagctggcctataaggtgcagggcagcagccagaggtttcgttctacagcaggtgggct

SEQ ID NO: 166841 - DNA, 324 bp, Homo Sapiens
cagctgcttcaggaagatggggaatatggtaagaccagtgaattccgtgagcatgagcccactgcctcacttctttacctgtaaagtgagtgcttggtcaaaggtaatgctgtgtggaataccgtgatagtggataaggcattccttgagtccataaatggtagtcttggcagaagcattgcatgcaggtgggcaagcccatatcctgagtaagtgcctgttccaatgaggacaaacctctctcctttccatggtggaagagttccaatataatcaacttgctaccgggtagctggtcgatcaccccaggaaatgatgccatac

SEQ ID NO: 166842 - DNA, 473 bp, Homo Sapiens
  misc_feature (242)..(242): n is a, c, g, or t
  misc_feature (386)..(386): n is a, c, g, or t
  misc_feature (391)..(391): n is a, c, g, or t
  misc_feature (409)..(409): n is a, c, g, or t
  misc_feature (453)..(453): n is a, c, g, or t
  misc_feature (461)..(461): n is a, c, g, or t
atgggcaaaaagcctcctttaaaaaacattattcttaagaaacctgggagagaaaaaaatgccagtgagaggaagacaaagaaaaattagaggcagtacattccatatttcagaactttagctttccagacagtccaattttgttttgtttacaaattcaccttgcagtaaaaggtgaagccaaatggtacaaagtccacagaattgaaaagccattcatatttatcattcaattttttgancttcaaatgttatgaattctccaaaaaggtaacagggaacagatatccctttggtctcactttatagacagggaaattaccaaaagaaaaatcttggctctaccatctctacttacagaaggtaaaacacttaacagagacagntttcngttggggttagaccaggnttcttttcacagcccttaatctcacgaggttaggaaggagtggnagttgccnagttgttggcta

SEQ ID NO: 166843 - DNA, 794 bp, Homo Sapiens
tgtaacggagaggggacggaaaaacgtagctgagccacataagccgtggcgacgtgcatgggacgccccatgcaaaatgaagtgcccccaccccccaaccgtcgagggcggggaaggggcgggagcatcgcggaggacgagggcgcgggcgaggatctggtggcgccaaccagggaggctacatgaatgccggtgctgggtatggaagctatgggtacggaggcaactctgcgacagcaggctacagtgactttttcacagactgctacggctatcatgatgtggggtcttcctagagcgtctaaaagtattgcacacaaaatcaactttttactccaatttcctccaactccaaaacccaaagtgtccgtgctgtgtccctgtgcttcactgggtttctcaaccgtggcttttcaccgcagcttgtctgaaactcttagcctgcagaatttaagacaatggcagtttttatcgtgatttgcctttgaacttggtcctattgaagttcacaataagtggaaaacaattttttcagagaatgtattttcgtgcagaatcgcacagaattctagagacagcgttgttcggcatcaaggcaaaagcccacctttgctttttatggaaagcattactttatttaaagagacagacaatgacgcattttaatctacctttgtcttaatttacagcaggttttgtatgaatttttaaccttttaacaaacctccccaatctgggttgaatgcctttgaccggggatgaaaaccgaatttcccccaccatccggaaatccc

SEQ ID NO: 166844 - DNA, 888 bp, Homo Sapiens
  misc_feature (66)..(66): n is a, c, g, or t
ccccattgaacagcagtgcgagcatggcaagagtccgataacatggatgtgcccccagaggacganagtaaagaaggggctggggaacagaagacggagcacatgaccagaaccctgcggggagtgatgcgggtgggcctggtggcaaagggcctcctactcaagggggacttggatctggagctggtgctgctgtgtaaggagaagcccacaaccgccctcctggacaaggtggccgacaacctggccatccagcttgctgctgtaacagaagacaagtacgaaatactgcaatctgtcgacgatgctgcgattgtgataaaaaacacaaaagagcctccattgtccctgaccatccacctgacatcccctgttgtcagagaagaaatggagaaagtattagctggagaaacgctatcagtcaacgaccccccggacgttctggacaggcagaaatgccttgctgccttggcgtccctccgacacgccaagtggttccaggccagagccaacgggctgaagtcttgtgtcattgtgatccgggtcttgagggacctgtgcactcgcgtgcccacctggggtcccctccgaggctggcctctcgagctcctgtgtgagaaatccattggcacggccaacagaccgatgggtgctggcgaggccctgcggagagtgctggagtgcctggcgtcgggcatcgtgatgccagatggctcctggcatttatgacccttgtgaaaaagaaccactgatgctatcgggcatctagacagacagcaacgggcaagatatcacacagagtgcgcagtcacgcactgcggctcgctgcctttcggccagctccataaggtcctaggccatggaccctctgcatccaagatgcccata

SEQ ID NO: 166845 - DNA, 1419 bp, Homo Sapiens
  misc_feature (128)..(128): n is a, c, g, or t
  misc_feature (213)..(213): n is a, c, g, or t
gacgatgctggattggtataaaaacccaaaagagcttcattggtcctgaccatccacctgaaatcccttgtggtcagaaagaaatggagaaagtataagctgaagaaacgcatcaggtcacgaccccngggacgttctggacaggcagaaatgctttgttgccttggcgtccctccgacacgccaagtggttccaggccagagccaacgggtngaagtcttgtgtcattgtgatccgggtcttgagggacctgtgcactcgcgtgcccacctggggtcccctccgaggctggcctctcgagctcctgtgtgagaaatccattggcacggccaacagaccgatgggtgctggcgaggccctgcggagagtgctggagtgcctggcgtcgggcatcgtgatgccagatggttctggcatttatgacccttgtgaaaaagaagccactgatgctattgggcatctagacagacagcaacgggaagatatcacacagagtgcgcagcacgcactgcggctcgctgccttcggccagctccataaagtcctaggcatggaccctctgccttccaagatgcccaagaaaccaaagaatgaaaacccagtggactacaccgttcagatcccaccaagcaccacctatgccattacgcccatgaaacgcccaatggaggaggacggggaggagaagtcgcccagcaaaaagaagaagaagattcagaagaaagaggagaaggcagagcccccccaggctatgaatgccctgatgcggttgaaccagctgaagccagggctgcagtacaagctggtgtcccagactgggcccgtccatgcccccatctttaccatgtctgtggaggttgatggcaattcattcgaggcctctgggccctccaaaaagacggccaagctgcacgtggccgttaaggtgttacaggacatgggcttgccgacgggtgctgaaggcagggactcgagcaagggggaggactcggctgaggagaccgaggcgaagccagcagtggtggcccctgccccagtggtagaagctgtctccacccctagtgcggcctttccctcagatgccactgccgagcaggggccgatcctgacaaagcacggcaagaacccagtcatggagctgaacgagaagaggcgtgggctcaagtacgagctcatctccgagaccgggggcagccacgacaagcgcttcgtcatggacggtcgaagtggatggcaccgaagttccaggtgctggctccaacaaaaaggtggcgaaggcctacgctgctcttgctgcctagacaagcttttccctgagacccctctcgcccttgatgcccaacgaacagaagagagcccagtaccgtcacagcggggaccgaacctccgctgcacaaccaaataaccctggctcggcat

SEQ ID NO: 166846 - DNA, 946 bp, Homo Sapiens
  misc_feature (706)..(706): n is a, c, g, or t
gaccctgcagccgcaaggcagggactcgagcaagggggaggactcggctgaggagaccgaggcgaagccagcagtggtggcccctgccccagtggtagaagctgtctccacccctagtgcggcctttccctcagatgccactgccgaggggccgatcctgacaaagcacggcaagaacccagtcatggagctgaacgatgaagaggcgtgggctcaatgtacgagctcatctccctgagaccgggggcagcctacagacaagcgcttcgtcatggaggtcgaagtgcatggacagaagttccaaggtgctggttccaacaaaaaggtggcgaaggcctacgctgctcttgctgccctagaaaagcttttccctgtacacccctctcgcccttgatgccaacaaaaagaagagagccccagtacccgtcagtaggagcaccgaaatgtgctgctaagccacaataaccctggcttcggcatgggaggccccatgcacaacgaagtgcccccaccccccaaccttcgagggcggggaagaggcgggagcaatcaggggacgagggcgcgggcgaggatttggtggcgccaaccatggaggctacatgaatgccggtgctgggtatggaagctatgggtacggaggcaactcggcgacagcaggctacagtcagttctacagcaacggagggcattctgggaatgccantggcggtggcggcgggggcggtggtggctcctccggctatggctcctactaccaaggtgacaactacaactcaccggtgcccccaaaaaacgctgggaaagaagcagccgcacgggggggcaagcagaaagcccctccttacggtttcggggctaaccagtccccaccagggggccagcaggcaagtccttacaacccagaagccccctaaacgcaaacctatggccccctcccaccagg

SEQ ID NO: 166847 - DNA, 1012 bp, Homo Sapiens
ggtaccggcccggaattacgggatatcgtcgacccacgcgtcgctgaccatccacctgacatcccctgttgtcagagaagaaatggagaaagtattagctggagaaacgctatcagtcaacgaccccccggacgttctggacaggcagaaatgccttgctgccttggcgtccctccgacacgccaagtggttccaggccagagccaacgggctgaagtcttgtgtcattgtgatccgggtcttgagggacctgtgcactcgcgtgcccacctggggtcccctccgaggctggcctctcgagctcctgtgtgagaaatccattggcacggccaacagaccgatgggtgctggcgaggccctgcggagagtgctggagtgcctggcgtcgggcatcgtgatgccagatggttctggcatttatgacccttgtgaaaaagaagccactgatgctattgggcatctagacagacagcaacgggaagatatcacacagagtgcgcagcacgcactgcggctcgctgccttcggccagctccataaagtcctaggcagggaccctctgccttccaagatgcccaagaaaccaaagaatgaaaacccagtggactacaccgttcagatcccaccaagcaccacctatgccattacgcccatgaaacgcccatggaggaggaccggggaggagaagtcgccagcaaaaagaagaagaagatcaggaaggaaagaggaggaacgccgagccccccccagggctatgaatgcctgatgcgggttaaaccagctgaaagccgggctgcagaaacaagcggtggcccgactgggccgtcaccgcccatcctacctgtcggggaggtggcggcatccttcaggccgggccccaagggggcaaacgagtggcgaagggaacgaatggcgtccgggccgagccggacggcggggagccggggcagcgagccagggccgccgggaggcaccggccaagcgagaaaagggcacgacattcaaagcgccg

SEQ ID NO: 166848 - DNA, 1361 bp, Homo Sapiens
gggcagccccaggctccccgggcccgcgccgcgccgctctttctccgacagccgccgggggtgccctgcaagctgttccgcgcgtcctgcccgtctgtccccgcgggtcgtcgcccgccacagccgcgccatgaccacccagcagatagacctccagggcccggggccgtggggcttccgcctcgtgggcggcaaggacttcgagcagcctctcgccatttcccgggtcactcctggaagcaaggcggctctagctaatttatgtattggagatgtaatcacagccattgatggggaaaatactagcaatatgacacacttggaagctcagaacagaatcaaaggctgcacagacaacttgactctcactgtagccagatctgaacataaagtctggtctcctctggtgacggaggaagggaagcgtcatccatacaagatgaatttagcctctgaaccccaggaggtcctgcacataggaagcgcccacaaccgaagtgccatgccctttaccgcctcgcctgcctccagcactactgccagggtcatcacaaaccagtacaacaacccagctggcctctactcttctgaaaatatctccaacttcaacaatgccctggagtcaaagactgctgccagcggggtggaggcgaacagcagacccttagaccatgctcagcctccaagcagccttgtcatcgacaaagaatctgaagtttacaagatgcttcaggagaaacaggagttgaatgagcccccgaaacagtccacgtctttcttggttttgcaggaaatcctggagtctgaagaaaaaggggatcccaacaagccctcaggattcagaagtgttaaagctcctgtcactaaagtggctgcgtcgattggaaatgctcagaagttgcctatgtgtgacaaatgtggcactgggattgttggtgtgtttgtgaagctgcgggaccgtcaccgccaccctgagtgttatgtgtgcactgactgtggcaccaacctgaaacagaagggccatttctttgtggaggatcaaatctactgtgagaagcatgcccgggagcgagtcacaccacctgagggttatgaagtggtcactgtgttccccaagtgagccagcagatctgaccactgttctccagcaggcctctgctgcagctttttctctcagtgttctggccctctcctctcttgaaagttctctgcttactttggttttccctctgcttgtaaaacattgagtcccctccctgccttggttaattgactcacaccagctgtgcgatgcccgcttttacaattaaaggaaaactgttgtgttcagtgtcaccttgtcacaacactgtgccccatgc

SEQ ID NO: 166849 - DNA, 710 bp, Homo Sapiens
  misc_feature (119)..(119): n is a, c, g, or t
  misc_feature (164)..(164): n is a, c, g, or t
  misc_feature (169)..(169): n is a, c, g, or t
agtccgcgcttttgtgttttgccaggaaatctggaggttgaagaaaagggggatccacccagccctcaagattcagaaagtgtaaaagctctggtcactaaggtggctgcgtcgattgnaaatgctcagaagtgccctatgtgtgacaaatgtggcactgggantgtgngtgtgttgtaaaagctgcgggaccgtcaccgccaccctgagtgttacgtgtgcactgactgtggcaccaacctgaaacagaagggccatttctttgtggaggatcaaatctactgtgagaagcatgcccgggagcgagtcacaccacctgagggttatgaagtggtcactgtgttccccaagtgagccagcagatccgaccactgttctccagcaggcctctgctgcagctttttctctcagtgttctggccctctcctctcttgaaagttctctgcctactttggttttccctctgcttgtaaaacattgagtcccctccctgccttggttaattgactcacaccagctgtgcgatgcccgcttttacaattaaaggaaaactgttgtgttcagtgtcaccttgtcagcaacactgtgtcccttcgccccgccgttcttctctgctgcatttggacatcagccaaatttgaacccaatcaaatataacgtgtctgacactgattttgtttttactcaataaatgtatagactacaaaaaa

SEQ ID NO: 166850 - DNA, 2207 bp, Homo Sapiens
  misc_feature (780)..(780): n is a, c, g, or t
  misc_feature (2162)..(2162): n is a, c, g, or t
tgaaagaggcgaagcgagagcggaggccgcactccagcactgcgcagggaccggaattctgtggccacactgcgaggagatcggttctgggtcggaggctacaggaagactcccactccctgaaatctggagtgaagaacgccgccatccagccaccattccaaggaggtgcaggagaacagctctgtgataccatttaacttgttgacattacttttatttgaaggaacgtatattagagcttactttgcaaagaaggaagatggttgtttccgaagtggacatcgcaaaagctgatccagctgctgcatcccaccctctattactgaatggagatgctactgtggcccagaaaaatccaggctcggtggctgagaacaacctgtgcagccagtatgaggagaaggtgcgcccctgcatcgacctcattgactccctgcgggctctaggtgtggagcaggacctggccctgccagccatcgccgtcatcggggaccagagctcgggcaagagctccgtgttggaggcactgtcaggagttgcccttcccagaggcagcgggatcgtgaccagatgcccgctggtgctgaaactgaagaaacttgtgaacgaagataagtggagaggcaaggtcagttaccaggactacgagattgagatttcggatgcttcagaggtagaaaaggaaattaataaagcccagaatgccatcgccggggaaaggaatgggaatcagtcatgagctaatcacccctggagatcaagcttcccgagaatgtncccggatcttgactctaatagaccttcctggcataaaccagagtggctgtgggcaatcagcctgctgacattgggtataagatcaagacactcatcaagaagtacatccagaggcaggagacaatcagcctggtggtggtccccagtaatgtggacatcgccaccacagaggctctcagcatggcccaggaggtggaccccgagggagacaggaccatcggaatcttgacgaagcctgatctggtggacaaaggaactgaagacaaggttgtggacgtggtgcggaacctcgtgttccacctgaagaagggttacatgattgtcaagtgccgggggccagcaggagatccaggaccagcttgagcctgtccgaagccctgcagagagagaagatctcctttgagaaccacccatatttcagggatctgctggaggaaggaaaggccacggttccctgcctggcagaaaaacttaccagcgagctcatcacacatatctgtaaatctctgccccagttagaaaatcaaatcaaggagactcaccagagaataacagaggagctacaaaagtatggtgtcgacataccggaagacgaaaatgaaaaaatgttcttcctgatagataaaattaatgcctttaatcaggacatcactgctctcatgcaaggagaggaaactgtaggggaggaagacattcggctgtttaccagactccgacacgagttccacaaatggagtacaataattgaaaacaattttcaagaaggccataaaattttgagtagaaaaatccagaaatttgaaaatcagtatcgtggtagagagctgccaggctttgtgaattacaggacatttgagacaatcgtgaaacagcaaatcaaggcactggaagagccggctgtggatatgctacacaccgtgacggatatggtccggcttgctttcacagatgtttcgataaaaaattttgaagagttttttaacctccacagaaccgccaagtccaaaattgaagacattagagcagaacaagagagagaaggtgagaagctgatccgcctccacttccagatggaacagattgtctactgccaggaccaggtatactggggtgcattgcagaaggtcagagagaaggagctggaagaagaaaagaagaagaaatcctgggattttggggctttccaatccagctcggcaacagactcttccatggaggagatcttttcagcactgatggcctatcaccaggaggccagcaagcgcatctccagccacatcccctttgatcatccagttcttcatgctccagacgtaccggcagcagcttcagaagggcatgctgcagctccctgcagaccaggacacctaccagctggctcntgaagggagcggagcgacaccaagcgacaagcggaaagtcctgga

SEQ ID NO: 166851 - DNA, 432 bp, Homo Sapiens
atggctcaggcaagggtagacccccagaaaagcttgaggacaagaccaggactgttaggtcgggtctgctgtccactgctccgcgctgaccatgttcctcaccacacagagcatttgccaagcggcagcagcagcttaccgccatgaaggtcctccagcggaactgcgctgcctacctgaagctgcggaactggcagtggtggcggctcttcaccaaggtcaagccgctgctgcaggtgagccggcaggaggaggagatgatggccaaggaggaggagctggtgaaggtcagagagaagcagctggctgcggagaacaggctcacggagatggagacgctgcagtctcagctcatggcagagaaattgcagctgcaggagcgctccaggcagaaaccgagctgtgtgccgagtccgctgttggaccagctca

SEQ ID NO: 166852 - DNA, 1841 bp, Homo Sapiens
  misc_feature (1391)..(1391): n is a, c, g, or t
ggggcgcggacgcagttgcgtgaggggtttgtgctatcctcggtgctgtggtgcagagctagttcctctccagctcagccgcgtaggtttggacatatttgactcttttccccccaggttgaattgaccaaagcaatggtgatggagaagcctagtcccctgctggtcgggcgggaatttgtgagacagtattacacactgctgaaccaggccccagacatgctgcatagattttatggaaagaactcttcttatgtccatgggggattggattcaaatggaaagccagcagatgcagtctacggacagaaagaaatccacaggaaagtgatgtcacaaaacttcaccaactgccacaccaagattcgccatgttgatgctcatgccacgctaaatgatggtgtggtagtccaggtgatggggcttctctctaacaacaaccaggctttgaggagattcatgcaaacgtttgtccttgctcctgaggggtctgttgcaaataaattctatgttcacaatgactatcttcagataccaacgatgagggtctttggtgggccttcgtcactgagccatcaggacgagtctcaacaacaagtagacggaacctcaagcaaagacagcaaacactgagcgtggtacctgcatgcattcctggcaacttcctatgcactcacggcagacgcccaccccactgacgactggacagcaacaatctctagcacgcgcagcctgcttcgcctcgcaaccgacgagaccctgactcctgaacccagcaacacccagacacacacaaaccctcgctactcttgcaacatccgcacacgaggacacaacgccctgcaccccacgtcagtcaacgcaaagaaaaacctgacccccctgcaggcactgcctccgcgcaaggcaggcttccattcgtcccacgaccacccctacaagagccctaagaccttcaggaccacgcccaacacgcggaacagacaccctgaccggaaccacctaccgccctcgcgggcgcgctccctgctgaaccccaaccataaacgacaattctatccccaaccgcaaggtacgcgaacgccctaggaccgcccacgccttaacgcctcgggggaacgtacccacgaccctccacatggttaccggctccacacagcggtcagcccgacgacacctactccaaacagaggacccacaggtgccaacgccaccgatccctcagaacgaccccatacgacactccatccgggacgtaccacccaacccgcaaccaccaggggaacccctaccacagcacagcgcggaattccaagacagcacagttgctgacaggaacaccacagctgagacacaggttaagacaccagttctacccgataccccaccangaagaacgcgcagcgacgcccccaacagcagccccacagttccctggcagcaagtgccttggcattgcacccccaagccgtggaacccacttctgcgaacagagctcccacggcaggcgcacactgcgcgctgagccagaacaacgaccccggcaaagagaggtcagcccgcaacaaccctcgaatacaaagattaagaggcaaaacaccacgagcccatctaaatcggaaacgacagcgaaccaaaaacattcaagggacgaacagtatagaagacaatgtcgcgtctacccaaccagcactgttccagacaacacagcctcggaaggggcaaccaatcggacgcgcaagtgtcaacacagtcgggcaggggaaagacgatgacaacccgaagtattgcggaccactacagcgacgagccgcatggtgggaatggcacatcgactcagg

SEQ ID NO: 166853 - DNA, 326 bp, Homo Sapiens
gagaagacgacagaagggtaagaggagagtgatggaagggggggcaccatttgggtggggagggtcaaggaataagcatgacataaatgtagtaagctagcaagctgtgtacattaactatgggtacagaaggggcaaaccacctgattatttgggcgctgaatgttccagacagagatatcagcaaatgcaaaggccctaaggcaaaaacttgaaatgtttaaggaacagtaaggccagtgactaaaaataagaattctaccatacctagtatgtattaattctataggagaacacccaagtcaaacaccgaaagaatgggagga

SEQ ID NO: 166854 - DNA, 794 bp, Homo Sapiens
tgtatcaacagtacacttgatctccagtacagacatatggtggaacagaagcctggatacaggactcagactcttactgagttggccaggagcagcaggcaccacagcctgtgtgtgtgcagatacagtgtactactaccaaatggtgcccaggttgactgctgtactgcagactgcaatggcagctggaagtttaggtctcctcctacctggatctcattacttggcccgttttcaggatcgtataatgtggataatgattctggaatgtggctatacttactgctctattaacattaaggggttagaattgcaggaaacatcctgtcatactgcagaagctcgcagagttgatgaagtttttgaagatgcttttgagcaagaatacacaagagtatgttcccttaatgaacactttggaaatgtcttgacaccctgtactgttttgcctgtgaaattgtattctgatgccaggaatgttctatcaggcataattgattctcatgaaaacttaaaagaatttaaaggtgacctcattaaagtacttgtgtggatacttgttcaatactgctccaaaaggcctggcatgaaagagaatgttcacaacactgaaaataaagggaaagcacctctaatgttgcctgctttgaacactttgccacctcccaaatccccagaagacatagacagtttaaattcagaaacttttaatgactggtctgatgataatatttttgatgatgagccaactatcaaaaaagtaatagaagaaaaacatcagttgaaagatttgg

SEQ ID NO: 166855 - DNA, 760 bp, Homo Sapiens
ttaggttgcttcaagtctaactatcaaaggacacgccaagtgtgtggaatttgtcaagagctttaacctgcctatgctgatgctgggaggcggtggttacaccattcgtaacgttgcccggtgctggacatatgagacagctgtggccctggatacggagatccctaatgagcttccatacaatgactacttgaatacttggaccagatttcaagctccacatcagtccttccaatatgactaaccagaacacgaatgagtacctggagaagatcaaacagcgactgtttgagaaccttagaatgctgccgcacgcacctggggtccaaatgcaggcgattcctgaggacgccatccctgaggagagtggcgatgaggacgaagacgaccctgacaagcgcatctcgatctgctcctctgacaaacgaattgcctttgaggaagagttctccgattctgaagaggagggagaggggggccgcaagaactcttccaacttcaaaaaagccaagagagtcaaaacagaggatgaaaaagagaaagacccagaggagaagaaagaagtcaccgaacgaggagaaaaccaaggaggagaagccagaagccaaaggggtcaaggaggcaggtcaagtcggcctgaatggacctctccagactctggcttcctgctgagtccctcacgtatcttccacaaccctcagatttatataactattactctgtgtatctatataaaaatttattaatataaatatcccca

SEQ ID NO: 166856 - DNA, 539 bp, Homo Sapiens
tccccaccccctcaaatttaaattttcaatttttctgtgaatttatataaaattaattatatattaatatcccaggggacagaaaccaaggcccagagctcagggcagctgtgatggttgagctcttcaggagccaccttgccacccattcttcccgttcttaactttgaaccataaagggtgccaggtctgggtgaaagggatacttttatgcaaccataagacaaactcctgaaatgccaagtgcctgcttagtagctttggaaaggtgcccttattgaacattctagaaggggtggctgggtcttcaaggatctcctgtttttttcaggctcctaaagtaacatcagccatttttagattggttctgttttcgtaccttcccactggcctcaagtgagccaagaaacactgcctgccctctgtctgtcttctcctaattctgcaggtggaggttgctagtctagtttcctttttgagatactattttcatttttgtgagcctctttgtaataaaatggtacatttctatatcaaaa

SEQ ID NO: 166857 - DNA, 618 bp, Homo Sapiens
gtagactctatgaggatccccacgctgcacgaggtatgaatgcaggcgattcctgaggacgccatccctgtaggagagtggcgatgaggacgaaggacgaccctgacaagtcgcatctcgatctgctcctctgacaaacgaattgcctgtgaggaagagttctccgattctgaagaggagggagaggggggccgcaaggaactcttccaacgttcaaaaaaagccaagagagtcaaaacagaggatgaaaaagagaaagacccagaggagaagaaagaagtcacccgaagaggagaaaaccaaggaggagaagccagaagccaaaggggtcaaggaggaggtcaagttgggctgaatggacctctccagctctggcgttcctgctgagtccctcacgtttcttccccaaaccctcagattttatattttctatttctctgtgtatttatattaaaatttattaaatataaatatccccagggacagaaaccaaggccccgagcgtcagggcagctgtgctaggtgaagctcttccaggagccaccttgccacccattcttcccgttcttaactttgaaccgtcgtgcgagcatggggatactctagaacagatatgag

SEQ ID NO: 166858 - DNA, 612 bp, Homo Sapiens
gcagctctatgaggatcccccacgccgcacgagcggttcaaatgcaggcgattcctgaggacgccatccctgaggagagtggcgatgaggacgaagacgaccctgacaaggcgcatctcgatctgctcctctgacaaacgaattgcctgtgaggaagagttctccgattctgaagaggagggagaggggggccgcaagaactcttccaacttcaaaaaagccaagagagtcaaaacagaggatgaaaaagagaaagacccagaggagaagaaagaagtcaccgaagaggagaaaaccaaggaggagaagccagaagccaaaggggtcaaggaggaggtcaagttggcctgaatggacctctccagctctggcttcctgctgagtccctcacgtttcttccccaacccctcagattttatattttctatttctctgtgtatttatataaaaatttattaaatataaatatccccagggacagaaaccaaggccccgagctcagggcagctgtgctgggtgagctcttccaggagccaccttgccacccattcttcccgttcttaactttgaccgctcgtgcagcatgggggatcctcatagagacgaccgcag

SEQ ID NO: 166859 - DNA, 420 bp, Homo Sapiens
  misc_feature (153)..(154): n is a, c, g, or t
  misc_feature (175)..(175): n is a, c, g, or t
  misc_feature (204)..(298): n is a, c, g, or t
catcgcgcacgagcggttcaaatgcaggcgattcctgaggacgccatccctgaggagagtggcgatgaggacgaagacgaccctgacaaggcgcatctcgatctgctcctcttgaccaaacggaatttgggcctgtgaggaagagttctccgnnattctagaagaggagggaganggggggccgcaaggaactcttccaacttnnnnnnnnnnnnnnnnnnnnnnnnnnnnnnnnnnnnnnnnnnnnnnnnnnnnnnnnnnnnnnnnnnnnnnnnnnnnnnnnnnnnnnnnnnnnnnnagccagaagccaaaggggtcaaggaggaggtcaagttggcctgaatggacctctccagctctggcttcctgctgagtccctcacgtttcttccccaaaccctcagattttatattttctatt

SEQ ID NO: 166860 - DNA, 229 bp, Homo Sapiens
  misc_feature (58)..(72): n is a, c, g, or t
agttcaagggtgcagtgagctgagatcatgccagggccacagaatgagactttgtttnnnnnnnnnnnnnnngtgacttgatttaagggaaaaaatgactggctatattcagtcagatatggcaaaaagtctcaaggtgttaatgtgaatgattaaggtcttggggggggtgtcccctatcagactacaggtgtttagaggcacaagaaaaaggtgcagtgggctacgt

SEQ ID NO: 166861 - DNA, 568 bp, Homo Sapiens
tcaggtctctgtgataaatacagggggagaagagacagaaggaaagtatttccttacattacatttgaagtatttcaaaatgtaaacagagagtctctgagaagtatgattacaagtgatgattctattctttactatacttttctaggttaaccaaaaatgttcaaatgagatgagcttcacaatcaaaaaaatattttcaagaacttctgaaacccaggtaaaaatccaccttcgacttcctttagaatgacgtgactagcatagagctcaacatcggaaaaaagaagcggatagtgtttatggagaatgggttcctgtggagaaaaatggtgaagaaaacaaagatgatgataatgttttcagcagcatttgccctcagagcctgtggacatctctacagcaatgagtgaacgggcacttgctcagaaaagactcagtgagaatgcatttgatcttgaagccatgagcatgttaaatagagctgtctaggtatgttgccttttgatgaactcttcaaatcttccttatctttggcattttactttgggattatctttaaaaacta

SEQ ID NO: 166862 - DNA, 609 bp, Homo Sapiens
  misc_feature (469)..(483): n is a, c, g, or t
tagttacaagttaaggcttcaccacgctttccctgatgaatagttaagacatatttttaggccatcagcacaagattattgaataacttgtatgcgaccaacctgccgcttcccctcatcgataccagccgatgatcctgactattcccacttgctgagaaccctgtcagatgctgcgttcaagaatgaaatgtgtcctcaaaactgttctatccaatgtagtagctattggacataaaacaagtaatttatttcagactttagttttcatgaagtatttatcaacaacttcaatttattccaacattaatttatgataggacagttattaaaattaaccatttctgagactgtaactttgaaattgtaagaaatggacaattaagctcactagtcaaaattcttgattcaagtgatgatccaatagcttaccaatgtcttccataaactgagctttgaggcagaaccnnnnnnnnnnnnnnntctaaaacctctccatcccagcaccataatggaggctaagcaattatacctacacatccttaacgacaggtctctcctaatgaaaaatcctgagatttaagcactgtgacttacagaagacgttgg

SEQ ID NO: 166863 - DNA, 999 bp, Homo Sapiens
  misc_feature (536)..(536): n is a, c, g, or t
  misc_feature (813)..(850): n is a, c, g, or t
ggtggacagcatgattcaaagactacaacaggagcaagacctgagacgttctggtgaagcaggtatcagtaataccagccgtttaagtagaggctccataagttctacctcagaggttcattcaccaccaaacgtaggactaagacgtagtggacaaattgaaggtgtacggcaaatgcacagcaacgcaccaagaagtgaaatagccacagagcgggatctggtagcttggagtcgaagggtggtagtacccgagctatcagctggtgtagccagtaggcaagaagaatggagaactgcaaagggagaagaagaaataaagacttacaggtcagaagagaaaagaaaacacttaactgttccaaaagagaaataaatacccactgtctcaaagaatcatgctcatgagcatttcctggatcttggagaatccaaaaagcaacagacaaatcaacacaattatcgtacaagatctgcattggaagagactcctagaccctcagaagagatagaaaatggcagtagttcttcagatngaaggcgaagtagttgctgtcagtggtggaacatccgaagaagaagagagagcatggcacagtgatggcagttctagtgactactccagtgattactctgactggacagcagatgcaggaaataatctgcagccaccaaagaaagtttcctaagaataaaacaaagaaagcagaaagcagttcagatgaagaagaagaatctgatatacagaagcaaaaacagattataaaggaaaagaaataagtaaatgaagtaaaagatggaccaatatcaccnnnnnnnnnnnnnnnnnnnnnnnnnnnnnnnnnnnnnntggctgtgggagaactaactgaaaatggtttgacattagaagaatggttgccatcaacatggattacagataccattccccgaagatgtccatttgtgccacagatggatgatgaggtttattatttccaacaaggacatgaagcctat

SEQ ID NO: 166864 - DNA, 928 bp, Homo Sapiens
ccaaagtgaaaacgtgtatgtaaacatcataaagtaaacaattcacaggaatttcgaggcttctatctgaacatagcttaggctctttctggggctatttttatgattaggaaaaaaaatcccaaacttttataaagttcctttttgttaagaagtgcaattccacctgtgtgagacgcggctgggtctctctttcattcacaccagtgctgctggtaggaacctgttctagaagagcacttgtcgcaggggtggggtggggagccctatttggtacaacaaaagagtgcatctcaccacattaaaaatacacattcctggaaatttatatccctagaaggaactaggtccttggtacaatgccctgggatttctcgccccttcctgccagccctcaggtgacatgcagcttgggcagcccagtggacatggggcaggtgggtggaggtcaatgccttaacaactccagccctgaactgcagcatcagtatgaaaggaaaaggtacagtgtgtaagcacccatcacatttaccaccatcgagtgtctgctgtgactcagtccatggttttacacacacccggtcaggtccaaaagctaagcaccctttcttcctactaagaagggcctgtgccatataaaatcctgaatctccttttaatagatgcaagggctgaaagggcactggctgttactaatacagcacctggttaaatatctgttctctctttaattctcacttgtacaatcacctacaagctgcctcttctgaaatagcagttaggatatgttatgacatgcagaaaatacccaaatctagtgccaacaagcctcgtcctcttcctctagtcactcagggcctggtggggtatacttgttgcctcgtacggggggactcaggtggtacaagttgcggatcacgagttcact

SEQ ID NO: 166865 - DNA, 539 bp, Homo Sapiens
tgtactagaggatcccccttccggcgtgtgggtacacttcatgtatctggaacatctggcttattcaggtcctttgaactccttgtcttgatggaaggctaaacaatgcttaggtctggcccctccaacagattgactgttaataacagaaactgtagatggttgaactactagtgacttttttccccttttcccagttacaattatactttcagctaacatatgccagtttcacagaactattaagtccccttattgtactttttatggcatgcccatgaaaaagcactttcttaagcctacagtatcagatcaatgggaaaacaacagaaaactaagaggagaattttcccgttaattttcttgcagaaaagtataagtctaattgcccattgccataaattttgtcttgtactcatgagaagcaacatgcactggctcattttatgtgcaaagaaaagatttcactattaaaaaattaacttggctaggtatggtgtctcacacctgtaatcccagcactcagggtgggctacgtc

SEQ ID NO: 166866 - DNA, 1234 bp, Homo Sapiens
ctgaaccaagtgctcatgtacctgctcttctgtcttcaatcttcgtcttcttggcttggcttggaggctgtgatccatgtggtgtggcccgtgtggctcctgccttgatcctgtagaccaccaatcctcctgtatcttggagctgggagacaagcccgcgcccaacaccttctatgtaggcatctacatcctcatcgcctgtgggcgctgtcatgatgttcgttggcttcctgggctgctacggggccatccaggaatcccagtgcctgctggggacgttcttcacctgcctggtcatcctgtttgcctgtgaggtggccgccggaatctggggctttgtcaacaaaggaccagatcgccaaggatgtgaagcagttctatgaccaggccctacagcaggccgtggtggatgatgacgccaacaacgccaaggctgtggtgaagaccttccacgagacgcttgactgctgtggctccagcacactgactgctttgaccacctcagtgctcaagaacaatttgtgtccctcgggcagcaacatcatcagcaacctcttcaaggaggactgccaccagaagatcgatgacctcttctccgggaagctgtacctcatcggcattgctgccatcgtggtcgctgtgatcatgatcttcgagatgatcctgagcatggtgctgtgctgtggcatccggaacagctccgtgtactgaggccccgcagctctggccacagggacctctgcagtgccccctaagtgacccggacacttccgagggggccatcaccgcctgtgtatataacgtttccggtattactctgctacacgtagcctttttacttttggggttttgtttttgttctgaactttcctgttaccttttcagggctgacgtcacatgtaggtggcgtgtatgagtggagacgggcctgggtcttggggactggagggcaggggtccttctgccctggggtcccagggtggctctgcctgctcagccaggcctctcctgggaagccactcgcccagagactcagcttggccaacttggggggctgtgtccacccagcccgcccgtcctgtgggctgcacagctcaccttgttccctcctgccccggttcgagagccgagtctgtgggcactctctgccttcatgcacctgtcctttctaacacgtcgccttcaactgtaatcacaacatcctgactccgtcatttaataaagaaggaacatc

SEQ ID NO: 166867 - DNA, 710 bp, Homo Sapiens
  misc_feature (25)..(25): n is a, c, g, or t
  misc_feature (27)..(27): n is a, c, g, or t
  misc_feature (61)..(62): n is a, c, g, or t
gcacacatcatcagcaactctccangngagactgcacccagaagatcgatgactctctcgnnggaagcttgtacccatcggcaattgctgccatcgtggtcgctgtgatcatgatcttcgagatgatcctgagcatggtgctgtgctgtggcatccggaacagctccgtgtactgaggccccgcagctctggccacagggacctctgcagtgccccctaagtgacccggacacttccgagggggccatcaccgcctgtgtatataacgtttccggtattactctgctacacgtagcctttttacttttggggttttgtttttgttctgaactttcctgttaccttttcagggctgacgtcacatgtaggtggcgtgtatgagtggagacgggcctgggtcttggggactggagggcaggggtccttctgccctggggtcccagggtgctctgcctgctcagccaggcctctcctgggagccactcgcccagagactcagcttggccaacttggggggctgtgtccacccagcccgcccgtcctgtgggctgcacagctcaccttgttccctcctgccccggttcgagagccgagtctgtgggcactctctgccttcatgcacctgtcctttctaacacgtcgccttcaactgtaatcacaacatcctgactccgtcatttaataaagaaggaacatcaggcatgctaaaa

SEQ ID NO: 166868 - DNA, 1158 bp, Homo Sapiens
  misc_feature (47)..(220): n is a, c, g, or t
  misc_feature (746)..(746): n is a, c, g, or t
  misc_feature (1046)..(1046): n is a, c, g, or t
acggcggcgacggcggcgaccccaccgcgcatcctgccaggcctccnnnnnnnnnnnnnnnnnnnnnnnnnnnnnnnnnnnnnnnnnnnnnnnnnnnnnnnnnnnnnnnnnnnnnnnnnnnnnnnnnnnnnnnnnnnnnnnnnnnnnnnnnnnnnnnnnnnnnnnnnnnnnnnnnnnnnnnnnnnnnnnnnnnnnnnnnnnnnnnnnnnnnnnnnnnnnnatgggagtggagggctgcaccaagtgcatcaagtacctgctcttcgtcttcaatttcgtcttctggctggctggaggcgtgatcctgggtgtggccctgtggctccgccatgacccgcagaccaccaacctcccgtatctggagctgggagacaagcccgcgcccaacaccttctatgtaggcatctacatcctcatcgctgtgggcgctgtcatgatgctcgttggctgcctgcgctgctacggggccatccaggaaccccagtgcctgctggggacgatcttcacctgccctggccatcctggtttgcctgtgaggcgggccgcgggcatctgggggcctctgtcaacaagggaccgcgaatcgctcaaggaacgtcgcaagcaaccccccaactgaccattggccccctacaccccaaagccccgtggcttgggaaccgcaccgaaccgcaccaaacaaaaccgtaccaccgcgagcgggtgcggggcggaaagcaacctttatttctccccgcgcactcacncaccttttgccaactgggtataacggagggcgcgcctcccgcggttataccattatgacccgcggcccctttgacaacgcggccccaatcaaagaggtgccccaaccagggacgagcgcatttttttgatggaccccccgcgcgccgcgcctagttagagagacatcgcgcgcgcggcgtagactctggccgctctacacgcggaaaggacactctgcgcctcctatttcttgcagggaagtccggcttggggcgcgccgattcgataaaccgcgggccgcattctgtgtatacgcccgngaccgccgccgacccgggagggtgtgttcgagccagggggtgaccgggtcggcgcggctcgcctactgctctcccttgttcaccgcgcatgtgacttggaaccgcccgcctt

SEQ ID NO: 166869 - DNA, 512 bp, Homo Sapiens
  misc_feature (13)..(13): n is a, c, g, or t
  misc_feature (51)..(60): n is a, c, g, or t
  misc_feature (502)..(502): n is a, c, g, or t
gcccgcctaaaanaacgggaaaaatcccgaagggcccaaaaacgcctgtgnnnnnnnnnngttccgggtaaaaactctgctaaaacgtaacctttttaacttttgggggttttgtttttgttcctgaaactttcctgttacccttttcaagggctaacgtcacatgtaggtggcgtgtatgaagtggagacgggcctgggtcttggggactggagggcaggggtccttctgcccctggggtccccagggtgctctgcctgctcagccaggcctctcctgggagccactcgcccagagactcagcttggccaacttggggggctgtgtccacccagcccgcccgtcctgtgggctgcacagctcaccttgttccctcctgccccggttcgagagccgagtctgtgggcactctctgccttcatgcacctgtcctttctaacacgtcgccttcaactgtaatcacaacattccctgctccgtcatttaataaagaaggaaaatnaggcatgcta

SEQ ID NO: 166870 - DNA, 387 bp, Homo Sapiens
tcttcacattcattgatgactacctactgagcaatcaggagttgacccagcgtcgggagcaaagggacatatgcgagtgaacttgagccagggcatggttaaagtcaagggaaaagctcctctagttagctgaaactgggacctaataaaaggaggaaatgttttcccacagttctagggacaggactctgaggtgggtgagtttgacaaatcctgcagtgtttccaggcatccttttaggactgtgtaatagtttccctagaagctaggtagggactgaggacaggccttgggcagtgggttgggggtagaagttcttcctttcctaagcccggcccctgcccagctctccaaagtctttcagaaaagtaaatcctaaattcagtg

SEQ ID NO: 166871 - DNA, 380 bp, Homo Sapiens
ccaaggccatacctgcctagccctttggctccatcctgtggatgcccactcacccctcagactcctgctgcccatgctgtggccggacttgtcagcagggggcctggtgggaggagcgactgccctgcccaaatgaactgccacagcagggacagctggaccgcagagtttatttttgtatttctactgggcctgcacactccagcccaaagggtcctgtgcggaggccccacgagcaggccccagcagtcaccggctctggtcttgggccggccccggtgcccacctgtacccccacctcgcccatttggccgcgtgcactgagtgtcactttgctgcagctcgtttctttccaataaaagtttctgtgacttaaaaaa

SEQ ID NO: 166872 - DNA, 1022 bp, Homo Sapiens
cccccaagaggccccaaaaacccccgcggtggccttggttggggggcctctgcttcggtgggggcgcttcccgaccccgcgaaacccttttgggacttgaaagtttcaagggcccccgttagaaaatcccaaagattaacctttttggggtcccagctttcccttactgtggcaggttcctttggggcaggggcagtcgtttcttcccaccaggccccctggtgaacaagtcccgcccacaccatgggcaccaggagtttgaggggtgagtgggcatccacaggatgagccaaaggggctaggcaggtatggccttgggcagtgccagggactgtggcagcgccagggtctggccagcagctggggaggccccaggggcctctcagggtggacaggtccaggcattggttgaagctggatgaagctggggcctcggctcctcctcatcaaatacagatcactgggaccctgtcctcctccatggtgctggtctcctcggccccactgcccctgcttctgctttattcctccacctcctcctcccccagctccatgtccagctcgttgcctgcctctgagggtgtgtaggtggagccactgatggaacggcagctaaagaagacgattcgcttgagccgcttgttgtagaagaagtagttgaaggaccagaggctaccatcctccccgaagggatctgagtccaagtctgggttatagctgtagatgtcacattcagccaggcagatctcctcgtccaccgcgttccacagctgtggtttcagatccttgaagtcctcccgcacagctgagaacagactgcagttgactgcattcaccacccagctaaggctgggctcccggctgaactcatggctgcgggctgtgctgaagtcatagtcaggcctgaaggactcattgagcgtggcaatcaggtagaagagggtcttgcggctgcacttgtcactgagggggccctcctcctcaccgccttggcttttgctgagtctgctggggctcagtcc

SEQ ID NO: 166873 - DNA, 1238 bp, Homo Sapiens
tcccgcaaatcgccggttccgttgggggcccctgtccgcctgccaagggtgtgggtctctcttgggccccccctggcccgggggtgggcgtttgattgcctaccacctgcttcgtccccccaggttccaggtgccaggtttatttgccctgcctccgaggggggggttaggtgggaccccctgatggaccgccagctaaaagaagacgattcgctttgaaccgcttgttgtagaagaagtaggtgaaggaccagaggctcccctcctcccccgaagggatctgagtccaagttctgggttatagcagtagatgtcacattcagccaggcagatctcctcgtccacccgcgttccacagctgtggtttcagatccctgaaggtcctccccgcacagctgagaacagactgcagttgactgcattcaccacccagctaaggctgggctcccggctgaactcatggctgcgggctgtgctgaagtcatagtcaggcctgaaggactcattgagcgtggcaatcaggtagaagagggtcttgcggctgcacttgtcactgagggggccctcctcctcaccgccttggcttttgctgagtctgctggggctcagtcctgaagtctggggtggagaaagtgcctccagcacgtggggctggccctcctggcagaactgcttgaacatgtgtttgtcgtctcctgccatcttacatgagtagctctcaatcctgccaatgatgtgggcatctccggtctccacagtcagctgtgagttgatggcttcaaagctcgagttctccaatagcttcatgtctttggggaaggagctccgtgctccagaggggctagtattgcctgcctggctgggttagatcagccgcgccgggccgggtctggctgggctggtcgctccgcgtcggtgccggtgcgcaggcgggggcgggctccgcgcagcgcgggctcttcaagatcggagggcggcgccgcggcctccgctcgggccgcactgtatccgggggaagaagctccgcggcgacgtcccgttactcccggccctgccggcccatccgggctgccaccgcgacatagcctcgcccccttccacagagcccgctctcgcgaccgacctgccgccgaccgccacagagcgctccggcgagtcagcgagccgagcgagcgagcgagcgcggacgcgtgggtcgacgatatcccggaactccggaccggtaccagcaactttgg

SEQ ID NO: 166874 - DNA, 744 bp, Homo Sapiens
gccttagctgggtggtgaatgcagtcaactgcagtctgttctcagctgtgcgggaggacttcaaggatctgaaaccacagctgtggaacgcggtggacgaggagatctgcctggctgaatgtgacatctacagctataacccagacttggactcagatcccttcggggaggatggtagcctctggtccttcaactacttcttctacaacaagcggctcaagcgaatcgtcttctttagctgccgttccatcagtggctccacctacacaccctcagaggcaggcaacgagctggacatggagctgggggaggaggaggtggaggaagaaagcagaagcaggggcagtggggccgaggagaccagcaccatggaggaggacagggtcccagtgatctgtatttgatgaggaggagccgaggccccagcattcatccagcttcaaccaatgcctggacctgtccacctgagaggcccctggggcctccccagctgctggccagaccctggcgctgcacagtcctggcaactgcccaaggacatacctgcctagccctttggctcccatcctgtggatgcccactcacccctcagactcctgctgccatgctgtgtgcggacttgtcagcagggcggcctggtgggaaggagcgactgcactgccaaatgaaactgccacagcaggaacagctggaccgcagaagattattaacgtatttcctactgggactgcacactccaggcca

SEQ ID NO: 166875 - DNA, 728 bp, Homo Sapiens
ggctgatctagagtatccccgtagtcccaccagacctcggaggatgtatacaattatgtcttctgaggaagcagcaaatggaaagaaatcccactgggcagagcttgaaataagtggaaaagtaagaagcttaagcgcatctttgtggtcactaactcacctgacagctttgcatttgagtgacaattccctgtcccgaattccttcagacattgccaagcttcacaatctggtgtatttggacctgtcatctaataaaattcgtagcttacccgcagaactcggaaacatggtatcactcagggagctccatttaaataacaacctgttacgagttctaccttttgagctgggaaaactgtttcagttgcagactttaggcctgaaaggaaatccccttacccaggatatattgaacctttatcaggaaccgagatggaacaagacggctgctgaactatttgcttgataatttgtcaggtactgcaaaaagaattacaacagaacaaccacctccaaggtcttggattatgttacaagaaccagataggacaaggccaactgccttgttttctgtcatgtgctataatgttctttgtgataaatatgcgacccggcagttatacggctactgtccatcatgggcgctaaactgggactacaggaaaaaggcattattcagagatctgagctgaatgctgtatcgaaggctcaggggggggtacgac

SEQ ID NO: 166876 - DNA, 638 bp, Homo Sapiens
  misc_feature (100)..(160): n is a, c, g, or t
ccggtcccctcaggattactcgagatcttcacagaggaacttcttgaatcaaaaaaggggtcttgctcctcagaacaaaccagaattgcagaaggtgatnnnnnnnnnnnnnnnnnnnnnnnnnnnnnnnnnnnnnnnnnnnnnnnnnnnnnnnnnnnnntctgacttggaaatagagctattaaaacggcagcagaagttggagcagcttgaacttgagaagcagaaattgcaagaagagcaagaaaatgcccccgagtttgtgaaggtagaaatggcaatctcaggagaacaggccaagaagtcgcccaagcccaggagtcctaggctgaggctgcaccaagacctcgtgtgtcaccccacagagctgtctgtgggtgccttctcaatctcagggcaaaatgcccctggagaatatttcagccagcagagaattttgacttgcagtaggatttggtttgattttcctacgatctgggtggatgccttgcctgtgacagttgcagttcctattcgccaaatgaagggcagtgccccctgcacgtaagtaggaatgatggaccttgtgtacagagacttaacagaaccaacaagcaaaacaagtgagaaccaggaaaaaggaagaggacactggaatc

SEQ ID NO: 166877 - DNA, 750 bp, Homo Sapiens
  misc_feature (702)..(702): n is a, c, g, or t
  misc_feature (717)..(717): n is a, c, g, or t
ccgagcgggtcctgcacatctcacacacggagcgacattgaggacggtgtgtctgggagtgggtgagaggctgatggggtcgagacacaccactaccttcatcttgtggtttgcaggaacaaggaggagagagaagatagaacgcagagagcgagcacacctttcatcaaaaatctccactctctaggcacagcctcggtaacaccgaggacagctcacaactggacaagcagggaaaccccagctcagggaagccacactcatcagctctcttcctccccaacccagtgccaactgcaaagtgacccaggacggcctggctgctctgtcctcagcaggccctggggtgggtccactcccaacctgaaagtgtatcaagtctgaccccccaaccagggttgctggaacagagagcgaggtctcagaggcaggtgctggtgaagcatctctgggagacgggcagggagtgactctacgagcctggatccctgagcaggcaggctctccttctcacccttccccgatgcacccatcctcatggttggaattttcatcaaatcttgaggggtagggaggggctgagtgggatgcgggtagcctgctcctcagaggcagagagactctactgcctggcatagaaaaataaatcagtgtatgaaaccaagccaaggtcaaacggtcagctttaaaaaagtcatcttnccaataaataatttnactatagaggcaatatttttaaaggccaaaaca

SEQ ID NO: 166878 - DNA, 634 bp, Homo Sapiens
ctttcatcagaaatctccactctctaggcacagcctcggtaacaccgaggacagctcacaactggacaagcacactgagcaagtgcttcttttggagcattctggaactgtctgaaaggcacaaactggacaatatctctgatggccacttcgcccaatggggagcggagacttccaccatcaccatccagaaactccatggcgctgaagtcagcacctccaactccaacaattatgatggacataggcagcctggaggcattaactatagcttgtctggtttcatcaaggtctgtgatcacaccatcagtaataatcaaaagcacaaaatattgagaagctgtctgctgttgcgtggctgcagcagcaaacctggccacgtgatttatgattggagaaaaattagttggtccatagagttttatctgaggaagacaagaccgatacgcctctacaatgccttggattccattgcagtagggattggatgggttgaagttcattggaaattcatgtgatacctgccactgaggaggtatctgagcgccaaaaccaaaagctggaaacatcttatcagcatcataatcttgaatgaccagtccccgtggggtagaggtggggatcctctaatgca

SEQ ID NO: 166879 - DNA, 673 bp, Homo Sapiens
  misc_feature (268)..(268): n is a, c, g, or t
agttctgcgaaaagcggaatgcaagtatgcgtttacttaaaaagtaaaagggtctgtgtgaaacctatccctccgaacgagtttgaacccccggaatttgtttctccgaggattaccccggcaaggtaatgccccttcaagtatgatggtgaaggatgaatatgtgcatgctttgagggacagccatcgttgtccactgaaggacattcaattcaaaccatccagcatccaccaagtaatcgtgcatcgacagagacatacagcaccncagctctgttagccccatctgagtctaatgctaccagcactgccaactttcccaacattcctgtggcttccacaagtcagcctgccagtatacaggggggcagccatagtgaaggactgttgcagatagcatcagggcctcagccaggacagcagcagaatggatttactggtcagccatctacttaccatcataacagcactaccacctgaactggaagtaggactgcaccatacacacctaatttgcctcaccaccaaaacggccatcttcagcaccacccgcctatgccgccccatcccggacattactggcctgttcacaatgagcttgcatttccagcctcccatttccaatcatcctgctcctgagtattggtgttccattgcttactttgaaatggat

SEQ ID NO: 166880 - DNA, 464 bp, Homo Sapiens
attgtcagtatgcgtttgacttaaaatgtgatagtgtctgtgtgaatccatatcactacgaacgagttgtatcacctggaattgatctctcaggattaacactgcagagtaatgctccatcaagtatgatggtgaaggatgaatatgtgcatgactttgagggacagccatcgttgtccactgaaggacattcaattcaaaccatccagcatccaccaagtaatcgtgcatcgacagagacatacagcaccccagctctgttagccccatctgagtctaatgctaccagcactgccaactttcccaacattcctgtggcttccacaagtcagcctgccagtatactggggggcagccatagtgaaggactgttgcagatagcatcagggcctcagccaggacagcaccccagctctgttagccccatctgagtctaatgctaccagcactgccaacttttccgg

SEQ ID NO: 166881 - DNA, 684 bp, Homo Sapiens
ctcatagccgactccagaggatacacaacgcctcctgcaggctagagaagcagagccgcctgtgcatggtcaggccttgcgaagctgacctggaagagaacattaagaagggcaaaaagtgcatccgtactcccaaaatctccaagcctatcaagtttgagctttctggctgcaccagcatgaagacataccgagctaaattctgtggagtatgtaccgacggccgatgctgcaccccccacagaaccaccaccctgccggtggagttcaagtgccctgacggcgaggtcatgaagaagaacatgatgttcatcaagacctgtgcctgccattacaactgtcccggagacaatgacatctttgaatcgctgtactacaggaagatgtacggagacatggcatgaagccagagagtgagagacattaactcattagactggaacttgaactgattcacatctcatttttccgtaaaaatgatttcagtagcacaagttatttaaatctgtttttctaactgggggaaaagattcccacccaattcaaaacattgtgccatgtcaaacaaatagtctatcaaccccagacactggtttgaagaatgttaagacttgacagtggaactacattagtacacagcaccagaatgtatattaaggtgtggctttaggagcagtgggagcg

SEQ ID NO: 166882 - DNA, 540 bp, Homo Sapiens
gtctccggtaatccctagtcacgatgattgtacaagagcctacgtttgaattcgttgtcgtagtcgtagttgcctcctttgacaaggtgcgtatccgctatatcctagctcgagcggactggagatacgcatttggatttatgaagcgctcagatagttatttcataatgtgaaaggagttctataaaatacccagggtaatacaatatccacgatataacattcagttgataaaaaacaaagtgtatgacagtatagatgacatcctacttatattttttgaagcccgcagatattatatgtatgtatgtgctttacatgcctagagtatctctggcagtgagtgtaagaaatggatcaaaacaggtgcctccagggagaggtaatggggtgccggagtaaagagggaggcttaggttttccactagatacctataagcgcttcttaaatttggcaccatgtatgtattaagcattaacaataactgagtttaattaacagaaaagaaaagaaaaccagtgagcctatgaagtgttgat

SEQ ID NO: 166883 - DNA, 1135 bp, Homo Sapiens
  misc_feature (589)..(715): n is a, c, g, or t
  misc_feature (740)..(740): n is a, c, g, or t
  misc_feature (744)..(746): n is a, c, g, or t
  misc_feature (878)..(886): n is a, c, g, or t
  misc_feature (898)..(906): n is a, c, g, or t
  misc_feature (1045)..(1054): n is a, c, g, or t
gacccagacccagcaactggaaggaacggatgggcctctagtgacagatccagagacacacaagagcaccaaagcagctcatcccactgatgacaccacgacgctctctgagagaccatccccaagcacagacgtccagacagacccccagaccctcaagccatctggttttcatgaggatgaccccttcttctatgatgaacacaccctccggaaacgggggctgttggtcgcagctgtgctgttcatcacaggcatcatcatcctcaccagtggcaagtgcaggcagctgtcccggttatgccggaatcattgcaggtgagtccatcagaaacaggagctgacaacctgctgggcacccgaagaccaagccccctgccagctcaccgtgcccagcctcctgcatcccctcgaagagcctggccagagagggaagacacagatgatgaagctggagccagggctgccggtccgagtctcctacctcccccaaccctgcccgcccctgaaggctacctggcgccttgggggctgtccctcaagttatctcctctgctaagacaaaaagtaaagcactgtggtctttgcnnnnnnnnnnnnnnnnnnnnnnnnnnnnnnnnnnnnnnnnnnnnnnnnnnnnnnnnnnnnnnnnnnnnnnnnnnnnnnnnnnnnnnnnnnnnnnnnnnnnnnnnnnnnnnnnnnnnnnnnnnnnnnngaataaatgagaattttattaatantttnnncccgtggggggcgccgccctgcccccaaaaaattttcaaaaaccatctttgtttggcgcccggggcgccggagatctcccccacagaaaaaatgccttgtatccaagagaatgccgtgggccagaaacaaannnnnnnnnatttcccacccnnnnnnnnngccgtccccccgggaaacaaacaacggggttgcaaacaaaaactcccaaaagggggcctccccgaagcgaacaacctctgggggcccgaacaaaaggggggacctccacgaaaaaacctcttaagtgaaagcatttggnnnnnnnnnntccgggcccgcatatttacaaaaacgcggggagactactattcccggaaatatttttcccgccggacaacggaaagcccct

SEQ ID NO: 166884 - DNA, 436 bp, Homo Sapiens
  misc_feature (346)..(346): n is a, c, g, or t
gggcttaggacccccagctccgacatgtcgccctctggtcgcctgtgtcttctcaccatcgttggcctgattctccccaccagaggacagacgttgaaagataccacgtccagttcttcagcagactcaactatcatggacattcaggtcccgacacgagccccagatgcagtctacacagaactccagcccacctctccgaccccaacctggcctgctgatgaaacaccacaaccccagacccagacccagcaactggaaggaacggatgggcctctagtgacagatccagagacacacaagagcaccaaagcagcttcatcccactggatgacaccacggacgntcttttgagagaccatccccaaggcacagacgttccagacaggacccccaggaccttcaagccttttggtttttcatgagggtggaccct

SEQ ID NO: 166885 - DNA, 596 bp, Homo Sapiens
tctatgagtatcctggttacctggagagtgatcaactgcacctgagatcaagggccagctggtgaagctactgtcggtgcgcctgtgccccccagtgtctgggcaggccgccatggacattgtcgtgaaccccccggtggcaggagaggagtcctttgagcaattcagccgagagaaggagtcggtcctgggtaatctgccaaaaaaagcaaagctgacggaagacctgtttaaccaagtcccaggaattcactgcaaccccttgcagggggccatgtacgccttccctcggatcttcattcctgccagggctgtggaggctgctcaggcccatcaaatggctccagacatgttctactgcatgaagctcctggaggagactggcatctgtgtcgtgcccggcagtggctttgggcagagggaaggcacttaccacttcaggatgactatcctccctccagtggaggagctgaaaacggtgctgcagaaggtgaaagacttccacatcaacttcctggagaagtacgcgtgaggacgccggagccccagcgggagacctgtccttggctcttcctcccaatgcccgtcaggctgaa

SEQ ID NO: 166886 - DNA, 195 bp, Homo Sapiens
caccgtgacaaattggtcaggttcaaggtaaagacccatcagtggaagtcacacaggacctcattgatgaatctgaagaagaacgattggaagaaatgcctgaaactagtcatcgtgattgacctgcccacatgtgaactcaataaactggaagagaataaaagacgtaagagtagaaagaaaattctcttcaaa

SEQ ID NO: 166887 - DNA, 543 bp, Homo Sapiens
  misc_feature (23)..(23): n is a, c, g, or t
cctggccctagactgttcctganaatcctaaccctgggattacctaactgttgagcccatccttcccccaaagcagggaaacccactggtctctgactgccctttccccacaaacacagcacaaatgctaggcctctgttgcatggctgtacaaagaacataagagtccatatttcctagtggatttgtaaaataagtgtgtgtgagaacacttgcgtttgaagaaagatctagggtcctgggtctcttgcatttatatgtcagaaaaggggcgatatgctgctgaggggtgagtgcatatgagtgtggccctgaggaccagggctggcagatgttgtctacctgctgaagaataaaaatttcttttggtaatggggctgtcagatatttcccccaccccacatatgcctcatataaccagaggcatcactggaataacaatgacagggattggccaaaatttttcagggtaaccaggacagtagcacatgcctgtaccaacacttcagttgggtactcgggatcctctagacagcctcgagc

SEQ ID NO: 166888 - DNA, 1387 bp, Homo Sapiens
ggggtgtctgtcattggcactgctacaacccacctgagccctgagttagctgcccagagtgtgacacacattgtgcccctcttcttggatggcaacgtgtcctttctgcctgaaaacagcttcccgagcagattccagccattccaggatggctcctcagggcagaggcggctgattgcactgcttatggcctttgtctgctccctgcctcgaaatgtggaaatccctcagctgaaccaactcatgcgggagcttttggaactgagctgctgccacagctgccccttttcttccaccgctgctgccaagtgctttgcaggactcctcaacaagcaccctgcagggcagcagctggatgaattcctacagctagctgtggacaaagtggaggctggcctgggctctgggccctgtcgtagtcaggccttcactcttcttctctgggtaacaaaggccctagtgctcagataccatcctctcagctcctgccttacagcccggctcatgggcctcctgagtgacccagaattaggtccagcagcagctgatggcttctctctgctcatgtctgactgcactgatgtgctgactcgtgctggccatgccgaagtgcggatcatgttccgccagcggttcttcacagataatgtgcctgctttggtccagggcttccatgctgctccccaagatgtgaagccaaactacttgaagggtctttctcatgtacttaacaggctgcccaagcctgtactcttgccagagctgcccacgcttctttccttgctgctggaggccctgtcctgccctgactgtgtggtgcagctctccaccctcagctgccttcagcctctgctactggaagcaccccaagtcatgagtcttcacgtggacaccctcgtcaccaagtttctgaacctcagctctagcccttccatgactgtccggaatcgccgcactgcagtgcatgcaatgctctcactcgcctgcccacccctgtgctgctgccgtacaaaccacaggtgattcgggccttagccaaacccctggatgacaagaagagactggtgcgcaaggaagcagtgtcagccagaggggagtggtttctgttggggagccctggcagctgagccctcagtcctggcctagactgttctgacaatccaacctgggattactaactgttgagccatatttctagtggatttgtaaaataagtgtgtgtgagacacttgcgtttgaagaaagatctagggtcctgggtctcttgcatttatatgtcagaaaaggggcgatatgctgctgaggggtgagtgcatatgagtgtggccctgaggaccagggctggcagatgttgtctacctgctgaagaataaagatttcttttggt

SEQ ID NO: 166889 - DNA, 663 bp, Homo Sapiens
  misc_feature (628)..(628): n is a, c, g, or t
cgtgatgctgcggcgttctagaggatcccgccactgacagagcccttggttgctgctcagccctgtgtgttaatcctctagtagccaattaactactctggggtggcaggttccagagaatgcagtagacctttggccactcatctgtgttttacttgagacatgtaaatatgatagggaaggaactgaatttctccattcatatttataaccattctagttttatcttcctgggctttaagagtgtgccagggaaagtgataagaaatgaacttctaggctaagcaaaaagatgctggagatattggatactctcatttaaactggtgctctatgtacatgagatgtactaaaataagtaatatagaatttttctggctaggtaaatccagtaagccaataattttaaagattctttatctgcatcattgctgtttgttactataaattaaatgaacctcatggaaaggttgaggtgtatacctttgtgattttctaatgagttttccatggtgctacaaataatccagactactaggtctggtagatattaaagctgggtactaagaaatgttatttgcatcctctcagttactcctgaatattctgatttcatacgtacccaggnagcatgctgtttgtcaatcaatataaaatattatg

SEQ ID NO: 166890 - DNA, 784 bp, Homo Sapiens
acgacaatttgtacacctctgattgcacggaacattttatctggcgtcatatgtcatctgacaggaggcatcttgagtgatgattttcacattagatctcataagcctcttggttgtcttcagctttcagtttcctctaactcttcattattatcttctcctctttcatatcctccaagtacctgcatttctgcaatatttcttcgacctacatttgcttgttctctttgtctgcttcctgatcctcttgatgacattgagcttgaggaactgggatctctgggattatttgatgttggaaaagtaggtctacaataaggtagaatatcctcttggatgagatgagtctttgctggtggaaggtctcgttttgctgccttgtttccacgtcctttcccgtcattttgctgttcctgtgcttctctgggatcacctggatttgttcgcatgtcaacaacctgtcttccatccaacacttctctccccttgtaactgcttccttttctgtctgatgatctgtctgttcttgcatccatagaagggagttttggcaccactacaggtcgtacttccagctgtgtcttggattgggcagtaggtgactttatagcaggtggcggcacaggaggtggtggaagatcatctgcgtaggtttctctgcgcagatgtcctggctggtgtttcagtttcttggctggtctggttttctgcattacggcgacactcatgttgctgtctgtagacccgggacttgtgggcctagggactgagacgcatgaaagtc

SEQ ID NO: 166891 - DNA, 1342 bp, Homo Sapiens
  misc_feature (1214)..(1214): n is a, c, g, or t
tgcagagctgtctagagtatcctggtgataccgcaactgaatgtggcagtcgtgtctggaccgaggagccctcacatcggttgttgaggctatcgcaggagcggcgcgctgtgaattccattgccacagctcgtagaacaggaggtccactcggaccatggagaccagccatcgtccgcagagtcgctgggccaacagcgaggacagcattctccatcaggaactgtggcattggagcagggcatgatggggcaggacacctttttgcagatggtaactgagttctgacagtgacactcagtgcagctatcaacagtccattcctcgttatttctgtactgaactccgttgtgatagcataggggaggccgcctcagctcattggccaactctttgttctcttcagtcactttgcggatgctgtcctgcagcgtggtcacaatggtgcgcaggcccctgagttccaggaccatgctggacagctcatcacaggagatgccgcagatggcttgcaagtcctttgtcttgtggccaatgtagttagtgcggatggcagggctggaaccattcaccacgttgttgtcaagggtgaggaggacactggtagagctggagcagcctttgttcctgaggatgtcttctggtgtggttccaaagacaaacctcacattctgcagcaccccctggaaattgtcattgacgcccccctgttgcgatgcggagtctggcgatgctggccaggtctctggtgaagacgctttggatggggacgtccaactcagcattctccatcttttcacagtcgatgtacagctgggccctgtcatcctgcacaaacagggtgatgctcttccactggccggttgccaggagagcttcttccacagacaccacgtgctgctttccttggacggtcaggctgaggtccagggtgcccgccttgccattggacaccacgctgaagacctggccagagtggtctttccgctccagggccagcagcgtgccccgggtcttcttcatctgcctcagggatgccagaaaggaggaaaccctttttctgcccgcacagcatccaccaggtcttggaacttgtcatcaggcacaggggggatcaggttggcatcctcgatgcggaaagctgggctggaagggtcggggcccttcaccagtcggcgcccagaccccttgcgggcggccccggtgagttcaanagatgtcaaacacgctgttgtctccgccagactctggaatgcaggttggtgccacacacatgcatcaggaacagacgcctagtccccagccagccctggtgacgaatgggatcctcaagagcagctcg

SEQ ID NO: 166892 - DNA, 515 bp, Homo Sapiens
cgactcgtgaggatcccctctcatgtagggccggggcaccaatctgaacaaggcgatgacgctgctttaggccgaggccttcgtgggtgccgagcgctgcaccatgaagacgctgacggagaacgacctgtactgtgagcccccggaagttgcagcccccgcccaagcggcggcagaaacgagacaccacacacaaccctgcccgagttcattgtgaagttcggctctcgcgagtgggtgctggaccgcgtggagtacgacacacgggtgaagcgacgtgccgctcaagcctcatcttgccgctggtcatcgtgcccatggtggtcgccatcgcggtgtctgtctactgctactggaggaagagccagcaggccgaacgagagtatgagaagatcaagtcccagctggagggcctgcaggagagcgagcgtgaccgctgcaagaagaaattcacagacctgatgatcgagatgtcggaccagaccaacgacgtgcacgtggccggcatccccgtg

SEQ ID NO: 166893 - DNA, 215 bp, Homo Sapiens
cacattctcacctagcaacaactggctggaactgggcaccagctctgcctttagaaggggtgtccacttcaccaggtcaccacagcccacactacgccctatcacttcccacaatgaggctaagtgtttgtttctactgatcaatgcccctgcaggttgcatttattgtaatgaaaaagaaagactgggagtaatctctaatcaggtgggtacgt

SEQ ID NO: 166894 - DNA, 829 bp, Homo Sapiens
  misc_feature (694)..(694): n is a, c, g, or t
cccacctgatcgctggagcaccttctgaaggctctggagcactcaaaccagagttgagtcgaagatctgctactgaactttttgaggcatatagcatggcagaaacgacattcaatcctcctgttgaatcttcaaaccccaaaataaagggtaaatttttacaaggggattcatttttgaatgaagatttaaatcagctaatcaaaagatactccagtgaagttgctactgaatcgcctctggatttcacgaaatatttgaaaacatcactacactagtagaggaatgaagtcagtggactttcttgtatatttgtgtgtgcagatgtacataaagatgagttgttaacttaggatcttttctttttatacaaggaaagcttcctaagaatgtctaggaagaagaggaagaatgaccctttgcatggcacagggttctgcccctattctgaatatgtcattccatcaaggagatcaaaagcctttttttctccccagtatttggaaattactttcttgatgatgctgccttttaaaagcttcacgtacattatagttttttaaaaaaatctttggactggatcttactgaagtgcagttgctatattaaaattagggcatagagcacagaaaaatcaagaccatgagaagacattttaccatttagctactttttataactaaatactctttanatatttttatttcaatactgtggatggaaatgagaaacattctaaattttgagtaatatatttttatgaagatattttgggaaaggaaaaaatagccttgtattcaggttcattgggctttttgctggatgatcc

SEQ ID NO: 166895 - DNA, 301 bp, Homo Sapiens
acaccagactgtagtactctcaaatatacagctttggaaacggtagatgaaaaaacgctctactcagagttttggtcaagactgtgcctgggttgaagtatcagtcaattgcctacacttctaaacaataagtgccaatgtctcaattttctcaccctgaatgatagaagctagctttatcaaatgccaaggttagaaagcctggaaataaaacttaagcacagacattcaagtttttgaaaagcataagcctaaattcagataaatcacactgatatattgtactatgcatagaaagttg

SEQ ID NO: 166896 - DNA, 520 bp, Homo Sapiens
ctgaagtgtttagagtttcaaaacgaaaaagacaccatattgagaaatttctaataaatgacttaaaaatgattttggttggttcccttcccaagttttcccagagttctcatctatgttctacacaacatgtaaactcaaatgtacataaccaacagatgtactatacacacatcagatatcaatatatacttgtgaattaaagtccctgaaatatacacatccccacattaggatatatcctattacatacgcaaagcatcatcctctaacaataggtccgagatagcagcaatttgatattctattacccagttacctcagaaaatatcatagatcctgaatagtacctgatatggtatccctggcttcaagaactctccagtaacatttagcataggtctcatgaagcaccaggctacattgccaatagcaattatataatcctgtcataggagaaaaggttttatcctttcaaaacctcgttattcaaatctgactaatggtggcaatcaagcta

SEQ ID NO: 166897 - DNA, 800 bp, Homo Sapiens
ctgttcactgttacagacataatccacaagggtcaggtcactctcaaaagctcatcgtccgcctcatctggtgctcctgcctcctgcccaccacttgtcccattggaggctaggcttgcactggctgtgctgttgtccttgggggtctgagacttctcagtaggcttgccaatcaagttctcaatggcttttgccagggctctgtccattggttgaaggtaagtccactaagctatagtccaatgggctccccactttgcctacattttcaaagtcctcttcctcatcactttctatccggtagggcttcttggtgctctcttgttctgagggcaggaccctaggctggctgtcacgggcaggctgatttgcatctccatgagcattgtcacaactctcctcctcatccgtctcaatccggtgtagccgtttgcgggatggtttgccttcctcttcctcctcctcctcatctgcttctgaatactcgtctgtgcttcggccccgctttcgaactgaccgctttgattctttagctagctcatcatcttcagagttcttggacaaatagctctcttcactctctgagctggaaagtcttcgctcgtgaactcgccttaattagtgaccacgtcgcaaaatcttctgggaaccgtcactttctgagtcttcttagtagttaattagtcttttctgatttctccttgaccgccttcgacgagcatgtaacaaaatcatcactaaaatcatcactgaagtcagctgatcagagtctgctactattctcgcatcagattcctcga

SEQ ID NO: 166898 - DNA, 1011 bp, Homo Sapiens
  misc_feature (984)..(984): n is a, c, g, or t
gggcggtcggcgtggtcttgcgagtggagtgtccgctgtgcccgggcctgcaccatgagcgtcccggccttcatcgacatcagtgaagaagatcaggctgctgagcttcgtgcttatctgaaatctaaaggagctgagatttcagaagagaactcggaaggtggacttcatgttgatttagctcaaattattgaagcctgtgatgtgtgtctgaaggaggatgataaagatgttgaaagtgtgatgaacagtgtggtatccctactcttgatcctggaaccagacaagcaagaagctttgattgaaagcctatgtgaaaagctggtcaaatttcgcgaaggtgaacgcccgtctctgagactgcagttgttaagcaaccttttccacgggatggataagaatactcctgtaagatacacagtgtattgcagccttattaaagtggcagcatcttgtggggccatccagtacatcccaactgagctggatcaagttagaaaatggatttctgactggaatctcaccactgaaaaaaagcacacccttttaagactactttatgaggcacttgtggattgtaagaagagcgatgctgcttcaaaagtcatggtggaattgctcggaagttacacagaggacaatgcttcccaggctcgagttgatgcccacagggtgtatttgtacgagcattgaaagatccaaatgcatttcttttttgaccaccttcttactttaaaaccagtcaagtttttgggaaagcgagcttattcatgatccttttaacattttttggtgagtggctaaattgggcaatcattatggtccagttttttttccgaaattattaaaggaactttcatttgaatttcacctttgggccctggtttaccattgaaaccagggaaattattgggccacaacaaattgcgaaaacctaacctttttaaccttttttaatggggggaaaattggggccccgttttncctaaaaaaattttcaggggggaaaaa

SEQ ID NO: 166899 - DNA, 1895 bp, Homo Sapiens
  misc_feature (1227)..(1377): n is a, c, g, or t
  misc_feature (1379)..(1380): n is a, c, g, or t
  misc_feature (1382)..(1386): n is a, c, g, or t
  misc_feature (1401)..(1411): n is a, c, g, or t
  misc_feature (1456)..(1546): n is a, c, g, or t
  misc_feature (1554)..(1646): n is a, c, g, or t
  misc_feature (1678)..(1693): n is a, c, g, or t
  misc_feature (1711)..(1723): n is a, c, g, or t
  misc_feature (1744)..(1784): n is a, c, g, or t
gggggagtgtccgctgtgcccgggcctgcaccatgagcgtcccggccttcatcgacatcagtgaagaagatcaggctgctgagcttcgtgcttatctgaaatctaaaggagctgagatttcagaagagaactcggaaggtggacttcatgttgatttagctcaaattattgaagcctgtgatgtgtgtctgaaggaggatgataaagatgttgaaagtgtgatgaacagtgtggtatccctactcttgatcctggaaccagacaagcaagaagctttgattgaaagcctatgtgaaaagctggtcaaatttcgcgaaggtgaacgcccgtctctgagactgcagttgttaagcaaccttttccacgggatggataagaatactcctgtaagatacacagtgtattgcagccttattaaagtggcagcatcttgtggggccatccagtacatcccaactgagctggatcaagttagaaaatggatttctgactggaatctcaccactgaaaaaaagcacacccttttaagactactttatgaggcacttgtggattgtaagaagagtgatgctgcttcaaaagtcatggtggaattgctcggaagttacacagaggacaatgcttcccaggctcgagttgatgcccacaggtgtattgtacgagcattgaaagatccaaatgcatttctttttgaccaccttcttactttaaaaccagtcaagtttttggaaggcgagcttattcatgatcttttaaccatttttgtgagtgctaaattggcatcatatgtcaagttttatcagaataataaagacttcattgattcacttggcctgttacatgaacagaatatggcaaaaatgagactacttacttttatgggaatggcagtagaaaataaggaaatttcttttgacacaatgcagcaagaacttcagattggagctgatgatgttgaagcatttgttattgacgccgtaagaactaaaatggtctactgcaaaattgatcagacccagagaaaagtagttgtcagtcatagcacacatcggacatttggaaaacagcagtggcaacaactgtatgacacacttaatgcctggaaacaaaatctgaacaaagtgaaaaacagccttttgagtctttctgatacctgagtttttatgcttataatttttgttctttgaaaaaaaagccctaaatcatagtaaaacattataaactagnnnnnnnnnnnnnnnnnnnnnnnnnnnnnnnnnnnnnnnnnnnnnnnnnnnnnnnnnnnnnnnnnnnnnnnnnnnnnnnnnnnnnnnnnnnnnnnnnnnnnnnnnnnnnnnnnnnnnnnnnnnnnnnnnnnnnnnnnnnnnnnnnnnnnnnannannnnngagaagtgcgcccgnnnnnnnnnnnacaaaaaaattttttacaacctttgtgggggggccgggccccccnnnnnnnnnnnnnnnnnnnnnnnnnnnnnnnnnnnnnnnnnnnnnnnnnnnnnnnnnnnnnnnnnnnnnnnnnnnnnnnnnnnnnnnnnnnaccgcccnnnnnnnnnnnnnnnnnnnnnnnnnnnnnnnnnnnnnnnnnnnnnnnnnnnnnnnnnnnnnnnnnnnnnnnnnnnnnnnnnnnnnnnnnnnnnccccccggcggcttattaaaaataaaaatttnnnnnnnnnnnnnnnngccgctttattggggagnnnnnnnnnnnnnaaaaaatattaaaaacatctnnnnnnnnnnnnnnnnnnnnnnnnnnnnnnnnnnnnnnnnnagtgagaaaaacacttgtaacacccgcggcgggaaacacccaccccaccttgtgggcgccctgtgggaaaaataacatactcgccccccccgggggaaaaaacacgggcgg

SEQ ID NO: 166900 - DNA, 460 bp, Homo Sapiens
agaacaccttatgtctaacccactcttatgttctgaccgtccgtcgaccgctcgcgtcgcatttggccgcctccctaccgctccaagcccagccctcagccatggcatgccccctggatcaggccattggcctcctcgtggccatcttccacaagtactccggcagggagggtgacaagcacaccctgagcaagaaggagctgaaggagctgatccagaaggagctcaccattggctcgaagctgcaggatgctgaaattgcaaggctgatggaagacttggaccggaacaaggaccaggaggtgaacttccaggagtatgtcaccttcctgggggccttggctttgatctacaatgaagccctcaagggctgaaaataaatagggaagatggagacaccctctgggggtcctctctgagtcaaatccagcggtcgacggacggggatcctcctagagtc

SEQ ID NO: 166901 - DNA, 956 bp, Homo Sapiens
  misc_feature (497)..(498): n is a, c, g, or t
  misc_feature (503)..(520): n is a, c, g, or t
  misc_feature (533)..(596): n is a, c, g, or t
  misc_feature (611)..(659): n is a, c, g, or t
  misc_feature (689)..(689): n is a, c, g, or t
tgccgagctggctccggggcaccgaccgctataaggccagtcggactgcgacacagcccatcccctcgaccgctcgcgtcgcatttggccgcctccctaccgctccaagcccagccctcagccatggcatgccccctggatcaggccattggcctcctcgtggccatcttccacaagtactccggcagggagggtgacaagcacaccctgagcaagaaggagctgaaggagctgatccagaaggagctcaccattggctcgaagctgcaggatgctgaaattgcaaggctgatggaagacttggaccggaacaaggaccaggaggtgaacttccaggagtatgtcaccttcctgggggccttggctttgatctacaatgaagccctcaagggctgaaaataaatagggaagatggagacaccctctgggggtcctctctgagtcaaatccagtggtgggtaattgtacaataaattttttttggtcaaatttaaaanncaacnnnnnnnnnnnnnnnnnncccaacaccccannnnnnnnnnnnnnnnnnnnnnnnnnnnnnnnnnnnnnnnnnnnnnnnnnnnnnnnnnnnnnnntttccccatccactnnnnnnnnnnnnnnnnnnnnnnnnnnnnnnnnnnnnnnnnnnnnnnnnnttcccacccctacaccccacacccttccancctctttccgttcgccccctccgacgccccgtataaaaaacccgtccccaccctacatttggcccgcgcgcccccgcagttccgctttccgcacccccggccggtgggagagcatatctcccgccacaacacacccgccgctacacaataccccctccggtagtggtttcccctccagaccacacaaccccccgcggtgggccaccccccgcctctatcacggaagaacagctaccccacagggtaccccttagcaccgaaaatcca

SEQ ID NO: 166902 - DNA, 482 bp, Homo Sapiens
gggccctcgaccgctcgcgtcgcatttggccgcctccctaccggccctctgctgccagctccaagcccagccctcagccatggcatgccccctggatcaggccattggcctcctcgtggccatcttccacaagtactccggcagggagggtgacaagcacaccctgagcaagaaggagctgaaggagctgatccagaaggagctcaccattggctcgaagctgcaggatgctgaaattgcaaggctgatggaagacttggaccggaacaaggaccaggaggtgaacttccaggagtatgtcaccttcctgggggccttggctttgatctacaatgaagccctcaagggctgaaaataaatagggaagatggagacaccctctgggggtcctctctgagtcaaatccagtggtgggtaattgtacaataaattttttttggtcaaatttaccagcgccgagggagaccgcaacaaaaacatgt

SEQ ID NO: 166903 - DNA, 813 bp, Homo Sapiens
  misc_feature (545)..(545): n is a, c, g, or t
  misc_feature (699)..(711): n is a, c, g, or t
atgttgttggatggagttgaagtgagcagtccacactctccacacatctagtgatcaagtggactattcgccaccatggctacgatagctgtatcagctgtgatcatgaaccctcacatttgcgagggaaggcagagggagtccctccctaccaggtgttcattgccttccctctttattattaacccctttcatagaagaatcatgctgaagcctagaggtgtgggatatttggcacaaacctatgctggagcaacaaggggagccaggcttggaactccatttgtctgattccagagactgcactcccctgccagtacttgatcctccccacagccgccgtctctccaagtcaaaaggcccctgaagttctccctcactctgtatcaagtggcaaaagccccaggttccaggcctgttcacggacctcccgacagaatctcctgcagcttttctcttgctcctgcttttactgggaattataactatttcagcagtttaagtgtttgaaggaagctttctctacgtatctttcctccctctgngaacaggattgctttactcatcacagggaaggccttaaatgaccttctggtacatccacagattttatttcatctctctccattagaaataaagatgaagcgcagaccatggtttctgagttctcttagtctccacagaatgtaattactacannnnnnnnnnnnnctaatcacaggagacttctctcagcaacctagttactgattctattaatccctcactctccacttccaactgctctttgaagcggaataatttccctaaaaa

SEQ ID NO: 166904 - DNA, 241 bp, Homo Sapiens
tagccaccctgtatttcaaaatgggggaccagaactcccggaagaaacaagctctgaacagactacgtgctcagcttagaaagaaaaaagaatctctagctgaccagtttgacttcaagatgtatatggccttggtattcaaggagaagaagaaaaagtcagcactttttgaagtgtctgaggttataccagtcatgacaaataattatgaagaaaatatcctgaaaggtgtgcgagattc

SEQ ID NO: 166905 - DNA, 1148 bp, Homo Sapiens
ggttccctagagcttttacagaaggatgtggtacagctccatgctcctcgatatcagtctatgagaagggatgtaattggctgtactcaggagatggatttcattctttggcctcggaatgatattgaaaaaatcgtctgtctcctgttttctaggtggaaagaatctgatgagccttttaggcctgttcaggccaaaatttgagtttcatcatggtgactataaaaaacagttcctgcatgtactgagccgcaaggacaagactggaatcgttgtcaacaatcctaaccagtcagtgtttctcttcattgacagacagcacttgcagactccaaaaaacaaagctacaatcttcaagttatgcagcatctgcctctacctgccacaggaacagctcacccactgggcagttggcaccatagaggatcacctccgtccttatatgccagagtagagtactgaccagcaaaatggagaagatcagagaatgcagcagcagttttttttcttgttttcttaccactttattctttcagagtttaaagaaaatggactcatgcacagaacactatgcatttggaaacttgttcatcctggatttttttaaatcatttttatctcagaacttaaacaaaaattagatgtcgtgcacggactgtgtgaaagaagatgctttgcatatttgctgcactgcatcagtatcttactaaaaatgtgaacatgaaaggactattgtacactgaaatgcttaaatgtatctgaaagcacaaggtgatactcatttttatggtcttcccatttgtgctggttttgcctcttggacatctgtcatcagtatttagagggtgagaagtgaatgtaacaggtataaataacatgtttaaaaacaataactttgctataatcacagttgttccagagcactgtcagatacattctaatgaccagaactggtttacaaacacgacaaatacaaccatgtggaaacgaaatcttaaatgacaagaacgcatctcataggtaggccattttgcctcatatttaactgggccatgtttgttcctggtactccatgtattaaatttcccgatctctttcccaagttgctattgtaagagtatctgctgcgtgtggattgcagtatacac

SEQ ID NO: 166906 - DNA, 453 bp, Homo Sapiens
  misc_feature (157)..(165): n is a, c, g, or t
gtcctctacctatcatggtttctgcagctatgcatgtatttctgttttatagctgctttatagctacttcagactccagatctgctttaatgtgtataactgcatccacacgcagcagaatactcttacaatagcaacttggggaaagagatctggnnnnnnnnntacatgagtaccaggaaacaaacatggcccagtaaaatatgaggcaaaaatgcctacaatgagatgcgtttttcatttaagatttctttcccatggttgtattttctttttttaaaccagttctggtcattagaatgtatctgacagtgctctggaacaactgtgattatagcaaagttattgtttttaaaaatgttatttatacctgttacattcacttctcaccctctaaatactgatgacagatgtcaaagaggcaaaaaccagcacaaatgggaagaccatacc

SEQ ID NO: 166907 - DNA, 806 bp, Homo Sapiens
ggagatgaggctctcactccaggtgatgaatgcatggatgggatactggatgaatctttgcttgaaacctgtccaattcagtcaccattacaagtttttgcaggaatgggtggactggctcttattgctgaaagactacccatgctatatccagaagtaattcaacaggtgagtgctccagttgtaacatctaccactcaggaaaagccgaaggatagcgatcagtttgaatgggtgaccattgaacagtcaggggagttagtttatgaagcaccagaaactgttgcggctgaacctccacctatcaagtcaagcagtacagaccatgtctcccatacctgcccattctttggctgctttttggattatttcctcgtcttccgggctatgcggaagtgctactgaaagagagaaaacatgcccagtgccttcttcgattggtattgggagtgacagatgatggagaaggaagtcatattcttcaatctccatcagccaatgtgcttccaaccctttccgttccacgtcccttcgtagcttgtttagcactacaccctttgaccactgatgatggtgtacttctaaggcggatggcattgggaaattggagccttacaccctcattcttgtctgtctctctgctttgagccaccattccccacgagttcccaactctagcgtgaatcaaactgagccacaggggtcaagctctcataaccctacatcaacagaagaccacagttatattgggccaaagggactggctttggacagatacagactccagttgcgtatcaccaggttac

SEQ ID NO: 166908 - DNA, 249 bp, Homo Sapiens
tagccacctgcagtgtgatgttacccagcccacacaagcctgagtgcagtggcagacctcagctctctggacccctcctacagcactagagctaaatcatgaagttgaattgtaggaatttaccaccgtagtgtatctgaatcataaactagattatcatagttatctagtttatgagtcataagctagatttgattcttcaaagaagaaaagtcagtgagcaaatttaaaccagaactaagcattata

SEQ ID NO: 166909 - DNA, 971 bp, Homo Sapiens
  misc_feature (194)..(260): n is a, c, g, or t
  misc_feature (463)..(463): n is a, c, g, or t
  misc_feature (477)..(477): n is a, c, g, or t
agccttgtatttctactccgaagaggagcaggagagagtgaacagcctctaactagcaccaaatgctgggcaaagaaaacgcccctttttctggtgtgttttcccaaatcttttatcttcagtttcctgggtgggaatgagccacacagggtgagcccaggctggatcctgagcctaattccattcttggcatnnnnnnnnnnnnnnnnnnnnnnnnnnnnnnnnnnnnnnnnnnnnnnnnnnnnnnnnnnnnnnnnnnnttcctatttcaaaaatgtattcagacttggagcctaggcagtgaaaggtgggaatggtggttacttcatcatttcggtaaattgtcacagccatttgaatttcagctaaagcgacattctcatttggacaagagatcagtatcaaaagacattggatcagagggttccaaacatactggtgaaaggagaaaatccattggtcnattattcctctttntctgtggggatgccctcatctccccaaaggatttggaacattggtgatgccaccttaagcaaaaccaagtcgccctgggtcaagatcttaagagttcatgttaccttcaacatagccagtctagccaattaccagtgctttcttctgatagagaggagactgcctggctagcttgagatgtaggaatgagaacttcaagacccaagtgagaatgcacatccatcacacggcagggctccttcgcattttcctctcctgacttcagatttgtctcctgacaacacccctagtacttagtgttgaaatgagtcacgccgagtggattaggcaggtacaatataaactctgaaagcagggattatggctgattgagctttgggtccctcagtgtccagcaggtgcttcatccaggtttgctaactgaatctgaaatctttagggtctgcagggtgctccatactcgtatcccgtgctggcactacccgttctctcat

SEQ ID NO: 166910 - DNA, 452 bp, Homo Sapiens
  misc_feature (271)..(271): n is a, c, g, or t
  misc_feature (414)..(414): n is a, c, g, or t
ttgatgaagcacctgctggacactgagggacccaaagctcaatcagccataatccctgctttcagagtttatattgtacctgcctaatccacccggcgtgactcatttcaacactaagtactaggggtgttgtcaggagacaaatctgaagtcaggagaggaaaatgcaaaggagccctgccgtgtgatggatgtgcattctcacttgggtcttgaagttctcattcctacatctcaagctagccagggcagtctcctctctatcagaagnaaagcactgggtaattgggctagactgggctatgttgaaggtaacatggaactcttaaggatcttgaacccaggggcgacttggttttggcttaaggtgggcatcaccaatgttccaaatcctttggggggagatgaggggcntccccacaggaaaaaggagggattattaggaccattgg

SEQ ID NO: 166911 - DNA, 2545 bp, Homo Sapiens
  misc_feature (140)..(140): n is a, c, g, or t
  misc_feature (658)..(730): n is a, c, g, or t
  misc_feature (820)..(837): n is a, c, g, or t
  misc_feature (975)..(995): n is a, c, g, or t
ggcttctgcggtctcccgcgcgccgcgcattgccgtacctgccacaagacgataggacgcgcgtcgttcgaccgacgaccggctgcctgcggtgcgcgccgccccgcccgttacactccccgtcggcaggaggcgcgcanatagcggctatctgtagcgccacggcgcggcgcgccgacacctacgcggtggcgatgagatactgccacagggtctggtggcggggaggcggcggaggtctgacacacgtcacgggtccggcgctgaggtgtgtagaagggggcgctttccgccgtgtcgggtggggcagtgtagatacagcccctcgtccccgcccatcgtgcggcgcgtcggcgccgtgtgagcgggcgcgcgggcggaaagctgtgcaccatgcagcgcgccggggagagtgcatgaaaattgtgtggggtataattggcgaggagagcgcgctacgcggatggcgagcttgcacgggaagtggagcaaacaaatctcgcgggttcaagaggaggacctgtggggagggggtcccgcgtgaaaaagaaagtttggttggcacccaaccaccgtgcccggtttggcaccgccccggcgcgtggtgttgtgatgtggtggggggaaggcgcaaggcgggctcggcgcatgggccgcnnnnnnnnnnnnnnnnnnnnnnnnnnnnnnnnnnnnnnnnnnnnnnnnnnnnnnnnnnnnnnnnnnnnnnnnngaaaagaaatgtgtttgagaaaactttctccgggggcgggagggggccggacaagcaacgctcgcggtgctggggccgcttatttccccnnnnnnnnnnnnnnnnnntattgtggtgttttcaagtttcaatcatttaattaacatctttaaatgaaacacagttttcttcatgtgtctcactcaggcttcagggcagagggaatggatttttagacatatcaaagactcaaaaatttaaagaannnnnnnnnnnnnnnnnnnnncttctaacattttatggaaattaaaaatcagaggcttttggtctctccatttactctaggtcaagctcatttaccccagaggacaaagaagggctgcctcttctagaccctcccttctcctttgtcctctgtcccacccagcagggaaacaagctcagaagatcctaacaggatagagttccagtaatgttggaggagggacagggaaacagaagtcaggttctctaccacctccagccattcccaggttgctgccagggcctggtttcatgcagctttgacccagtcctggatcctagggggtggggtagatcaggagctctgagcagaacagtgctcactgattatcctctttccccaactcagtgggcaggtgcagcgtacacccagcagcactctccactgcccacaggcaagggaagaatattgattgattagctacaaggagaagacagtagtgactagtggaaaacaccctggagagggccagaggaacctggctctcaccacatcccctctgttcccagccttggtgagggggcggggaggtcatgtcaacctctctccttggtggtgaagctaaaagcaaggttccttgccagactcaagcccaagtcactgttaagggaaagaggatcaagaaagaagcggtggccctggggggcagccacgctgctgtggacccacaggggccaatggggaagccagcttgcctagacaggtggcacaggctgaaaatagaaaggttaacattcccggagagtacagtaagagaggctgatacctaggggaccaccacccagcctgccccagaagcactgggtgcccctcattgactagagaagacttgagtaaaatgcacctgtggcttcccatccttgtcactcagcgttagctgcccccagtggaaccacctgtgctgaaaggcagctgcagaaaggacatgcaccgaaatgaggagagagaaaggtcagagaatgaagtgtggagggccaggcctgggcccactgctcaaggaagctccccccctccagatgcgtgccttccatccacctcctcagtgcttgctcagcccaaaggctcctgcctctgaagtgctgggggcccacccaccccagtgtggtcaaggaggcaaggggcaggtgcttgacactgccaagtgccccgagatgactctactgctcacccatttctttgggccctggcagtctcctacttgtccccagcatggagcacctggcagaactggaaggcaggagggtggttggtgagttgaggcacaggaaggccaatcccctctgcaccttttgtgctttggaattccacagccccacacctgcccccagcctagagaagcctgtgggaacacaatgacttggccaccttcaggaaccaagaggagtaaactggactgggcaggagggcacagactggtcccaagctatgggctgactgccggggatggattctgctgccatgtaaacaggcccttggaatgcaacttcctgggccctggaggatggccatgcagaaatcttttcaaaagtgcc

SEQ ID NO: 166912 - DNA, 828 bp, Homo Sapiens
acccacctgggctgacaccaatgccacagtcagcttcctttctgcacactgtgccttctcacccttgcgtggtttggtgacagtctcaccagtctctcttcagaggctacagatccagctccctcgattccgtgaatcagctactccgctatctgagagagctgcccctgcttttccaccagaatgtgctgctgccactgtggcacctcttgcttgaggccctggcctgggcccaggagcactgccatgaggcatgcagaggtgaggtgacctgggactgcatgaagacacagctcagtgaggctgtccactggacctggctttgcctacaggacattacagtggctttcttggactgggcacttgccctgatatcccagcagtaggccctgccttcctggccactgatttctgcatgggtagaccatccaagactgcagcgggtagaaggtggcagttcttcatgggagtctttttaacttggtgcctgagttctctcctaggcaagtggccagttgcctccacctcagttcttccatctttggtggggacagggcccagcagcatctcagcctcctacccacaattccactgaacacttttctggccctactgcacatggcccccagcctccatccttgttgctggtagcctctcacaactccgaccttgccctctgccttcccactttccttccatctccatttcttaaacccccaaacagctcaatcttcttacaaaggattagaatcccaaggaagtggctttctggggtcctctggaccaatgagtcccgggttcttccaagactttggacgcttctgttcc

SEQ ID NO: 166913 - DNA, 798 bp, Homo Sapiens
  misc_feature (50)..(50): n is a, c, g, or t
  misc_feature (79)..(80): n is a, c, g, or t
  misc_feature (97)..(97): n is a, c, g, or t
  misc_feature (105)..(105): n is a, c, g, or t
  misc_feature (375)..(375): n is a, c, g, or t
  misc_feature (401)..(401): n is a, c, g, or t
  misc_feature (417)..(417): n is a, c, g, or t
aggaggggggcttaggagggcatttgggggcagggctggggcatttttgnaagtgagagggcattttccatccagctcnnccatgtccactgacagnccaccacncaggcttcaggtggaggtgaggctgctgtttcccaatgcggtgctatattcttctggaagcccctttccttctgctgtggctagagctgtgaccaagaatgggaacaggaggctgctaaagtctggaaaagcaggaatcatttgtcagaagaacacagaagccacctgctgggagttctatctttttagagatgagctgtttggggtttagaaatgagatggaaggaagtggaaggcagagggcaagggacggagttgtgagaggactanccagcacaaggatggaggctgggggnccatgtgcagtagggnccagaaaagtgttcagtggaattgtgggtaggaggctgagatgctgctgggccctgtccccaccaaagatggaagaactgaggtggaggcaactggccacttgcctaggagagaactcaggcaccaagttaaaaagactcccatgaagaactgccaccttctacccgctgcagtcttggatggtctacccatgcagaaatcagtggccaggaaggcagggcctactgctgggatatcagggcaagtgcccagtccaagaaagccactgtaatgtcctgtaggcaaagccaggtccagtggacagcctcactgagctgtgtcttcatgcagtcccaggtcacctcacctctgcatgcctcatggcagtgctcctgggccccc

SEQ ID NO: 166914 - DNA, 732 bp, Homo Sapiens
  misc_feature (211)..(589): n is a, c, g, or t
acgtggcccaccttggaacaagttccttctcgaggcctttgaagtgagcaccagaggccttcctcctccagggccctctgcagaccaggctgagatggagcaacctgctaaaatcgatggagatgcttctagcctcccagtaggaggccccagccatgccttcaacctggcaggaggtgtagccactcctcatcctccctgagtgctgatnnnnnnnnnnnnnnnnnnnnnnnnnnnnnnnnnnnnnnnnnnnnnnnnnnnnnnnnnnnnnnnnnnnnnnnnnnnnnnnnnnnnnnnnnnnnnnnnnnnnnnnnnnnnnnnnnnnnnnnnnnnnnnnnnnnnnnnnnnnnnnnnnnnnnnnnnnnnnnnnnnnnnnnnnnnnnnnnnnnnnnnnnnnnnnnnnnnnnnnnnnnnnnnnnnnnnnnnnnnnnnnnnnnnnnnnnnnnnnnnnnnnnnnnnnnnnnnnnnnnnnnnnnnnnnnnnnnnnnnnnnnnnnnnnnnnnnnnnnnnnnnnnnnnnnnnnnnnnnnnnnnnnnnnnnnnnnnnnnnnnnnnnnnnnnnnnnnnnnnnnnnnnnnnnnnnnnnnnnnctgtctcggctgttgtgggttgcaggttgggtgctgctgttgtggtccttcccagaaactgccagtagagggcagcctgggcatcctaatgcttactctggttgttacacaaagaaccatatcggggtcactggcgagccacc

SEQ ID NO: 166915 - DNA, 1308 bp, Homo Sapiens
  misc_feature (723)..(723): n is a, c, g, or t
ggggcttccggcacagcggaactccgggtgccggttgaggttgctggtggaccgtgctctggtggtcttggatgaggccccatgagcgcggcgcccctggtgggctacagcagcagcggctccgaggatgagtccgaggacgggatgcggaccaggccgggggatgggagccaccgtcgtggccagagcccccttcccaggcagagatttccagtacctgacagtgtgctgaacatgttcccgggcaccgaggaggggcctgaagatgacagcacaaaacacgggggacgggtgcgcaccttcccccacgagcgaggcaactgggccacccacgtctatgtaccatatgaagccaaggaggagttcctggatctgcttgatgtgttgctgccccatgcccagacatatgtcccccggctggtaaggatgaaggtgttccacctcagcctgtcccagagtgtggttctgcgccaccactggatcctccccttcgtgcaggctctgaaagcccgtatgacctccttccacagattcttctttactgccaaccaggtaaagatttacaccaatcaagagaaaaccaggacctttattgggcttgaggtcacttcagggcatgcccagttcctggacctggtttcagaggtggacagagtcatggagggattccaacctcaccactttctaccaggatccttctttccacttcagcctggcctggtngtgtgggtgatgcacgtctccagctggaggggcagttgcctgcaggaactacaggcaatcgtggatgggtttgaagatgctgaggtgctgctgcgcgtgcacactgagcaagtccgctgcaaggtcctgggaacaagttcttctcgatgcctttgaagtgagcaccagaggccttcctcccccagggtccctctgcagaccaggctgagatggaggaacctgctcacacatcgatggcgatgcttctagcctcccagctcggaggccccagccatgccttcaacctggcaggaggtgtagaccactcctcatcctccctgagctgctgatattctctctctctttctctatccatcattaaatacatcctcaccatccatcctaataattctctccatagaaccatcataacatcctacattctccttacatcaacatacctaccactatcatctcacttcatacatcttgtaacacatcttaatatccatcattataccaacacaggtcatcatcactccccataactattctcattttcccatcatcctatcttcttaccttatatacatatcttataaccca

SEQ ID NO: 166916 - DNA, 875 bp, Homo Sapiens
  misc_feature (194)..(572): n is a, c, g, or t
  misc_feature (810)..(810): n is a, c, g, or t
  misc_feature (847)..(847): n is a, c, g, or t
aacaagttcttctcgatgcctttgaagtgagcaccagaggccttcctcctccagggccctctgcagaccaggctgagatggaggaacctgctaaaatcgatggagatgcttctagcctcccagtaggaggccccagccatgccttcaacctggcaggaggtgtagccactcctcatcctccctgagtgctgatnnnnnnnnnnnnnnnnnnnnnnnnnnnnnnnnnnnnnnnnnnnnnnnnnnnnnnnnnnnnnnnnnnnnnnnnnnnnnnnnnnnnnnnnnnnnnnnnnnnnnnnnnnnnnnnnnnnnnnnnnnnnnnnnnnnnnnnnnnnnnnnnnnnnnnnnnnnnnnnnnnnnnnnnnnnnnnnnnnnnnnnnnnnnnnnnnnnnnnnnnnnnnnnnnnnnnnnnnnnnnnnnnnnnnnnnnnnnnnnnnnnnnnnnnnnnnnnnnnnnnnnnnnnnnnnnnnnnnnnnnnnnnnnnnnnnnnnnnnnnnnnnnnnnnnnnnnnnnnnnnnnnnnnnnnnnnnnnnnnnnnnnnnnnnnnnnnnnnnnnnnnnnnnnnnnnnnnnnnnctgtctcggctgttgtgggttgcaggttgggtgctgctgttgtggtccttcccagaaactgccagtagagggcagcctgggcatcctaatgcttactctggttgttacacaaagaaaaatatcggggtcactggcgagcccacccacactcaccagaatctccactgtagtccccctaacaaacagcccttcacttcctcttccacttcaggcaatttgtattttgatggccattggncttcaggattcagagtgttttaaaatcattcacggcnggggtttatcccggggtcgagccagggg

SEQ ID NO: 166917 - DNA, 776 bp, Homo Sapiens
agctcggtaccctgagagaccgtgttgcaatgtgagagaccgtgttgcaatgtatttaatagaatgagctatatagagaaaaagagtaagaaatgagctgaggagacagagcctgggacagctcaaatgcattactcactgctatttaaggagtaagtgtaaggtcaaccactcgcgataatccctacatggtggcatctaaccgtcaaagtgcacaggcacctgtgggttaccctcacaggcaatgacaacacgtctagtgctcgctatggcccgatatctgcagttgggtgccctggaacttcctgtgtccctgcaatctgtgaccttcactacaccctcatggcagttcatcttgccgttcttgcattggatattggtggtgctgcagatactacgaatgttccagatatcttcatggatgaaggtgttgaagcgcttgcagtgatacaaagtcatcttccgtctttgcatcatcaagttgcagtagcgatcactgccacctgtctcctcagggtgcacgtgttgccgcaggaatcgctggtacatgccatcctggccataggagggctggaccagccccagccccagcagggtcagcagcaaaagcagaagcaatgaatgggtcctctgcagagccatcagtatcttagaggtgcccgcttcttcctccctagtacgatgatggggagccggtagaaaacgcaaagatgttcttttgaatcctgctttgcatctaggtggggttggcgtccttgtgtgagtgtgtgtacccc

SEQ ID NO: 166918 - DNA, 806 bp, Homo Sapiens
tttccagaaaaagccccagcctcattcattaacaggtttaggtctccatatctctttggtgcaaaggtatttaatagaatgagttatatagagaaaaagagtaggaaatgagctgaggagacagagcctgggacagctcaaatcaattactcactgctattttaaggagtaagtgtaaggtcaaccactcgcgataatccctacatggtggcatctaaccgtcaaagtgcacaggcacctgtgggttaccctcacaggcaatgacaacacgtctagtgctcgctatggcccgatatctgcagttgggtgccctggaacttcctgtgtccctgcaatctgtgaccttcactacaccctcatggcagttcatcttgccgttcttgcattggatattggtggtgctgcagatactacgaatgttccagatatcttcatggatgaaggtgttgaagcgcttgcagtgatacaaagtcatcttccgtctttgcatcatcaagttgcagtagcgatcactgccacctgtctcctcagggtgcacgtgttgccgcaggaatcgctggtacatgccatcctggccataggagggctggaccacccccagccccagcagggtcagcagcaaaaacagaagcaatgaatgggtcctctgcagagccatcagtatcttagaggtgcctcggcctcagaacaagtccgcagaaacgggcaggacaatggaaagaagttttgtttctcacccgcttcttcctccctagtacgatgatggggagccggtagaaaacgcaaagatgttcttttgaatcccc

SEQ ID NO: 166919 - DNA, 475 bp, Homo Sapiens
  misc_feature (456)..(456): n is a, c, g, or t
ccgtgtacacacactcacacaaggacgccaaccccacctagatgcaaagcaggattcaaaagaacatctttgcgttttctaccggctccccatcatcgtactagggaggaagaagcgggtgagaaacaaaacttctttccattgtcctgcccgtttctgcggacttgttctgaggccgaggagcctgtgttggaagagatggtgatgggcctgggcgttttgttgttggtcttcgtgctgggtctgggtctgaccccaccgaccctggctcaggataactccaggtacacacacttcctgacccagcactatgatgccaaaccacagggccgggatgacagatactgtgaaagcatcatgaggagacggggccttgacctcaccctgcaaagacatcaacacatttattcatgggcaacaagcgcagttttcaaaggtccatcttgttgaaaacangtattgggaaaccctcaca

SEQ ID NO: 166920 - DNA, 379 bp, Homo Sapiens
agcagatgctgaggtactcccaggattccctgtgtcgggttgggacccgggacttcactctaaagcttgatatggcactctgttggtcttatcatctcaggaagctttttaaattcactaagattgcctacaccaggaagatcatcatcaaaagttgcatgagatacacagcttcccagcatcttctgaattctggcagagaaaacatcttcattatcatctttcacaggtggagttacagccttggtccaaggtccatcttcttgaggtgcctgctgcacatcatactcagtgttccatgctgacccatagttaatgctggccccagataatctcttggattcaccacgacacagtgcaccacgacacagtgcaccac

SEQ ID NO: 166921 - DNA, 703 bp, Homo Sapiens
  misc_feature (479)..(479): n is a, c, g, or t
tctgaacaatgcaacgcttcctcactctcccaatagcagttacccaaactctcctgggagcagcagcagcacctaccctcactctcccaccagctcagacccaggaagccctttccagatgccagctgatacgcccccacctgcttacctgcctcctgaagaccccatgacccaggatggctctcagccgatggacacaaacatgatggcgcctcccctgccctcagaaatcaacagaggagatgttcaggcggttgcttatgaggaaccaaaacactggtgctctattgtctactatgagctcaacaatcgtgtgggtgaagcgttccatgcctcctccacaagtgtgttggtggatggtttcactgatccttccaacaataagaaccgtttctgccttgggctgctctccaatgttaaccggaattccactattgaaaacaccaggcggcatattggaaaaggagttcatctttatnatgttggaggggaggtgtatgccgaatgccttagtgacagtagcatctttgtgcaaagtcggaactgcaactaccatcatggatttcatcctactactgtttgcaagatccctagtgggtgtagtctgaaaatttttaacaaccaagaatttgctcagttattggcacagtctgtgaaccatggatttgagacagtctatgagcttacaaaaatgtgtactata

SEQ ID NO: 166922 - DNA, 523 bp, Homo Sapiens
  misc_feature (484)..(484): n is a, c, g, or t
  misc_feature (489)..(489): n is a, c, g, or t
aaatttctgaatccaacagttggtcacagaggtcaagtattatcaaggctcctttgtcagttctcaatcgtgtctgactcatccatccttcaagtacatgcaaggctcaatagttttccagaggcagatgcctggggccatttaagatacagatgaaataggattatgaggtgaacccatttgagtaagaactttatccagccactggagggggccgtgcagatgtatctcaatccagcagggggtgctagtaacatcctgggcggtggtattctgctccccagcccttcacaaagctcatacgtatagtacacatttttgtaagctcatagactgtctcaaatccatgggttcacagactgtgccaataactgaggcaaattcttgggttgttaaaaattttcagacttacacccactaggggatcttggcaaacagtaggtaggggtgaaatccatgatggggagttcagttccggcttttncacanaggtcctactgcactaagggattcgggatcacct

SEQ ID NO: 166923 - DNA, 1058 bp, Homo Sapiens
  misc_feature (429)..(516): n is a, c, g, or t
  misc_feature (660)..(669): n is a, c, g, or t
  misc_feature (933)..(933): n is a, c, g, or t
gcaggaggagctgcttggcagaaggacctcctgcccagacctgaggagtgaaaggctttgagggctgaagtctccctttgttacggaccctggcccaggagttgaatgcctgaggacgtgtgggaaccccgttccctacttagcatgatccttgagtctcctctctggatggaatccgcgagctcgccacctggccaccctctacacggctccaccctgccatggccgtggggcccttgctctctgacttctcaggacacaggtcatggaggttcttcccaagctggcagaggccatttgtggaaagtggagagctacgtggtggccatctgccaactccagcatctctggaaaatctccacgctgaatgtgatttttgaaaacagcttatgtaattaaaggttgaatggcacatcataattccagccnnnnnnnnnnnnnnnnnnnnnnnnnnnnnnnnnnnnnnnnnnnnnnnnnnnnnnnnnnnnnnnnnnnnnnnnnnnnnnnnnnnnnnnncaacatacatacactcaaacacagcacaaactacccccacccacaccagccacattttcaaatccaccccacccacagagagagagggggcggccctcccaggcccccacagaaaaacctactataaacctccctatccatatnnnnnnnnnnctcaagacaagggtaaaaaccaaacttcacttaattagggggcggcccaaaacctttggcccgttcacacactcggaaaaaaggaacaccgaaaaccgggccacccccggaggcttccaagctggccagaccacgaaaggacaaaaacgcgggggcacgggaccaacataaaacctctgctcctcaaaataaacgcgggcgaacaagcctatgtcaactcataaactcaaaaacggaggccacaccaccgacgggctctacctnacgcgacggcgaagggacagctcacgctgtacacaaaggaactcctacggggcccgcgacttgaggccctctcctagtcatgtcgaatcgggtgtaacataacacatctcacatagcgcgacggg

SEQ ID NO: 166924 - DNA, 753 bp, Homo Sapiens
ggggcggcggcgcggtgtaccctgggatagggagcgatctccgagcgaggcggcaagatggacgcgggatttttccgcggaacaagtgcagaacaggataatcggttcagcaacaaacagaagaaactactgaagcagctgaaatttgcagaatgcctagaaaaaaaggtggacatgagcaaagtaaatttggaggttataaagccttggataacaaaaagagtaacggaaatccttgggtttgaagatgatgttgtgattgagtttatattcaaccagctggaagtgaagaatccagactccaaaatgatgcaaatcaacctgactggatttttgaatggaaaaaatgctcgagaatttatgggagaactgtggcccctgctgctaagtgcacaagaaaacatcgcgggaatcccttctgctttcctagaactgaagaaagaagaaataaaacaaagacagattgaacaagaaaaactggcatctatgaaaaagcaagatgaagacaaagataaaagagataaggaagaaaaagaaagcagcagagaaaaaagggagcggtctcgtagcccaagaagacgcagatccagatctccttccccgtagagagacgagtcttcccactgtcaggggaggagagaaagcgcagtcattctcgatctccccgtcgacagaaccaagagccggaggagctgaaaaagatgttgaaggaaaaagccaaagaacgaagagaggaaagaaatgcttgagaga

SEQ ID NO: 166925 - DNA, 548 bp, Homo Sapiens
  misc_feature (414)..(425): n is a, c, g, or t
tactcagacaagtgaccgtgaacgagatgaagaggatgatgagctactcccagacaaggatgctgacgaacgtcttcttcgtcttactggagatctactccttctatgccgttggtggaggaggcattcttctgtggcggagttcttcttcgaggagatggccgccttcttgggcttggccgccttctaggtgaatacgatcttgatcgggatctatggcgccgtctaggtcgagtgtgagaaggagagcgggaccgcgtccgggatcttgatttggagcgtgaccgagatcgtggtcgggtcttctccttctccttttcttttttggaatttttttccggagaaggttctttagcgctctggtataggttcaggttagggaactttcagaatgtcactgtggaaacaaaagcnnnnnnnnnnnngtggcctctctcgtggccccccccttctaattctcttctccccaggggttttataaagttttcctcaaaattttcaaaatccaaaactctgtgtgtctctcttttctcccaaaaaacccttta

SEQ ID NO: 166926 - DNA, 1157 bp, Homo Sapiens
  misc_feature (455)..(507): n is a, c, g, or t
  misc_feature (810)..(831): n is a, c, g, or t
ggggatctccgagcgaggcggcaagatggacgcgggatttttccgcggaacaagtgcagaacaggataatcggttcagcaacaaacagaagaaactactgaagcagctgaaatttgcagaatgcctagaaaaaaaggtggacatgagcaaagtaaatttggaggttataaagccttggataacaaaaagagtaacggaaatccttgggtttgaagatgatgttgtgattgagtttatattcaaccagctggaagtgaagaatccagactccaaaatgatgcaaatcaacctgactggatttttgaatggaaaaaatgctcgagaatttatgggagaactgtggcccctgctgctaagtgcacaagaaaacatcgcgggaatcccttctgctttcctagaactgaagaaagaagaaataaaacaaagacagattgaacaagaaaaactggcatctnnnnnnnnnnnnnnnnnnnnnnnnnnnnnnnnnnnnnnnnnnnnnnnnnnnnncagcagagaaaaaagggagcggtctcgtagcccaagaagacgcaaatccagatctccttcccctagaagacgatcttcccctgtcaggagagagagaaagcgcagtcattctcgatctccccgtcacagaaccaagagccggagtccttcccctgctccagaaaagaaggaaaaaactccagagctcccagaaccttcagtgaaagtaaaagaaccttcagtacaagaggctacttctactagtgacattctgaaagttcccaaacctgaacctataccagagcctaaagaaccttctccggnnnnnnnnnnnnnnnnnnnnnnggagaaggagaagacccgaccacgatctcggtcacgctccaaatcaagatcccggacgcggtcccgctctccttctcacactcgacctagacggcgccatagatcccgatcaagatcgtattcacctagaaggcggccaagcccaagaaggcggccatctcctcgaagaagaactccgccaagaagaatgcctcctccaccaaggcatagtataggagtagatctccagtaagacgaagaagacgttcgtcagcatccttgtctgggagtagctcatcatcctttcatctcgttcacggtcaactttctggagagatcctctagag

SEQ ID NO: 166927 - DNA, 434 bp, Homo Sapiens
cagtgactgattcatgggaaagggctttgaaggaactacttcagtgcacacacaaggtacgaacctctcaggcctttcgaagaactttcataattcatgaaagcccagttctgaagattcacgtatccatctggagacctacaggaagaaagtgattgggttcctctggttcttgcctgcttcactgtggatgggaagaggtgacaacctcagtctccctttggcacctgtccaagggtaggcaaccaccttcaccttcacacagattgaggagacactggactttttacccattttctttaatcttcaatattaatattgtgtttacattgatgagaacaagagttaatgccctaccctctgctgggctgtttgtattgagttgcaatgtgaccagcgaaagctgcatttaataaatgaaagtacagactgtt

SEQ ID NO: 166928 - DNA, 395 bp, Homo Sapiens
  misc_feature (13)..(13): n is a, c, g, or t
  misc_feature (338)..(338): n is a, c, g, or t
  misc_feature (385)..(385): n is a, c, g, or t
aatgaattaaagntaaatttctgcacaaagggacaatattcttgctggatgcgtttctgtaaatgcttcacagtttgaagacaaaggaatgcaacttcccaaaatgtgcccgaggtggaagtacttcctggctagtcggtgtaaacgttgcaaaaccagtctgtgggtctaagagctaatgcgggcatggctgttgggatggaggacctgctgtggcttggtcctgggtatcgaaagagtctggatttttagggctcatactatcctccgtggtcatgctccaataaattcactgctttgtgggcgcgacccttagggtattcctgcattttcagctntggggagcccttaaagatgcccttttggctttggctttccctggggnaagaagtccc

SEQ ID NO: 166929 - DNA, 1001 bp, Homo Sapiens
tctagaggatcccttagccacgtgaaagaaatatttaaggagagattacatgaaatcaaagagagggagatagattcatgaagaggctgaaatactcaaaggtgagtagaaagggaagaagcagagaacaaatacaagccaacagagattaatactgaaatagaaaatcacaaacagcaagagatgctgaggcacgcaggggaggagagagagaatagcccaagagaggcagaaaggaaatgcagaaatgagaaacgtgagataaaaagtagaaacagcagaaaggagcccagactcagaaaaaaggtgaaatttaaaacgaacgagaaggggaaggggtaacaaataatcacagttcacaaagagaaaagagaggtaggcagagaaaggagaggtagacagaacaagaaaaggacaaaaagcacacagcatgtgacccaaaaaggagacatgaaataaagcgtgaaagaagagccacatctaggagagcaaagagaaatagcaacaaaatgaaaaatgagagatatgtctaagacaagacacagaccactcttgtgaacaaaaagagaaaatgaggcaaaggcacacacgaaagaaattagcaagagaaacatggaaatgggtaagacacactttagatagagaacaaagagcaaagacaagaaagaaagagacaaagaaatacacattcattcagctatcctcaagtgctagagtgccaggcatgttgatcttcaggtgggaaggctgacttccttcagtgtgttcaaatttcttggacctgctgaagactcagctctctgcactgcttgtaggaagtataatgatttggcagataggaacaatgaagagcttgacgtgtggtggttgtttttgagactttatcttcctatctgggaccaggaaagtatcttgacagaacctcctgacctagggttgttgcccagtggtagtgagcttttcccctgcaggagcctcatgccacatatgaacgtagggat

SEQ ID NO: 166930 - DNA, 721 bp, Homo Sapiens
atctggggctttgggactgtttttatgagcagatgctggtagttcggtaatttcaccccctggacccacagaaagccaggactcctcctggtgggattctgactgaggcagggtgtcccttgcccgctggctctcccaggatgcagctttcctctgatgctttttattctttttctccctaactttactgtgcagggcttctgatttatgtgcatgtgacttagcaagtacctgaaatttgtctgttttaggctttcttggtaacttctgttctatgctcatatcaacacaaacaacatcaacatccttactaaaatgctttggtgtgttgttaatattttctttatccacaaggacaactgtaacacctggttcctcgtccacctccaaagcactatatcttctcttttttctctttttgagtgtggaagtggcatttgcagtctcatcacagattctggattttttcaaaggagaagaaatgagatgctggaaatcttttttcctctttttcctcctagttatttgagactgttcattcaccagggaggagtctctgaaaatttcgtgggaatgtttctgaggtctttccttatgtatagaacactttttctttttcttgtcagaaactggagtgtggatttcaaatctgcttgattctccttccattttattccctccgaaagcaccgccacctttctcccaacccggaagtgctccc

SEQ ID NO: 166931 - DNA, 622 bp, Homo Sapiens
ccgcctccagacctcaaatttccttgacgtatgtgaatgaggcacctgaagatgtgagcatgttctttgtaaaaacttctcggagccaccttttcgtagcagcaaggctcccttggaagactgtttggactgaattatttccagtttcatctctctgtcctgcagaatccaccagagatagaagtctaatcattctgcagacaatctcggcagataaggctggcagctcgtaaaacttaagtagctttgtgctgctgcagatggcttcatgcagtttcagacacacagtcaggtaggattggtgacaaggcctcctcgggaatcttgtcccggtaagtgtccaggagtcgcaacagcatttctaaaatgttctgaacgttctgaacatcctgaacatcctgcgtattcaagacttgctcaagtcccggaagccggtagtaaatccctgaaagacagtccaggatatgagcaggaaaacgacccaggtgctcaatgaagttttccatatacataaccaggtgactcagaggtagtagactaaaccaggatcggaagagaggctcgtctatgctcagcaaatgctgcttctctctcataactgaagtggggaactgaaagttga

SEQ ID NO: 166932 - DNA, 795 bp, Homo Sapiens
  misc_feature (351)..(351): n is a, c, g, or t
  misc_feature (370)..(370): n is a, c, g, or t
  misc_feature (592)..(600): n is a, c, g, or t
  misc_feature (761)..(761): n is a, c, g, or t
tagcttgattgccctaccagtaaaagacagaggattgtccttaagtccctgctaaaacattccattgttaaaatttgcactttgaaggtaagctttctaggcctgaccctccaggtgtcaatggacttgtgctactatatttttttattcttggtatcagtttaaaattcagacaaggcccccagaataagattttccatgcatttgcaaatacgtatattctttttccatccacttgcacaatatcattaccatcactttttcatcattcctcagctactactcacattcatttaaagggttctgtaaacatttttaagacagttgggatgtcacttaacattttttttntgagctaaagccagggaancaagccatgcttaatatttaacaatcacttatatgtgtgtcgaagagtttgttttgtttgtcatgtattggtacaagcagatacagtataaactcacaaacacagatttgaaaataatgcacatatggtgttcaaatttgaacctttctcatggatttttgtggtgtgggccaatatggtgtttacattatataattcctgctgtggcaagtaaagcacacnnnnnnnnnctcctaaaatgtttttccctgtgtatcctattatgggatactggtttggttaattatgattctttattttctctcctttttttagggatataggcagtaatgctattactggaaatggaatttcctttttctggaaatgtaatcatggatgcttggaatgntaggatttttggtactgtaaaccgggcttggtcc

SEQ ID NO: 166933 - DNA, 490 bp, Homo Sapiens
tcctgcctttggactacagcacagtcttaattcaggacagagtttagagtctgtaactctgaaaggcagagctccacggaagcagatgtcccttctgaacagttctgaattccagcctcaaattagaacagttgccaagagtcacagtgactcatgcattctttcttcaaacaacctccctaccaaggatcttctttcagctctgttagaacaaggcaataaactgcgtaatgccatggtgatttctgcaatgaaatcaagcccagagaccagcatgttgttggaccaagttcatcctcctattaatgaagattctcttagagcatcaacacagatcagagccttttctaggaatcggtttaaagaccacattgaagatcacctcctcccttcaaccgagaatacattttggagacacgacacaaaagctgataccagagctatacagctgctttaggccagtgctgaattagtccaaagggcggacaag

SEQ ID NO: 166934 - DNA, 1185 bp, Homo Sapiens
ttggctacaactccgggagaaggacatccagcgctttttcaatgctattgccccctcctcgaagtagacctcaaaaatgggtacggcttcctggagttcgaggactcccccgacgccgacgacgccgtttacgagctggacggcacaggaacttcttccgcgagcgcgtgatcgtagagcacgcccggggcccccctcgcgatcgcgacggctacagctacggaagccgcagtggtggaggtggatacagcagtcggagaacatctggcagagacaaatacggaccacctgttcgtacagaatacaggcttattgtagaaaatctttctagtcggtgcagttggcaagatttaaaggattttatgcgacaagcaggtgaagtaacctatgcggatgcccacaaggaacgaacaaatgagggtgtaattgagtttcgctcctactctgacatgaagcgtgctttggacaaactggatggcacagaaataaatggcagaaatattaggcttattgaagataagccacgcacaagccataggcgatcttactctggaagcagatccaggtctcgatctagaagacggtcacgaagtaggagtcgcaggagcagccgcagtagatctcgaagtatctcaaaaagtcgctcccgttccaggtcgcggagcaaaggtcgatcacgttctcgatcaaaaggcaggaaatctagatcaaagagcaaatctaagcccaagtctgatcggggctcccattcacattctcgaagcagatctaaggatgagtatgagaaatctcgaagcaggtctcggtcccgatcccccaaagaaaatggaaagggtgatataaagtcaaaatccagatcaaggagccagtcccgttccaattcgccgctacctgttccaccctcaaaggcccgttctgtgtcccctccaccaaaaagagctacttcaagatcccgttctagatctcgctcaaagtcaagatcatggtccaggtcgagttccagagattaactcagaactccttgtttgcacattattatggaacactttcctgcttaggcagttactcttccatgtttatacttggcctcttctgcaagaggaatctcttgaaaacaggggcacacagaaatttgatttgtggccaaattggatgacaaagatgagctctaaggagatgatcgct

SEQ ID NO: 166935 - DNA, 451 bp, Homo Sapiens
  misc_feature (198)..(198): n is a, c, g, or t
tgaggaccccccacctggttacggaatctcagcctagggagaagcactgccagccttctgtctttttttataacggccatttttgtaataaaaatgtaagtacccaaggaagaaataaaattgtcaaaatatgctgctgttatttatagcaagcagagttgtactcacatggaatgccacacttcacacacagaatcnagaggtctcgtgaaaacacttaagtggctcctgtaacttctccagtaagaatcagggacttgaaatggaaacgttaacacgccacatgcccaatgctgggcagtctcccatgccttccacagtgaagggcttgagaaaaatcacatccaatgtcatgtgtttccagccacaccaaaaggtgcttgggctggagggctggggcatagaagtcaggcctcaggagcctcaagttcgtcagctttgccaactgtac

SEQ ID NO: 166936 - DNA, 1316 bp, Homo Sapiens
  misc_feature (55)..(117): n is a, c, g, or t
  misc_feature (1057)..(1057): n is a, c, g, or t
  misc_feature (1212)..(1212): n is a, c, g, or t
  misc_feature (1252)..(1252): n is a, c, g, or t
tctggcggtacgcgctggctgcgtcgacgtgctgacgccatgacgccccggctgnnnnnnnnnnnnnnnnnnnnnnnnnnnnnnnnnnnnnnnnnnnnnnnnnnnnnnnnnnnnnnnatcggcggtcccgcaggtcccggatgttgcggacagtatgaggcaagcgcagggggacggggaccagcagctgtcgccgccgctctcagggtgaagagggaacagaaatctttgccccctgactttggaaatctcgtttaaccttcaaactggcgatgtcaagggttccaagtcctccacctccggcagaaatgtcgagtggccccgtagctgagagttggtgctacacacagatcaaggtagtgaaattctcctacatgtggaccatcaataactttagcttttgccgggaggaaatgggtgaagtcattaaaagttctacattttcatcaggagcaaatgataaactgaaatggtgtttgcgagtaaaccccaaagggttagatgaagaaagcaaagattacctgtcactttacctgttactggtcagctgtccaaagagtgaagttcgggcaaaattcaaattctccatcctgaatgccaagggagaagaaaccaaagctatggagagtcaacgggcatataggtttgtgcaaggcaaagactggggattcaagaaattcatccgtagagattttcttttggatgaaggccaacgggcttctcccctgatgacaagcttaccctcttctgcgaggtgagtgttgtgcaagattctgtcaacatttctggccagaataccatgaacatggtaaaggttcctgagtgccggctgcagatgagttaggaggactgtgggagaattcccggttcacagactgcttgcttgtgtgtttgccggccaggaattccaggctcacaaggctatcttagcagctcgttctccggtttttagtgccatgtttgaacatgaaatggaggagagcaaaaagaatcgagttgaaatcaatgatgtggagcctgaagtttttaaggaaatgatgtgcttcatttacacggngaaggctccaaacctcgacaaaatggctgatgatttgctggcagctgctgacaagtatgccctggagcgctttaaggtcatggtgtgaggatgccctctgcagtaacctgtccgtggagaacgctgcagaaattctcatcctggccgacctcacngttgcagatcagttgaaaactccgggcagtggatttcatncactatcatggcttcgggaatgtcttggagaccctctgggggtggaaagcccaatgggggtggg

SEQ ID NO: 166937 - DNA, 744 bp, Homo Sapiens
  misc_feature (394)..(394): n is a, c, g, or t
atttaaggaaaaatttggggtggtgataatatggcttttcacagaaagggtcatgaagccctggcccaacaggactgtggtactaggggctgggatgtggggttaccacatggagagattttccattaagagagaaggacaaacatttctgagagtgtcagccattcttggtagacacctctccactcctcatcccacctctacccatctccatgccacaccttatccagttagacacatacataccaatcattagaagaacaagtttagaaggtgtggaacttgtgcctggctggctgggtagtcagctgagcctgttgctgagcccggtggtctggattggagtatggccagggcaggagtacacagaattagaatttagactgtcccttgnagtagaattccactgattttctgtggctccagtgagaacaaggctttgaaactgaacaagataacttctagaaatgaactgtactaatccctttccccagattgtatcatgagtagaatcaggttcacgtggtgcttcaaagccctgagaagaatatttctttggaccccaggcactaggggccacctgcctgggagtctccctgcctcactcctctaggcaggggagtgatgcttcaggacgtgacaggctgttctaacatgtgtctacctgagggctagttgaaggatccaggaatattttcttcttgggtgggccctgaacaaagccaaaaattgtagaaaccagtc

SEQ ID NO: 166938 - DNA, 437 bp, Homo Sapiens
tccctgctggtgaatcatcaaggttgatgcagatttatggcaaaccaataccaaccattcagtggataaaaggtgatcaggagctttcaaacacagctcgattagaaataaagagcaccgacttgccaccagtctcagtgtaaaagatgcagtacgtgtcgacagtggaaattacatactgaagtgggggtttccaagctagtgtgcatttttctgctgtaactcctgagataacaacaggtccttcaggtggccctggtctgtcaagaaccttgacattcacagtaactgatctttctcctgccacatttttggccttcagtatgtaatttccactgtcgacacgtactgcatcttttacactgagactggtggcaaagtcgtgctctttatttctaatcgagctgtgtttgaaagctcctgatcaccagtacgtc

SEQ ID NO: 166939 - DNA, 199 bp, Homo Sapiens
  misc_feature (163)..(163): n is a, c, g, or t
aggttgtcgcgtgatctagaggatcccgagtaccacctgaaataccatcttcccttggtcactaccaccgatactggtcttcctcctaccttttgggctgttcctcttgtacagacttctcctgatccctcttgatgccatagatgtgggagcaccccagggnctcagttccttttctctactaagaaggtctcagaat

SEQ ID NO: 166940 - DNA, 210 bp, Homo Sapiens
gagtagcccactgttaggagatttaaattctatttggctaattcagcaaatattcactgagcacctacaaatgctagagcctactctggaagcttgggatacagcagtgaatatggtaggtggggtatggcagtgaatatgacaggtgggatacggcagtgattatggcaggggggatctgccagtgaatatggcaggtgggaatatggg

SEQ ID NO: 166941 - DNA, 246 bp, Homo Sapiens
actatgattggcatattttccagtatcctaatacatgcatacttatcttttatagattataataatctacatttaaaattccattttaatattgtggcatgaaaaatacaaacaccaatacagtatgttttatgctcactcaaagttaactggctcagagttttaaaagctttcccggataaagcagagtcaagtctaccctatatccccatcctataaattcctcttggtcgaacctggcaatct

SEQ ID NO: 166942 - DNA, 947 bp, Homo Sapiens
  misc_feature (21)..(21): n is a, c, g, or t
tttggccccagtgggtcctcnagtatggtcatgggagccaggaaggggaagggacttagggtggtgctgaactgcaaggggccaccctagctttggcatgggggtgcttcctgtagctatagccccctccctcctgggtggggctggcctctagccagaggcttctgaaggacatttggactgggagtgaggactctagccagtccagaggtgaggagggagtcctggtccttgcatctttatcccaagcagcctgaatccctagtcaaaagtggcccctaaatggctcttagggggtagggatggaaggaaagggaacccaggttagtgtggggagagtggggggaaaatgatcaattctgaggccacaaacatcaaaacaaaggcaatctagtctcctttctggggaagaggttctgaaaactttcaagctccctggcagaaaaacattttcagggaggctaaggggtaagggttgcaccaatcaggtagggccctcctgcccccagccacaaacccttccatacctgccagcctcctttggacagattttgaggaaattttgtgaattctgaggccaagggaactgaggtgtgggggtctcacagaagtgtgataaattctagaaaactagctgcgagggaccagatctgggcccaaccctgtgatgggcaggtgggcatgggctgcatgtagtggttctcctggtggcaatggcggctggacggaggatgtggtggagcagagaagggggtgggagggtagagtggatggtcagtgtctggtcatttccgactgaagagtgagcccagcagaaccacgcctggccacagtcatgcccgtcaggaaccagcggttgaagcgttcctggccctttcggctctcggctgctgcattgttcccatagagttccacaaaagtatcccagccgccgttctcctggatcc

SEQ ID NO: 166943 - DNA, 518 bp, Homo Sapiens
gtcgggcgattctagaggaccccccactattgataaaagtgatgactccaggacacagcccatagccacctgagtcaatccctgggtacaaagctaggaatctgaactttttaaacaagcctgctaggtaagtcttatgcactccaaggtagatgagaaccactaccctaaacatagctacaacaggacttacagcaagaaaaaccatttgactgcaaatattattttacaatgggcttcttaatgtcatttttaaaaattaatcacacaaatagtttgtactttcataactgaagcttgtcttcattatgcccttatcccttgactagaattttgttaaataaaacatatgtaagccagaatgacacagccatgttgacaacttgagatggaagatcaaatcatcctaaattacatttcaatagttccaggaaagaaaaaagtcctgtgaagacttccatgtaagtaacatcattttttaaaagaacctagcagaaaatttaaaactgtgttattaa

SEQ ID NO: 166944 - DNA, 563 bp, Homo Sapiens
  misc_feature (39)..(39): n is a, c, g, or t
  misc_feature (81)..(81): n is a, c, g, or t
ccttgttaccatttcattttttccaggggaaggccactnatgaccaatggagaaaaacagctttaaaaggaggcttagatnaatcctctgaattaaaggcattcttactacttctgaacacagaaaacgcctggggattgtactggcaagagaccacctattctaaacctcaggtacaaagtgtccacttgcctccagacaatactgaattgtactttctccttggtacttcccattcgatgaagcagtctctctctgtggtctctgaaccactatttataaaagtgatgactccaggaccacagcccataccacctgaggcaatccctgggtacaaagctaggaatctgaactttttaaacaagcctgctaggtaagtcttatgcactccaaggtagatgagaaccactaccctaaacatagctacaacaggacttacagcaagaaaaaccattggactgcaaatattattttacaatgggcttcttaatgtcatttttaaaaattaatcacacaaatagtttgtactatcataactgaagctagtcttcatcatgtcctta

SEQ ID NO: 166945 - DNA, 517 bp, Homo Sapiens
  misc_feature (275)..(284): n is a, c, g, or t
  misc_feature (397)..(397): n is a, c, g, or t
  misc_feature (468)..(468): n is a, c, g, or t
catcgttctagaggaccccgacgtagcccaactgacagaagtatgattgaagccacaaactttgtgcatacagctcatgttggatcaggagacctgttcagtggaatgaattcagttagctccattcagaaccaaatgcagtccaagggaggttatggaggtggaatgcctgccaatgtccagatgcagctcgtggacacgaaggcgggatagccctggtcctttctccaggttattgtgaatttctatattttctctgtccactattctgtaannnnnnnnnngtcctgtgattgcttttattttgaattacaaaaaagaagtgtgatggcaccttgtccaccctgtcgtgattattccagtgagatgttactgtctgctctgaaggagatactgncagacgaatcctgcatttcctcagctgcatgcatgccttttggactcatggacagagttcttttggattgncactgaaatttcaaatggttaatcagtatgggatctgatcttcgcatga

SEQ ID NO: 166946 - DNA, 582 bp, Homo Sapiens
atactgtcagcgttgctactgtcaggtggtgctgctgtcatggtggtgctgctgtcctggtggtgctgctggttgggtggatgtggataaagaaactctgcaacacaggaggtacccaaatgtgtttgggattggggactgcaccaaccttcctacgtcaaagaccgctgctgcagtagctgcccagtcaggaatacttgataggacaatttctgtaattatgaagaatcaaacaccaacaaagaagtatgatggctacacatcatgtccactggtgaccggctacaaccgtgtgattcttgctgagtttgactacaaagcagagccgctagaaaccttcccctttgatcaaagcaaagagcgcctttccatgtatctcatgaaagctgacctgatgcctttcctgtattggaatatgatgctaaggggttactggggaggaccagcgtttctgcgcaagttgtttcatctaggtatgagttaaggatggctcagcacttgctcatcttggatggcttctgggccaaaactgcagtcactgaatgaccaagagcagcaccaccaggacagcagcaccacagg

SEQ ID NO: 166947 - DNA, 1401 bp, Homo Sapiens
  misc_feature (629)..(629): n is a, c, g, or t
tgtgccattgttgagcccagtgagagacatttctaccagccaatctggacactggtgggtgctggtgccaaacaattgtcctcatctggtcgtcccacggcaagtgtgattccatctggtgtagaatggatcaaagctagagtgactgagttgaacccagacaagaactgcattcacacagatgacgacgagaagatctcctaccaatatcttattattgctctcggaatccagctggactatgagaagattaaaggcctacctgaaggtttcgctcatcccaaaatagggtcgaattattcagttaagactgtagagaagacatggaaagctctgcaggacttcaaagagggcaatgccatcttcaccttcccaaatactccagtgaagtgtgctggagcccctcagaagatcatgtacttatcagaagcctacttcaggaagacagggaagcgatccaaggccaatatcattttcaacacttctcttggagccattttcggggttaagaagtatgcagatgccctgcaggagatcatccagggagcggaacctcactgttaactacaagaaaaacctcactgaagtccgagccgataaacaagaggctgtatttgaggaaccgggancaaaccaggagagacccaagtgattttcatatggaaatgcttcatgttcacacctccaatgagcccaccagatgtcctcaagaccagtcctgtggctgatgctgctggttgggtggatgtggataaagaaactctgcaacacaggaggtacccaaatgtgtttgggattggggactgcaccaaccttcctacgtcaaagaccgctgctgcagtagctgcccagtcaggaatacttgataggacaatttctgtaattatgaagaatcaaacaccaacaaagaagtatgatggctacacatcatgtccactggtgaccggctacaaccgtgtgattcttgctgagtttgactacaaagcagagccgctagaaaccttcccctttgatcaaagcaaagagcgcctttccatgtatctcatgaaagctgacctgatgcctttcctgtattggaatatgatgctaaggggttactggggaggaccagcgtttctgcgcaagttgtttcatctaggtatgagttaaggatggctcagcacttgctcatcttggatggcttctgggccaaaactgcagtcactgaatgaccaagagcagcacgaaggacttggaacctatccttgtaaagagttccttgatgggtaatggtgaccaaatgcctcccttttcagtacctttgaacagcaaccatgtgggctactcatgatgggcttgattctttgggaataataaaatgaaataatacttttattttctgaataaaagtttgtcactgat

SEQ ID NO: 166948 - DNA, 810 bp, Homo Sapiens
  misc_feature (354)..(376): n is a, c, g, or t
  misc_feature (647)..(647): n is a, c, g, or t
  misc_feature (742)..(742): n is a, c, g, or t
  misc_feature (768)..(768): n is a, c, g, or t
gggggggtgaaaggttgcgaagatggcgacggccttgagcgaggaggagctggacaatgaagactattactcgttgctgaacgtgcgcagggaggcctcttctgaagagctgaaagctgcctaccggaggctctgtatgctctaccatccagacaagcacagagacccagagctcaagtcacaggcggaacgactgtttaaccttgttcaccaggcttatgaagtgcttagtgacccccaaaccagggccatctatgatatatatgggaagagaggactggaaatggaaggatgggaggttgtggaaaggaggagaacccctgctgaaattcgagaggagtttgagcggctgcnnnnnnnnnnnnnnnnnnnnnnnttgcagcagcgaaccaatcccaagggaacgatcagcgttggagtagatgccaccgacctttttgatcgctatgatgaggagtatgaagatgtgtccggcagtagctttccgcagattgaaattaataaaatgcacatatcccagtccattgaggcacccttgacagcgacagacacagccatcctctctggaagcctctcaaccccagatggaaatggaggaggttccattaactttgcgctcagacgagtaacttccgcaaagggatggnggagagttgggaatttgggagctggaggacctacagggggctttggttcgggtctcaaagctggtccgtaaatctcacaaccaagatgcctttgntgacaaccaaactgtggctctgcagnttttcatcccgggggaaatccgaccccggcctggaccactgt

SEQ ID NO: 166949 - DNA, 619 bp, Homo Sapiens
  misc_feature (40)..(40): n is a, c, g, or t
cgaagttactcagagtccaagaggaagaaatgctagaagntgatttctgatgcagaggagaatctgattcctgatagcctacttacatcagcacagaaaatcatcagcagcagccccaataaaaaagggcatgttaacgtgatagtggagcgattgccaagtgctgaagaaaccctttcacagaagcgcttcctcatgaacactgaaatggaacgaagggaaggacctgagcctgacagaagctcagatagggcgcgaaggaatggatgatgtttatcgtgctgataacctgtactgttgatattgggggacttgatcataggctggagcagttcagacgaacaaagacgagttaatgaataaaggtctggctactgatgagaatgccccaccaggccggagaaggacaaattctgagtctcttcgattacactcattagctgcagaagcccttgtcacaatgcctataagagctgcagagttgacaagagccaacctggggcactatggagatataaaccttttagatccagatactagtcaaaggcacgtagatagtacattggcagcgtactcaaaaatggtgtcgcactataaaactcctcagatggctaactag

SEQ ID NO: 166950 - DNA, 601 bp, Homo Sapiens
  misc_feature (38)..(38): n is a, c, g, or t
tcagcccacctggcacggcatagtcacagagaacgacnacaccgtgctcctcgaccccccactgatcgcgctggataaagatgcccctctgcgatttgcaggtgagatttgtggatttaaaattcacgggcagaatgtcccctttgatgcagtggtagtggataaatccactggtgagggagtcattcgctccaaagagaaactggactgtgagctgcagaaagactattcattcaccatccaggcctatgattgtgggaagggacctgatggcaccaacgtgaaaaagtctcataaagcaactgttcatattcaggtgaacgacgtgaatgagtacgcgcccgtgttcaaggagaagtcctacaaagccacggtcatcgaggggaagcagtacgacagcattttgagggtggaggccgtggatgccgactgctcccctcagttcagccagatttgcagctacgaaatcatcactccagacgtgccctttactgttgacaaagatggttatataaaaaacacagagaaattaaactacgggaaagaacatcaatataagctgagcgtcactggctatgactgtgggaagaaaagagcacag

SEQ ID NO: 166951 - DNA, 884 bp, Homo Sapiens
gggccgcctacctcgcccaggctgccagaccggaagcgctccgctgtacctggatcctgctcctctgggttgaaacccgggcgccgccaagatgccggcttaccactcttctctcatggatcctgataccaaactcatcggaaacatggcactgttgcctatcagaagtcaattcaaaggacctgcccccagagagacaaaagatacagatattgtggatgaagccatctattacttcaaggccaatgtcttcttcaaaaactatgaaattaagaatgaagctgataggaccttgatatatataactctctacatttctgaatgtctgaagaaactgcaaaagtgcaattccaaaagccaaggtgagaaagaaatgtatacgctgggaatcactaattttcccattcctggagagcctggttttccacttaacgcaatttatgccaaacctgcaaacaaacaggaagatgaagtgatgagagcctatttacaacagctaaggcaagagactggactgagactttgtgagaaagttttcgaccctcagaatgataaacccagcaagtggtggacttgctttgtgaagagacagttcatgaacaagagtctttcaggacctggacagtgaagggagcccgggcagccaccgtctccagagccctgggcagcattttccagcaagatgtacacaatctttagcctttatttcgtaaagttttatacagaagagagaagagcatgtctttacttgaaaaactcttgatcaagaatttgggtgggagaaaagaaagtgggttatcaagggtgatttgaaattttctgcagcattaaagctggcgcttaataagaataagtaataataaagaaatttctaacattccatg

SEQ ID NO: 166952 - DNA, 388 bp, Homo Sapiens
cagaggctaaagagtgtgtacatctgctggaaaatgctgccccagggctctggagacggtggctgccccggcctccccttcactgtccaggtcctgaaagactcttgttcatgaactgtctcttcacaaagcaagtccaccacttgctgggtttatcattctgagggtcgaaaactttctcacaaagtctcagtccagtctcttgccttagctgtggtaaataggctctcatcacttctgggctttgggaattgcacttttgcagtttcttcagacattcagaaatgtagagagttatatatatcaagggtcctatcagcttcattcttaatttcatagtttttgaagaagacattggccttgaagtaaatagatggcttcatccaca

SEQ ID NO: 166953 - DNA, 535 bp, Homo Sapiens
gtgatctagaggatcccggcacgaggtaaagattgtgtcatctgctggaaaatgctgcccagggctcggagacggtggctgccgggctcccttcactgtccaggtcctgaaagactctgttcatgaactgtctcttcacaaagcaagtccaccacttgctgggtttatcattctgagggtcgaaaactttctcacaaagtctcagtccagtctcttgccttagctgtggtaaataggctctcatcacttcatcttcctgtttgtttgcaggtttggcataaattgcgttaagtggaaaaccaggctctccaggaatgggaaaattagtgattcccagcgtatacatttctttctcaccttggcttttggaattgcacttttgcagtttcttcagacattcagaaatgtagagagttatatatatcaaggtcctatcagcttcattcttaatttcatagtttttgaagaagacatggcgcttgaagtaatagatggcttcatccacaatatctgtatctttaggggtaccgagctc

SEQ ID NO: 166954 - DNA, 965 bp, Homo Sapiens
  misc_feature (632)..(632): n is a, c, g, or t
  misc_feature (688)..(688): n is a, c, g, or t
  misc_feature (694)..(694): n is a, c, g, or t
  misc_feature (699)..(718): n is a, c, g, or t
  misc_feature (722)..(731): n is a, c, g, or t
  misc_feature (734)..(737): n is a, c, g, or t
  misc_feature (744)..(744): n is a, c, g, or t
  misc_feature (762)..(785): n is a, c, g, or t
  misc_feature (806)..(806): n is a, c, g, or t
  misc_feature (822)..(822): n is a, c, g, or t
ccgctgccaccgctcaccatgggcccgggtcctcggctgctgctacctctcgtgctttgcgtggggctcggcgcacttgtgttttcttcgggggccgagggcttccgcaagcgaggcccctcggtgacggccaaggtcttctttgatgtgaggattggagacaaagatgttggcagaattgtgattggcctctttggaaaagttgtgcccaagacagtggaaaattttgttgctctagcaacaggagagaaaggatatggatataaaggaagcaagtttcatcgtgtcatcaaggatttcatgattcaaggaggtgacatcaccactggagatggcactgggggtgtgagcatctatggtgagacatttccagatgagaacttcaagctgaagcactatggcattgggtgggtcagcatggccaacgctgggcctgacaccaatggctctcagttctttatcaccttgaccaagcccacctggttggacggcaaacatgtggtgtttggaaaagtcattgatgggatgacagtggtgcactccatagagctccaagcaactgatgggcatgaccgtccactcaccaactgctcgatcatcaacagtggcaagatagacgtgaaaacgccttnttgtggttgagatcgctgattggtgacacaactggcagaaaacaaggatatgcttntggcanggggnnnnnnnnnnnnnnnnnnnntgtnnnnnnnnnnttnnnntttgccnttttcattaatttggcgnnnnnnnnnnnnnnnnnnnnnnnnggatgtctatccccacattcncaggaaaggttataanaaaatcaaaccggtcaccccctttaattttgccttgaaccttcaattaaacccacctggctttaagggactttttgaaccttaaaattttttccccccttttcctcaaggggggtggcctatttttaaaaaaaccacaaaaac

SEQ ID NO: 166955 - DNA, 782 bp, Homo Sapiens
  misc_feature (127)..(163): n is a, c, g, or t
  misc_feature (182)..(203): n is a, c, g, or t
  misc_feature (364)..(387): n is a, c, g, or t
  misc_feature (581)..(602): n is a, c, g, or t
  misc_feature (605)..(606): n is a, c, g, or t
  misc_feature (765)..(765): n is a, c, g, or t
gggaccgtccactcaccaactgctcgatcatcaacagtggcaagatagacgtgaaaacgccttttgtggttgagatcgctgattggtgacacaactggcagaaaacaaggatatgctttggcagggnnnnnnnnnnnnnnnnnnnnnnnnnnnnnnnnnnnnntgtctttcaattatttgcnnnnnnnnnnnnnnnnnnnnnngtattctatcccagatcacaggaaagttataaaaatcaaaccgtcaccctttagtttgcttgaactttagtaaaccacctgcttagggactttgaacttaaatatatccccttcctcaagtggtgctattttaaaactaaaaaaaactttgaattggctannnnnnnnnnnnnnnnnnnnnnnnctgaattcattatgatccccatattgggtaatgctgaacatttatctgaaacagatgaggatattattattttgtatccaaacagaaattcagataaagggaaattagactagtgtaatatgagatatgtcatagggatttctttctgacaaaagggtgctttgctgttctttatattaaatacttttagagcnnnnnnnnnnnnnnnnnnnnnnaannaaaacatggtcggcccgcctcgggcccctcgagaaggctttctagaaccatttcgttttgggcgcgcggggccccagtagggtaaggtgaaacatggggccatagcctgttttccctaagggaaaaccctggggctcatgaaacttaaggggctttggnaattccttcaacccaac

SEQ ID NO: 166956 - DNA, 313 bp, Homo Sapiens
  misc_feature (190)..(190): n is a, c, g, or t
  misc_feature (199)..(199): n is a, c, g, or t
  misc_feature (251)..(251): n is a, c, g, or t
  misc_feature (293)..(293): n is a, c, g, or t
ccacagctttcgaggcctctgagaagtggcccaacctgattcatgagcctcttgaccaaggcaactgtgcaggctcctgggccttctccacagcaactgtggcatccgatcgtgtctcaatccattctctgggacacatgacgcctgtcctgtcgccccagaacctgctgtcttgtgacacccaccagcngcagggctncggcggtgggcgtctcgatggtgcctggtggttcctgcgtcgccgaggggtngtgtctgaccacttgctaccccttctcgggccgtgaacgagnacgaggctggccctgcggcc

SEQ ID NO: 166957 - DNA, 199 bp, Homo Sapiens
  misc_feature (189)..(189): n is a, c, g, or t
actggaggcgatgagtggttaagctggtggagaaactcgatgtaaaaaaagattggtatgaccatgctctcatggtgggaaaagaacacaacttggcttctgaagacacataggaccttagataagtatggtattcaggcagatgctaagcttcagttcacccctcagcacaaactgctccgcacagcngcataaaggg

SEQ ID NO: 166958 - DNA, 1036 bp, Homo Sapiens
  misc_feature (878)..(878): n is a, c, g, or t
tcgacccacgcgtccgctctgacaggatccggggctgagcgaaggaggcggcggccatggagttgggcgagctgctctacaacaagtctgagtacatcgagacggcatctgggaacaaagtcagtcgccagtcagtgttgtgtggaagccagaacatcgttctcaatggcaagaccattgtgatgaatgactgtattatccgaggggatctggcaaatgtaagagttggacgtcattgtgttgtgaaaagtcgtagtgtcataaggccaccattcaagaagttcagcaaaggtgttgcattctttcctttacatattggagaccatgtctttattgaggaagatcgtgtggtcaacgcagcacagattgggtcctatgttcatgttgggaagaactgtgtgattgggcgccgatgtgtgttgaaagactgctgcaaaattcttgacaacacagtattacctccagaaactgtggttccaccattcactgtcttctcaggcttgccaggactcttctcaggggagctcccggagtgcactcagggagctgatgattgacgtcaccaagaagctactaccagaagttttggccctgacgcaagtctagcatctctgcctcatgtcttgaatctgttgagctctaagatgaacctggggacaaagtgagccagtcagcacctacaaagagcctttgtgtctttgacatctaccaccctcctccttttaaaaaatttctttagaatttctcaatcttcaaggctctaagtgcttaagaattcactaacagacagaccatctggaggagctgtcttcaaatgctgtgcttacaccttatctatgaacagtcactttgtaccattatctgtggaacacagaatncatctgttcccaacactccagccccttggtcctgtgggatgggctgggatcccgcctggaaacggacctggcagagcggcaggcaccctttccggtgtgggagggttttgttggctgggtgcgctggttcacgggcccttttcactggcccttggttg

SEQ ID NO: 166959 - DNA, 652 bp, Homo Sapiens
  misc_feature (153)..(154): n is a, c, g, or t
taaatggctttaccacctgcaaaactggacccttacggcgttttttgttgctacccgatatggtttggctgcgtccccacccgaaatttcatcttgaattgtagtttccctattaatgccccatgtgtcgtgggagggacccggtaggaggtnnaatgcgaatcatgggggcaggtttttcccatactgttctcgtgatagtgaatacatctcactaaatctgatggttttataaagggcagtttccctgcacgtgctctcttgcctgctgccatggaagacatacctttttgctccttctttgccttccaccatgattctgaggcctctccagccttgtggaactgtgagtacattaaacctctttttctttataaattacccagtttccagtatttcttcatagcagtatgaaaagtaactaatacactacccgagacatcttaggagatttgtaatagctgtaatgccaggtccaccatatttttagcataaagcaaatgtttacgcgtgatatgactgcacgggctttctttcagctggagccatagcaactcaagtagtaaccctatcttagtctgattaaaagtaaatattagtctgggcatggtgggacatgcctggtcgacgcggccgcgaatttagtagtata

SEQ ID NO: 166960 - DNA, 980 bp, Homo Sapiens
ttcttcatcaagctggatgatgaagtctcagttcatcctgactgctttaaagctcctcacggtatttcttctgtaaaggccaactctgcttcaagttgtgcaatacgtccctgggacagctgccttccaagctcttgattctcctggataagcattcgacacttcgccattaactttttccctgtttggctatcaggcgtaaacttccaggcactcagttcattttgggcttgttccagtttgtctttagtctgttccagttcacctttcatttttaggaaaaacaagttgatcgctgggtctaccattgttgatctcagttgggcaacgctcggctgctggacttgcttgaggtactggatttgagtagtacactcttgcatctcttgttccttggttgctagtcgcattacaaggatgttttccctgcgtgcagactcctgctgttgttgctttagtttttcttcagactctcttaggccagttacatcattagagttaagatctgtgtacttgccctccaaagcttgtacatatgcttcatattgtttccatcttagaattaactcatctcttgccataactttgaagtctgtttcactcaatcgaaccttcttgggaagaggttcttcgttggtcatcttgaatcaggagagtcgcctttcaggcgtggccgcagtcactcgcccgccgccgaaccccgccaggagaggaaaggtgaagggagggaggccgtcggcctagcccgatcggggcctcgaggcacaatggagcagctgctccccggtaacactccccgtcctttcccaggagcctggcgcgagctccgcgggccccggagctcagcaagctcagtaagggaagcggccgaggggaggggcgggccagcgaggtcggaggtcagccccagggcatcacgggaagggaaggtggaagtactcgccggggccacctgcggctgcggggctgcctcgtgcccc

SEQ ID NO: 166961 - DNA, 451 bp, Homo Sapiens
tcttcattaaagaatttaatagggagttgattatgttgtagaatcatatcgtcctattctgtgacacattagaaacataaactttagggctttttcatctccacagcatagaggtctgatcgcttctgtctaaaaacggggatttgctggcgtatttcagccagcttcttcaggtctatgtctgaatacacgattgcttcttctgtgccagctttggctagaacctccccccaagggttcaccacggtgctgtgtccccaggcaacataggaggctttgtcatcccgggcaggagaggctgtggcacatacacctgattatcaacagcccggcttcgctgaagtaactcccaatggctgggtcaagtggcaagttaaaaagcccctggatatacacacagttggaagcctcccgttcgcaaattttgtgcaaattctgcaaaacgattttc

SEQ ID NO: 166962 - DNA, 839 bp, Homo Sapiens
  misc_feature (754)..(754): n is a, c, g, or t
gggggtccgccggatctccagcgctcagtccgcgccgcaggtggtgcttgtctgcagagtcatgacctctttccgcttggccctcatccagcttcagatttcttccatcaaatcagataacgtcactcgcgcttgtagcttcatccgggaggcagcaacgcaaggagccaaaatagtttctttgccggaatgctttaattctccatatggagcgaaatattttcctgaatatgcagagaaaattcctggtgaatccacacagaagctttctgaagtagcaaaggaatgcagcatatatctcattggaggctctatccctgaagaggatgctgggaaattatataacacctgtgctgtgtttgggcctgatggaactttactagcaaagtatagaaagatccatctgtttgacattgatgttcctggaaaaattacatttcaagaatctaaaacattgagtccgggtgatagtttctccacatttgatactccttactgcagagtgggtctgggcatctgctacgacatgcggtttgcagagcttgcacaaatctacgcacagagaggctgccagctgttggtatatccaggagcttttaatctgaccactggaccagcccattgggagttacttcagcgaagccgggctgttgataatcaggtgtatgtggccacagcctctcctgcccgggatgacaaagcctcctatgttgcctggggacacagcaccgtggtgaacccttgggggggaggntctaaccaaacctggcacagaagaagccatcgtggaatcagaacatagacctggaagaacctggctgaaatacgccaagcaatct

SEQ ID NO: 166963 - DNA, 1147 bp, Homo Sapiens
tgatagcgcacgttgaggtatatgggcagagtcataggtggcacgcccacctgcagtggggaggccaagggatgcaggatcagtgggggctgagccaaggggggaggcccctcgggggcaggactcagcctgctggggctagaggccacgggcgatccgggggagctgctgctggcagctcggggactctcgggcttctcaaagtcacaaacccccagctcagagggaatctctgggagaggtggatggccaggtgtcctagtgtcgccagcagcggaagtcaggtgggctgaggcgagaggcttttggccttgaggctccatgggcatggggtcctggatgacggtctgcttgaagagttcatctcgtaggtgagggagaaaacagtcaatgcgttcccaggtgatctcccagagggccgaggggccgcctccccgtgcatctgcactgtggaaaatctccgctgtgtccatcaccagaagcatgttcttcagagactcagggatcgcctctgacagtaagtcgctggagcctgcgtgcatgtacttgtccatgaagtccaagatggtgagccagagggccgcaaaggtagagagtgacagcagtggagacaggtgctgcaggaagaccttagagagcaatgtggaagccctcatccgggtctcctccatcccacccacatctgcagggctgatgttctccaagagcttggtaagtagaggaaacagcaccttgttaaaacaggactcccattccagggcatctagcttttgcagatcatgtacaagtagtgctcgctgcagataggtcagtgcctgcatccgtacctggcgccgggcatcgcagcacaggcaggcaataccctgcagtaaagggcaccagcagtgggcccagagggtgcgagaatcagcttcaatcttctggccacctgtctccaggtggcgttgctcctccgcccatgagctgtagatagaggctgcccgcgtgtgcagggtgtgcatcaggtctagcaactgtaaagacaccgtatggtagctggcaggcacgccttcgtcctcatcatcatcactctgcccgccccgagaggcatgttggctggaggttcgaggccggcgaagcattgatccctctttggatttcttcttga

SEQ ID NO: 166964 - DNA, 625 bp, Homo Sapiens
gacgtagcccaactggtcagtttgaacgaatcaagaccctcggcacgggctccttcgggcgggtgatgctggtgaaacacaaggagaccgggaaccactatgccatgaagatcctcgacaaacagaaggtggtgaaactgaaacagatcgaacacaccctgaatgaaaagcgcatcctgcaagctgtcaactttccgttcctcgacaaactcgagttctccttcaaggacaactcaaacttatacatggtcatggaggacgtgcccggcggtgagatgttctcacacctacggcggatcggaaggttcagtgagccccatgcccgtttctacgcggcccagatcgtcctgacctttgagtatctgcactcgctggatctcatctacagggacctgaagccggagaatctgctcattgaccagcagggctacattcaggtgacagacttcggattcgccaagcgcgtgaagggccgcacttggaccttgtgcggcacccctgagtacctggcccctgagattatcctgagcaaaggctacaacaaggccgtggactggtgggccctgggggttcttatctatgaaatggccgctggctacccgcccttcttcgcagggacccactc

SEQ ID NO: 166965 - DNA, 477 bp, Homo Sapiens
ccgtggagagagtctctcctttcttctgctagtcatcccaagtttttcttcacctatcacctggactcgtagcgtgatatggtctaaatctatactgaatgcgcgttgcaagatatgtcgaaagaaaggcgatgctgaaaacatggttctttgtgatggctgtgataggggtcatcatacctactgtgttcgaccaaagctcaagactgtgcctgaaggagactggttttggatgtttcccaggtggagaatacccgccactatctgcaacactcagcgtttgctcttctgcagagatcccaatcacattcatggcgtgcagagtttcctgaaactcccgcctgtcgtcaatgtcatcaaccttgtatgagcccgagaggctcaggtagtaataatagtccatgctggtgatgccaaggctgtgtttctgctctgcagaggcgccctcgataagctggtcaaatatgtgaaaatccg

SEQ ID NO: 166966 - DNA, 360 bp, Homo Sapiens
cccgtttgctgattatgacatttgacccagaatctcaagaaataccttaaatcatactgcatgaaataaatgacccatttaattcctgattagttgaactccttaatgacttttcagttttgtatataatagaaaggttcaagaacctttgtagatttgcttacaactgctgctggtatttatgaaagcttttaaaagttatgttatattcttctgcatctgttgattccacattaatgtaattctcaagtattttataaacaagccttgggtgttagaatggtctgtttcaaattttcaggcatgctatttcgacttacttactgcaaggtatcacccccctttcctcccctccactat

SEQ ID NO: 166967 - DNA, 727 bp, Homo Sapiens
  misc_feature (76)..(89): n is a, c, g, or t
  misc_feature (361)..(361): n is a, c, g, or t
tatgtagctatactagttggaatatagtagtactttgttagtttagttattttacccaggaggcagctgttagttnnnnnnnnnnnnnntttgggaatatacggtacttggggggttaattctatactaaaacttgaaatggtgagtgactctgggtcatgcttaatttatgcagaatatcctccgaatcctaaatctagagctccagggatgctggtcattaagaagggtaatacaaaagacttacagctatcgggatccccagtagtaggaaatcttccgtcacagccagttaagagtggaactggtccaagtgttaataagggtttagtccctaaacctgttgctccacctagaaaanctacacaatagaacaattacaaccgggttgtagttgtactatgggtggcctttttaataagtgggggggaggagagtacaaattacagcataacagaatccgtttcgtgaattaatgcagtctgtagtaagcatatcatatagcagttattatccagttaaagaaagatacagttgaaaaacattacgttttaattctccatgagtaaagtgataagtaactataaaatcattattgggagaacatggaaacagtcaagcataacgaaccttacagaaagataattatctccaaatttaggaagtacatgtacctgcctacccacctcttcaagcctatgcgtaccacacgtgcaaaatacataca

SEQ ID NO: 166968 - DNA, 2841 bp, Homo Sapiens
  misc_feature (704)..(726): n is a, c, g, or t
ggggaccgcggcgtgagcggttgcttgggccagaaggttctctggtggaggcgctcttcctggtgtcccgcccagtaggtgattgaatgactcagatatgaagatcatcatctaggttttgtgtaaaaggccctggatattttaagtggccattttggatttacagtgtttttggataattttgccccagaagtttattaaaattggcaagaatcgtctgtgaagtgaattgatagtagtgaacaattcagcaagctacttaaaaagagacccaggcagcatttcttcagtattttggttcaaacggattatataactggttacagtatttcagctggtggtaatttttgcctccccttcccccaccccgttgttggggttcttcagccgaaactgagagacgttgatttgtgtactgagtagtttcagcagtttcaaatgactgagtattgctgaagtttcatggcagtttatttttacctttattgaaagttttaggaatttttgacttcagctctttcatgtcacaatgggacactttttctgaatgaagagattgaaagaatacagagtttttttccttttatcttttatttacgtggaaatttaaaatgttgcagttttccggcagcatggtagtattgagatagctatgggtgtctctgtatatgctgatgtttaggaatgctcttcagatgtgaaannnnnnnnnnnnnnnnnnnnnnnggctcgtaaattggatatttcatctggagtggacaagtacaacagtggcaagtacatggaataataaagaagactttgatcttaaatctaaagaacttggctaattcgggagatagccatatgaaaactttaaaacagaagtatgggtagctgacttgaagtaactctatgtcaaatagtcgtaggttaagtatcttcaaagaacttcgatattatttcagaggatacaaaataaaaatacaaactggaaaataaagattacagagaaaaaaccaacaccttcctgtgcagtcctgttggaatttggacttgccatgaggtgttgaagccttgtatcactgagttggagagactggacctaaatggcgcagcatgactttgctccagcctggcttaatttccctactccaccatcatcaacaaagtcgtcattgaattttgagaagcattctgaaaactttgcatggacagagaatcgttatgatgtgaaccgtcgacgacacaactcttcagatggctttgattctgctattggacgtcctaatggaggtaactttggaaggaaagaaaaaaatggatggcgtacacatggaagaaatggtacagaaaacataaatcatcgaggtggataccatggtggaagttcccgttctcgtagcagtattttccatgcaggaaaaagccaaggactacatgaaaacaacatacctgacaatgaaaccgggaggaaagaagacaagagagaacgcaaacagtttgaagctgaggattttccgtctttaaatcctgagtatgagagagaaccaaatcacaataagtctttagctgcaggtgtgtgggaatatcctccgaatcctaaatctagagctccaaggatgctggtcattaacgaaaggtaatacaaaagacttacagctatctggattcccagtagtaggaaatcttccgtcacagccagttaagaatggaactggtccaagtgtttataaagttttagtccctaaacctgctgctccacctacaaaacctacacaatggaaaagccaaacaaaagaaaataaagttggaacttctttccctcatgagtccacatttggcgttggcaactttaatgcttttaaatcaactgccaagaactttagtccatctacaaattcagtgaaagagtgtaatcgctcaaattcctcttctcctgttgacaaacttaatcagcagcctcgtctaaccaaactgacacgaatgcgcactgataagaagagtgaatttttgaaagcattgaaaagagacagagtagaagaggaacatgaagatgaaagccgtgctggctcagagaaggatgacgactcatttaatttacataacagcaatagtactcaccaagaaagggatataaaccgaaacttcgatgaaaatgaaattcctcaagagaatggcaatgcctcagtgatttcccagcagatcattcggtcttcaaccttcccacaaactgatgttctttcaagttcacttgaggcagaacacagattgttaaaggaaatgggctggcaggaagacagtgaaaatgatgaaacatgtgctcccttaactgaggatgaaatgagagaattccaagttattagtgaacagttacagaagaatggtctgagaaaaaatggtattttgaaaaatggcttgatctgtgacttcaagtttggaccgtggaagaacagcactttcaaacccacaactgagaatgatgacacagagacaagtagcagtgatacatcagatgacgacgatgtgtgaaggatttcctaacagctttagaaatcttagtgtgatacatctctcatacagtttggggtgaattgtaaaaatgaagaactataatttatgtagtgaaataccccattagaagaggattttttgggggacttcaatatgaagaaaaccaagaatgttttgttgggctgtgttgaacattatttctttgtaaatgaatgttgtaggaatgaggacttgggttggtccaacattgactttcttcatcactgcaacatttctctgactagcaatgtgacgatgtaacaaatgagattttctcatttaataataaaaaattgtgtaatgttttgc

SEQ ID NO: 166969 - DNA, 824 bp, Homo Sapiens
gcaggagactttgaggtaacatggtctggtggtggcatgagtcctcagaaggtatttgtaataaggttccacacccagctctctcagctgtttttaaatgaatgtgtgtgaggaacagatgggaaagttgggagatctgtctacagagaagcaaagttgtggttctcttgctaacttcaaggtgagggacattgggcaccctaagtttgggaacttggttgataaatacgtatatggtccattccataaatcagtggtgagtgactggcctgggttctagacctctgggaaccagcacctgagtcacagctgtctaggcctcggtgctggcctgggttctagatctctgggaaccagtgcctgagtcacagctgtcagtgcagccatttgcccaggctgctcccgagggggatgatgggaaattcagcagtgtagactcactttaaacaagctccggtgatcctgaaatgctgaagatcgtgtaggtgggttgtggggtcagcagagctgccatctgcccacgtctggaaaacaacacacggtgagtcaccggttggccatgagatctccccacttaaaggtgctgtgagcttgtctctaagatatatacctcttccttttgtcttttgctgtaagcttgacctttggcagatctgatgaaaatacaacctcttatgtatagttgccttgattataagccatagtaaatcgagctgttcgcatttttgcaggcctgcattttctactgggaggttcatcaaaccttccacttagcaatagccctgactcaggcagaatggctcatagattagccttcgaaagaa

SEQ ID NO: 166970 - DNA, 876 bp, Homo Sapiens
ggggccctgatcttgcaaggggtaaaggaaatatagaaactagttctgaagatgaagatgatacggcagatttgtttccagaagaatctggttttgagcatgcttggagagaattagataaagatgctcctcgtgctgatgagattacacgtcgattagcagtttgtaacatggactgggatagattaaaggcaaaagatttgctggctctgttcaattcatttaaacccaaaggaggtgtaatattttccgtcaagatatatccttcagaatttggaaaggagaggatgaaggaagagcaagttcaaggaccagtagagctattaagtattcctgaagatgccccagaaaaagactggacgtctagagaaaaattgagagattaccaattcaaacgactgaaagtactattatgcagtagtagactgtgattctccggaaacagctagtaaaatttatgaggattgtgatggcctggaatttgaaagtagttgttctttcatagatctaaggtttataccagatgatattacttttgatgatgagcctaaggatgtagcctcagaagtgaatttaacagcatataaaccaaaatatttcacttctgctgcaatgggaacatcaacggtggaaatcacttgggatgagtctgatcatgaaagaattacaatgctcaacaggaagtttaaaaaggaagagcttttggacatggattttcaagcctacttagcttcctctagtgaagatgaagaggagacagaagaggagctacaaggtgatgatggagtcaatgtagaagaagatgggaaaacaaagaaaagtcagaaggatgatgaagaacaaattgctaaatacaggcagctcttgcaggttatt

SEQ ID NO: 166971 - DNA, 599 bp, Homo Sapiens
  misc_feature (268)..(268): n is a, c, g, or t
gaatttcatgaccacgtccagcacatagtaagtccagccagtatgaaatgctcgactcagaaaagcgcctttctggttactgtggcttaaagccagccaacctttatgctcgttccatatttggtgaagatgcacttgcaaatgtcagcattgagaagccaattcaccagggaccagatgctgctgttaccggccatataagaattcgtgcaaagagccagggaatggccttaagtcttggagataaaatcaacttgtcacagaaganaactagtatataaaaataaacaaaaagtccttgaagctttacagttaatttaggtatgggcttactggactccaacatcttgtgtactctttcatgcttatatagaatctgagttcatgctgaatacttttcagccaataatttatagcctttcccttaaatcaagattgagtttaaaattatagtttgtctttggtcttaacagttctgaatgctgtcctcaaagtatataatgtttcatgtaccaagacccttttcacagtacaataaacagatctattcataaatttttgttattttataaataaatgattacataattttagttaaa

SEQ ID NO: 166972 - DNA, 1935 bp, Homo Sapiens
ttttggatagatctgtttattgtactgtgaaaagggtcttggtacatgaaacattatatactttgaggacagcattcagaactgttaagacaaaagacaaactataattttaaactcaatcctgatttaaggggaaaggctataaattatttggctgaaaagtattcagcatgaactcagatttctatataagcatgaaaggagtacaaaaagatgttgagagtccagtaaggcccatacctaaattaactgtaaagcttcaaggactttttgtttatttttatatactagttttcttctgtgacaagttgattttatctccaagacttaaggccattccctggctctttgcacgaattcttatatggccggtaacagcagcatctggtccctggtgaattggcttctcaatgctgacatttgcaagtgcatcttcaccaaatatggaacgagcataaaggttggctgccataaagccacagtaaccagaaagggccttttctggagtcaggcatttcatattggttgactttaatatgtgctgtaagtagtcatttaaatcaaccatgttggtgttaactgtcactttgttttcccattcaaattcggcccacatctgacggaattctgcatcagtgcaagttgcaggctggatatagtccatgatgtcgatgtgaatatcactgagaaccacacaatttctgtcacttgctgctccagagacatcataaactatattaccaaaaattattccattttctgttgatgctactttgacgttagctttaatatttgcgaagtcatgaggagcaagagtcaaaggagacggcttttccacaagtttcagatcccctagtgtagctagttctaatgtgcaattctgcaaagtatcactggtttggttcacaacaagtacatccaggacaatatcatattggttgacatgaacgtaagcttctgcatatacaggatctgagaaacctgtcaattgggtgaccttgttaagtttagatgctaggggatctgctgcctctttcctctgtgtgttacccattgctgccagtaaactcagctgaaactgatcttccttgcagttcatttcattcttagcagttagttgcatgaaggaaatggggtcatcaggctgtactgtcacattcctcttttcagattctttcttttgggataatttctcttcttctagtttagcagataacatgtgagaaagggactgtctgcattccttattgaaaatgtcattcattaaaggtgaacattcagacaagaccttgaggcacagggaaattcgatccacatcatcatcagtaattggcttcttaggaagagaggattttcccaaatgcaggatagtagccatgagcaacatagcctcagcaacaaaagaattttgctttttcttctcctgaaccaaagctacatagcgcaatgcaatcttggtcagagttgtggcaagggaggcagcaacaaagaaatctccatccagaaggaatcctctcaagggaggtctgtcttcctctttcttggtgggtctagaactgctaagggcactctgagttgcataggtacccatttcagtaaccaatttctgaactggccctacagttatttcttcttcaggttttaattcaccagcttctttctttatttctgactctacaattgggatctctccaagggacctgcggatctcagtcatcacactctgaatgtcttccttggtactacagtattctcccaggatccataatgctcctcggtaaatcttgacagatttaatagcatgaaagacttcaagcatcttctcaacaataagcattctcaggttatcaaagcgctgaatggcttcacgaacaaactccaagacatcagcagctgctgcttcgttgttgtcactgagaaattccattaacaccc

SEQ ID NO: 166973 - DNA, 572 bp, Homo Sapiens
ggcctccaatttggctactagaatcttgcttttaacgctactttttgaggagttgaagctaccttgtgcttgggtggttgaatcaagtggcatccttaatgtcctaatcaaactcttggaagtggttcagccctgcctccaggcagccaaggagcagaaggaagtccagaccccaaagtggatcacaccagtgttgctcctgattgatttctatgaaaagacagccatctcctcaaaaaggagagcccagatgactaagtacctgcaatccaacagcaacaactggcgctggtttgatgatcgctctgggcgttggtgtagttacagtgcaagcaacaatagcactattgattctgcctggaaatctggagagacaagcgtgcgattcactgcaggccgaagaagatacacggtccaattcactacaatggtgcaggttaatgaggaaacagggaaccgacgccctgtgatgctgactctcctcagggtacctcggctgaataaaaattcaaaaaacagcaatggacaggaactagagaagacgctggaagaaagcaaagaaatggataccc

SEQ ID NO: 166974 - DNA, 611 bp, Homo Sapiens
gagtcggtaccgtcattatcaggtcacacacacggtatactgtgtactggcagctcatcaagaaggtggaagcagcctggcaacatagtatctgtgaaagtgtggagctcatcttgtccaacgggtcagcatcctggaacttctctagacatttagcctcttcctcctcctgcttttcccgagctttccgttcctcttcctccttccggcaagcaacttcctcaggtgactctgccctttgatccattggaatatcctgtcccagagacatagcaattgctctcatcatctggtcctcttcagacatgctgagatcccgaacaactcctcccatgattggaggagggtgggttaaaaggtactctgtggcctgctccatggtgctggtgttcaacagtgcctccattgcatgttcccttgtgaagcccatgtccatgagctgttgcagttgttgctggttgacttgaggttcccggcgggagccaccttcctcttgccctgtatcctcttctcctcgagacccctccttctccttgcttagtctctctcgaatcacagggttctcctcggaggatgtggcatagaatggccagcatcgattcagccattcg

SEQ ID NO: 166975 - DNA, 1025 bp, Homo Sapiens
cttggattggatccacaccgttacttcgtatcaacatccagaaagggtgtagtgagatgagagttggagcagagtccgcgagccaacccgagcccatcaacctggacaactgtcgccgtgctttcaccagtgaggaagagctaggggaaaatgagatgtactactgttccaagtgtaagacccactgcttagcaacaaagaagctggatctctggaggcttccacccatcctgattattcaccttaagcgatttcaatttgtaaatggtcggtggataaaatcacagaaaattgtcaaatttcctcgggaaagttttgatccaagtgcttttttggtaccaagagacccggctctctgccagcataaaccactcacaccccagggggatgagctctctgagcccaggattctggcaagggaggtgaagaaagtggatgcgcagagttcggctggggaagaggacgtgctcctgagcaaaagcccatcctcactcagcgctaacatcatcagcagcccgaaaggttctccttcttcatcaagaaaaagtggaaccagctgtccctccagcaaaaacagcagccctaatagcagcccacggactttggggaggagcaaagggaggctccggctgccccagattggcagcaaaaataaactgtcaagtagtaaagagaacttggatgccagcaaagaaaatggggctggccagatatgtgagctggctgacgccttgagtcgagggcatgtgcctgaggggcagccaaccagagttggtcactcctcaggaccatgaggtagctttggccaatggattcctttatgagcatgaagcatgtggcaatggctacagcaatggtcagcttggaaaccacagtgaagaagacagcactgatgaccaaagagaagatactcgtattaagcctatttataatctatatgcaatttcgtgccattcaggaattctgggtgggggccattacgtcacttatgccaaaaacccaaactgcaagtggtactgttacaa

SEQ ID NO: 166976 - DNA, 688 bp, Homo Sapiens
ttcttgaggatcccccgagctcctcaaatacctcaggaagctagtaatcatgcccaggattgtgacgacagtatgggctatcaatatccattcactctacgagttgtgcagaaagatgggaactcctgtgcttggtggccatggtatagattttgcagaggctgtaaaattgattgtggggaagacagagctttcattggaaatgcctatatcgctgtggattgggatcccacagcccttcaccttcgctatcaaacatcccaggaaagggttgtagatgagcatgagagtgtggagcagagtcggcgagcgcaagcggagcccatcaacctggacagctgtctccgtgctttcaccagtgaggaagagctaggggaaaatgagatgtactactgttccaagtgtaagacccactgcttagcaacaaagaagctggatctctggaggcttccacccatcctgattattcaccttaagcgatttcaattggtaaatggtcggtggataaaatcacagaaaatgtgtcaaatttcctcgggaaagttttgatccaagtgcttttttggtaccaagagacccggctctctgccagcataaaccactcacacccaggggaatgagctctctgagccaggatctggcagggacgtgagaagtggtgcgcaagtgggtgggagaggagtccctg

SEQ ID NO: 166977 - DNA, 1242 bp, Homo Sapiens
  misc_feature (657)..(690): n is a, c, g, or t
  misc_feature (841)..(841): n is a, c, g, or t
  misc_feature (864)..(864): n is a, c, g, or t
  misc_feature (920)..(920): n is a, c, g, or t
caagaaagatgggaaggaaggtgctgaggaaatagacagacatgttgaacgcagacgttcaaggtctccaaggagatctctgagtccacggaggtccccaagaaggtcaagaagtagaagtcatcatcgggagggccatgggtcttctagttttgacagagaattagaaagagagaaagaacgccagcgactagagcgtgaagccaaagaaagggagaaagaacggcgaagatcccgaagtattgaccgggggttagaacgcaggcgcagcagaagtagggaaaggcatagaagtcgcagtcgaagtcgtgataggaaaggggatagaagggacagggatcgagaaagagagaaagaaaatgagagaggtagaagacgagatcgtgactatgataaggaaagaggaaatgaacgagaaaaagagagagagcgatcaagagaaaggtccaaggaacagagaagtaggggagaggtagaagagaagaaacataaagaagacaaagatgataggcggcacagagatgacaaaagagattccaagaaagagaaaaaacacagtagaagcagaagcagagaaaggaaacacagaagtaggagtcgaagtagaaatgcagggaaacgaagtagaagtagaagcaaagagaaatcaagtaaacnnnnnnnnnnnnnnnnnnnnnnnnnnnnnnnnnnaagtcgaagtggcagtcaaggaagaactgacagtgttgaaaaatcaaaaaaacgggaacatagtcccagcaaagaaaatctagaaagcgtagtagaagcaaagaacgttcccacaaacgagatcacagtgatagtaaggaccagtcagacnaacatgatcgtcgaaggagccanagtatagaacaagagagccaagaaaaacagcataaaaacaaagatgagactgtgtngaaaatattttgtaaaagtggatcacattgaatcctataaatgattaaatctgcttttttcccccaagttgagattgtgcagtagttcgcactccctcaagctctccctgtaggctgcattttcatttcctctttcgtgtagggaagtgcctttgtatttccatttattgcattggtgttttcacccaattgtcaagttcgatacatgtatgcacagattgttcttgcatttttattgtttgtttttgaaatgtacagtctgtacatatgacctgaaaatgttttaattcctttggcatggttgccatgttggttaaatttg

SEQ ID NO: 166978 - DNA, 778 bp, Homo Sapiens
gttgcatatattggagcgcgggattgatgtatatagatatacacagccgcctacagatctgtgggactggtttgaatccttccttgatgatgaagaggacctagatgtgaaggctggtggaggctgtgtaatgaccatgggagaaatgctacgatcttttctcacaaaactggagtggttttctaccttgtttccaagaattccagttccagttcaaaagaatattgatcaacagattaaaacccgacctagaaaaatcaagaaagatgggaaggaaggtgctgaggaaatagacagacatgttgaacgcagacgttcaaggtctccaaggagatctctgagtccacggaggtccccaagaaggtcaagaagtagaagtcatcatcgggagggccatgggtcttctagttttgacagagaattagaaagagagaaagaacgtcagcgactagagcgtgaagccaaagaaattgagttccacacattccaccttgatgtgtattctttcttaaacttgatctgccagagaatatggttgcattaagatgtcaggctggttttccctttccataatgactctaatcctactttataaatgaaagacattattactcatcctcagtcttactaggatggatttgaacaggaagggggtaaaaactcctctgggaaacaagatagagtggcaatttgaaatattgctattcatgttggaaattgcaagccagatgatttttagttattttcaacacatgtgaaggaagtgcaggaaacaaga

SEQ ID NO: 166979 - DNA, 478 bp, Homo Sapiens
ccctacgaatgccttgtctgcgggaaagccttcagcgaccactcatccctcaggagccacgtgaaaactcaccggggagagaagctctttgtgtcatccgtgtggaaaaggctccagtgagcgcgcctgctttagagacacaggatgattcagaccggaaacagacctcgtgggtgtaagaggaagcctctgtgagctcgcaccttactgggtgcaaaagaatccacggaacttgggagaagtccagttcctgtaaaaactgggaagacgaggcgttctcatcccataggaggtttgtgagaactcacgccgggggtgaaaatgtacgtctgtagcatggagaagccttcagggtacattcagctcgtaacaaacacaggaggacttaatggcagcttggcatttaatgtcaaaatccaagccgtggcatttaatgtcaaaatgacttcagaccacttctagccttctgggcccatga

SEQ ID NO: 166980 - DNA, 611 bp, Homo Sapiens
  misc_feature (199)..(200): n is a, c, g, or t
  misc_feature (211)..(213): n is a, c, g, or t
  misc_feature (221)..(221): n is a, c, g, or t
ttaaatggccagcatgactatctttcccaacccaactaatgttatatgcgaccatcgaaagactgttaaagaaagagatgactgagtcgcactagtttcctaaggacgcttggcagatacgcagcaagagaagcaagtgcttatgaacaggtgaaacaagttttgcaaatatctgaggaagccaatttgtgaaaaaacnncaaggctttannnatccagtngtgacccagttgaggaaggagctggagaggcaggcggagcgacttgaaaaagaacttgcatctcagcaagagaaaagggccattgagaaagacatgatgaaaaaggaaataacgaaagaaagggagtacatgggatcaaagatgttgatcttgtctcagaatattgcccaactggaggcccaggtggaaaaggttacaaaggaaaagatttcagctattaatcaactggaggaaattcaaagccagctggcttctcgggaaatggatgtcacaaaggtgtgtggagaaatgcgctatcagctgaataaaaccaacatggagaaggatgaggcagaaaaggagcacagatagttcagagcaaaactaacagggatcttgaaattaaagatc

SEQ ID NO: 166981 - DNA, 415 bp, Homo Sapiens
cttggcttatggagatgcctcgtgaaacacagctgggcaagtattaatgtatatggaacagcctggatttctgcatatggataagccaccttggaataggaagaggtgttgagcctggactgtgggaggaaagagctgcgtggatagattcaaacttcctgtggtagtgctcccagtctgacctctgtagaccttcagtactcactcttcttgcttaggctctctgtgtgttgaaagccatcccgtgttgcatgtgttgttacaattttctgtgatacttgcaatttatgtttgagaagaagtgaaaagtttgccttctgacctcatttccttcttgatcagtgaacactaacattttggggacaacttagtcaattggttttccttacaacaaaataaagtaaaatgtagcagt

SEQ ID NO: 166982 - DNA, 1433 bp, Homo Sapiens
  misc_feature (32)..(32): n is a, c, g, or t
  misc_feature (101)..(101): n is a, c, g, or t
ccatttcccatttaggcccaagccccggactncaaaatctgtaacaggaaattccccgttgctgtcaaaaaaactctcggccccctctgcactaactttgnctgctgaaagttatctggctcctctgccttcaaactcctccagcttctgaccactgggcaacgcaccactgccagttcctctggggctctcaagaatcactggagtacttctgcagctctcttggatgacctaggggtgcagcaacaggcacaaagctctcctcccaggtcctggatttctttatttcttcccttccttctccttggtgtatttgtcctgtgagtgtctgactctatcactttcaaagctgtgctgtgatttgggtctttagatgaggcttcatgccctggcataagcaaagagcctgatacagagtggcctgcagggagcagctttgaggtatttccagagccccggaggtgctgcagcgagtgggcaagcccagctttcttaaggactttttgatcctgcttcagcttctgctccaatgtgggtaaaaacttgctttttaaaactcttcggatcacatcagtgctgacatcaaagccttcagccaacctgggaactgaccaggactctggaaattcctcatgtaaataccgtatctgctccatggcttcccacgtcagggtcctgggcggggcaccaggcgcctccatttgcctccgaattttctggaatcggattgcttgtttctgtcgtttcagggtgctgggggaagagaaccaatggcagaagccatgcgtggaagcagaatggatgtttgaagagcctcaggctaaatcatggagcgcccagccctcttctctttgatcgcaagggcaaccgggccatgttgccggcttagagctgctccgtacacccagaaagctaacacctagaacaataactgcctgtaagcatgccgaactctcgtaaactgatgatgaaatacgtcactaatgaagggaccagtggtcccaggggagctgaacacctgacgctgcgcccctaacaacgggtaagaagaaacaagggccgctgcgcaagcagcggcaggacacccggcgccaagggggcgcggcctggagcgccggggcacgaggccctgcttcaagctgagggcccggggagaagccggtacctctccacctcctgcagctcccgttcctccggctcccagtcggaatcggggtccggctcccggccaatagggcctgggcccgccaccccccgggtcgcgaacccacagcgagtgacggcggcgcaaacgcgcccgcccagcaagagactcagggtaaccgccatgtcgacgcaaacccggacgcgtgggcggacgcgtgggtcgacggacgcgtgggtccggacgcgtgggtcgacgatatcccaaaacttccggacctgtaccagcc

SEQ ID NO: 166983 - DNA, 972 bp, Homo Sapiens
gagtcctggtcagttcccaggttggctgaaggctttgatgtcagcactgatgtgatccgaagagttttaaaaagcaagtttttacccacattggagcagaagctgaagcaggatcaaaaagtccttaagaaagctgggcttgcccactcgctgcagcacctccgggactctggaaatacctcaaagctgctccctgcaggccactctgtatcaggctctttgcttatgccagggcatgaagcctcatctaaagacccaaatcacagcacagctttgaaagtgatagagtcagacactcacaggacaaatacaccaaggagaaggaagggaagaaataaagaaatccaggacctggaggagagctttgtgcctgttgctgcacccctaggtcatccaagagagctgcagaagtactccagtgattctgagagccccagaggaactggcagtggtgcgttgccaagtggtcagaagctggaggagttgaaggcagaggagccagataacttcagcagcaaagtactgcagaggggccgagagttctttgacagcaacgggaacttcctgtacagaatttaagtcggggcttggcttatggagatgcctcgtgaaacacagctggggcaagtattaatttaatatgggaccagccttggatttcctgcatatgggataagccaccttggaataagaaagaaggtggtgagcccgggactgggggggaggaaaaaaccggccgggggaaaaaattccaaacttccctgggggaaaagggcttcccagcccggacccccggtagaacccctccggaaacctcacctctttcttggcgcttaggagtcatcccgcgggggggtgtgaaagaaacactaccccggggttgtgagtgcgggcccgcgctcacaccattttttcctgggcggagaacccttgcgcccacatttatgcgcccgcggggccaaaaaccacacc

SEQ ID NO: 166984 - DNA, 1029 bp, Homo Sapiens
ggcactgatgtgatccgaagagttttaaaaagcaagtttttacccacattggagcagaagctgaagcaggatcaaaaagtccttaagaaagctgggcttgcccactcgctgcagcacctccggggctctggaaatacctcaaagctgctccctgcaggccactctgtatcaggctctttgcttatgccagggcatgaagcctcatctaaagacccaaatcacagcacagctttgaaagtgatagagtcagacactcacaggacaaatacaccaaggagaaggaagggaagaaataaagaaatccaggacctggaggagagctttgtgcctgttgctgcacccctaggtcatccaagagagctgcagaagtactccagtgattctgagagccccagaggaactggcagtggtgcgttgccaagtggtcagaagctggaggagttgaaggcagaggagccagataacttcagcagcaaagtagtgcagaggggccgagagttctttgacagcaacgggaacttcctgtacagaatttgagtcggggcttggcttatggagatgcctcgtgaaacacagctgggcaagtattaatgtatatggaacagcctggatttctgcatatggataagccaccttggaataggaagaggtgttgagcctggactgtgggaggaaagagctgcgtggatagattcaaacttcctgtggtagtgctcccagtctgacctctgtagaccttcagtactcactcttcttgcttaggctctctgtgtgttgaaagccatcccgtgttgcatgtgttgttacaattttctgtgatacttgcaatttatgtttgagaagaagtgaaaagtttgccttctgacctcatttccttcttgatcaggtgaaacacctaaccatttcggggggacacacttaggtcaatttggtttttcccctttacaaacaaaaaataaaaggtaaacatgttagacaaaaagcaaatagcaacaacccacaactaatccaaacaatcactcaccccca

SEQ ID NO: 166985 - DNA, 1504 bp, Homo Sapiens
ggctgcgcggtgctccacacgctggttgctggtggttgtggggaccccgcggctgccggctatatcgggtagaggggcccggccgcccagggagggcgtggtgggggcatggctgagccgcaagctgagcgtccccgcctttgcgtcttccctgacctcttgcggcccccgagcgctgctgacattgagacctggtgtcagccttacaggaacaaaacataaccctttcatttgtactgcctccttccacacgagtgcccctttggccaaagaagattattatcagatattaggagtgcctcgaaatgccagccagaaagagatcaagaaagcctattatcagcttgccaagaagtatcaccctgacacaaataaggatgatcccaaagccaaggagaagttctcccagctggcagaagcctatgaggttttgagtgatgaggtgaagaggaagcagtacgatgcctacggctctgcaggcttcgatcctggggccagcggctcccagcatagctactggaagggaggccccactgtggaccccgaggagctgttcaggaagacctttggcgagttctcatcctcttcatttggagatttccagaccgtgtttgatcagcctcaggaatacttcatggagttgacattcaatcaagctgcaaagggggtcaacaaggagttcaccgtgaacatcatggacacgtgtgagcgctgcaacggcaaggggaacgagcccggcaccaaggtgcagcattgccactactgtggcggctccggcatggaaaccatcaacacaggcccttttgtgatgcgttccacgtgtaggagatgtggtggccgcggctccatcatcatatcgccctgtgtggtctgcaggggagcaggacaagccaagcagaaaaagcgagtgatgatccctgtgcctgcaggagtcgaggatggccagaccgtgaggatgcctgtgggaaaaagggaaattttcattacgttcagggtgcagaaaagccctgtgttccggagggacggcgcagacatccactccgacctctttatttctatagctcaggctcttcttgggggaacagccagagcccagggcctgtacgagacgatcaacgtgacgatcccccctgggactcagacagaccagaagattcggatgggtgggaaaggcatcccccggattaacagctacggctacggagaccactacatccacatcaagataccagttccaaagaggctaacgagccggcagcagagcctgatcctgagctacgccgaggacgagacagatgtggaggggacggtggacggcgtcaccctcaccagctctggaaaaagatccccttggaaactaggccggggaagcaacaagtcccctccaaggggcccagggccaccctgggcaaaacggggaagggattctcccgaaaccacccaagccaccttaaggcttcccccacccccggcagaaaagcccttcctggggaaacgggtcccc

SEQ ID NO: 166986 - DNA, 441 bp, Homo Sapiens
tgtaaaaacctctcaccgtcacaagacttggagttctcagcagaaatctggaatgttcgctggcatgattgtgctttgctttgagtccacctttgtagttgcaatcaatgaagtaaacaggaaatagtccagtgttttatttaggggctaaaaaatcaccaccagcatggcctggggtgaaaagcctcatcccattagggtttaggccagaaagtgtgaatctgtagcttggttaataacaaccagcttctctgattggtgggctgctgttgttactgtggtctctaaatgaagccatgagaccttattatttttttaaaaaaaacagaaagtgcctaagttatttcctctgtgtagctgtgcaaattaaaacaaaaacaaccatttaaaaataatgaaaaataatctctttattctctctctccaacagatctctgaccc

SEQ ID NO: 166987 - DNA, 459 bp, Homo Sapiens
gatccccgtgaaaggccgaactagtgaaactgctacagacatacgctgctctgaactctaaggccaccgtttatggggagcaggtggattactataaaagctatatcaaaacctgcttggataacttagccagcaagggcaaagtctccaaaaagcctagggaaatgaaaggaaagaaaagcaaaaagatttctctgaaatatacagcagcaagactacatgaaaaaggagttcttctggaaattgaggacctgcaagtgaatcagtttaaaaatgttatatttgaaatcagtccaacagaagaagttggagacttcgaagtgaaagccaaattcatgggagttcaaatggagacttttatgttacattatcaggacctgctgcagctacagtatgaaggagttgcagtcatgaaattatttgatagagctaaagtaaatgtcacctcctgatcttcct

SEQ ID NO: 166988 - DNA, 1084 bp, Homo Sapiens
gagaagtccgtccactctctcatcaggtgactttaagagacccgccgactgctaaataccgggcggcacacgtctacttcactgactcttgtccagatgccctgtgtaatgaactggtaaaatcccgagcagccaaagtcatcaaaactctgacggaaatcaatattgcatttctcccgtatgaatcccaggtctattccttggactctgctgactctttccaaagcttctacagtccccacaaggctcagatgaagaatcctatactggagcgcctggcagagcagatcgcgaccctttgtgccaccctgaaggagtacccggctgtgcggtatcggggggaatacaaggacaatgccctgctggctcagctaatccaggacaagctcgatgcctataaagctgatgatccaacaatgggggagggcccagacaaggcacgctcccagctcctgatcctggatcgaggctttgaccccagctcccctgtgctccatgaattgacttttcaggctatgagttatgatctgctgcctatcgaaaatgatgtatacaagtatgagaccagcggcatcggggaggcacgggtgaaggaggtgctcctggacgaggacgacgacctgtggatagcactgcgccacaagcacatcgcagaggtgtcccaggaagtcacccggtctctgaaagatttttcttctagcaaagagaatgaatactggagagaagaccaaccatgcgggacctgtcccagatgctgaagaagatgcctcagtaccagaaagagctcagcaagtactccacccacctgcaccttgctgaggactgtattgaagcattaccaaggcaccgtagaacaaaactctgccgagatgggagcaggacctggcccatgggcacagatgctgagggagaagaagatcaagggaccctattgcgaagccatcggtcccattctgctggattgccatcgttcacgcacttattgacaagaatccgcatcatccttctcttacatcttttttgacagcaaatgggctccacggaggaaacacctgcaacaaatgaatcccagacgggccagata

SEQ ID NO: 166989 - DNA, 1042 bp, Homo Sapiens
aggcgaattcagccattagtcttctccttcaaggcctttacacggagacgcgggagtgaagactggtgagctgccctcatttcttcctctttcatatactgtcgaaccatctccatagtaaatttagaaaagctatcttgtcctcctgagaatggcatgttcagttccttggcagtagacagtgtagttttttctggagaagcttcttcatcagagtcatcatgatgacctcttctcttttccatgttaaatctgcggtgactctctgaaggtagtaatgatcgaaatgattgttcttctatttcatcttctgtcatggattcatcaaatttcagagaatattctgttgcaatagacgttgagtcttttacatcaggaagagatggaacactatcacttcgtagagactcatctgcagcagtctgaacctgttcatcaatggaactctctatctgttcaccattaagtttcttctcatttcccttacaagatggaactgaaggactttcttggcggctgctaccactgctacttcttctatcatgattcttgtatcctgaagactcagaataactatcatatgaagcagaatacttctgatgctttgagtcaagggtcccttctttactctgagagagtgaaacagatggacttttcctatctgtttcagttctggtcctcagctgtttcacaaagtctggaaggtgctgccgttggtggtcatacagtattgcaaggggagctcctgaagccacgacagcatctgagatatgagttctagtcaactctgccatctcacagatttgacgtgctgcgtctgtggtgaggcgagcagtttctgactgctgagctgctattttacacgttgcttcctgcaggacttcagttacttcccgttgtgattgaaccacctgctgtaatgattctgcatggacctgagctgctttgtttcgggtttcttctaattgtctctgactctccagagcctcttgttcagcctttagtttcaagagggccaagtctcttcaggaagttgctgaga

SEQ ID NO: 166990 - DNA, 830 bp, Homo Sapiens
  misc_feature (782)..(782): n is a, c, g, or t
gggacgtgtggtgaggcctacagaagcggccttcagctggaccttggtctccccgccggacttcgagggtgtcatcgccgcccctgttgggggtgagcgccgcgcggctgcagcatgcctcacaggaagaaaaagccctttatagagaagaagaaagctgtgtcttttcacttggtccaccggagccaacgagatcctttagcagcagatgagagtgcaccccagagggttctattgcccacacaaaaaatagacaatgaagaaaggcgagcagaacagaggaagtatggagtgttctttgatgacgactatgactacctgcagcacctgaaggaaccatctgggccttcagagcttattccctcaagtaccttcagtgcacacaacaggagagaggagaaagaagaaacgctagtaattccaagcactggaattaagttgccttcatcagtgtttgcttcagagtttgaggaagatgttggattgttaaataaagcagctccagtttcaggacctcgactggattttgatcctgacattgttgcagctcttgatgatgattttgactttgatgatccagataatctgcttgaggatgactttattcttcaggccaataaggcaacaggagaaggagagggaaatggatatacagaaatctgagaatgaagatgaccgcgagtgggaaagatgtggatgatgaaaaagggagatagccatgatgactatgactctggcaggcctattgtcaaatgaagactgtatggtttgggcccgggaanaatcccgaagctatagcagatccctgggtcctggaggggaggaaccac

SEQ ID NO: 166991 - DNA, 442 bp, Homo Sapiens
ttatctcaaccggttaagatagacattcccagagcggcgtttatagacctccccctaggaatgcattcctttcccagggcattaatattaatattccttgctaggaaaagaatttagtgatatctttcctacttgcacgtccatttataggctctctgcaagaagaaaaatatggctctttttgcccgaccccacaggcagtcagaccttatggttgtcttcccttgttccctaaaaatcgctgttatactgttctttttcaaggtgcactgatttcatattgttcaaacacacgttttacaatcaatttgtacagttaacacaattatcacagtggtcctgaggtaacatacatcctcagcttacaaagataacaggattaagagattaaagacaggcttaagaaattataaaagtagtgtaagggaactgataaatgtcc

SEQ ID NO: 166992 - DNA, 640 bp, Homo Sapiens
tgtgatatagtaacattacagatgtaatagcccaggtgcagtggctcatgcctgtcttacgttaatctcgtaatcttgttatcttcctaagctgaggatgtacatcacctcaggaccactgtgataattgtatctaactgtataaattgattgtaaaacatgtgtgtttgaacaatatgaaatcagtgcaccttgaaaaagaacagaataacagcaattttagggaacaagggaagacaaccataaggtgtgactgcctaaggagttgggcagaatacagccatatcaggagtttttgatttcgcccttggccttgtgatctttgctttgccctttgccttgtggtctttactggcctcagaagcatgtgatctttgttctcctttttgctgtttgaagcatgtgatctttgtgacctactccctcttcgtacaccccctccccttttaaagtccttaataaaaacctgctgcttttgcggctcaggcgggcatcacggtcctactgataggtgatgtcatccctggaggcccagctgtaaaattccactctttgtactctttctctgtatttctcagctggctgacacttagggaaaatagaaagaacctactttgatatattgggggcggttccccct

SEQ ID NO: 166993 - DNA, 427 bp, Homo Sapiens
ctcgcccccgttctccccgttggaggaagatatatcagcatgtgatcaataaagagaggcgtggtgattacctggggaaaacagtgcaagttgtccctcacattactgatgctgtccaggagtgggttatgaatcaagccaaggtgccggtggatggtaataaggaagagccccaaatatgcgttattgagctgggaggcaccattggagacatcgaaggaatgccgtttgtggaggcgtttagacaattccagtttaaggcgaaaagagagaatttctgtaatatccacgttagccttgtcccacagctcagtgctaccggagaacaaaaaaccaaacccacccaaaacagcgtccgcgcactgaggggtttaggcctgtctccagatctgattgtctgctcgaagttcaacgcccatgagattgc

SEQ ID NO: 166994 - DNA, 423 bp, Homo Sapiens
ccgttgctcccgttgatcctgtttaacctgttcttccctgctatctttcaaaccttcggggccaatggcactactgcctgcctgagctccagtttcacaaggggttgtactataaaagttcataactttcttcagtgacaaggcaccagcttcataagtagcagccactctcacaccaacagcagatgcacaagagaccaccaggctgtttagggctgaggtgcttgtggtaggcgggctgtggagattaggaattgcttcttctaaaagaggctgagatggcattggcttttcaccatgctctgagtcctctcttactgaatgatctgacagtttccgtaggtattcattgactgcttgggtgtcagggtatgatggtatgtttctggccagaggaaatttcagttggatcagaagaggaga

SEQ ID NO: 166995 - DNA, 772 bp, Homo Sapiens
ggaacaccaacacaatcaataatggcactcagcagcaagcacagagtatgaccaccactattaaacctggtgatgactggaaaaagactgtaaaactccctccaaaggatctaagaatcaaaacttcggatgtgacctccacaaaaggaaatgagtttgaagattactgtttgaaacgggagttactgatgggaatttttgaaatgggctgggaaaagccatctcctattcaggaggagagcattcccattgcttcacctggtagggatatctgagctagagcaaaaaatggaacaggcaagagcggtgcctacctcattcccttacttgaacggctagacctgaagaaggacaatatacaagcaatggtgattgttcccatctagagaacttgctctacaggtcagtcaaatttgcatccaggtcagcaaacacatgggaggggccaaagtgatggcaaccacaggaggaaccaatttacgagatgacataatgaggcttgatgatacagtgcacgtggtgattgctacccctgggagaatcctggatcttattaagaaaggagtagaaaaggttgatcatgtccagatgatagtattggatgaagcagataagttgctgtcacaggattttgtgcagataatggaggatattattctcacgctacctaaaaacaggcagaatttactatattcccgctactttccctcttagggtacagaagttcctgaattccccatttgccgaaacccctatgagataaacctgatgg

SEQ ID NO: 166996 - DNA, 955 bp, Homo Sapiens
  misc_feature (199)..(199): n is a, c, g, or t
taagtcttgggaaccgtgagccccagggttggacccttggcaaaagccggtccaggtggtagggagtgcccttgggtcatctccatccccaggttggctcaataggctcccaaacagagggtgggtttgtgacaggacagcccctgtgggtggggagccttccacctgggggtgggagcaccctgtgaaaaacctgagngtggaacaggaggcctttagggacccgaagttcttgggaagggagttgggggtgtgggttcggctgaacttctttctagatcactaattaaaaggcacattcatgctggggaatggatagtctgtttgaccctgagtgccacagtcaagttttaggggacaggcaagaggcaaaggaacaaaaagggagacgaaggaaggaatgagaaaggcaggggaaaagaggaaggaggaagaactggtaacaaagggtgggccacggagtgtggctagcagagcctctgagggaggtggcccccaccagaacagaggctccctctgcctggggaggtgcaaagggctggtaaacaacctgactgctgttatttacaaccccccagcctaggggcctgaggggtcagtctaaggaggctgaggctccctccgccctgcccacctggggagggttggggaagtggagagttctgcacagtaggtgcagaggcttctgtctcccaggtatcctccccgaggtctggcaggataatgctgaccgggaggccttacctgccaaggggccagagggtgattttgctcttgagaaaacctggcctgccagctaaatcataggcctatttgtggccactacagcatatatttatttttctccctaaaaaatgctcaatacccctccccatatttaaaacaccacaataaaaatacataggaaattcaagtttacatagcatgccaagaaaaataaattgtcatgacttaa

SEQ ID NO: 166997 - DNA, 427 bp, Homo Sapiens
  misc_feature (324)..(324): n is a, c, g, or t
  misc_feature (375)..(375): n is a, c, g, or t
tactttacacaatccaatatgcaaaactggagcgtctgatatgaatgtctaaccctgggagagaacattgatagctaacctcactaggtaccagagagccaaggtgttacacgaggatatgtttaaaaataaaatgtttttggatatcctcacctcccatgctatcttctaagataactacaaataggcttcaaagatttaactgagttctgccaaggacctcccaggactctatccagaatgattactgtaaagctttacaaatcccaccttggccctagcgataattaggaaatcacaggcaaacctcctctctcggagacnaatgaccaggccaatcagtctgcacattggttttgttagatactttgtggngaaaaacaaaggctcgtgatagtgcagctctgtgcctacagagagcctccct

SEQ ID NO: 166998 - DNA, 600 bp, Homo Sapiens
aatggctgtgaagatagcatgggaggtgaggattccaaaaacattttatttttaaaatatcctgtgtaacacttaactcttggtacctgtgggttagcatcaagttctccccagggtagaattcaatcagagctccagtttgcatttggatgtgtaaattacagtaatcccatttcccaaacctaaaatctgtttttctcatcagactctgagtaactggttgctgtgtcataacttcatagatgcaggaggctcaggtgatctgtttgaggagagcaccctaggcagcctgcagggaataacatactggccgttctgacctgttgccagcagatacacaggacatggatgaaattcccgtttcctctagtttcttcctgtagtactcctcttttagatcctaagtctcttacaaaagctttgaatactgtgaaaatgttttacattccatttcatttgtgttgtttttttaactgcattttaccagatgttttgatgttatcgcttatgttaatagtaattcccgtacgtgttcattttattttcatgctttttcagccatgtatcaatattcacttgactaaaatcactcaattaatc

SEQ ID NO: 166999 - DNA, 285 bp, Homo Sapiens
atgtggcaggcttgggagatgcggcaagttttggggaggcagccatcgagaagggagatttgaaaccctgcgtggagatctgtgacaccatagccttggctaaatagttactggaggtagtggtgctaggtactgtcctagaaaccagggggtgggacccttgagaaccatttccaggtgagggggtagataagggaaggcggtacataagtggcttatctgaagtcttaataagtgaggaggaacaggagagttggggattattactaacttcacgacgggatg

SEQ ID NO: 167000 - DNA, 907 bp, Homo Sapiens
attaggggccaacaaaaattaaagggggggaccggcccacaaaaaagggtgttgttcaagaaaaaccacgtgaaattgacctgaatctggagttcagatttccccccctgcgtggactttagggatgccttcaagctatcactgcctcgctgggaaagagccctgactttcccgttctgccttgctgcagtatccttcaggggttccaaaaacaccactcttttacctgcacctgccttccgttcatcagcggagggcatcactagcgggggccaggactgagaatcgatgaatgggcattgctttggtgtagcatatttttctgtctcttggttttacacttgcaggggcatggagtcagatagaggtacaaaagtaccaaaacgatactggccacgcaagcagcaagagtggtaaaagctgtgttaaatgcctcatgagcatgggatctgcttacagtgaaattgctcacatttattgtgacgtccacagtttcatttaacaggcgttgcttattcattgcgatacaagaatacactccagcatcctcaaaacgagggctttctataaccagacttccattgtgaaacacgtaaaagttttccatctctttatccggctctagcagtctgttatctggacccacccagatgaaatccgtatttgcattacctgtcttgctgtcacagtggaccatcagtctttccccgacctgagcctcatgaataaagccaagcgcacgaaaggaaccattgatgatgctgtcagagcaattcataaagctatcctggagcagaagtacctgacgcgagtgcctggagtcagaccacaggcgacaggtgtaatcgttcttaaaatccatcactgagctaaagtgcctacgataccaaaagaccagcaaggagta

SEQ ID NO: 167001 - DNA, 1181 bp, Homo Sapiens
  misc_feature (993)..(993): n is a, c, g, or t
  misc_feature (1060)..(1060): n is a, c, g, or t
  misc_feature (1140)..(1140): n is a, c, g, or t
cggctttgaaacaggcagaagacatcccaggagacagcaaaaactataatgaatgtatccggcacgagaccatcagagttgcagtctgtgacatgatggaaggaaagtgtccctgtcctgaaaccctacgaggggtgatggagaagtcctttctggagtattacgacttctacgaggtggcctgcaaagatcgcctgcaccttcaaggccaaactatgcaggacccttttggagagaagcggggccactttgactaccagtccctcttgatgcgcctgggactgatacgtcagaaagtgctggagaggctccataatgagaatgcagaaatggactctgatagcagttcatctgggacagagacagaccttcatgggagcctgagggtttagaccctgctcccatctccccttcccccactcaagagtcccagcagaatcccttccccccaccccagggatggagaggcactgtgtatctccctccagactcgaagtcatcctgcaagatggcaagaaccaagcaagctccgatcccagggtgtgggagtgggggcctgttcccggtctgacctccttggcactggagcatctggggcttcgttcatccattcatcccgtatcaggggccaaggtacctttacaggagcacctagagcgagggcctttggaaaaaacaaaacaaccaacacacctctccacagggccagctccttagggataagtggaagatggaaaattgcaattccaagagggagtgtgcccaaatgatttatggggatacctggaagggagcttggggtgggggctgtctgtgacacttaagcagtctgggtggttgtctatttgtctgtcttcagtcttgaagcagggcatcccaatgcccttttcctccctgccttccttcccccattatttcccacaggccagcataattttgtttttcctaattatagtcactgttctagaccgaccaaagagaaggaaccgtggntggagtctagggctgctgatcaagtaagctttacctagcaccctgagcaccttttcttcccctcccnctcttttcctcaccctttttctagattgtaaaacagaaagggaaattgtggactggggactttaacccaaggtccttggntaaaaaccctggctgtggcccccgtaaaaaaagcctggaaa

SEQ ID NO: 167002 - DNA, 758 bp, Homo Sapiens
  misc_feature (99)..(156): n is a, c, g, or t
gggagaggctccataatgagaatgcagaaatggactctgatagcagttcatctgggacagagacagaccttcatgggagcctgagggtttagaccctgnnnnnnnnnnnnnnnnnnnnnnnnnnnnnnnnnnnnnnnnnnnnnnnnnnnnnnnnnngggatggagaggcactgtgtatctccctccagactcgaagtcatcctgcaagatggcaagaaccaagcaagctccgatcccagggtgtgggagtgggggcctgttcccggtctgacctccttggcactggagcatctggggcttcgttcatccattcatcccgtatcaggggccaaggtacctttacaggagcacctagagcgagggcctttggcaaaaacaaaacaaccaacacacctctccacagggccagctccttagggataagtggaagatggaaattgcaattccaagagggagtgtgcccaaatgatttatggggatacctggaagggagcttggggtgggggctgtctgtgacacttaagcagtctgggtggttgtctatttgtctgtcttcagtcttgaagcagggcttcccaatgcccttttcctccctgccttccttcccccattatttcccacaggccagcataattttgtttttcctaatttatagtcactgttctagacagaccaaagaagagggaacagggggggagtctaggctgctgatcagtaagcttttactagcacctggagcaccttttttcccctccctt

SEQ ID NO: 167003 - DNA, 229 bp, Homo Sapiens
caaagcgcgggggacaatgtgatcatccttggagagagatgtgagcaccaaggctgggtttgtatgtggtgggggaataaacacacttacttgaaaattaccatatgaactctaaatgcataattattattttgcttaattgttaaattaagggaaattttcttaaaattcttctgtttacatcacgtaacactacatttatctgattatatccgttgctcaatgccct

SEQ ID NO: 167004 - DNA, 393 bp, Homo Sapiens
tgccaagcgcggtcttgtatgaattaaagaataactcttttccccacccaaaactttgttttaaggaaaaattctgacaaaccattgtgtttgttaatataaaccagagaaaggtacaattaaatgtgagggtacctattttggcacatcatttaatatagttagtaatttattttttgtctctaatacaagcaccttctttagaaaaagcaactgggcattttggccaaagttaaaattttacaaaaggttacttgcccaactgtgtagagtctgcttgcacgcttttatctccaatactttccttagctttaagtagacagttttaggctaagagaatgtaacttcaaatccatccctcatcatatagtcctgggtgaggcagtaaatatc

SEQ ID NO: 167005 - DNA, 427 bp, Homo Sapiens
tgtggaggcggttcaggcggaggtggctctggcggtggcggatctgacattgagctcacccagtctccagcaatcatgtctgcatctccaggggagagggtcaccatgacctgcagtgccagctcaagtatacgttacatatattggtaccaacagaagcctggatcctcccccagactcctgatttatgacacatccaacgtggctcctggagtcccttttcgcttcagtggcagtgggtctgggacctcttattctctcacaatcaaccgaatggaggctgaggatgctgccacttattactgccaggagtggagtggttatccgtacacgttcggaggggggaccaagctggagctgaaacgggcggccgcagaaactgttgaaagttgtttatgccaaactctcatacagcgacctcattata

SEQ ID NO: 167006 - DNA, 424 bp, Homo Sapiens
gtgggtgcccttggccccacaagtcaaagtagcgcctatagtagtcccctctagcacagaaatagacagcagagtcctcagatgtcagcctagtgagctccatataggctgtgctggaggacttgtctacactcagtgtggccctgcccttgaacttctcattgtattcagtactcccctctccaggaaaaatccatccaatccactcaagtccctgttcaggcgtctgcctcacccagtctatatcataacttgtgaagatgtagccagaagccttgcaggacaacttcactgaagccccaggctttaccacttcagttccttactgctgcagcttcacctgggccatggccggctggccgcatagaaaggacaataaaggaattgcgaataataagggatcctctagaacgactcgcagcat

SEQ ID NO: 167007 - DNA, 578 bp, Homo Sapiens
tgtgatgacatatgttacaaggctggttatagtgtctcaatggacactgcaaagaactacataaaagaagtctgtctcaagcagttcgtatttgagtcagtggtcagatggggcagttgcgctcagctgcagtccctgactccggaaacactgtgcctctcaaatgatctagagctcatccttggcgtacatgaggggcagttgttgttctagtacccatttagcccatggctcttcaagccaattcacactgggaaaaacacaccctcacaagatgcctatccatttgagttcatacaggttttagtagctagaactaaaaaacatttttaaaattatctaaacaaattggtaccaaagaaaacttgccatacttaaacagtatatatgttcccttttttggctgagagattcaagtttgtgctatatagaacactaacagttactaaagactaggaaaatttgcaggagaaaggctatttttaaacttcacaataatttaaaggaagccaaataactaaaacttctaataaatgccataactaactatacctctacttgtcctgtcacacttgcgc

SEQ ID NO: 167008 - DNA, 460 bp, Homo Sapiens
gaggatccctgcgccaaatgtgaaagaactgcctggagatgcaaagcacaataaaataattaagtgaaaagaacaaacaaaagatacccgttaaaacagttattttagctggcagcacttgaaattggtaatctgtattttttttaaattgcatagctgcaagatgattcactgctgattaactgttgagcagttttatttaagaggataagaatatttaataaattgcaattcagtagaatattctatatttaattaaaatgtaattatgtaatatgatttgctctttggactgcattctgatattaaacctttaatttaaaaatattaacatattttagctttcctatgtagaagtctattttccactcgtgggggagaaaatggaagaacttgagatcatggtctacattcagatgtttttactgcttgattacatttcttggtttcacatttggcg

SEQ ID NO: 167009 - DNA, 353 bp, Homo Sapiens
atataacaagcataacacaccactgcttttggtggaaaagtgcagaatagtatgtaccttttatgaagaaaaatgtaatttacaatattcagtgagaatgttactgctgattttcttttccaaggtgtagaatattctttgatttatagaattcatttttgacccagatgatggttcctttacagaacaataaaatggctgaacattttcacaaatagagtgtaacgaagtctggatttctgataccttgtcatttgggggattttattttactttgttgctttaaaattcaatgcagagaagttgttgactgtaggggaaataaagttaattcaaattttgtgttaaaaaaa

SEQ ID NO: 167010 - DNA, 788 bp, Homo Sapiens
gggattgttctggggcttgtcctcctttctgttacggtccagggcaaggtctttgaaaggtgtgagttggccagaactctgaaaagattgggaatggatggctacaggggaatcagcctagcaaactggatgtgtttggccaaatgggagagtggttacaacacacgagctacaaactacaatgctggagacagaagcactgattatgggatatttcagatcaatagccgctactggtgtaatgatggcaaaaccccaggagcagttaatgcctgtcatttatcctgcagtgctttgctgcaagataacatcgctgatgctgtagcttgtgcaaagagggttgtccgtgatccacaaggcattagagcatgggtggcatggagaaatcgttgtcaaaacagagatgtccgtcagtatgttcaaggttgtggagtgtaactccagaattttccttcttcagctcattttgtctctctcacattaagggagtaggaattaagtgaaaggtcacactaccattagttccccttcaaacaaataatatttttacagaagcaggagcaaaatatggcctttcttctaagagatataatgttcactaatgtggttattttatattaagcctacaacatttttcagtttgcaaatagaactaatactggtgaaaatttacctaaaaccttgggtatcaaatacctctcccggaacatttccggtccctttatttcttgctgcgcgttttcctttgggaaaaagtcctcccctcctgttcccccccaaggctgggc

SEQ ID NO: 167011 - DNA, 516 bp, Homo Sapiens
attgaaattgctaagcgaaagggtaagaaagggaaaaggagatatagtaaccacagaggacttaaaggacaggaggaggagatggccataggagaggagggttcctcttaggtcagatggaggttctcagagccaagtcctccctctctactggagtggaaggtctattggccaacaatcctttctgcccacttccccttccccaattactattccctttgacttcagctgcctgaaacagccatgtccaagttcttcacctctatccaaagaacttgatttgcatggattttggataaatcatttcagtatcatctccatcatatgcctgaccccttgctcccttcaatgctagaaaatcgagttggcaaaatggggtttgggcccctcagagccctgccctgcacccttgtacagtgtctgtgccatggatttcgtttttcttggggtactcttgatgtgaagataatttgcatattctattgtattatttggagttaggtcctcacttggggg

SEQ ID NO: 167012 - DNA, 459 bp, Homo Sapiens
  misc_feature (23)..(23): n is a, c, g, or t
  misc_feature (33)..(33): n is a, c, g, or t
  misc_feature (55)..(55): n is a, c, g, or t
  misc_feature (78)..(78): n is a, c, g, or t
  misc_feature (447)..(447): n is a, c, g, or t
cccatgggaaaaggagggttccnccttgggtcnagatggaggttcctcagagccnaagtcctcccctctcctactggnagtggaaaggtcctatgggcccaacaatccctttctgccccaacttccccccttccccccaattacctattcccctttgaacttcagctgccctgaaacagcccatgtcccaagttcttcaccctctatcccaaagaacttgatttgcatggattttggataaatcatttcagtatcatctccatcatatgcctgaccccttgctcccttcaatgctagaaaatcgagttggcaaaatggggtttgggcccctcagagccctgccctgcacccttgtacagtgtctgtgccatggatttcgtttttcttggggtactcttgatgtgaagataatttgcatattctattgtattatttggagttagaacnaacacttggggg

SEQ ID NO: 167013 - DNA, 744 bp, Homo Sapiens
ctccgtttttccacctggagcctgcacagaaatctagagtaagcagtccactggccagttttctgcagcaacaaaggagtgcttcatctctggagtgggaacctgagccacacctctatcgttcaaagagtttaaaaagcattaatgttcatggcgatctactacgaaaaagccatcctccataagtcagggagcgccatttttctgaaagcacttctattgacaatgccctgagtcgactgacccttgggaatgaattctctgtcaacaatgggtacagtcgaagattcagatctttttctgaactcccctcctgtgatggaaatgaaagttgggcttatcgcagcgggacaaaaacaggtcccaggtctgcaatatctatatacagacctatcgactatgggatctttgggaaagaacaacagttagctttcttagaaaatgtaaagaggtcacttacacaaggaagattatggaaaccaagttttcttaagaaccctggcttcctaaaagatgatttgaggaaccctcccaacccctcagagtcattaagctcaaattctcccagtagtcaggtgccagaagatggcttatctccaagtgaaccgcttaatatctatgaggatgacccagtggactcagattgtgacacagacacaaccacagatgatgaatactacctggatgaaaatgacaaagagtcagaactgtgaggctttttcaataaaatgcttacttttgtca

SEQ ID NO: 167014 - DNA, 1114 bp, Homo Sapiens
ttggaggcacaaacacaatttatttcaatgtaaaggtactaccaaatgaaacagtttaaatgcttgtaacaaacgtgttatccaaaacagcacaatatgatgatgctaagacttacaaaattaacctaatttacagtattgtcaaacatgatttcatacaaacttgaataaacaccacatctaactaggtcaaacaactaccgagttcaaataattgatatggaagtattttggtaaagtgcccatagtgagagtttaaaaagcagcccctgttttctatagaaaaagttgtgacagtgaataactcatcacattctctgcaatactactcagcactcatatacactcaggggagcaataccctggacacatagctttatttcacatttagtgaacaaactcaagatttttataaagttctgactttgggccagaagataaaatgtcccatatatacatatattacaaaccctaatttcctaccctcttaaatcctctagttctaagaatggctttttgacttgtctttaagtttagaaaggaaaaagtgtgcaatgcgcttgcatctgtacttgctgaattatgaaacaaatatgttaaatgagaaaaaaaccttgggatggtactaatacacttcgattatatacatgatctttgggtattcatgacaatcagtttaaccatctgttgccttatgaaaaacttaatttcctaagttacccaggaaatgtatttaaccatttacaaaaacaaaaattctaatatgcactttagaaaatcgtggtcttatatacctgcatatttcttccataagacaggtacacattaaaaaatattgctcaatgacataaaaatatatattatttctttcctttgccatttatgcatataaatatttcaccgaagaagatgcatcattcaataaacaaatgcaaaaactactttatataaagtgtggttctctatctagcaatataaaatataaaacgataataatacagtcagctattaaagagctaaattcaagaaatttgcaaaccagtacagcagtgaacagtcccttgtataatacaaagtccattatgaaaaagtcagtctattcggacgcgtgggc

SEQ ID NO: 167015 - DNA, 641 bp, Homo Sapiens
tagggccaatataataataagcggaactatataatccagaaacaggtttaagtgcatattcttgtacaactgactatcacatgtaaaaactggcaattaattaaaatgcaattaaatacagatttgcaagccttctggccattatgtaaacatttaaaaattaactgaatagccaattgaaaaataagagcttacatacgtatcttaaaaaagcacaaatggtgaaagatgcactataaaatagcgtgacaaaacatatgcataccaacaaagatctttataggcacttgcattcagaaacattccttttataaataagcacttataacagttccactccaaaaaataaacctgatattcccaaatagcacctattagttgagactatatcatatattagggatgcattcaaatggaccatttggtggggaaagtcaactgaactttaaaaaatacgaatccacctatcttattcacaaatttaaaaatacagaatttaaagataattccagtgaggcacaaatgtgaccctatcaaaacattctaccattcagtattaccaacagaggataaatacaacaacaaaaggcaaaacccatgattgggcagtcctatacaaagaggcctgtcaaacatcttca

SEQ ID NO: 167016 - DNA, 662 bp, Homo Sapiens
catatctagcttacaaacagtaaaaaatggaaaagatatttaatgtttaagcaaaagctgaacctaggtgatgtacctttagaaattaagagataaagtgaagcattttgttcttttgaggattatcaagaagatttgctattctctattttctttttaaaaagaagagttatccacatagcgggaacatattatgaaacagatctatttgctcaatgtcatatggaagaacaaatcacaaaattaaataattctacctttaaataattaaagataatgcagttgacagtacaaagcactgggaaaaaatcacttatttgggggatgtgtgatacataagaaactttgggcctaaagttcacatggaagactggaagacttaaagtttaagggtgtcaccaaaagataacaatggctttgactccaactctcatgttagaccctgttaaaaggttaggtttattgctgttattttaccccagtaagttattgaataaatggagatatacattggtgataagtatgaggtgaagtaataagatctcaaaatattagtcttagaacaaaaatgacactcatgatcacttggcaaggatacttatttacttagtgatttatatcctataataagctacatttttaggaggtagattacagtaccg

SEQ ID NO: 167017 - DNA, 782 bp, Homo Sapiens
  misc_feature (610)..(610): n is a, c, g, or t
aggctggtacggcccggagttaccgggatatcgtcgaccacgcgtccgcagtcaagtgtctcataaagatcagctcctccctcagaatacaagttaatgcatgttactcagtcgcccagtatgtgaaagaagatatgagggagacaaatgagttgatagtttgaattataggatttttgccacgttaccttgatgcaaatttgccaaatctgatactgtgaaaagatttgataacttttctaatgcctgactagtaagttttaaaacatcattctttaaaagaatagtttaatacttttggttattccaatcttcaatgttaacccaaaggattctgagataaaaattatgtgtcatctaaacttcagtttacagacaaaattagagctttgttttatttggagaagggggatgcattcatttgattttgtttttgtttttaattaattgaatataataggatacctagcaaatgttttcaccaaagtgaatctttgtgattttcattctagaaaacatgttttaaatcacccaaatttaatcacatgtctttatatcataccagataactggtgtagtgtatccttttactggtttcaataacctctgncctcccccagcccttaactttacaaagaatgtgaaaaactagcatcatagtgcatataaatactcaagcacatttcagcttaagcttctaatttctcaagaagttgaaacagttagttatgtagttgaagcaaattgtgtgcaaggctacatctaaacacttgagtgaataa

SEQ ID NO: 167018 - DNA, 450 bp, Homo Sapiens
  misc_feature (211)..(223): n is a, c, g, or t
cgcccaatgtgaaatgctgattcctgccagcagtcgccaggtgtctctcacgctgctgggagaggaatgtctcgtcttcttcatctggttgcctccgtcactgttctagaggcttctggcactggtgcaaggcagagctgtgcttccttgagagtgtgccaagcatttactttggttatttagttctagtctgggagcagacaccaaaggnnnnnnnnnnnnntaccaactccatgtgtctgaggtatcacttatagtttaaaaaaaatgattgtcttatcatgtttgggaaaatactggtcttcctgttttcctcctatttaaattcatcctaaaacttccagggacacaagaaattattagctattttgaccatccattccagaaaagatggtggccttacaatcaattgcaagtggttaatagtaacacctgttgacagcttctatc

SEQ ID NO: 167019 - DNA, 487 bp, Homo Sapiens
acgcactgtgaaaatgaaatacatgtattagaggtaacatggggatgttaaacttgtgaagaaccagtagggttaaactatcatggcccaaatcatacttcatcagtgggagctacaataatgaacacagaattaacttcctcttacaaaggcatcacagaaaaaacaatactcactttgtagcattaagcagcatcacttgaaaaaggaacaaaacaggttatacagctttaaatcaacaagtatagagtcagccagattatgagatctccaaggcatttttaatgacacacacaaatctcatgacctctttccatttatgcacttatgactcctgtcaataatcttgcttgtattccctctttgattttcacatttcatacaagaggtctgcgaaatctgaccgccttaacctagagatgctttaaactacttcagttatttatgttgcaggtgagacgacaaaatgtagatatttctgatgttc

SEQ ID NO: 167020 - DNA, 500 bp, Homo Sapiens
ggattacatattgtatgagtccaacgatatggtaatctggaaaaggcaaaaccatggagacagtgaaaaggtagtggttaccagtggtccatgggaagggttggatgaataggtggagcacagaggatttttaaggcagtgaaactattctgaatgatactgtaatggtggatacatgtcatacctttgtcaaaaccaataaaatataacaaccaataaaactgcacaaagagtgaaccctaatgtaaactatggacttaataatgtatcaatattggctcaccaattttaacaaatgtaccacactaatgcaagatgttactaatagtggaaactggagggaagagggcttgaggggacatacgggaactctctgtaattcctgttcagtttttctgtaactgctaaactgtccaaaaaaagtctgtttttataaatcgaggcatgttttatatggactaaaatactatgatgccttttatttcacattgcgcggtacc

SEQ ID NO: 167021 - DNA, 1358 bp, Homo Sapiens
gggagaagctgggcagcctctgccgggttccgggaaaaggagctcctgctgccactgctcttccggagcctgcagcatggggcccctgccgcgcaccgtggagctcttctatgacgtgctgtccccctactcctggctgggcttcgagatcctgtgccggtatcagaatatctggaacatcaacctgcagttgcggcccagcctcataacagggatcatgaaagacagtggaaacaagcctccaggtctgcttccccgcaaaggactatacatggcaaatgacttaaagctcctgagacaccatctccagattcccatccacttccccaaggatttcttgtctgtgatgcttgaaaaaggaagtttgtctgccatgcgtttcctcaccgccgtgaacttggagcatccagagatgctggagaaagcgtcccgggagctgtggatgcgcgtctggtcaaggaatgaagacatcaccgagccgcagagcatcctggcggctgcagagaaggctggtatgtctgcagaacaagcccagggacttctggaaaagatcgcaacgccaaaggtgaagaaccagctcaaggagaccactgaggcagcctgcagatacggagcctttgggctgcccatcaccgtggcccatgtggatggccaaacccacatgttatttggctctgaccggatggagctgctgggcgcacctgctgggagagaagtggatgggccctatacctccagccgtgaatgccagactttaagattgcccggaggaagcaaactcttcgtataaaaaaagcaggccatctgcttaacccttggctccaccataaggcactgggactcggatttctctatctgatagaggtattttctgtggccctgggagctgtctgtctttcccctacccccaaggatgccaggaagacgtccaccattagccatgtggcaacctttacttctatgcctcacaagtgcctttcagagagccccaattctgctttcccacaaaataaacctaatgccatcaggcacaacagaaaccagcacactcaacacgcgcgcacacaaccaaccaacccgcacacccgcaacacgagcccccaagtaataggcattaccacacaggcggcccacacaccgacacgcaacgcgacgagctgcacgcaaccacagcggaccacaacgacggagggacacagccgcacaccccgccagcggcgccgcgacgcgcagcacgcacacgaaccagcgctcacagcgcgacgacccgccagccgccgagcgacaccgacccaccgcggcacctaccgagcgccgcgaagcccgcaacaactgcggcacaccaagcggacgagcct

SEQ ID NO: 167022 - DNA, 481 bp, Homo Sapiens
  misc_feature (11)..(11): n is a, c, g, or t
  misc_feature (369)..(369): n is a, c, g, or t
  misc_feature (440)..(440): n is a, c, g, or t
ccggattccgngaaaaggagctcctgctgccactgctcttccggagcctgcagcatggggcccctgccgcgcaccgtggagctcttctatgacgtgctgtccccctactcctggctgggcttcgagatcctgtgccggtatcagaatatctggaacatcaacctgcagttgcggcccagcctcataacagggatcatgaaagacagtgggaaacaagcctccaggtctgcttccccgcaaaggactatacatgggcaaatgacttaaagctcctgagacaccatctccagattcccatccacttccccaaggatttcttgtctgtgatgctttgaaaaaggaagtttgtcttgccatgcgttttcctcnaccgccgtggaacttgggaggcatccaggagatgctgggagaaaagcgttcccgggagctgtgggatgcgncgtctgggtcaagggaatgaaggacatcaccgaggccgcag

SEQ ID NO: 167023 - DNA, 496 bp, Homo Sapiens
tacggccaagtgtaaactgaagctggggcccctatgaatatatagtgtcttagtgatttagagtttatataaactgattatattgttttcaaagtttaatgagatcttccacttctatctagttagtgcagatgtccaaattaaaatatttccctcttatactaaaatgctgcgttaattttaggccattgaaagctgtaccttatcagaggtaactccccttaaccaggataactggtttgaagaaagttaagcttaatttttgtaatcacagattaacttaatttgtgataccattttaactttgagctcttaagtaaaaagtagcagcattcctaagttgtggggtgaagcatctgtttcataacacaggtctatcataattgggttctgtaaatgtaatggttctctaaacattttaatgcccaggcttgatattgtacacaatgcaagatgtctaaaatcttcatttagaattcaagggtatagcttgcta

SEQ ID NO: 167024 - DNA, 630 bp, Homo Sapiens
gggctactgcggctgcgcaagctcgacgcgcgcactcttgtctgcttacgagggctcctcccttcagctttggtccctcggggcgtctgggcagcctacgctttccggataaaaatggcagaatgaaagaattatgagtggaactagagaataggaaagacatgaaccaacgcccaaaatgagaaagaaggacatataaagaaaaagacaaatacaagtgaaaaaaatagactaatggattaacgtccctgtcgtgtgacattttctgactatggaaatgatattagacaaaaagcaacttcaagtggttttcttatttgagttcaaaatgggtcataacgcagcagagataacttgaaacatgaacagcgcatttggcccaggaactactaacgaacatacagggcagctgtgattcaagaagttttgcaaagcagactagagccttgaatatgaggaacacagtggccagccattggatgcttcacttcttgaagcatcttgacagctttttgcaggtgaaatgcttccacaccagcaggatgcagaaaaatgctttccaagagtttgttgaatccagaagcatggatgtttatgccgcaggaataaacaattattcacattggccag

SEQ ID NO: 167025 - DNA, 426 bp, Homo Sapiens
  misc_feature (11)..(11): n is a, c, g, or t
  misc_feature (22)..(22): n is a, c, g, or t
  misc_feature (110)..(110): n is a, c, g, or t
aaaccccttanaaattagggangcagcaaccccctgggctttgggcaagaggcaagaagaagtcaactgccagatccccccccattgtccagcggatcatttccaaaagncccacgggggcaagacactgaaacatgccatgaaggcattgtcctttgccccttgaagaaacttcaccctcacccatgcacccagctttaaatactgctgtcaatgcctgaatggagtggcccagtttttgtccctggacagtctttatatagactgtacttcttacataagactgtgctcttgaagtactatttgccagtaaaagaaacccaactttcttggtaaaatggctgattccagtcggaaagcgtaggctgcccagacgccccgagggaccaaagctgaagggaggagccctcgtcctcgttccgaatc

SEQ ID NO: 167026 - DNA, 757 bp, Homo Sapiens
  misc_feature (166)..(217): n is a, c, g, or t
  misc_feature (583)..(599): n is a, c, g, or t
aaaagaagagcagcattacattttttgataaagactttttatgccaggaatggattaattaccaacaaaatttatactaatcaggctgatgtcaatctatttttgtaatgtatcattaacaaatttattttggaaaagataaaaatattgccccttgataataaannnnnnnnnnnnnnnnnnnnnnnnnnnnnnnnnnnnnnnnnnnnnnnnnnnngatattctaagacaaaaaaatggttaatcttcagattaataaattaggtcattataataataaattaattttttttaaagttcagcaacctctgtccaagtatttacaacaatacttgaaagttcctttacaaaacagaacacattttcttttcacgttaagcatactgggtatctgtgtctttcacaacaaggcatttttaaaagaaaactcaatgcacaaatgggttaattagtataaaagtgctaagggctgtttgaaaagttaccactatagtatacagtcagttatatttgaggcatactacaacaaacttccagcttattgtggacaatattccagtagttgtgtcaaaccattgtttgnnnnnnnnnnnnnnnnntccaggagctgattagtgatgcagataagaactgccatcaatgtctctggccagtgagcaaattgaaaaccaactgaaagcaaatccaaatgaggaagattttaataaaggaatacccttctccatagcaggtgcaatgctgactgctcaaggcgtgc

SEQ ID NO: 167027 - DNA, 406 bp, Homo Sapiens
  misc_feature (182)..(233): n is a, c, g, or t
gacacagatacccagtatgcttaacgtgaaaagaaaatgtgttctgttttgtaaaggaactttcaagtattgttgtaaatacttggacagaggttgctgaactttaaaaaaaattaatttattattataatgacctaatttattaatctgaagattaaccatttttttgtcttagaatatcnnnnnnnnnnnnnnnnnnnnnnnnnnnnnnnnnnnnnnnnnnnnnnnnnnnntttattatcaaggggcaatatttttatcttttccaaaataaatttgttaatgatacattacaaaaatagattgacatcagcctgattagtataaattttgttggtaattaatccattcctggcataaaaagtctttatcaaaaaaaattgtagatgcttgctttttgtgtttt

SEQ ID NO: 167028 - DNA, 592 bp, Homo Sapiens
caaatgtgaaagatgctagtgatcaaagagaagatgtttatattggaaaccacatgccttgccctgaaaacctcaatggttactgcatccatggaaaatgtgaattcatctattctactcagaaggcttcttgtagatgtgaatctggctacactggacagcactgtgaaaagacagactttagtattctctatgtagtgccaagtaggcaaaagctcactcatgttcttattgcagcaattattggagctgtacagattgccatcatagtagcaattgtaatgtgcataacaagaaaatgccccaaaaacaatagaggacgtcgacagaagcaaaacctaggtcattttacttcagatacgtcatccagaatggtttaaactgatgacttttatatgtacactgaccatgtgatgtacatttattatgtcttttttaaagaatggaaatatttatttcagaggccttatttttggacatttttagtgtagtactgttggctcgtatttagaatattcagctacgacagttttggactgtttagtagtctttgttttatgtttttaaatacagaaatggctttcacatttgg

SEQ ID NO: 167029 - DNA, 1115 bp, Homo Sapiens
acaacgtaggcatagtgacgcgcctgtttgcttagcagtcctattgacaactcttctgggagtgctgttctgctttaataagcgagacctaattaaaaaacacatctggcctaatgttccagatccttcaaagagtcatattgcccagtggtcacctcacactcctccaaggcacaattttaattcaaaagatcaaatgtattcagatggcaatttcactgatgtaagtgttgtggaaatagaagcaaatgacaaaaagccttttccagaagatctgaaatcattggacctgttcaaaaaggaaaaaattaatactgaaggacacagcagtggtattggggggtcttcatgcatgtcatcttctaggccaagcatttctagcagtgatgaaaatgaatcgtcacaaaacacttcgagcactgtccagtattctaccgtggtacacagtggctacagacaccaagttccgtcagtccaagtcttctcaagatccgagtctacccagcccttgttagattcagaggagcggccagaagatctacaattagtagatcatgtagatggcggtgatggtattttgcccaggcaacagtacttcaaacagaactgcagtcagcatgaatccagtccagatatttcacattttgaaaggtcaaagcaagtttcatcagtcaatgaggaagattttgttagacttaaacagcagatttcagatcatatttcacaatcctgtggatctgggcaaatgaaaatgtttcaggaagtttctgcagcagatgcttttggtccaggtactgagggacaagtagaaagatttgaaacagttggcatggaggctgcgactgatgaaggcatgcctaaaagttacttaccacagactgtacggcaaggcggctacatgcctcagtgaaggactagtagttcctgctacaacttcagcagtacctataaagtaaagctaaaatgattttatctgtgaattcagattttaaaaagtcttcactctctgaagatgatcatttgcccttaaggacaaaaatgaactgaagtttcacatgagctatttccattccagaatatctgggattctactttaagcacgacatatacctagg

SEQ ID NO: 167030 - DNA, 137 bp, Homo Sapiens
agtgtgacatggcaaaactccattaacaacggagaagtgttcaaataaatcacggtataaagcaacagaatacaggtatttcaagaaatcagaggagtatctacaatatggaaattagtccacagtatattaaggtt

SEQ ID NO: 167031 - DNA, 663 bp, Homo Sapiens
tctgaaatgatgctcatacacaaaatgaaaatatatttgtgaatgtagacaagtaggcatcatcaattttttgaccacagaagaaaggtagtattgttatatactttttccacataaaagtctacctctgattttaccttgtcactcggcttttcatttttactagtatttttagttttccatcataagccagtcttcgtattatatcaatacaaactttataaacttgtttacacttaatttttgtcgttattcgtgccttgaataaaaatagtcatagtggatataagaagaaaattctaatgatttaatttgatatccaaaatacataaaaaattgtaaggggataaaaatctcactgcaatagctttctcacctttgcataaaaattatcactttgatttcagacaagtttttacaagctgtggttattaagaggtggatctcaccatgtgagacaaaaaaacacgtgtgtgccaattctaaattaatttccaaatatgaaatacatccgttaattcttaaagatgctcaaacacaaaataaaatatattttgaatgtagacaagtaggcatcatcaatttttttaccacagaaaaaggtagtattttatactttttccacataaaagtctacctctgaattacctttacacttgccga

SEQ ID NO: 167032 - DNA, 677 bp, Homo Sapiens
tgaagaaaaatatgacaaacacaggttcccacacgtacacatacatacaaaggaacctgcacacatgcacacacacaggcaggtataggcacacagttccaccaaagcgaagtccaaatcagagttcttaccgattctaccactctgtaatactctcagaagttcccacaactgcccaacacctcacctacccgtttcctgctgcacaaagtctccttcactctcatcttttcgatacatcgtcaggcagggcagaagggcactacgccgcagagcattcgaggctctcagcacactgccagccagcgtgaaaatgcggcttcactacagcccagagaaaagggccaggtttagtcatcgatccagatgcattttcccgggaaatgaccattcccaaacccacagaacagtttggcttctctggatatccttataggaaataggggtgagaggtgggaaaagcttctcaatctcatacagaaacagcacaaatatttaatacaccttttgcaacaagatcttctctgttctccattaagcatcatgtaaatctcactagtgtggttaacaaaatggctttccccaaggacagaagtcaacagcttgtggggccatatatcatctagtactaggccattcattatctcctagattactcttttttgtatatttcggga

SEQ ID NO: 167033 - DNA, 523 bp, Homo Sapiens
  misc_feature (394)..(428): n is a, c, g, or t
tgatcgtacaagtattacctcatttgtgtgtgactgagtaaagaatattggatcaagcggaaagagtttacgtgtctaacaaacttaaagctactgtagtacctaaaaagtcagtgttgtacatagcataaaaactctgcagagaagtattcccaataaggaaatagcattgaaatgttaaatacaatttctgaaagttatgttttttttctatcatctggtataccattgctttatttttataaattattttctcattgccattggaatagatatctcagattgtgtagatatgctatttaaataatttatcaggaaatactgcctgtagagttagtatttctatttttatataatgtttgcacactgaattgaagaatagtgggtatattcnnnnnnnnnnnnnnnnnnnnnnnnnnnnnnnnnnngggcttaagacccccaatttaaattatgggcaaactccttttcccaagaagtgtgcttatttgggaacattttttactccttcaatttggggcgg

SEQ ID NO: 167034 - DNA, 451 bp, Homo Sapiens
  misc_feature (15)..(15): n is a, c, g, or t
  misc_feature (394)..(394): n is a, c, g, or t
  misc_feature (405)..(405): n is a, c, g, or t
  misc_feature (417)..(417): n is a, c, g, or t
attcggaacgagggngttcatgtacctgctgagctggctgtcgctcttcatccaggtggccttcatcacgctggctgtcgcggctggactctattaccgggcagaactgatagaagaatacacagtggccaccagcaggatcataaaatacatgatctggttctccaccgctgtactgattggcctctacgtctttgagcgcttccccaccagcatgattggagtgggcctattcaccaacctcgtctactttggcctcctccagaccttccccttcatcatgctgacctcgcctaacttcatcctgtcgtgtggactagtggtggtgaatcattacctagcatttcagttttttgcagaagaatattatcccttctcagaggtcctgggcctntttcaattttntgcctgtggganaatttccgtttgcgttttttttgtgttcaatttt

SEQ ID NO: 167035 - DNA, 1060 bp, Homo Sapiens
  misc_feature (1006)..(1016): n is a, c, g, or t
ggcaaacaacgaccgtgaagtgccaccggacttaaccaagagacgtaaagaggagaatggaacaatgggggtttcaaaacataaaagtgaaagtccttgtgaatctccttatccaaatgagaaagacaaggaaaaaaataagtcaaaatcttcaggcaaagaaaaaggcagtgattcatttaaatctgagaagatggataaaatctcctccggtggcaaaaaggagtccaggcatgataaagaaaagatagtaaagtaagagaaacgggacagttcaggaggaaaggaagagtagaaacatcataagtcctctggacaagcacagataatgaagactgtccatcaaggctatggacagacccccttagccgtatgtttcccagaggaggatgccaaagctccgtgcgtcactctcagaatgatatctcccataattaagagcttctggtgctgtccatgtaatgggaatctgcttaaagtcagaagatgagtacacaccaccatcctcttgacgagacagtccaaagtcactgattttcagaacattattatcacctccaggcagtttcttacagcaaggtccctgtgtatacattttttactcgagatacaccatccagaatcagcatctaatgaaaatttcactgagttttagttcattcttctttctctgaaaggagaggaaatcgcctccaggaaccagttccttaatgacgtagataggccgtctttgcgtgtgaactcctatacttttgacattactgggatgattatattgcttgaggattttggcttctagtaaaaattttaatttcagttcctggggaagacgttcttgacgtgttttaacagcaacagcaattttatcctttaatgtgaccttaaatgtgtcaccaaaatttcccttgcctcttgtaacgtggcacctttatgattgagaacccatttcttattctcctaatgaccatactgtgataccatgatgctcttaattggaacattgacnnnnnnnnnnnggcaatttaaacagttgagataaaattcatttaacatcaaattt

SEQ ID NO: 167036 - DNA, 700 bp, Homo Sapiens
  misc_feature (684)..(684): n is a, c, g, or t
aaaaggcgcagtgcttctagacggatttctcaagacccaccacactgcagaagcgggacgagcccctacaggagaggacagagtgcattttcccagatacttcccattttggaagttttcaggacttggtctgatttcaggatactctgtcagatgggaagacatgaatgcacactagcctctccaggaatgcctcctccctgggcagaaagtggccatgccaccctgttttcaagctaaagcccaacctcctgacctgtcaccgtgagcagctttggaaacaggaccacaaaaatgaaagcatgtctcaatagtaaaagataacaagatctttcaggaaagacggattgcattagaaatagacagtatatttatagtcacaagagcccagcagggcctcaaagttggggcaggctggctggcccgtcatgttcctcaaaagcacccttgacgtcaagtctccttcccctttccccactccctggctctcagaaggtattccttttgtgtacagtgtgtaaagtgtaaatcctttttctttataaactttagagtagcatgagagaattgtatcatttgaacaactaggcttcagcatatttatagcaatccatgttagtttttactttctgttgccacaaccctgttttatactgtacttaataaattcagatatatttttcncagtttttccaaaatc

SEQ ID NO: 167037 - DNA, 608 bp, Homo Sapiens
  misc_feature (568)..(568): n is a, c, g, or t
  misc_feature (588)..(588): n is a, c, g, or t
  misc_feature (594)..(594): n is a, c, g, or t
agaacagtcaccgacaacatgctgtgtgctggagacactcggagcggcgggccccaggcaaacttgcacgacgcctgccagggaatttcgggaggccccctggtgtgtctgaacgatggccgcatgactttggtgggcatcatcagctggggcctgggctgtggacagaaggatgtcccgggtgtgtacaccaaggttaccaactacctagactggattcgtgacaacatgcgaccgtgaccaggaacacccgactcctcaaaagcaaatgagatcccgcctcttcttcttcagaagacactgcaaaggcgcagtgcttctctacagacttctccagacccaccacaccgcagaagcggaacgagaccctacaggagagggaagagtgcattttcccagatacttcccattttggaagttttcaggacttggtctgatttcaggatactctgtcagatgggaagacatgaatgcacactagcctctccaggaatgccttcctccctggggcagaaagtggccatgccaccctgtttttcagcttaaagcccaacctcctgtacctgtncaccgtgtaggcagcttttnggaaanagggaacacaaaaa

SEQ ID NO: 167038 - DNA, 194 bp, Homo Sapiens
ccaaatgtgaaagcaagaaagagaaacgtaaaaacagatagagattctgcctgtgcttttgtttgactgtctctagattttgaaaccaaaaaactgaactgaaatcatctaaagagttaaaatttcagtgatccgcaataaatacattgtggaagattattttttatcttgtaaaacacttttgtgttggaccg

SEQ ID NO: 167039 - DNA, 1382 bp, Homo Sapiens
  misc_feature (458)..(503): n is a, c, g, or t
  misc_feature (947)..(947): n is a, c, g, or t
  misc_feature (1161)..(1161): n is a, c, g, or t
  misc_feature (1218)..(1218): n is a, c, g, or t
  misc_feature (1302)..(1302): n is a, c, g, or t
  misc_feature (1311)..(1311): n is a, c, g, or t
tcgtacggtcacatgtgaaagaggtcatgtcttctcaaaatctagctaaggaagtagtctgcattggtgtgcattacagtattttgcttaatgaaagcctcagttctgaatgttgatatgagtagttaaaaggaagtggggccattttatgtgtttatctgtgtcaagtatttctggtaataagaagcacttaatttacacatattttaatcctgtgaaagattccacatagagaaaagaaagatacctaaccttcaacaaatgttatttttggaaacacaatttttgtcattaaatgttatattatttcacatatataaaacagatgttatgtaagaatggtgtatattttaacataaatcatttagagaaattatctagattcattaattttcatagtgcctttttcacatgagtcagctggaaaatctgcaataaacagaatttgctgtctgttnnnnnnnnnnnnnnnnnnnnnnnnnnnnnnnnnnnnnnnnnnnnnncacccccgagaaccccgtagaggccacaaaaaaccccccaatataatcgccggtgggaggccggaccccagtaggggaaggtagacgagaccgtagcgggggatacccgcggggggcaagcgcagaggggcgtgcaaatgtttatttttgtctcggggccccgggcgatcgggcggcgccgcaacagaccaatccgatgaagactccgccccgagtgtggcgccggcgggcgaggcccccgcggagggggagccttcagaatgtggaccggcccttctgcgcagcgcgggtgatcgactgccacaagaacaacccacagtccactgcgacgttccgactaacaccacctcgacggagtttgcgctactgacgatctacgtgcgacgcacaatgaccaccatatgaaaaccaggtcgtcgcccccctgcgcgtgtcggagcaccngctccgtccaattgtgtggtccgacctctactcacgtcagacaacaaccgctgacgcacgcagggtgcgacgcggttttgattgtaatacgtagtcccgcgtgatcctatgagtatgcgtgggcgccgtcagcaccacaccgcgccacacgccgagccagcggacgcgtgttgtgctacgccgccccacatgtcgtccaccccgccctgtagtngtctctgcactcacgcgcgcttatctgttacagccacaggactctccctccgccgcnacccgcgagcgcgggtatgcgacatctataccccgagcaatacgcgcgatcgctcgggtggaaggtgatgacgggactgcgacncgccagcantacgcagcggggcacagactctgctgccacgaccgccgcgctgatgagagcgtcggcacagaaatcgaccg

SEQ ID NO: 167040 - DNA, 316 bp, Homo Sapiens
aaatggtggaaatgttattacacatctatcattatccaccatggtttaatggccatgaatgcagcatcaacacaaatggaaccagccacttggttacagtagctgataacaacactagtggatattattgcttataccccaagttgcatggagacatccattgatgatgtttggcaagattacaatgcaaatgggagctttggttgtaaaatttcaactatgactactcattgaaaactcatcttctaccattttatggtgggatacatgtcaattcttccacatctgtctccttcacatgtgcgcgtaccgctac

SEQ ID NO: 167041 - DNA, 202 bp, Homo Sapiens
tcaccttcttccttgtcagaggatggatgggagtcatttttactgtttctagtgacatctcgttctgaatttgactcagagtcccatttactaccagcataattcttccttttgggcttactgccatttctaaggtgatcagaaagattctctttgccttttacctgtaacgtgtttaagagtagttttatttttattcatt

SEQ ID NO: 167042 - DNA, 400 bp, Homo Sapiens
aagggaaccaaagttaatgtcttatgcctaatgaatcctgaaatgaatccaagcatttgcaggaaattctagttgatgcatacatacaccaagcagtttagtaaaatggaagtggactaaaacttactaatcaactggcttatgaatggatttcatttgataccattataaacctatatttaagagaatgctaattagcctgtatgtttaaatttaccaaagtgatttctatgttttgtatgttaatggaagtagaagcaatgttctgctttaaagattgaactgttgaaatacggataatacaagaaaatatacaatttattatagtcaaaggaaaatgaagaataggcttgcttcgtgttaaagcagccaaaattcagagttcactgtgccgtcgcta

SEQ ID NO: 167043 - DNA, 962 bp, Homo Sapiens
  misc_feature (42)..(42): n is a, c, g, or t
gacacccttggacgcatggggtcacaggtaatcataccctantcggtgtgataaatatgacatcatgcaccttcgtcccatgggtgacctgggccagcttctgtttctggaatgggacgcgagagataaagattctatccgacgagtagtacaacacagcaatgtgggtcatcaatcttattggacgagactgggaaaccaaaaactttgattttgaggatgtttttgtgaagattccccaagcaattgctcaactgtccaaggaagctggagttgaaaaattcattcatgtttcacatctgaatgcgaatattaaaagctcttctagatatttgagaaataaggctgttggagagaaagtagtgagagatgcatttccggaagccattatcgtaaagccgtcggacatctttggaagagaggatagattccttaattcttttgcaagtatgcatcggtttggtcctataccccttggttccttgggctggaagacagttaaacaaccagtatatgtcgtagatgtatccaaaggaatcgttaatgcagttaaggatcctgatgccaatgggaaatcctttgctttcgttggtcccagtcggtacctccttttccacctggtgaagtacatctttgctgtggctcacagattgttcctcccattccccttgccgctttttgcctatcgatgggtagccagagtctttgaaataaacccatttgagccctggataacaagggataaagtggagcggatgcacctcccagacatgaaattgccctcactgcctggcttagaagaactttgggattcaggcaacaccactggaaactccagggcatttaaggtgctgcgggcgcccatcgcactttaccgcctggctggtctgcttaaaaattgaagatagggaagcccggcccaagaacggtcaacaatttagggcccccctgaaaagcctctt

SEQ ID NO: 167044 - DNA, 846 bp, Homo Sapiens
ggggtcgtgggggattgtgggaaaagatggcggctgccgcacaatcccgggttgtccgggtcctgtcaatgtcacgttctgccattactgcaatagccacatctgtgtgtcacggcccaccctgtcgccagcttcatcatgccctcatgcctcatgggaaaggtggacgttcctcagtcagtgggattgtggccactgtgtttggagcaacaggattcctggggcgatatgttgtcaaccaccttggacgcatggggtcacaggtaatcataccctatcggtgtgataaatatgacatcatgcaccttcgtcccatgggtgacctgggccagcttctgtttctggaatgggacgcgagagataaagattctatccgacgagtagtacaacacagcaatgtggtcatcaatcttattggacgagactgggaaaccaaaaactttgattttgaggatgtttttgtgaagattccccaagcaattgctcaactgtccaaggaagctggagttgaaaaattcattcatgtttcacatctgaatgcgaatattaaaagctcttctagatatttgagaaataaggctgttggagagaaagtagtgagagatgcatttccggaagccattatcgtaaagccgtcggacatctttggaagagaggatagattccttaattcttttgcaagtatgcatcgggttgggtcctatacccccttggttcccttggggctggaaaaacagttaaccaccagtatatggtcgtagatgtatccaaaagggaattggttatgggcaggttaaggatccctgatgcccaatggggaaatccttttggcctttccttggggca

SEQ ID NO: 167045 - DNA, 796 bp, Homo Sapiens
ggggtcgtgggggattgtgggaaaagatggcggctgccgcacaatcccgggttgtccgggtcctgtcaatgtcacgttctgccattactgcaatagccacatctgtgtgtcacggcccaccctgtcgccagcttcatcatgccctcatgcctcatgggaaaggtggacgttcctcagtcagtgggattgtggccactgtgtttggagcaacaggattcctggggcgatatgttgtcaaccaccttggacgcatggggtcacaggtaatcataccctatcggtgtgataaatatgacatcatgcaccttcgtcccatgggtgacctgggccagcttctgtttctggaatgggacgcgagagataaagattctatccgacgagtagtacaacacagcaatgtggtcatcaatcttattggacgagactgggaaaccaaaaactttgattttgaggatgtttttgtgaagattccccaagcaattgctcaactgtccaaggaagctggagttgaaaaattcattcatgtttcacatctgaatgcgaatattaaaagctcttctagatatttgagaaataaggctgttggagagaaagtagtgagagatgcatttcccgaagccattatcgtaaagccgtcggacatctttgggaagagaagatagattcccttaattccttttgcaagtatgccattcggtttgggtcccaatacccccttgggttcccttggggcctgggaaggacagtttaaaccaacccggtataatggctccaacaagggtatcccccaaggaat

SEQ ID NO: 167046 - DNA, 1890 bp, Homo Sapiens
  misc_feature (1334)..(1423): n is a, c, g, or t
  misc_feature (1583)..(1593): n is a, c, g, or t
  misc_feature (1724)..(1736): n is a, c, g, or t
  misc_feature (1809)..(1809): n is a, c, g, or t
atggaaaaaaaagggtggagctattagcagctgtacggtcggaatcccgggatatcgtcgacccacgcgtgcgagatggcggctgccgcacaatcccgggttgtccgggtcctgtcaatgtcacgttctgccattactgcaatagccacatctgtgtgtcacggcccaccctgtcgccagcttcatcatgccctcatgcctcatgggaaaggtggacgttcctcagtcagtgggattgtggccactgtgtttggagcaacaggattcctggggcgatatgttgtcaaccaccttggacgcatggggtcacaggtaatcataccctatcggtgtgataaatatgacatcatgcaccttcgtcccatgggtgacctgggccagcttctgtttctggaatgggacgcgagagataaagattctatccgacgagtagtacaacacagcaatgtggtcatcaatcttattggacgagactgggaaaccaaaaactttgattttgaggatgtttttgtgaagattccccaagcaattgctcaactgtccaaggaagctggagttgaaaaattcattcatgtttcacatctgaatgcgaatattaaaagctcttctagatatttgagaaataaggctgttggagagaaagtagtgagagatgcatttccggaagccattatcgtaaagccgtcggacatctttggaagagaggatagattccttaattcttttgcaagtatgcatcggtttggtcctataccccttggttccttgggctggaagacagttaaacaaccagtatatgtcgtagatgtatccaaaggaattgttaatgcagttaaggatcctgatgccaatgggaaatcctttgctttcgttggtcccagtcggtacctcctttttccacctggtgaagtacatctttgctgtggctcacagattgttcctcccattccccttgccgctttttgcctatcgatgggtagcaagagtctttgaaataagcccatttgagccctggataacaagggataaagtggagcggatgcacatcacagacatgaaattgcctcacctgcctggcttagaagaccttggtattcaggcaacaccactggaactcaaggccattgaggtgctgcggcgtcatcgcacttaccgctggctgtctgctgaaattgaggatgtgaagccggccaagaccgtcaacatttagtgcctcctgagcagctcttggttttggcgtcttttgggtcggcccatgtggtttgagcacccagccaggcggtctctttagaggatcctgtacacagttccactattaaaacatttcaggttgnnnnnnnnnnnnnnnnnnnnnnnnnnnnnnnnnnnnnnnnnnnnnnnnnnnnnnnnnnnnnnnnnnnnnnnnnnnnnnnnnnnnnnnnnnccttgttcggccgccctcggccccccaaagaccttttcttaacaccttctctttgggcgccgcgggcccccattaggtaaagtgaaacctgtggcctataccttgtttccaaaggaaaaccccgggaccaggaaataagggctttggaattccccccccnnnnnnnnnnncgccccgggggggcacccgaaaccgtttcttgaaaaaaaccccaaaaggggatttccgagagggtcttttcccggggatctattcaaccgggggagcccccaacgggagccctcgactttccaaattttannnnnnnnnnnnntggccactttcattccaaaaaaacgggtggaaaattcccattaacaatttttcggccccaacatgggaaaacnctcttcccaaaacgggtgtatagtaaaacccctgaaattcgccacccgggaatttcaccacccctttgtccccctttgcgg

SEQ ID NO: 167047 - DNA, 415 bp, Homo Sapiens
tgataagtaacggcataatttaaagttacttaaataaggtattgtgagggtaggggtttttctacaaggtcggggggccaataaatgtaatggcatctggtgcaatgtcttcaaacgtaaaaatcaagaaaacaaaattcgaggtgaaaactcacctactaaatatttattattctaactcatacggggagactaaagggcaatttgttgaagatcaaaatattttcctagatttgttgacggggtaaaaaaataacatgagttctcctgaagtctgcacacacaatgctggtgttacgttgtgtcaatgcgagtgcgtctgagcaagcccagttctccactggaggcttcatcagaaggtttcgtcgtcattgcagttggtggcccagtgtccaaacatctcacagattcacat

SEQ ID NO: 167048 - DNA, 1522 bp, Homo Sapiens
  misc_feature (142)..(142): n is a, c, g, or t
  misc_feature (256)..(256): n is a, c, g, or t
  misc_feature (494)..(506): n is a, c, g, or t
  misc_feature (625)..(648): n is a, c, g, or t
  misc_feature (1034)..(1066): n is a, c, g, or t
ccgtgtgcattgtcgtacaaagaaccgtcgctgatgagaacaataatataggggttgtggcgcgagaatgaagacgcgccgtgttgcacgatcgggccggtcttattgcggggtaatcaatctttgtgccacccccgcgctntgccacccgccggcgagtgttccccaccgccccgacatcacggcgatacacaaaagtctcgtttttcggcgggggttcttgcatggtagttcggggcgggctccccgtgttaantcaacatactttcacgctaacgcaagatattttgcatgacccacctattgtggtttttttcaccccccacgacagatagtgggcgaccgttggttatgagcggtgtgggaagagataatcgtatagcgcgccttcgtatttgatccatccgcaaaggagcgcgggttgtttatttgtggaaggagactgtggagttgtcgtagctgggttgggtggaaaacacactaaatgcctcatnnnnnnnnnnnnntttttctcaacccaagttggtgacaatttttaaaccgggggggagacgagtatgtggaaaagaggggtggtgtgggccccgggtttttttctacccagggggaaaggagggagatagcnnnnnnnnnnnnnnnnnnnnnnnnagaatactcctatgggggattccggggttggttcatccccattttttgaggggtctgcggggtcggacataaattcctttattatatgtcggacagttcctggggaaaagtggcaggggcggggggctaacgtaatatcgagattcgtgtggactccctgtttatagatcccagggagggcctcaggactcgcatttggagttgttcgaggaccctgggttgtggcgcgaggcgttttttggttgtgcgggattcaaaccgctggtcatggccaggatttcctagggagcgaggtgtgggccattttccctttccttcgggggcgcgggggccaaatagaatggttttgaaagcttttttgaggtctcgagagcggccgagcaagnnnnnnnnnnnnnnnnnnnnnnnnnnnnnnnnngcgaattgcaaaatctggtttaattaagatctggggaggggagcacatagtgaaaatacatatgcacaggaaccaaatcaatgctagacaatgtattagtttacaatataataggataactacaagtttgaaggctcaaattgagtccatcagctgtaaatacaattttatatttggctcaagtggctgttgaatatcaagtggtgccgagtccctccagagcacctactgaccccctcagccttggaaggagtttcaccacagtctcagaagaaatcccagtcgtgcctttaactcttttggcccttgggagtcattgcaaccccaatacaaatgccggcccagggatttccagtggccacaagttattgcacagagaggtctgttctaagccagactcttacagctaaggaggtgtgagattagcccttaaatactggtctagcattagcctcg

SEQ ID NO: 167049 - DNA, 335 bp, Homo Sapiens
aggcatgcctaagagacagaaacggctgaccttaccccaccccagccggatcctctgcttatctcccacatgcacttggcttaactggttttcacagattctgaggttatagaacctgttgtttttcaaactcctgtacagagcctggaaataatggagcaaacgcaaatgtattgagagtcattatactttaaaatagttttaaagactattggggtaccatcaggtcaaaagccactgatttgggaagcaacttttttgcaaaacactttttttggagtactgaactttacaggggcttgccgtaatctctatttagtagtttcaatttggcg

SEQ ID NO: 167050 - DNA, 720 bp, Homo Sapiens
acaatgtgatagattggtttatatgatactaatacagtccagttaaaagtggaaacaggcaaaagagagagagaaaactcatcatttagtttggtctagacacaatttggttaaattttaggattctattggcagttaacatagatgacatggacacagcctatgagtgctttttaaatacgtgcttctaaaaatctgagctcaaagcaagaaaaagaaaacaggaaagctgtatccatttgccataatagatgaatcagaattgttttctattaaatatttcatcacgaaatatgatggaggccagaagctatttttaggcttactataacactattatgcatttttataaataagaagaaggctgtagaaagtacttgaaaaatatctaattctctttctgtctaaggaaaactctttctacttggtgcaataatctgaaaatttagaaggtcaaaatatgtcacaggaaatgatcatagacctaaaaatagtttttaaggaaaccagctacacggggcaaccaaccatcttgctgttgaagaaaacagttccaaaaggctaaatcattggcataaaggaaacaaaacccaaagtatgcgttgtaattcttgagccagtattactgaaacaggataaaagttataaaatctaacataggttaacgcaatgtctctgctagtgctacaagtctaaaatatcttgtacacgcgtttcaga

SEQ ID NO: 167051 - DNA, 786 bp, Homo Sapiens
cccctcaaaaggggggaaaaaggccctttcccatttctttccagtaccaagggaatcctttgtttctaaaaagtttttccaattcaggcaaaaacaatttataacagttattttgaaaaatgattgaaaattgaatcctttacatatattttctatgatcatctcctaattcttacaaatgccaaaatcttaaccaatcattgcataagctcaagctaagagttttattgaatgcaacctcttctaaactggtcaacggtgtgtggctgtcaacattccacacggtgaagttctacagcagatccggaacagttccgaggcccctacctttaccaacggaaattaggtttccctagaaggcatcaacagtggctgctgagtgcttgtgcataccgactcctgagaggcagtgatttactaccaaatgtcactgctttgagacccatgggaaggttggcctccaaagaggaggccatgataaaattaaaacatcaaaaataagttactaaaattcagctgaaaaatgaaaatgggaaatgtgttttgtcactttttaagatcgaaattcccaaaatagctatcgttggtattcaaataaggtttaagatttagtctctgaacctcttcaaaacaccccaaactaaggtgggaatacaagaggtgacccgctgccctccagcacctccagacacagggtctaccttcatcttcctcagtggcaggggttcacatttctatgcagggaccccatgagggctggacgtgctctgcaaagtgctccgggcc

SEQ ID NO: 167052 - DNA, 1098 bp, Homo Sapiens
  misc_feature (746)..(751): n is a, c, g, or t
caacgcatgtgccgctccccttccggctggccccgctcagtcacccgcagcaggcgtgcagtttcccggctctccgcgcggccggggaaggtcagcgccgtaatggcgttcttggcgtcgggaccctacctgacccatcagcaaaaggtgttgcggctttataagcgggcgctacgccacctcgagtcgtggtgcgtccagagagacaaataccgatactttgcttgtttgatgagagcccggtttgaagaacataagaatgaaaaggatatggcgaaggccacccagctgctgaaggaggccgaggaagaattctggtaccgtcagcatccacagccatacatcttccctgactctcctgggggcacctcctatgagagatacgattgctacaaggtcccagaatggtgcttagatgactggcatccttctgagaaggcaatgtatcctgattactttgccaagagagaacagtggaagaaactgcggagggaaagctgggaacgagaggttaagcagctgcaggaggaaacgccacctggtggtcctttaactgaagctttgccccctgcccgaaaggaaggtgatttgcccccactgtggtggtatattgtgaccagaccccgggagcggcccatgtagaaagagagagacctcatctttcatgcttgcaagtgaaatatgttacagaacatgcacttgccctaataaaaaatcagtgaaatggtaaaaaacatacatagcannnnnnaaaaacacgaggcggggacgtctagagtatccctcgaggggcccaagcttaggcgtacccagctttcttgtcccaagtttccactatagtgagccgtatatataacgctaggcacctgcccgctcgtttaacccacgcggtcgctgaacgggcacaacccgtgctaccttgggatcctcggtgaagggaacccttactccggggggggtgcacccacttgggacaacctacgctacggagatttagggtcctaggctaactctaacactcttcacgcgctaacagggcggtcaacccaccgcatacgtctgccctgaaagttgcctcccgcagttgtctcctgacac

SEQ ID NO: 167053 - DNA, 600 bp, Homo Sapiens
ttgctggggttgctctagaggtcccgggtcgaccacgcgtcagagagacaaataccgatactttgcttgttgatgagagcccggtttgaagaacataagaatgaaaaggatatggcgaaggacacccagctgctgaaggaggccgaggaagaattctggtaccgtcagcatccacagccatacatcttccctgactctcctgggggcacctcctatgagagatacgattgctacaaggtcccagaatggtgcttagatgactggcatccttctgagaaggcaatgtatcctgattactttgccaagagagaacagtggaagaaactgcggagggaaagctgggaacgagaggttaagcagctgcaggaggaaacgccacctggtggtcctttaactgaagctttgccccctgcccgaaaaggaaggtgatttgcccccactgtggtggtatattgtgaccagaccccgggagcggcccatgtagaaagagagagacctcatctttcatgcttgcaagtgaaatatgttacacaacatgcacttgccctaataaaaaatcagtgaaaaaaacaaaggagccccccagcggaagaaaaaccc

SEQ ID NO: 167054 - DNA, 564 bp, Homo Sapiens
atacatatacgaatcgagctcagtaccggaggagcatccctacctctgaagtcacagcgtgagcatccctgtccctgtagttcatatggggtgcctccctacctctataatccatagaagtaccatctccacccctatagtccataggtggtccttctctatcccgaaaatccccagaatgtatgtccctacccctgaagtccaactgtgatgaatctctgctctggaaatcagaagacgaaaaatctccccccctgaaatcatgtccaggtccctcccctcctcgatagtcaccatgcggtccgtctctagctccatagctgaaagaatgctcctctacatttgcaaaaggaggccccgaatgcccctggaaatcaaagggaagtgaatctctgccaggaaagttgccagagtgtctctcttgagcatgactcttaaggggaggaggaggataatccctgttccacccgggagcaaacctttcttcttggctcccacgataaaggtccagttctgttagcaggtcgagaatccccccacactcggattcagaagatgacgacc

SEQ ID NO: 167055 - DNA, 749 bp, Homo Sapiens
ccgctgtgtgtcactctgcagcagactctgtggaggcaacccatccaggagatgccaggagggttgtggtgacgccccatatgttcctccacggagagactgttctgtgatcagcttagaattccctctacactggcagttccacctgtctggtcatcctgagtcagggggctgccctctggttgctccaagggagaatccgctctctgaggctcttgatggctccgccgcctccacctgtagaacaagaggcctccgacggccagcaagaccaggatgacactgggcaccagcaggtggaagacagactcctggagctgcgggctggaggatccctcggactgcctctcatggccttggctggagcattcagcaaagctgttgttgcagttcttgctgaaaatattccagtccttgtcaaggagattctttgtttcattaaagacattcttgaccttctccagcaactggagaggtgtctcatagaaagttcggacgcaggccttgtcatgctcttcataatccttggtgaagcagctcttcagcctcaaagagagttcctgcagctgcacaatggcgatggcattgggggtgttatctctgaagcgcatggtgtcctccattatgtcttgtaccaggagaaatgccttcttaaggtagcacactggatctttcaactgttcctggtctacaaactcaaatgtaatttgcacgaggtctccatctgactgtcaatcagccgctgcaga

SEQ ID NO: 167056 - DNA, 625 bp, Homo Sapiens
  misc_feature (16)..(16): n is a, c, g, or t
  misc_feature (23)..(23): n is a, c, g, or t
  misc_feature (54)..(54): n is a, c, g, or t
  misc_feature (121)..(121): n is a, c, g, or t
gcttcccaaaagcaanccccctntctgttgcccagaaaaggccgtcccctggtnaactcgggcctttataagactgtggttttaaaaactgcaagaaggaagaagaggaagagtgggcccnggaacaccccacccaggcgctgctctgaccagtcagagaacgtgaggcagcttcccccatagggatctgcaccgagaaggtgtggaaggcacaagcaagagtgacggtaccagagatcccagagggcgtggctcgcggcggccacagcaggcgcagcgctgacctggggtggtcccccccttgaatgagaaagagatcctgattctgctgtgataaaaaagcaaagaaagacggtttttggtttaaaaagaagccactcaagggttaaaatagttattttaagttaacaaagaaaattaatcttcaaataagctgacactatctggaaaactcatctgtccctaaagcccacaatgcgtccactgcttcgtcctcccatggaacctgagcctgacgtgaaggagtcagacgtgtgacagaggaagagtctgagaagagaagacacctttacagaatgtacagcgagagagccggcctggccatcgcccagcagggacccactcg

SEQ ID NO: 167057 - DNA, 1233 bp, Homo Sapiens
  misc_feature (480)..(480): n is a, c, g, or t
  misc_feature (723)..(723): n is a, c, g, or t
cgagtgggtccctgcgcccttagtccagaacttcctgcactccgtgaatgaatggctcaagaggcagaagagaaataaaattccctacagtttctttaaaactgccctggacgacaggaaagagggtgccgttcttgccaagaaggtgaactggattggctgccaggggagtgagccgcatttccggggctttccctgctccctgtgggttcttttccacttcttgactgtgcaggcagctcggcaaaatgtagaccactcacaggaagcagccaaggccaaggaggtcctcccagccatccgaggctacgtgcgctacttcttcggctgccgagactgcgctagccacttcgagcagatggctgctgcctccatgcaccgggtggggagtcccaacgccgctgtcctctggctctggtctagccacaacagggtcaatgctcgccttgcaggtgcccccagcgagggacccccagttcncccaaggtgcagtggccaacccgtgaactttgttctgcctgccacaatgaacgcctggatgtgcccgtgtgggacgtggaagccaccctcaacttcctcaaggcccacttctccccaagcaacatcatcctggacttccctgcagctgggtcagctgcccggagggatgtgcagaatgtggcagccgccccagagctggcgatgggagccctggagctggaaagccggaattcaactctggancctgggaagcctgagatgatgaagtcccccacaaacaccaccccacatgtgccggctgtggggtttggaagcttctagaagtcgtgctggtctcccaggtgaggcaagccatggttgctgggctgtagggtgagtggcttgcttggtgggacctgacgagttggtggcatgggaaggatgtgggtctctagtgccttgccctggcttagctgcaggagaagatggctgctttcacttccccccattgagctctgctccctctgagcctggtcttttgtccttttttattttggtctccaagatgaatgctcatctttggagggtgccaggtagaagctagggaggggagtgtcttctctctccaggtttcaccttccagtgtgcagaagttagaagggtctggcgggggcagtgccttacacatgcttgattcccacgctaccccctgccttgggaggtgtgtggaataaatatttttgtaagcactcccccgccacaaccggaccgcca

SEQ ID NO: 167058 - DNA, 500 bp, Homo Sapiens
actctagaggacccccagccctcaatactactgtacctgcccagtctaccccttcctctccatgcaagtgtggcagggcctgggtatcatgtccacatgcccagcaagagccttgctcccctgcctcccctcctttttcctgtccacctatatgaccaatccctaattgctgtcctgatgatgagtcattccaatttactggatttaaaacaaaaagttgttacggtttcatggggtggcccctctctctctctcaccctctgggtttcgggaggtcgagtggggtattctctttgtttggcagtggttgctgtcctcttggcatctgagtcctttccctgtccccacaagcccttctactccctgtttgcctttcctttgccaccctctccctgttttacatggaaattgcacgggcctctctgtgtttgcgtgcatgtgtgcgcctgtatatacatgtatagagaggtatgtggggggctggaggtatgtgaggggcg

SEQ ID NO: 167059 - DNA, 1764 bp, Homo Sapiens
  misc_feature (932)..(941): n is a, c, g, or t
  misc_feature (979)..(1086): n is a, c, g, or t
  misc_feature (1315)..(1315): n is a, c, g, or t
ttcggcacgaggtcctgccttcagtgccccaccacccttctgatcttaggggttggatgggtcatctgtccttggtcagaattttctcaccctagtactcctactggcctgaccagggctgactgggtattctaatgaggagctgggaagtggggtgacatagctgaccttagtatcaacccccctcttctccaactcttgttttctagtccaggatatgctaaaggacgaagattttctattgtttccaggccctcagaccatccttgctgtcccttcaccctccatgcccctgccatcctcactcacttctcataaatggatctgggggttagagtggaggaaataaaatcctgaagtggttgtcagtgcttgtgggatgcagtggtcttcaggattctccccgcattattatgtagttgttcagaagctgttgctactgcgtctctctgtctgcagggggcacttgttcctgaggtcctcgcctgggtcctgacttctgtagtttctgtgaagacgtggctgtcctgtgggctcctgtgtgtgctggctgcgccctgagctccgagacagctgcccataacctgctaaggtcagggcccagggccccccacagcatggctgagggaccccttcccagtagggctgtcccaagccccactccatggggccaggtttcctggccacttttgttgatagcagatggatcaatattagtaaccccatccaagattgaactgtgaaagagaggttccaggggtatctccctcagtgccagttacttagtgatgtgttacccaggatgcagcaggtgtgtgcaggtatcttgctctctaggcctgcgtgtgtgtgtgagtgcgtgtgtatatgggcgtgggtgtgtttgtgtgtggtggctgtcgcggcttctcctatttctccatctccccgtnnnnnnnnnntcgtcaccccgctacgcccgctacacccaaatatcccnnnnnnnnnnnnnnnnnnnnnnnnnnnnnnnnnnnnnnnnnnnnnnnnnnnnnnnnnnnnnnnnnnnnnnnnnnnnnnnnnnnnnnnnnnnnnnnnnnnnnnnnnnnncggtttctcctgcccctgccgccttgcgtctgcgctcctcggcccgcgggtccgcgcccggcgtgggggccgggtcggggtcggcagtgggtcttcgggttcctcctccgctgcctccgcatcgcattactattactaatcgcgcaccgcagttcttgtcggttagcggaatactagcgattgactcctagatggtacggtggtcacattatctgaattacacgcggtntcgtacatatcgctctatatacacacgtctgcaccttagacgtgactcacctacgtagagggagcagaaccagtatagcgctatcccgagataagtaagtgaattgaatcgatacatttgggcgcaatgctgccgcgaaccgtctggtcttgtagatgtgccctacagtctgtgggtatatagactccggtgactcagtacgcaacgttacatatcataagacagctcgtaacggatggaaagtcgcctactgaggcgcgaacaatttagccgaccgcgaagccgctggcggtatcaatgtccctacagccgacttcgcgagaagccgagacagagcgcgtatgatttatgtatatagaggcttcaggccgccaattagtgtagcagaccgataagtatcctctcccagtcgcttcgaggatccacgcggaggtgcaacaatgattcga

SEQ ID NO: 167060 - DNA, 1597 bp, Homo Sapiens
  misc_feature (12)..(12): n is a, c, g, or t
  misc_feature (1078)..(1103): n is a, c, g, or t
ccaggcgcaccnaggaggccccccgggacagcccggtttttcccagaagttccagaagtcaggacccaggcgaggactcagggaacaagtgccccctgcagacagagagacgcagtagcaacagcttctgaacagctacataataatgcggggagaatcctgaagaccactgcatcccacaagcactgacaaccacttcaggattttatttcctccactctaacccccagatccatttatgagaaggtgagtgaggatgccaggggcatggagggtgaagggacagcaagggatggactgagggcctggaaacaatagaaaatcttcgtcctttagcatatcctggactagaaaacaagagttggagaagaggggggttgatactaaggtcagctatgtcaccccacttcccagctcctcattagaatacccagtcagccctggtcaggccagtaggagtactagggtgagaaaattctgaccaaggacagatgacccatccaacccctaagatcagaagggtggtggggcactggaaggcaggaatgggattggcccatgcctcaccttctcctaataacaaaagagaatgaagatggaaaacctcaggccttcgcctcccttcccccaatgccctgggtccctaacacacaccatggacttgccatccccaccccccagtcaagctccagaggaacagatctgaagatggtggggaaggatcagttgaacactctaagctgataagagtgagtgggttcctctctccttcccaacagtaaggcagagcagagtggcatctccttgggaacagtcatctagagataaatgccatcctccagccctaagaagggtggagagaagagtacaaggaaaatggtggtggagaatccatcatctgtcctatcatccagaaaaacctacctgcagagaggagggtaaccagtcaaagactggggcagtccagcttgactaatgccctcccaccttcttcccttaatctcaccaacacggaaggggcagatgacaggctccagtgggcagtgtcctggctgcaagccctgagcttcactccacnnnnnnnnnnnnnnnnnnnnnnnnnnacaaatatatctctctatacatgtatatacaggcgcacacatgcacgcaaacacagagaggcccgtgcaatttccatgtaaaacagggagagggtggcaaaggaaaggcaaacagggagtagaagggcttgtggggatagggaaaggactcagatgccaagaggacagcaaccactgccaaacaaagagaataccccactcgacctcccgaaacccagagggtgagagagagaggggccaccccatgaaaccgtaacaactttttgttttaaatccagtaaattggaatgactcatcatcaggacagcaattagggattggtcatataggtggacaggaaaaaggaggggaggcaggggaggcaaggctcttgctgggcatgtggacatgatacccagggccctggccacacttgcatggagaggaaggggtaggactggggcagggtgacagtaggtatgtcaggggtgggtggggtgctttgttagggctgt

SEQ ID NO: 167061 - DNA, 1096 bp, Homo Sapiens
ccacaattcaatttttggaaggggggttacttaatattaatcccatctgctatcaacaaaagtgggccaggaaaccttgccccccatggagtggggcttgggccagccctactgggaaggggtccttcagccatgctgtggggggccctgggccctgaccttagcaggttatgggcagctgtctcggagctcagggcgcagccagcacacacaggagcccacaggacagccacgtctttcacagaaactacagaagtcaggacccaggcgaggacctcaggaaccaagtgccccccgcagacagagagacggcagtagcaacagcttctgaacaactacataataatgcggggagaatcctgaagaccactgcatcccacaagcactgacaaccacttcaggattttatttcctccactctaacccccagatccatttatgagaagtgaggtgaggatggcaggggcatggagggtgaagggacagcaaggatggtctgagggcctggaaacaatagaaaatcttcgtcctttagcatatcctggactagaaaacaagagttggagaagaggggggttgatactaaggtcagctatgtcaccccacttcccagctcctcattagaatacccagtcagccctggtcaggccagtaggagtactagggtgagaaaattctgaccaaggacagatgacccatccaacccctaagatcagaagggtggtggggcactggaaggcaggaatgggattggcccatgcctcaccttctcctaataacaaaagagaatgaagatggaaaacctcaggccttcgcctcccttcccccaatgccctgggtccctaacacacaccatggacttgccatccccaccccccagtcaagctccagaggaacagatctgaagatggtggggaaggatcagttgaacactctaagctgataagagtgagtgggttcctctctccttcccaacagtaaggcagagcagagtggcatctccttgggaacagtcatctagagataaatgccatcctccagccctaagaagggggagagaagagtacaaggaaaatggtggggagaatcatcattt

SEQ ID NO: 167062 - DNA, 1768 bp, Homo Sapiens
  misc_feature (1310)..(1310): n is a, c, g, or t
  misc_feature (1327)..(1327): n is a, c, g, or t
  misc_feature (1337)..(1337): n is a, c, g, or t
  misc_feature (1339)..(1339): n is a, c, g, or t
cggtgctaggtggagggaaggaaggagggagccggggagtgggccagggcagcagccgggctgaagtcggcttggggagccagagggagcggagcggaacctgcggggcagaggcggcggccgcagcggcgcagctgatagcaggaacaggatcaagtcttccataccagggaccaggccaaaaccagactgccactgcccctacttgggccccactgtccccagaaagcagctgctgtgatcatgggcaatatctttggaaaccttctcaagagcctgattgggaagaaggagatgcgcatcctgatggtgggcctggatgccgcaggaaagaccaccatcctatacaagctgaaactgggggagatcgtcaccaccatccctaccattgggttcaatgtggagacagtggagtataagaacatcagctttacagtgtgggatgtgggtggccaggacaagattcgacccctctggagacactacttccagaacacccaagggttgatatttgtggtcgacagcaatgatcgggagcgagtaaatgaggcccgggaagagctgatgagaatgctggcggaggacgagctccgggatgctgtactccttgtctttgcaaacaaacaggatctgcctaatgctatgaacgctgctgagatcacagacaagctgggcctgcattcccttcgtcaccgtaactggtacattcaggccacctgtgccaccagcgggggacgggctgtacgaaggcctggactggctggccaatcagctcaaaaacaagaagtgaaagccagacagccctaacaaagcaccccacccacccctgacatacctactgtcaccctgccccagtcctaccccttcctctccatgcaagtgtggccagggccctgggtatcatgtccacatgcccagcaagagccttgcctcccctgcctcccctcctttttcctgtccacctatatgaccaatccctaattgctgtcctgatgatgagtcattccaatttactggatttaaaacaaaaagttgttacggtttcatggggtggcccctctctctctcaccctctgggtttcgggaggtcgagtggggtattctctttgtttggcagtggttgctgtcctcttggcatctgagtcctttccctatccccacaagcccttctactccctgtttgcctttcctttgccaccctctccctgttttacatggaaattgcacgggcctctctgtgtttgcgtgcatgtgtgcgcctgtatatacatgtatagagagatataatttgtgggggccggggggaacgngggaagggggtggaagngaagattgcngnttttgccattcatgacaatgacacactcggcagcgtgccatcatggcccctctccgtggcgctcgacatataccgtaacaaaggtgtccatggccattaatgcaatgcggtactggcccaaaccctttcgaaagaactcccccgcctcatccgcaggtaccggttttctttggacagacaaagaataaattcacgtcagtttccggccataccaccctacctctaaacctctttctccgccaacccctttccttaagtactcacaccacaatggatttttttcttccccgcaagaacgtcctcttccatctgttaaatacacaaccctggctaatgacgctaaaacaaccggacaacaacgccttaataacacccaaaattataaaccctcagatagaaccctacgtatttgttcgccactctattatt

SEQ ID NO: 167063 - DNA, 520 bp, Homo Sapiens
agtgggtcctgcatgggggtgaagactgaatctgcactctgaccagacaggttaccatgaaagctgggggcttttattccccaaggtaatctgcttcgactagatttgctgcctttgcttttagatgggtcgtcgtcttctccctgaaaggggagcagctgggggaataataacagcagcggggcaccttgcccagtttggtatacaaagattcaatttcatagcttctaggcgactctgcaggtcctgaatctctttgagatgtttatctcgtagtcgtcgcagctctaactttaagtcttcatcttcgatatctgactcattgtcgctactcatgtaagaggagttaaatgaattactaaggctttgacttagattctggctaggaaggctctttgagctcagctgatggggcgagtgtggactaccggaaccatcatccacatccctacttaaaaaagcggcctccgggtcagaagacggcccatttagatgtgaaggctctgcaggcacccactcg

SEQ ID NO: 167064 - DNA, 460 bp, Homo Sapiens
cgagtgggtccctgcaggagtttcacacgagagtggtccttccctttgcctgtggtgaaaaagtgcatcacacaggtattgctttttaacaagaactgatgctccttgggtgctgctgctactcagactagctctaagtaatgtgattcttctaaagcaaagtcattggatgggaggaggaagaaaaagtcccataaaggaacttttgtagtcttatcaacatataatctaatcccttagcatcagctcctccctcagtggtacatgcgtcaagatttgtagcagtaataactgcaggtcacttgtatgtaatggatgtgaggtagccgaagtttggttcagtaagcagggaatacagtcgttccatcagagctggtctgcacactcacattatcttgctatcactgtaaccaactaatgccaaaagaacggttttgtaataaaattatagctgtatcta

SEQ ID NO: 167065 - DNA, 1811 bp, Homo Sapiens
  misc_feature (1077)..(1077): n is a, c, g, or t
  misc_feature (1100)..(1100): n is a, c, g, or t
ttaaaaatttataacttgggttcttccacaggaaccccacaaaggaccaaacattctcaaatgcgaaatcccaaaaagccccattctttcatagtaacccgggctcatcagtgacaatcatgcctgctccaaagggctcatcagagaatgttttgtaactgatgccgcaaggaccctcatggacattcaaaaaagacccaacaccatgtccagtcccgtgcaagtaatctaggcctgaatcccataaagctgaacgggcaaaggagtcaagaaggtgacctttggttccagtcgggaaaacggctgcactcacagctatgtggcccttgaggacatatgtgaagcattccttctcgtaggctgtaggggtcccaaaatgcattgtccgcgtcacatctgtggtgccatccttgtattgagcacccgagtcaataaggtacacctcatccagggacaaggtcctattcgtctcagggactggcgcgtagtgaatgatggcgccgttgggtcccgtactggaaattgttgggaagctcaggtccacaaagtctgcctgttgcctgcgaaactcctcagctttgtcagcagctgagatctctgtcacaccacctttgggaacctctttctccagccagttaaagagttcacagagagcaacagcatctttaatgtgagcccgcctcatgccttctgactcagctgaattcttcacagctttggcgatgcagatgggggtgtaaggcatacagcagcggtggtccttggggatggtctcgctcacagcatagctggccttgtcactgacccacaccttctcccttggggagaggtcagcacacagggccttgagctcgctcaggatggacttgtagggatgcacctggatcctgtattcggcttccagacccaagtcaagaaccaggggctccttcacactgggggcgtctatgcggtcaccatcaatgaagagcatgatcgtctcaagtcctatgattgcgtagaagaaaaatactggattgtgctccacatctgatcctcggagattaaatagccacgcaatctcatccaaggcagtgnccacaaaccacatgacgttcctntcagccattttcaaccgaaggtctgcaaccttgtccttccaggagatgcctgtgtaatccaggcccagtgtgaggagaggcttgcaagggcgctcaggacggtctgtccagattttgtcaacgaggttctccttgacaggaatgaggtgatggccggcacttctcagaactttggccattttcttccaataatctgtaggaatgatcaaggggtccacaccaaccctggatccttcaggaagcacactcaccagccagtcttcctgagttggtgtgtccttcagacccatcgtcataagtgtccagttgctgtccatttgcttggcagcctggagaaagtagcgcccgtcagtccacatggctgcatgctcttctgtgatgatggctgtgcccgcagagccatcgaatccagagacaaaagcccgccgacagtcacatggagcaatatactcactctgatgagcatctcccgatgggatgatgtaggcctggatcggttcggtcacatactcagagttcctcatggcttgtctcagctgccgaagcagctctgaagtcacctttggaggcattctgccgtctgtttccacacctgtgtctcctgagtgtgtcacctcgttaggttcaattattcttaaatttctcagttgaaaatcctggtgattcacccttactcgcggtggctttctggaggctgccatatcggcggtg

SEQ ID NO: 167066 - DNA, 688 bp, Homo Sapiens
ccttcataatcatatgctttgatacaaataactggacataaagacatcaatggaattgccacaaagcagtatgtggtcatgcctgctgatctgcttatagcatctaggtaaattaactttcaaggtctcaccggaagtgaaaataagggcttctctcaaaggaggctataaaataatttctgggttaatttatgaaagctgaggggttgcagaaagagagtcatgttgaagccaataataaaaaagaaaagacaagtatgggggcaggaaaggggggtgagaaggcaggtagaggagcttccacaaagggaaaggtggcacaaattgctgaagcttcagagaagtagaaaattgattaagaccttcctttggattttcctagaaggtgattattgatcacctttgagacaacactatatttcctttttgttctcaatgattttgccgctcagtgacccctttcctgcccccatacttgtcttttcttttttattattggcttcaacatgactctctttctgcaacccctcagctttcataaattaacccagaaattattttatagcctcctttgagagaagcccttattttcacttccggtgagaccttgaaagttaattaccctagatgctataagcagatcagcaggcatgaccacatactgctttgtgcagcccggtcccggcta

SEQ ID NO: 167067 - DNA, 978 bp, Homo Sapiens
tatagctgggaaaggtgaggaagcagcccatgcaggtatctgaggaaggtgatttctttcaggtaacagcaagggcaaaggccctggggcaggtatgagctttgggtttggggtgctggtaggatagagggagaccccaggacaggaggctggggggaaagtgggggcagatgcagtcacggagcaggacaggagacagttataggactttgtagggcatggcaaggactttggattttagttgaggtggatgtggagccactggagggctttgctcagagtggggggcttgatcaaatttgtgatttaatgggatccttctggctgctgtggaagatgggctgaaggtggaggcaggaggaccagggacgaggttccagcaaggtccaggcagaggcagtggtggcttggaccaagatggtgacaggcggatgatgggaagtggtcagacctggatgtgtcctgagggtgaagctgctgggacatatgtgagggaggacagaggagctgaagtcccctccatggtgcgtagccttgacccactggcattgacggatgtatggatcacagggcgaaaattcaagaggccagtgtgagagtgctgattggacaccaaatgaagtgatttgaaggaaattactaagtatgcagcggtccaaatgatacatataaacggcctaacgtgtgtgagaggcacgcggactactggaattgagatgatgccacgaagggcaaagaccccgttttgttttcgcagactccgtgcctgcgaaatggcgcgggtctgttttgggaaggacggactttccacaggcttctgcttcatctttcgccgacctctctgaattgctttggcaaacactgtttattgtcattggctcggctccgcgctccagcccatctctgctgatagatgtgtgtcatgctcagccgacttcactgtgcggcatgtacactcctccccaagctgatacgcct

SEQ ID NO: 167068 - DNA, 931 bp, Homo Sapiens
agtaagaagctggaggtggatgtgatccaggagcggagccgcaacacagtcttacagcagcacctggagaccctgcggcaggtgctgaccagcagctttgccagcatgcccttgcctggaagtggagagacacctacagtggacaccattgactcatatatgaacagactgcacagtattattttagctaatccccaagacaatgaaaacttcatagctacagttcgagaagttgtgaacagactcgatcgttagggaatggtcttagaactccaagatgttccataagtgtttttacttgtgaggaatgagaagccatccatggaaatttgaactgagtgggggcagagaaagagtgcagatccctttgcttgtgaaagaattatcagtgagtgaaaggccatcaccccaggaagccaaatgagggagcagcaacatgtatatgagcttcctatggaattgtccttatgtgaagctttgaaggtgtacagccactctcccgggtcttcaggttcctaccatttccatttctgttaaagtggatctgcatatcttcagcttactaggtgacccggatgctgacatctgctgctgcagaaaggaagacttttcattgtaatttcgcttagaccctttatcagtgaagctccagtttttcttacctagctgtccctttttttaatgccctccggggggttattttttggttttccctgggccccccacccaatttaaaccttctcccattttttctggaccttctggaaactaacctgggtgtggccccaccaaaggggtccctgaaaaggagaaaattttttcttgggccatttgggaaccaggggccccagattcctttctcctcccacatttattttgggccccccgtggctggtggggaaactctccccaaaaaagaacaaaagggggt

SEQ ID NO: 167069 - DNA, 364 bp, Homo Sapiens
tgctacgcggccccgcctagagcatttccatttgcccccaacaataatggccgtcctcatatgctcaatcatgaccacagtaaacgaaggcaagcgacctgacgtccctgacccacaataaacttcttcgacaaaagtagaggaaatcggtgctcgttaacaacatggcagccaaccgggcttaatcagcccatagtgtatattggctctccctccctccaacctgctcccattcggcacgaaggctggcaaagatccaacacggcagcatttcttgcttcggtttgccaggcttcaaaatggcggctcagcccgctttctcgcgatcgtgactcagaattcgtccgggccgcatagcaggtac

SEQ ID NO: 167070 - DNA, 1103 bp, Homo Sapiens
  misc_feature (889)..(889): n is a, c, g, or t
gacaacacgctgactaggaaaaggaggaggcggggcagtggggccttcggcggcgactatggaaggagccggctacagggtggtgtttgagaagggcggagtgtacctgcacaccagcgctaagaagtatcaggaccgagactctctcatcgctggtgtcatccgtgtcgtggaaaaggacaatgacgtcctcctgcactgggctcctgtagaggaggctggagattccacccaaatcctcttctccaagaaggactccagtgggggtgactcatgtgcttctgaggaggaaccaacctttgaccccggctatgaacctgactgggctgtcatcagcactgtgcggccacagccctgccactcagagcccacgagaggtgcagagcccagctgcccccagggctcctgggccttctcagtgagtctgggggagctaaagtccatccgccgctccaagccaggcctcagctgggcctacctggttctggtgacccaggctggaggttccctgcccgcactgcacttccaccgcgggggcacccgcgccctgctccgcgtcctcagccgctacctgctgttggccagctccccgcaggactcccgcctctaccttgtcttcccccacgactcctctgctctctccaactccttccaccacctgcagctctttgaccaggacagctccaatgtggtgtcacgcttcctccaggatccctactccaccaccttcagcagcttctcccgagtgaccaacttcttccggggtgccctgcagccacagcctgagggagccgcctccgaccttcccccgccacccgacgatgagcccgagcctggattccaggtcatttcctgtgtgagtaggggagctgggggcctcgcccaacgngggagcgggggcccttcaagttacagaaggaggagtggggcaccccacggggggcccctgaaggtcgccctgccagcaaggtccctggagcttgaaagaaccgggaatctttctccggggggggtctggaagcccccatcccttgcggggccccgaaggccctggggaaagtttttccctcccctagggggtaacccctcccagcctttgggga

SEQ ID NO: 167071 - DNA, 419 bp, Homo Sapiens
  misc_feature (16)..(16): n is a, c, g, or t
cctgctcaggctcaanagatttcccactgacaaacttcaatgcggaaaatactccatccgttttcttgcgtaatgtgggccttgtgctcctcagctgtgccttcccagctgaggtaccctaggaggaacttcccaggcctacgcgccgcaggctggggctcagaccccccgagaagatccggttcttcagctcagggacctgctgcaggcgaccttcagggcccacgtggcgtgcccactcctcctctgtaactggagggcccgctccacggttggccgaggccccagctccacacaggaaatgacctcgaatccaggctcgggctcatcgtcgggtggcgggggaaggtcggaggcggctccctcaggctgtggctgcagggcaccccggaagaagttggtcactcgggagaagctgc

SEQ ID NO: 167072 - DNA, 700 bp, Homo Sapiens
gtccgtcccaagaagttaaatggttgtcactgaagtcagtccaaaaaggatgggcagcttcggatcctaacaaacttcccagtgtcgaagagaacaaaaatttggtgtctcctgctatgagggaagcaccaacatcgttaagtcaacttcttgacaactctggagctcccaatgtgacaattaaaccccctgggcttacagatctggaagtaacacctccagtagtttctggggaggacctcaaaaaagcatctgtcattcccacactgcaggatctgtcttcttctaaagaaccttctaattccctaaacttacctcacagtaatgagctgtgttcatcccttgtgcatcccgaatttgagtgaggtcagttctaacgttgcaccaagcatccctccagtaatgtcaagacctgttagctcttcctccatttccactcccttgcccccaaatcaaataactgtatttgtcacttccaatcccatcacaacttcagctaacacatcagcagctttgccaactcacttgcagtctgcattgatgtcaacagttgtcacaatgcccaatgcgggtagcaaggttatggtttctgagggacagtcagctgctcagtctaatgcccggcctcagttcattacacctgtctttatcaatgcatcctcaatcattcaggtttgaaaggtcacagccagccaatcct

SEQ ID NO: 167073 - DNA, 688 bp, Homo Sapiens
  misc_feature (437)..(445): n is a, c, g, or t
gtcttaccgagtggtcctgcggcgatgttagttaggcagcatgctggctgcttttcaaggttgtacatttaataataaatataactggcttccctttcagatgcaatgcttggtgctagcaattaccacaaaatgagtgaattgatcaatataaagtgctattttctctggaagcttctctaaccaactctcgattgcctttccatctatgtgacttaacttgttgacaatcttgtcaaacacctgtgattgcaccattttaaaaatacattaatattaatttgaacagtggaaattatgttcctctaaacattagcccctaaaatagaacttcaattccagttgcaaataaagattcagatttttctttttaaagacaatcaggaacccagtacctagcaagtaattgtgtcaaaaactttagtgttttgtttagnnnnnnnnnaatttgggcagagagatctgtgtctaaaaaccgacagaaggaactttccctgcagctagttcttgcttcttctactggacttctctaaaagccacatccttctacagaatccgtctacacagaacaatatttgaaccaattcttgggtctcctgttggatgtcttcccatggttgtgccaggacactctagtgggtgtgaagatgtcatattatactggactgtgaagcgagaagggatattt

SEQ ID NO: 167074 - DNA, 732 bp, Homo Sapiens
agtgaagacaagacagttgtttaatgtcatatagctcctatgttcccatgttgaataaggattcaaaccccagtatctggctctacagcctgtggtacattacaccatgttgtccaacaagcatagctctcagggttacatggtttgttaaagtggttaaaaaccccaatcaaaggcccgtggaagttcttaagcaggggtaggttatgccagaaaaaaagtagtggctattcagctaattttctcacatttactcagtctttcccgtctgtaaaataaaaatgaatctaagttccagagaaaacaaatgggggcagtgtgagccaaggaagtgaataataataagcagaagagaaaggcagcctctgctcattggtagtcccaggaggtcggccttctgcagttgccaagcaacgagtgtaaacagcacaagatcatggccactaactacagtgccaaccaggtaagttcccattctccatttctttaacgtttacttttgtttttcagattctatctttggactgtcccctctcataggattctgatctttgaacagatagctgagagtggagtgagataatattttacctcctcagggatagagagagcccaggggcgatccaaaggtatctcttggttaaatttgtagggtgtaaaccagaagttggcaattttttttctgtaaaagggcggagtgtaaaaattttaggctttgcaggccaagtggca

SEQ ID NO: 167075 - DNA, 943 bp, Homo Sapiens
gggaactttaaacaggtatttacgtggtcaggggtccctgaaggagatggacttgagtggccagtaagagaaggctgtcaccaatacagcttaacaatagaacagttgaaacaaaaagcagataagagagtcagaagtgttcgctataaagtaatagaagattatagtggtgcctgctgccctctgaataaaggaatcaaaaccttcttcacaagtccctgcaccgaagagcctcgaatacagctgcaaaaaggggaattcattttagccacaagaggtttacgatactggttatatggagacaaaattcttgatgattcctttatagaaggtgtttcaagaataaggggttggttccctagaaaatgtgtggaaaagtgtccctgtgatgctgaaacagatcaagccccagagggggagaagaaaaatagatagctgctgttaaaacaaaattatcctttaagtctgcttaattacttgaaaattgtacatattactaaagaattatgcaatgagcctactctggttaagatgttcttttcctcaaaggtgccctaagtgccatgatttaaatatttttattaccattttgaaatggagaagccattctgcatatgcctttgaattcctgcccctctttaccacctcttcctccccctcaaaggaaaaacatttcatccaagtaagttaacggcattttctgtaggattttcttatgcactgcacactctggacctcacctgcagatacagttccccccttgccaggagcatctgcatgtggtacttctcttttccctcagttgatatttcttatatgatattctagatactatagaactcaatttgtcagattcagtataacctcagattttgttacctgtcttttaaaaatgcagattttgtcaaatcaaataaagatcaatggatgttgggtataaaaa

SEQ ID NO: 167076 - DNA, 324 bp, Homo Sapiens
ctcggaccgagtgggtcctgccaagaagtacgtcaagctgcgtttcgagccgtgcggggctggaggctcatctgtgccaagttcacccacgagtcccagcggcaggagaaccacttcgtggaagggctgctctactccctggatgaggctgtcattatgacaggggtcatgacagatgaggcagagcccagcaagctgaatagcattggcaattactacaagccgtggttctttaagcatgtggagaactatctgaagacaaaccgagagggcctggagtacattcccttgagacactactaccaccgccacaaccgggatctt

SEQ ID NO: 167077 - DNA, 680 bp, Homo Sapiens
tcttgcataatgaatcattacaacactgtccaatatcttgccttcccatacatcgatatatttctgaatttcattcatttatttgatagccaggtgtttgcttcttaattggtgactataaaaagggcaaacaggatctccaggtcgacgtctaggtgaatactgcttgtaaattcggtccatgctaccttggagattcatgagagcagtaatagcttggttcaaacattctctgtcttcttgttcttcactacatgctttcaattgctttagtaactcaaagtagtgccaacagtgatacactggcaccagcataagacgtggaaggacgtaacgaactgcctctttaaaaccatcagcaatggactgaaagtgtagagcaactgcaggtctggccatcaatttattgaaatgttcatgaaactctggtgaaagaatgtcctgtgataatgtatcataaggatcaaatgcttgctcttctgccaaatcttcaaaacagctgccagctaagggatgaggactgctttcatcagtcatttcaactgtgtcttcaatcaaacctaaaagtttcacagtcaattcatgtatatctgaaatgttactaaaaatcttttcgatatcagaaggtttaacagcttctatcagaaagaaggttctcgaaacatttatgatcatattat

SEQ ID NO: 167078 - DNA, 1301 bp, Homo Sapiens
  misc_feature (1117)..(1126): n is a, c, g, or t
  misc_feature (1155)..(1165): n is a, c, g, or t
caggctggctttgtcagctgagagcacggagggagagttgtggggtccatgttggaatgaggggtgagcacatttccctggtatcttggccgaagaatccaggctggagatgacagaggaggccatggtggagagttgattgcatccttatgttgaaatggagatcatgttcagctgggggaactctgtggtctccccagctgtcaagggctgcctccctctgttctgacctcatcgttattctggcagagtatactctgaagcgctggcttattttggaggggatgcaaagttttctcccacctaccctgtggggcagactcatacataattctttgcttttttcttccccctttgcctgacttgcagttcgtctaatgattgaaaatccttccgagacccgctatgacagcttctactttgttgacaacaagctgataatgcactacaaggctgattactgcctataatggaggccagtaagtgctgcaagagtagataggggaggtgctttgccgcggccacaagatcctgccacacggagatgatcgaagctgcagtttgtcaacacacatctggaacctggccccaggaagccaaggccggggtggcactttcctgccgcgccaaaggagctcccaaacagtgctgtattttcttccccagatatcttcttcttccctcttcttcctgccccgtagcttgcagaggtactatagtaaagtaaaaggttaggataagggtcctggaatccagataaaaaagtttattttccgtagttctggctgcctgttggttgtcttgacgaccaggcatagctgtgcctggtgagaaggctctggccaggcccaccagcaggtcagcagctcttaaggttcctgggtgctgtgggaagctgaaaggtaggcctcttccaggtagctcctcctctcacctccggcattgccatcagcgcagtctgccctcagcctgtgtgaagtcttaaaccaactgggaaggcaccaggaatggggtgatgctgccaacctgaaggggcctgctttgtgggagaggctgctggctctgacctaaattcccggggcgcctatccgcccttcctgcgggagaacacgcccgnnnnnnnnnntggggccggtcccgtgtgggtgccccgtnnnnnnnnnnnccaacagaacgtgcggcgcgccacctcctgccgcgcggcgctcccgcgccgcccccggcctttgaggagagaatggcacggggccgcgcgcgcttccgtcgtatcgcggcacgcccgtgtgtcgctgcgcgtcccg

SEQ ID NO: 167079 - DNA, 238 bp, Homo Sapiens
cgagtgggtccctgctctgttacatgctcatgtgtacaggaagaacatatgaaatatcatcccacggatgacgatacagcccctgcttcagcctctgctgatcaagatagtgtccaatgaaccccatactccttcccagcacaaagatgccattgagggctccaatgtcaatatattcatcagcttcctcccgagtaaaggacccacagttacgtcaggcagcacttccctgccacaa

SEQ ID NO: 167080 - DNA, 830 bp, Homo Sapiens
  misc_feature (802)..(802): n is a, c, g, or t
agaagcgagtccgactgtgctcgctgctcagcgccgcacccggaggatgaggctcgccgtgggagccctgctggtctgcgccgtcctggggctgtgtctggctgtccctgataaaactgtgagatggtgtgcagtgtcggagcatgaggccactaagtgccagagcttccgcgaccatatgaaaagcgtcattccatccgatggtcccagtgttgcttgtgtgaagaaagcctcctaccttgattgcatcagggccattgcggcaaacgaagcggatgctgtgacactggatgcaggtttggtgtatgatgcttacctggctcccaataacctgaagcctgtggtggcagagttctatgggtcaaaagaggatccacagactttctattatgctgttgctgtggtgaagaaggatagtggcttccagatgaaccagcttcgaggcaagaagtcctgccacacgggtctaggcaggtccgctgggtgaacatccccataggcttactttactgtgacttacctgagccacgtaaacctcttgagaaagcagtggccaatttcttctcgggcagctgtgccccttgtgcggatgggacggacttcccccagctgtgtcaactgtgtccagggtgtggctgctccacccttaaccaatacttcggctactcgggagccttcaagtgtctgaaggatggtgctggggatgtggcctttgtcaagcactcgactatatttgagaacttggcaaacaaggctgacaggggaccagtatgaagctgcttttgcttggacaacacccggnaagcccggtagatgaattccaggacttg

SEQ ID NO: 167081 - DNA, 678 bp, Homo Sapiens
gccagagagagaagtaattgacattctcccaccaagagctgctcaggcaaaacatcatgacaggtcgtgatgttcagggcaggaatgaagatggtctgcttcacgacatacaaagggatggtgaccagcagaatcagcagccatattgccagggagatgccaatggcaatgtttgccttcttcctggagtgccccatggggttcacgatgacccaatacctctgcacactgaggcaggtcatgaagagaatggaacagtacatgttgccatagaaaaagccaataagcacattacaaagagcttccccataaatccagttgttgccatgtatgtgataggcaatcttcaagcggaaccagatgacagagaggaggtcagccaaggccagattggccatgtaaatcacagcagggtgcttcttcttagttcggcaaaagaaagacccacacgggccatgccgttacttggcaaacccaccacaaacacaattgtgtagacaattggaaggaagacatgtggtcagttttaccagtgaggacagatgcagaaaactcatccacagaaaagactgtttcaaccgtaactcctattcccagtgacgtgggatgtgccatcaaccttggatggtgccacctgcaggagagtagaggctgctagcaggatggcgcccccagctg

SEQ ID NO: 167082 - DNA, 680 bp, Homo Sapiens
gggccgagtgggtcctgcagaggaggagggtggacgaaccaaaagccaccgatactgggcccaaactaggtgcaaagcacagctcagccacctatggcaagttcaaggatcaccacgaagttatcgaacggattctgttgtgctatgcaaccacgggcttgaaggtcaagcaccttttgtctgggcaagaaaggacggaggggcatttacaatatactgactggccagatcacggcatgtccagaggatgtccaaggatttttatcctacttggaggagatccagtcggtccgtcgccataccaacagcatgctggaaggcaccaagaaccggcacccgcccatcgtggtccacggtagtgctggggtgggaaggaccggcgtgctcattctttctgagactgatgatctactgcttggaacataacgaaaaggtggaagtgcccatgatgctgaggctcctcagggagcagaggatgttcatgatccagactatcgctcaggacaagtttgtctaccaagtgctcatccagttcctccaaaagtccagactcatttaatcagcccaatccagctcctggaggagggacccagctccatcgcgctggaggagagtcactccagacaacatctgctcccccacagggtgcaggtggtgcagcaaaaggtctctgaagacag

SEQ ID NO: 167083 - DNA, 696 bp, Homo Sapiens
ggggcgaacgggtcctgcagtatgtcacccctagaccacactctggcagtagcttgggtgcggggggacacattgattgactctcccctggtcatgtgcttcacatctgactctgttgtgaggttccccagagccaccaagattctgcaaatggaaattagcgcccttaggaagcacaggtacatgcagggcaataccaccaattgttcacgatgaatgaattggactcccgggataataaaccagaatgtgtgcttgcgggggcggggaattagttttgcttacctctgtatacctggtatcctaggagggtgcgaggggcatattaatgcttagcaaaagttgacaaatgaagggacctcaaaagttctttcctcctttgaatctctaaacccgagagtctgtttttgcatgggacatcatcttgttccatcagggagctggcgatttggctcctgggtcactaaatccaaacttgtagttgatcacccatgactgggttctcattgacctgcacgaagagttgttactggaataaacactggatgctagaatgccacctgctgcctgagatttcatcaaagaaagggcaacacgttccctagctctgagcatctctaggccaatggtgttgctcccagtctaccttgggaggcaagttctgttcttctcctggtatgaaaagctgacgatgtg

SEQ ID NO: 167084 - DNA, 720 bp, Homo Sapiens
tggtcctgctcaaagagttgagtctgttattctcctcctttggctggtgtttgactttactctgaggaacagaacgtggcagaagtgacactgcaagttttggccctagttcttaattggtctagcagcttctgctttgattctcctggaacccagctgtcatgctgtgagaaaactacaggtttatcctgctggagagacggcacatggagaaccaagacgccattgccacaacccgcaccaaggccccaggcatacgaatgaggaacagagcccatctttcctctgcatgtgtaacctcagcctgcaccatataagcaaaagaactgtgaagctgcatgagtaatctcagcctgcaccatataagcaaaacaaccatccagacaacccacaaaatgtgacaaatcattgtttctgtagtaagtactaaggttttgcgactgtcatacagcaatagataactgacacatcatcttccttcccgttgccacgatccaccattattgctctgtccctactaagacatgatttagaaagagaaactagggacacctacacaagcctaatcattgtacagagatgagttatgacaaattaatgactcagtgagcttttagctcatctaccctaatacaatttgttcaactgagatttccttgaattagtaaagggagactgaagttatgctgtgcagaagatagtacaaaagctagttcgctg

SEQ ID NO: 167085 - DNA, 633 bp, Homo Sapiens
tcagtcggagctgctgtcttcagcaacacttcctaaagttagtagaggaaggaaaaggaggtagtctgtgcctcagtaccacaccaattaggggttatgaaagaagctagggctggggatgaggctgtcgctattgattaaggtagggttctgatatcatctccttcagacactggctatatttcctccattcgccttgacaactaacagcaatgatggtggattaatcaacagtgtcctctaagcagtgctcccacagcacacataaatatgaagtctacataagtctttcaggatgcagaagagtcacaaggaatgaactggatatctgtggtgagaaggagaatgttacctgtgtctagcagaagccaaactcttaccaagcagaaaaaccagaatccctcagatggaatttcattattggatcacattctaaagtcctaaaataccattgatgggtaataaatgtgaattcaatgctatattttgaactgaatgctcttttgaattaaaacacaaggtaggctctaaacaacaggcacagcaaaggactctaggatggtgacatggataaatgcatgaaaagacatgttttcctatcaaggcagtactattattacatttgagctatct

SEQ ID NO: 167086 - DNA, 516 bp, Homo Sapiens
  misc_feature (86)..(140): n is a, c, g, or t
tgactccccgatcgatgaaaggggtcatcgtattgaagggtggggaacatgctatttacaataactgacaattatctgcaaatacnnnnnnnnnnnnnnnnnnnnnnnnnnnnnnnnnnnnnnnnnnnnnnnnnnnnnnncaaaggtctcctctacaccctgatgtgaaaggatcaggaaggcttaaagttaactggaaaaacaaaacaaaatctaaggctcagtgtgctatctttttgtgttgggagggatatgaatatatatatatttacatgtccttgtatgtgcataaagaaattctggagacgtgtacatatacaaattaataaaaaatatatatttgtgacagagtatgagcacaaaagaggacaacagacagagtggcagcaatgctgtatatttcttagcttagctttagctggcatgtcttccccttaggaaggaaggagaatagcatacaaacaggtagcagtaaggatccagatgacagtatggatctcaaaaagtgggaagttg

SEQ ID NO: 167087 - DNA, 701 bp, Homo Sapiens
ggcggaccgactggtcttgctgtgtctcacatggacaaaaaatgaaatggagagatagagcaagagagggctgaacccatccttttatagcaacaccaatcccacccatgaagatgaagcctcgtgcagcctaatcacctcttaaaggtcttgcctcttaataccattacaatggaaattaaatttcaaaatgacttttggaggggtcacatattaacaccatagcataagcataaacatttcacattaatagagaaagaatgagctggtagatggtcagccatttttgcacaactctatgaggtaaaaggaaaatcattattgacttctactttatggttaaactatggggaggatctccccttctttcttggggcttagataaccataaagtctacattcaattgtctactcttcctcagaaagttgctattataaatccatgctctgccttgtggtactgggtagaaggaagaaaaggcttttacagagcttatagtattcctctgaagtctgtagtaacaattaaaagaaaaagtatacactgggcatgtagatcaagcaaaagatctagtaaaaattataagtagttaggaagtcactaaaaatattttagtttatgcctttgatttaggactttaagggggtgagttctttggaatgaaataaacacgttccaattcgaattcttactggataga

SEQ ID NO: 167088 - DNA, 409 bp, Homo Sapiens
cgagtgggtcctgctcgattaccaccaggccttgcacacctgcctcccctccaagcccctcctgggcctgggctcctctgtgatctacgtcctgtggaacctgctgctactgtggccccgagtcctagctgtggccctgttctcagccctcttccccagtatgtagccctgcatttcctgggcctgtggctggtactgctgctctgggtttggcttcaaggcacagacttcatgctggaccccagttccgagtatcctctatttctcctggttcaacgtggctgagggccacacccgaggccgggccaccatccacttggctttcctcctgagtgacagcattctcctgtggccacctgggtgacttacagctcctgcctgcccagcaggacccactcgggtaccgcgc

SEQ ID NO: 167089 - DNA, 707 bp, Homo Sapiens
acctgcccacagaagctgcagcccgcctgaccagatgagaaatttagacgccagcatgaacagctaagagctgttatcgtcagggtcctgaggccacaggtcacggcagttgcacaacagaatcaaggagaggtccctgaaccccaagatatgaaagtggctgaggttctctttgatgctgcagatgcaaatgccattgaggaagtaaaccttgcttatgagaacgtcaaggaagtggatggactggatgtttccaaagaggacacggaagcctgggaggctgctatgaagaggtacgatgagaggatcgacagagtggagacccggatcaccgctcgccttcgggatcagcttggcacagccaagaatgccaacgagatgtttaggattttctccaggtttaatgcactgtttgtcaggcctcacatccgtggggccattcgtgactaccagacccagctgatccagcgcgtgaaagatgacattgagtctcttcacgacaagttcaaggtccagtacccacagagtcaggcttgtaagatgagtcacgttcgtgacttgccccctgtgtcagggtctatcatctgggctaaacagatcgacaggcagctgacggcctacatgaagcgggtggaagatgtccttggcaaggctgggagaatcacagtggaggggcagaagctgaagcagacccattcgcgtacctc

SEQ ID NO: 167090 - DNA, 624 bp, Homo Sapiens
gcggcctctccatagctgagtatagatgtacccagccgagagacattataacaatgatgttcttcccctcctcattgacaaggaaggtaacatctcttatctttgggcttggcaggagcaaaatagaaggttggactcaaggcatcaacacacagatcataaatcttaacaaagtctgcggtgacaatagctaactcggtctgtgaaccaggtaaccacacggctttgatgatgaagttccccgtggccaactgagggtgcaaaaccaagtgatccgaaacagagccggagctactaaaggtgagcacatgacagtcctttagcccacaaaccgccaagtagtcttcctggcagggatttcctgtgaggctcaacacagtaaaaggaactgcggcagaagccaagcgggtcacagttaacttcctttggctggaatctgcttgcttcaggagtgcagagagctgcacaacggcgcatcttgcccttctcatggctgacagccaaatgtcggcggcgcccatggggagaggagagcacacacatagccacccgcctgagcacatgagcactgatcagctgccggatggtctggccctggtctccactgcgcgtaagggccagcag

SEQ ID NO: 167091 - DNA, 1079 bp, Homo Sapiens
  misc_feature (707)..(707): n is a, c, g, or t
  misc_feature (988)..(988): n is a, c, g, or t
cgacgaaaggaaataatgccacagctagaggaaagaaaggttatctctccacctccttttgcaccgtcaccaaccttgcctcctacctgtcatccggaagaatttttggatgaagacttgaaggtagctgggaaatacaaaggaaatgattatagccaatactctccctggtcatgtgacaccatcggctcctacattggaaccataagatgcaaaacccaaagatgttgtggcagcagggagtgtggaaatgatgaatgtggagagtaaaggaatgagggaccagcgattagatcttcagagaagagcagcagaaaccagtgatgatgacctcatcccatttggagaccgaccaacagtgtctcggtttggtgccatctcacgaacttccaaaactatatatcagggtgctggtccaatgcaggctatggcacctcagggagctcctacaaaatctattaacatttcagattatagtccatatggaacccacggtggctggggagcttctccatattcacctcatcaaaacataccttctcagggacacttcagtgagagggagagaatatctatgtcagaagtggccagtcatggaaaaccccttccatctgctgacagagaacagctaagactagaattgcagcaattgaaccatcagattagccagcagacccagctagagagggaggcaaacaccctggcangccagtcacagcccccaccaccgccacctccaaaatggcctgggatgatctcaagtgagcagttgagcttggaactgcaccaggtggaaagggaaatcgggaagagaacacgggaactgagtatggaaaaccagtgttctctggacatgaaaagcaaactgaatacaagtaaacaagcagaaaatggacaaccagaaccacaaaacaaggttccggctgaggaccttacattgacattcagggcatgggatctcagtttcccaaatgtgctgggttccagngtgagaggcagggaataccctgggctgataacttcccgggctttagatcagtctcatcttcctcatgtggctttataaaccgaccctgggg

SEQ ID NO: 167092 - DNA, 1347 bp, Homo Sapiens
agacatcaatctgaagtgtaggtcacttcctcaatgcttgcctcatcttctatatgcctgtgtctgaaaagatatgaagcttttgcgccagagcttggccactctcctaattacctcccagatcctcaaccaaattatggaatcttttcttccttattggctccaaaggaagcatggtgtgcgggtgaagaggaaggtgcaggctttaaaggcagacattgatgctacattatatgaacaagtcatcctggaaaaagaaatgggaacttatttgggcacctttgatgattacttggagttattcctgcagtttggttatgtgagccttttctcctgtgtttacccattagcagctgcctttgctgtgttaaataacttcactgaagtaaattcagatgccttaaaaatgtgcagggtcttcaaacgtccattctcagaaccttcagccaatattggtgtgtggcagttggcttttgaaacgatgagtgttatatctgtggtcactaactgcgcgctgattggaatgtcaccacaagtgaatgcagtctctccagaatcaaaagcagacctcattttgattgtagtagcagtggagcacgcactcctggctttaaagtttatacttgcatttgccatacctgataagccacggcatatccagatgaaactagccagactggaatttgagtctttggaggcactcaagcagcagcaaatgaagctcgtgaccgagaacctgaaggaggaaccaatggaaagcgggaaggagaaggcaacctgagtgcccagcgtgcccagctgccctgttggcagaggcctgtgtctgtgccacacctgccacggtggcagggggggtacccggggcagcatcgtggctcctgaacccagacccaatgcttagccaaacgaagtggctcccatgtggcaagcacccttctcagtttcgcagtggcttggctcgggatccttggcagttcccccagccccaccctgtctgctccttcccagttccttcccgggccccacacgctgctccagctgccaactttgctgcagagccactgccgcccttgagcctctcaccatgagtgagccaccagctctccacgttcccctcatagcagtgtcactcccaaccccaccatggcccagggacccgtggacaggttggggatggggtgtgtgcccactgtgctcatcacaggagcctcagttgagagtgagcggggtacagtaaggcagtgcttcccacactggacctctttcctggttctcttttgcaatacattaacagaccctttatcaacataaacaatagtaactgagctattaaaggcaacctctctg

SEQ ID NO: 167093 - DNA, 691 bp, Homo Sapiens
acgcaattcttcagctggcacagaccctgctgtatcttccttctctcctgtgatgacagcatttccacctcactcacaacgccttcggggggtttggacagcaccttctcatcaggactgaggtcagctccctgtgtagggtcctctccggaaacacacgtttctttgagcttcaccagctccttggcaggttcggcttcctgaggttctgcatccatttcaaccaattcttcagctggcacagaccctgcccccttccagtgtcatcctttcctccttccctggttctttcctctctccactcccatctcactcccactgcccttatcaggtctcccggaatgttctggagcagatcacgagctttgcccttggcatgtcataccacttgcctctggtgcagcatgtgcagttcatcttcgacctcatggaatattcactcagcatcagtggcctcatcgactttgccattcagctgctgaatgaactgagtgtagttgaggctgagctgcttctcaaatcctcggatctggtgggcagctacactactagcctgtgcctgtgcatcgtggctgtcctgcggcactatcatgcctgcctcatcctcaaccaggaccagatggcacaggtctttgaggggctgtgtggcgtcgtgaagcatgcgatgaaccggtccgatgctcctctgcgg

SEQ ID NO: 167094 - DNA, 595 bp, Homo Sapiens
agaggatccccgtcccaggtaggggatgcagataaggctgggggtcgctgggttttccctaaggatgcagtgggatcccagaccttgcgggctttgagtcccagtccagatctcaggttctgtcctgatggggccctgactcatatggactggcaaagcttccgggatttggaatctcaggatctgcccagcccttgtgcctggacacagcacataagtgcgtccactggtctctctcttccactgccttctgtcagtagaagccaccaatcgagaaacagggagttttgatgttacactggtctgctctggagttttatatttattagactgaattgcactttttatcttcttaagaaggactaaaaaagctgcgaggcctggcaggggatcagggaggatgagtgtcctgagcagagaggtagggttaccaggtatttctgtttgccttgaactggtcacatagccccagtgcccctcagcagagagacagggtgaatgaaggagctggtgtagtcagtcctagaggagacacacagatgcctctgagaaagcgtttgcagatgacacacgcccaggctcagtgaggacccat

SEQ ID NO: 167095 - DNA, 696 bp, Homo Sapiens
gggaccgaatggtcctgtcacttctaccccaaccacactctcaggagaggatgagggaacaaaactgtcaggagtatctcgatcaccacagtgatcctgtatccttaattcttcctgattgttatgaggtggtgttgggagggaggctggcacatcaactgtcttagggccctgagcaagagctcgggccaacaagtcgtcctggggtctgaagggcagctgaaatggtttaggtcctagagttttggtaacttcatggctcactaacactccggcttttccagcaagttcttcagttgttgcaaaaccattggccatcttctgacaagccataggaggtggtgtaggaggaagagaggcagggggtgttggaggattacttaaattattctgcttgtagatcaactgagaatagtcgtccgaaaccccttccagggtagcactgccaaaagttcccagaagtcgattcccactattaaattggccactgccataaggaagaaagtgcgcaaagttcactccaatgattggttccattagagggagcagagagagctgctgtttcaagtgggtaaacgtgtcagtgctagagtacatagcttgtttctcctcttcgtcctttttccttttctttgagcgaggtgctgctttctcacccgtcctgagtccgttgcttcgctgtttctggttccttct

SEQ ID NO: 167096 - DNA, 413 bp, Homo Sapiens
tcagctcaggaaagcccccaacagagatcagtggagcatgaccccgcccatggtgaacgcctactactcgcccaccaagaatgagattgtgtttccggccgggatcctgcaggcaccattctacacacgctcctcacccaaggccttaaactttggtggcataggtgtcgtcgtgggccatgagctgactcatgcttttgatgatcaaggacgggagtatgacaaggacgggaacctccggccatggtggaagaactcatccgtggaggccttcaagcgtcagaccgagtgcatggtagagcagtacagcaactacagcgtgaacggggagccggtgaacgggcggcacaccctgggggagaacatcgccgacaacgggggtctcaaggcggcctatcgggcttaccagaact

SEQ ID NO: 167097 - DNA, 1495 bp, Homo Sapiens
ctgctgaactcaatgtgacgggctatagccgggtgaactacgacgaagagaactggaggaagattcagactcagctgcagagagaccactcggccatccctgtcatcaatcgggcacagatcattaatgacgccttcaacctggccagtgcccataaggtccctgtcactctggcgctgaacaacaccctcttcctgattgaagagagacagtacatgccctgggaggccgccctgagcagcctgagctacttcaagctcatgtttgaccgctccgaggtctatggccccatgaagaactacctgaagaagcaggtcacacccctcttcattcacttcagaaataataccaacaactggagggagatcccagaaaacctgatggaccagtacagcgaggttaatgccatcagcaccgcctgctccaacggagttccagagtgtgaggagatggtctctggccttttcaagcagtggatggagaaccccaataataacccgatccaccccaacctgcggtccaccgtctactgcaacgctatcgcccagggcggggaggaggagtgggacttcgcctgggagcagttccgaaatgccacactggtcaatgaggctgacaagctccgggcagacctggcctgcagcaaagagttgtggatcctgaacaggtacctgagctacaccctgaacccggacttaatccggaagcaggacgccacctctaccatcatcagcattaccaacaacgtcattgggcaaggtctggtctgggactttgtccagagcaactggaagaagctttttaacgattatggtggtggctcgttctccttctccaacctcatccaggcagtgacacgacgattctccaccgagtatgagctgcagcagctggagcagttcaagaaggacaacgaggaaacaggcttcggctcaggcacccgggccctggagcaagccctggagaagacgaaagccaacatcaagtgggtgaaggagaacaaggaggtggtgctccagtggttcacagaaaacagcaaatagtccccagcccttgaagtcacccggccccgatgcaaggtgcccacatgtgtccatcccagcggctggtgcagggcctccattcctggagcccgaggcaccagtgtcctcccctcaaggacaaagtctccagcccacgttctctctgcctgtgagccagtctagttcctgatgacccaggctgcctgagcacctcccagcccctgcccctcatgccaaccccgccctaggcctggcatggcacctgtcgcccagtgccctggggctgatctcagggaagcccagctccagggccagatgagcagaagctctcgatggacaatgaacggccttgctgggggccgccctgtaccctctttcacctttccctaaagaccctaaatctgaggaatcaacagggcagcagatctgtatatttttttctaagagaaaatgtaaataaaggatttctagat

SEQ ID NO: 167098 - DNA, 867 bp, Homo Sapiens
caccggaaagtattgcaaggaaatgatgctgcaagaaaagcagacaaatatggacttcccaacatagggacgtgaagcaggtgtattaaaaataaggatgcatataaaactaagacacaaaatgaatccctgagctgagtttgcatccgaaaacatcacgttcacacttcatttgggtgaaaatgaacaaggacacttctcatgggcaaccacggggctttggcttcacacagatgtgatcaataacgacagtagcgggctccaagagtacattaatctcagaaaaaatagtggtatagtctccacagggatttgcttctcagataagtagaactatggcctgccatgaaattgagagctcatgaatatagatggttgagtgtatcagtcttcaaagcatttaaaacatacttttgtttttgttttatcagtgcaatttgtttttgaagacgccggaaaactatttcatttaacctgagcaattaaaacgtgtcaaatcacagctgtcacagttaggtttgataaaattaattgttagcatccttattactggcacagctgtgatatttctggatttgactatgcacctgctgcaggaaaacatgataaaatgtcatttagatctctaactacaagaccgttagactagagagctctttaaggcaaggacatgaaaactgcgtacttttatacctcgcttaagtcagtgacagatttaccaatgacaacacaattttaaaattccaacacatatattactttgtcctatgaagggcaaaaagtcaatatattttaaattttacacacagaatggatataatgacctttttacacatcagtgatatttacaaagactctaatgagacc

SEQ ID NO: 167099 - DNA, 845 bp, Homo Sapiens
gggatgccgtatctctgaaggatactctagttatgctggttgttgacatgtcaaagccttggactgctttggattctttacagaaatgggcaagtgttgttagagaacatgttgacaaactgaaaatccctcctgaagaaatgaaacaaatggaacaaaagttgattagagacttccaagaatatgtagagccaggagaagacttcccggcttctccccagagaagaaatactgcgtcacaagaagacaaagatgacagtgtagttttacctctgggtgcggatacacttacacataacttgggcattccagtactagtagtttgcacaaagtgtgatgccattagtgtattggagaaagaacatgactacagagatgaacattttgattttattcagtcacatatccggaagttttgtttacagtatggtgcagcacttatttacacttcagtaaaagaaaacaaaaatatagacttagtatataaatacatcgttcagaaactatatggatttcccctataagattcctgctgttgttgtggaaaaggatgcagtatttattcaagcagggtgggataatgataagaaaataggaatattacatgaaaattttcaaacattaaaagcagaaggataattttgaagacatcataactaaaaccacctgttcgaaaattttgtacatggagaaggaaattatgggcagagaatgatccggtgtttctttttgaagcttaccgtccctttttagcaaagcaaccacccaactgcaacttggaaggcctgggggatgcctcacccaaaaatccccaggaggcctcccccccaaaccccaaattgatt

SEQ ID NO: 167100 - DNA, 1238 bp, Homo Sapiens
  misc_feature (235)..(244): n is a, c, g, or t
tcgagctcggtacctgctgtaggcagcgtttgttaaaaggccatcttcagactgttcttgccaagacttgattcccatttttagtaggtctcagaacacaacttaaagatatatcacctttcgtggtgtcagctgtgaaaggggccccacacagaccatacgcacaagaaaataggctaaggaggaagaacacaaagtaacaccccaccccacccccaaatatgttattaactgnnnnnnnnnntgctactttctaccaagtagtggctagagcgctctgatttttaaaaactgcaccccacacacagggtttcgccatctcagcaggctgtacaagacatgtttcagtatggctcttttctgttcttattccttttgttttgtatgaagactgcaatacaggccttgcttcctttacattcaataccagtaagattctacagaaaagctggaagggaccaaaatactgattgtaataaatatttgtgggcctccttgtactgactgggcagccgatgaagggggtggggaaaggtctctgagaggcaccaccgattgcttctaggtctacacaagagacaggtactgccattagctgtgcgtggagacatcggaggaggagctgctgttgctgttggtggtctgggccctctttatgtataagtttagtagcttcatcttgctccctgtgagctgtgcaaggtgaggtttcaggtcttctccgattacggaataaattgccactaagcaaaacacgctggccttacgcacactactttcggtgttgtcataaccctgcagcaagcctgggatgatgtcgacaaggagctgcagcaatgactcctttgcgatcctctcgacgactttggtctgcatcttgatggcagcaaggttgatggggtagtcggccgtctggatgatggggcagagcaccttgatgcactgctccgggtggatggaactggccagtgtggacgcagcctcctcagccgctctcaccacctccttatgggagtctttgtgggcttccagagtcttcataatcgtcagctcggcgtagtttttaaatcttgctggttgatttctcagaatttccctcaaaactcttaacgccagtgctcgaattgaatggtctttgtctccaagggtctccagcagcagcagcagaatggtcttgaagtgctcctcccagacaccaaggctgtcttcccgcgtgatcttgagcagcaccaccagga

SEQ ID NO: 167101 - DNA, 936 bp, Homo Sapiens
catgcctaccagatcaaagtacgcctgagagcaggaaaaaagcctggtgctatgcccattttgatggaccatggattgcccggcaaatggaactccatcctgacaagccacccatcctacttgtggctggtaaggacgacatggagatgtgtgagctgaatcttgaggagactggcctgactcggaagcgtggtgctgagatcttgccaagacagtttgaagaaatctgggaacgctgtggaggcatccagtaccttcagaatgcgattgagagcagacaggctcggcccacctatgcaacagccatgctgcagagtctgttaaagtagatgttgcacaccagccttacagctgggagcctttgccatggtacttaggtagggtgtgtgcccccagatttaaccattccataatcatgttagagttacttctataaagtgaacagattttattaatcacggcttttggtgaatttgtttaaggttaattatggtagcaaattttggacctaaacattatttttctgtatcccgctgtaattcccaaaactctcattattctctaactattacacatgggcatattctgatgtttctcatcctttgccagaagactaccttacatccatcgtaattgttctctaggaaaagagaacttttttcaaaattcaaaatacttcttaaggatggcacagtaccatataactggagtaataaaacatgagcttacattcttacaataactaaaccacttaaaatgatcaaggcactaatgttttggtctgaaaagctgtgtactttatagacattttcagacatttttggaaatttccattaaaggtggaaaatctatttttttcctcctttgcagtgtcttagtttgaatgaaacacttcgaagttctagaattctagaaagagccttaatgttagagata

SEQ ID NO: 167102 - DNA, 649 bp, Homo Sapiens
  misc_feature (615)..(615): n is a, c, g, or t
  misc_feature (623)..(623): n is a, c, g, or t
aacccgacatagggatcacccagacagcctctcagacagcgacagtcgcaaatacaggctcaagacacagactcaagtattatcgcaggtcagtattttctgaagacgcatatggcagacggattagcgtataccaaggagagtggcataggagggaaaagcatatgtggctgaaacctgtaagttggtgttggttatgcagaaatgtgtaacagatcaaacggtcctctcaagtgtctattagataggcaataagaactgcagtgtagctgagtaacatcttttagctgactataaatcactttgtttttaaacaagaaaagctgtgctcttttatgtgatgccttttttatttattcaggctatacctacaatatgtgaatcaaactgtttaatgaatcctgggacatactgatgactataaactggcctctctgagtcatagaaaaatggccttatttctccagaagtgagtaaaccacacttccaggctatctgaactcctgaagccctaaaaataaaaagcacagttgtaactacctgaaatatgaagatccagtttcatacaaacattttgtatgacgtgaatagttgatggcatttttttgtcatganaaaaatantgtaaatcacaggacttttgccaaag

SEQ ID NO: 167103 - DNA, 540 bp, Homo Sapiens
  misc_feature (373)..(404): n is a, c, g, or t
gggggcgtggctggtgtaggcgggtggagaaggatcggggccctcgccgctctgtctcattccctcgcgctctctcgggcaacatggcgggtgtggaggaggtagcggcctccgggagccacctgaatggcgacctggatccagacgacagggaagaaggagctgcctctacggctgaggaagcagccaagaaaaaaagacgaaagaagaagaagagcaaagggccttctgcagcaggggaacaggaacctgataaagaatcaggagcctcagtggatgaagtagcaagacagttggaaagatcagcattggaagataaagaaagagatgaagatgatgaagatggagatggcgatggagatggagcaactgnnnnnnnnnnnnnnnnnnnnnnnnnnnnnnnnggaccaaaagttcaaacagaccctccctcagttccaatatgtgacctgtatcctaatggtgtatttcccaaaggacaagaatgcgaatacccacccacacaagatgggcgaacagctgcttggagaactacaagtg

SEQ ID NO: 167104 - DNA, 672 bp, Homo Sapiens
  misc_feature (70)..(189): n is a, c, g, or t
gagcttttattctgtgtctgacagtgctaaagggctttacgtggattaacttgttgagtcatcccatccnnnnnnnnnnnnnnnnnnnnnnnnnnnnnnnnnnnnnnnnnnnnnnnnnnnnnnnnnnnnnnnnnnnnnnnnnnnnnnnnnnnnnnnnnnnnnnnnnnnnnnnnnnnnnnnnnnnnnnnnttgggtcgtctgacctctgacctggggctctcaaccacttaatgctacactgggaccctgacttaaggactcagggtctaggctccttatctcaaaattggccccgtgttgccacacaacggccaatcgcatatgtccttgccttgcttaccacctaatcgggcaggcctagcagacagggacactgcctttcttatcctcttcgtgccatgcatggaagggcggggctccattagaacttggaagcttcctctctaatttatggtttgtccctctccaacatatgggagagatagataagtctctttaattagttcactaagagtaataagccatagacccatcaaggaaaattcaataaatgttcactgggcatcttttatgcaccaggctctgtctacattcagagcgagagaacagtcacagctgacatctatggaccacttacgactggcctggctctgggctaacccgcaccgtata

SEQ ID NO: 167105 - DNA, 449 bp, Homo Sapiens
atgcgtatttataagctttgcttccccaacaagattataagctctttgattgaagtacatcatatatttgatatgtattctcttgtccaagtgtatctgtaggcaataaggggaactttgtaaaacaagagttttccggtcaagtaaatttgagaagcgctgcctaatctcttccccctcagagatctgcaatgcatattgacctattaaaggctctgagaattcttcctgcgaagaaacctattttagccttgtccaccttgcatttcccaaacacgtttgacctcagaactccctttttcactaagaatgttttgcccatcttatgttttacccatgtgctctatagcagttaacactgggcttattaaaggtactcattatgtgattgtaaattaactggtgaagcattccctcattcttgtgtattttatacatttatttatatg

SEQ ID NO: 167106 - DNA, 707 bp, Homo Sapiens
ccggaggcatagtacaaagggctaagctgtggaaagcaccacaggcaacttgaagcagcactcgcccagacaagatgtactacctttagcggcttagtcactgggaaggcagtggtaatgagacccaactgacaaccggtaccccatgcccaaatctctctgcttattgacaatgccagagtgtgctcctcgccacacgccaactgtaaaatcctgactgctaacaaagggctggcctcagaatcagcaatgctgacaggatttggttccggcacatactgctggttggctactgcacactggccagcagaattctctccccacatgtacgcgacaccattgtctgtcactgctccactatggaagcttcctgttgccacagtaataacatattgcccaaccagggcattttctagaatggggctacttggacaaatctccactggtccacttctccagggaagagtcccaaagctgtagacctcaccatcttcagtcagaagaactccatgtttcactccgagggctgcctgcaaaacagtctttcctccccagcctggcaatctctctggtgttatgggaaaggatcctgcctgccagatatggaccagggctctttccttggatccttctggctctgttgagcttctcttctttgagtccctcggccaggggaaccttcatcccgaatattctttttaagaaat

SEQ ID NO: 167107 - DNA, 894 bp, Homo Sapiens
  misc_feature (620)..(620): n is a, c, g, or t
tattggctcataaaattggactctgtaaaaccacgaaaagttttggacatagtgagaacaagtattcgtacagttcttccacgcatctggaaggtgcctgatgttgaagaagtaaatttatatgcggattttcaaccgggttgttaatcgcttactctggagtcgtggccaagggctgtggaactgtttctgtgattcaggatcctcttgggagagtatattcaataaaagcccggaggtggtgactcctttgcagctccagtgttgccagcgcctagtggagctttgtaaacagtgcctgctagtggtttacaaatatgcaactgacaaaagaggatcactttcaggcattggtcctgactggggtaattccaggtatttactaccagggagcacccaattcttcttgagaacaccaacctacaacttgaagtacaattcacctggaatgactcgctccaatgttttgtttacatccagatatggccatctgtgaaacagaagggaagatcgccattggttatacataacagcaattcatttttttcctctgaagttgaacatgcaaagaacatgaccattaagtgctgttttatgtatataagacatatatatgtgtngaaatatatgcacatatgcaccctaataacatatatttattatattaaatgatatatgaaagaagaattagcagaaaatggaatataagacttaaccttttctggaaacggaataaaccatgttaaaaattgtttacacaaattatgtgaaatgtctaaaaatctgcctagggttaataattaaattcccttcctaactagaaaagggtaatttttgcctgccggagtatattaaaacccaatttggttcttggaagaattccaatttaccgga

SEQ ID NO: 167108 - DNA, 607 bp, Homo Sapiens
gggtcgtctgactcataactttgctgcagaaatacaaacttacatcttccttttactaccttaagaatactagtgaataaaacattaattcaaagagcaaattatagaaactacaatgacatttaatgcaaatggtaggaatttacatgtttacaaatcatcttcaactggttgtgcagcaattcaataaaatatctttgtattataaaaatgtgaagaaaaaatgtaaactgatgtaaaggaagtactgtcattttaattaacctatgtttaatagcttttccttctggactttgcaaagccttcttggcaaacacattgcaaagcattctctgggaggttcagcctccttgtgtgtactgtactgtgcagacatgaaaaaataaacccgtttactgtgtgcgtgtaaatagcctggtcatcaggccattttcagccaatagtcacatccagtgcaattttgcaccgaacacttaagggtgtggttggtaagaacgatctgtaaaataactgggatgaattcccatgtatacctgtgtaaatagatttgttaactgaaatatactttaagaaagataaaatctgtaaataaactgatttataaatt

SEQ ID NO: 167109 - DNA, 680 bp, Homo Sapiens
ctggtgtgttctggagggcccagcagccccaatcgctgaaagcccagaaggaggacgatgtggcttgctcgcggaggttatcctggggctcatcccgccgcagaaataactcctcctcctccttctccccacatttcttgggccctggtgtgggcggggccgcctccaaaggctgcctgattcggaacactcgggggttcctgtcttcagggggatcccctctgcgtcctgccaacgcctctttggaagaaatggcttctctagaggaggaagcctgcagccttaaggttgattccaaagatagttctcataactccacaaactctgaatttgcagctgaagctgagggtcagaatgatacaatggaggaacccaacaaggtccagaaaaggaagagaaacccagtgaggagcccctgggggagcgaaggactgtcattgacaaatgctctccacccctagagttcttggatgactctgactctcattgagaaatccaaaagcataaagatagggaggtggtgatggagcacccctcttctggaagtgactggtctgatgttgaggagatctccacagtcagattctctcaggaggaacctgtctccctgaaaccttcagccgttccggagccttcttccttcaccaccgactatgtcatgtaccctccccgggatacag

SEQ ID NO: 167110 - DNA, 496 bp, Homo Sapiens
  misc_feature (332)..(332): n is a, c, g, or t
acattaagactatatgaagaagatgacacagcgcaccatcctgggaagtgcatgtctcagaccaactccaccttcaccttcaccacctgtcgcatcctgcatccattcagatgagctcactcgggtcacaccaagccttaactcagccccaactccagcttgtggcagcaccagccacttgaaatccacgccggtggccagaccatgcactccacggagactgagcctggctgagtccttcactaacacccgtgagtccacgaccaccatgagcacatccctggggctcgtgtggctgttgaaggagcggggcatttctgctgccgtgtacngacccccagagctgggacagggccggccggggctccctcctgcactcctacacgcccaagatggctgtgatcccctctactccgccgaactcgcctatgcagacacccacatcctccccaccctcctttgagttcaagtgcacgagccctccctacgacaattt

SEQ ID NO: 167111 - DNA, 621 bp, Homo Sapiens
  misc_feature (32)..(32): n is a, c, g, or t
  misc_feature (42)..(42): n is a, c, g, or t
  misc_feature (81)..(81): n is a, c, g, or t
  misc_feature (110)..(110): n is a, c, g, or t
gccaaactgcttgtgataggcattcccaacanaagctttacnggaagcaagccaagaggaggagggctgctgactgtcccnattagttttgggatttgaaactttatcanccaaggtggtagggccatttgcagcaagagaacttcaaatccaacatttctgcgctttgctttctttatggctctattcttcaagacttcctcactggccatggagaatgttcccacctcttcagcttcatcttcttgatcccaattcctatctgtcagttccttcacggaatttcttttggccatgttttcgaacctcctcggcggccgccgctgcactcgctgggtcttggttgcggcgaaacccggggcgcagcggcgcaggggtctggagcccgcaggggtcgccgggctgagcgcgctcggccgcttccggtgctgcgctgcggaactcagaggacttagtgctcggcaagcccagagactcaaacaccatatccctgggggggctcctcacgctgtgttcggcagggaggcgagagcgccggttcagccagagacagctgggggaaccgcgccgaacacgctccgggcggccattttgtaactcgaatctacccccaaaaacccc

SEQ ID NO: 167112 - DNA, 409 bp, Homo Sapiens
ccgctacggacgctgtacagggggtccgggaagggggctgggggcaggcagcaggtcagtgcacctgaggctcggaccgccaggtgtactggatacagtccctcaaagtcaggcatatgcaacagctggggcacagcaggagctccactctgaagcagtgcacgcagcagctcaggagcaccagcgcctgcccgcagcgccagatgcatggctgagtctccatgccgatccagcagagctgggtctgcacctacccgcagcagaaagctcaccacactcgtctgccccgtgatcaccgccaggtgcaggggcgtctggtgcaggtggttggtgaggttgacaacgccgaggtcctgggcgtggtggatgacatagactatctgctcaatacactgtccgcccgtgagtg

SEQ ID NO: 167113 - DNA, 131 bp, Homo Sapiens
atccggcgctaggacgccagcacactacacagacacactgcaaaaatctacatagattgccattcagatgtgttactacatagtgtcccaagataacatttgaatctgtccccttctcacgatcggggcat

SEQ ID NO: 167114 - DNA, 319 bp, Homo Sapiens
actgaatcttgggagggaagtggtggcattcttgggtccagaaagaggaagtggcacacatgccctttgctgcccagtgaatgtagcagggcaagaattcagacccaggccagcatgactccaagccccaaacccaaatacattccactgagtcctcttctcagagaaattagagtgattatcatgtaaatctcaggaggaacaggggtcgtcataaccatttgttcactgggtgcgtgaatgagccagtgcatggtaaactagtggctggctgtccatgcattctgagggttgctcatctgagcgtgtcctgacttgc

SEQ ID NO: 167115 - DNA, 402 bp, Homo Sapiens
cggtcgctgagggatgctactagctgtgagcatgcatatgttaggccacttgtttaggccaagtgacacgacccacaaagtctgcaggaagggtggtactttacaagcagccttggagttcacttgtaaaggaagcctggtgtgcatcttttgtaaagcagagcaggtttttgtaaagtggctaactcatctcttttgcagactttgacgtctacgtgaaagcttttcttagaatacagcccactactcagagaaactagattgaccaagtgcactgtgaaaacaaaacccacacttggttcttcattcacctcattctactgcatgttggaatgaactctggaatcaggtagaatacttccgcttgtgggactgtggagggagactgggcgtccgtagcgg

SEQ ID NO: 167116 - DNA, 906 bp, Homo Sapiens
ggggtcctaggagacttggttttgacttatatacatgaaaagtttatggcaagaagtgcaaattttagcatatggggcctgacttctctaccacataattctacttgctgaagcatgatcaaagcttgttttatttcaccactgtaggaaaatgattgactatgcccatccctgggggtaattttggcatgtatacctgtaactagtaattaacatcttttttgtttaggcatgttcaattaatgctgtagctatcatagctttgctcttacctgaagccttgtccccaccacacaggacagccttcctcctgaagagaatgtctttgtgtgtccgaagttgagatggcctgccctactgccaaagaggtgacaggaaggctgggagcagctttgttaaattgtgttcagttctgttacacagtgcattgccctttgttgggggtatgcatgtatgaacacacatgcttgtcggaacgctttctcggcgtttgtcccttggctctcatctcccccattcctgtgcctactttgcctgagttcttctacccccgcagttgccagccacattgggagtctgtttgttccagtgggttgagctgtctttgtcgtggagatctggaactttgcacatgtcactactggggaggtgttcctgctctagcttccacgatgaggcgccctctttacctatcctctcaatcactactcttcttgaagcactattatttattcttccgctgtctgcctgcagcagtactactgtcaacatagtgtaaatggttctcaaaagcttaccagtgtggacttggtgttagccacgctgtttactcatacagtacgtgtcctgtttttaaaatatacaattattcttaaaaataaattaaaatctgtatacttacatttc

SEQ ID NO: 167117 - DNA, 2978 bp, Homo Sapiens
  misc_feature (2680)..(2680): n is a, c, g, or t
ggggacatcgccggtgtttgcgggtggttgttgctctcggggccgtgtggagtaggtctggacctggactcacggctgcttggagcgtccgccatgaggagaagtgaggtgctggcggaggagtccatagtatgtctgcagaaagccctaaatcaccttcgggaaatatgggagctaattgggattccagaggaccagcggttacaaagaactgaggtggtaaagaagcatatcaaggaactcctggatatgatgattgctgaagaggaaagcctgaaggaaagactcatcaaaagcatatccgtctgtcagaaagagctgaacactctgtgcagcgagttacatgttgagccatttcaggaagaaggagagacgaccatcttgcaactagaaaaagatttgcgcacccaagtggaattgatgcgaaaacagaaaaaggagagaaaacaggaactgaagctacttcaagagcaagatcaagaactgtgcgaaattctttgtatgccccactatgatattgacagtgcctcagtgcccagcttagaagagctgaaccagttcaggcaacatgtgacaactttgagggaaacaaaggcttctaggcgtgaggagtttgtcagtataaagagacagatcatactgtgtatggaagaattagaccacaccccagacacaagctttgaaagagatgtggtgtgtgaagacgaagatgccttttgtttgtctttggagaatattgcaacactacaaaagttgctacggcagctggaaatgcagaaatcacaaaatgaagcagtgtgtgaggggctgcgtactcaaatccgagagctctgggacaggttgcaaatacctgaagaagaaagagaagctgtggccaccattatgtctgggtcaaaggccaaggtccggaaagcgctgcaattagaagtggatcggttggaagaactgaaaatgcaaaacatgaagaaagtgattgaggcaattcgagtggagctggttcagtactgggacaagtgcttttatagccaggagcagagacaagcttttgcccctttctgtgctgaggactacacagaaagtctgctccagctccacgatgctgagattgtgcggttaaaaaactactatgaagttcacaaggaactctttgaaggtgtccagaagtgggaagaaacctggaggcttttcttagagtttgagagaaaagcttcagatccaaatcgatttacaaaccgaggaggaaatcttctaaaagaagaaaaacaacgagccaagctccagaaaatgctgcccaagctggaagaagagttgaaggcacgaattgaattgtgggaacaggaacattcaaaggcatttatggtgaatgggcagaaattcatggagtatgtggcagaacaatgggagatgcatcgattggagaaagagagagccaagcaggaaagacaactgaagaacaaaaaacagacagagacagagatgctgtatggcagcgctcctcgaacacctagcaagcggcgaggactggctcccaatacaccgggcaaagcacgtaagctgaacactaccaccatgtccaatgctacggccaatagtagcattcggcctatctttggagggacagtctaccactcccccgtgtctcgacttcctccttctggcagcaagccagtcgctgcttccacctgttcagggaagaaaacaccccgtactggcaggcatggagccaacaaggagaacctggagctcaacggcagcatcctgagtggtgggtaccctggctcggcccccctccagcgcaacttcagcattaattctgttgccagcacctattctgagtttgcgaaggatccgtccctctctgacagttccactgttgggcttcagcgagaactttcaaaggcttccaaatctgatgctacttctggaatcctcaattcaaccaacatccagtcctgagaagccctgatcagtcaaccagctgtggcttcctgtgcctagactggacctaattatatgggggtgactttagtttttcttcagcttaggcgtgcttgaaaccttggccaggttccatgaccatgggcctaacttaaagatgtgaatgagtgttacagttgaaagcccatcataggtttagtggtcctaggagacttggttttgacttatatacatgaaaagtttatggcaagaagtgcaaattttagcatatggggcctgacttctctaccacataattctacttgctgaagcatgatcaaagcttgttttatttcaccactgtaggaaaatgattgactatgcccatccctgggggtaattttggcatgtatacctgtaactagtaattaacatcttttttgtttaggcatgttcaattaatgctgtagctatcatagctttgctcttacctgaagccttgtccccaccacacaggacagccttcctcctgaagagaatgtctttgtgtgtccgaaagtgagatggcctgccctactgccaaagaagggacaggaaggctgggagcagctttggtaaattgggttcagttctggtacacagtgcattgcccctttggtggggggatgcatggaagaacaccacatgctttgtcggaacgctttcctcggcggttggcccttggctctcatctccccccattctgtgcctactttgcctgaantcttctaccccccgcaggtggcagccacaatggggagtctggttgtttccatgggttgagctgtctttggtctgggagatctggaactttgcacctgtcactactgggggagggggtcctgctctaacttccacgaatgagggcccccctttacctaaccctcccaacacctactcttcttggaacacctattatttaatccttcccctgtgttggcctggcaacagaactactgggcaacattaaggggaaaggggtttcccaaagcttacccgggggggaccttgggggttaaccc

SEQ ID NO: 167118 - DNA, 941 bp, Homo Sapiens
aagcaggctggtaccggtccggattcccgggatatcgtcgacccacgcgtccggtgaagacgaagatgcctttggttgtctttggagaatattgcaacactacaaaagttgctacggcagctggaaatgcagaaatcacaaaatgaagcagtgtgtgaggggctgcgtactcaaatccgagagctctgggacaggttgcaaatacctgaagaagaaagagaagctgtggccaccattatgtctgggtcaaaggccaaggtccggaaagcgctgcaattagaagtggatcggttggaagaactgaaaatgcaaaacatgaagaaagtgattgaggcaattcgagtggagctggttcagtactgggaccagtgcttttatagccaggagcagagacaagcttttgcccctttctgtgctgaggactacacagaaagtctgctccagctccacgatgctgagattgtgcggttaaaaaactactatgaagttcacaaggaactctttgaaggtgtccagaagtgggaagaaacctggaggcttttcttagagtttgagagaaaagcttcagatccaaatcgatttacaaaccgaggaggaaatcttctaaaagaagaaaaacaacgagcacaagctccagaaaatgctgccaagctgggaagaagagttgaaggcacgaagtggattgtgggaacagggaacatttcacagggcattctatgggtgaatgggcagaactccatggaggtatgtgggcggaagcaatggggagcatgcctcgattggggaaagagagagccagcagggaaagacgattgcagacgagaacggccgacgacagatgctgttggaagcgctcaaaacttagaggcgggaggacgggtccataacgggacaacgtacctgaacccccgtccagcgtggcgatgatggcatatgggagc

SEQ ID NO: 167119 - DNA, 173 bp, Homo Sapiens
cagcccgttactgcgactaacattataataaacttcaaaccacaaaaacattgtgactaatcattaaaaaagcagccatatgcacaacaccagcccttgtcaaatgatgtcccatcttaaccatgtgcaatttgtcctttataagctttgagtatcttacagcttgccttttt

SEQ ID NO: 167120 - DNA, 302 bp, Homo Sapiens
aacattaaaccaaacttcaaaccacaaaaacattgtgactaacattaaaaaggcaagctgtaagatactcaaagcttataaaggacaaattgcacatggttaagatgggacatcatttgacaagggctggtgttgtgcatatggctgcttttttttataagaaggccaccggcaaacagggcaacaatgtcggcccccagccaaccacatcacaatgcaattctgatgaaacacatgaccacaaggcaaccccattagcaaacatccattttcaaaattctctaggctaacaacacattcag

SEQ ID NO: 167121 - DNA, 740 bp, Homo Sapiens
agtgggtcagtgtcttcaggttgggtgccttctgaacaatgctagacatgtcatccagcctgtacagcctgttgttgctcaagttcaaggacaatagctcagggatgttctcttcaatgatcctcagggtagctgccatacagcttctgcgattcaggacaacgtcaatgttctgggccaccaaatctgggtctgaaacggaggcctttgaggtcaagggcttgttgggagccatcgtatcgtttgctcatgatcagctttagctgttctacttgttctggcttcacttcattcagtatagtgtggggtggagcagaagagttgatgatgatagatatccttcggttctcccgatccaaaatcttatagttgacagccttcaatgcagaggcagtactggcgtcttcaacgaagaactgggcccgtgtattctcatagtgaaactcaataggggtgaagggcacactgcacttgctctgaatcatgctcaggagccatgccttgtcatactttctgccataaggaattgtaatcttgaaccagttctttgaggtcccatcctggctggtgccagcccctcctctctctggaggagctctgtctctccgcacagtaacatgaatgcgatctcgatcatgccaagtatcaccccgacggttaggtcgggtggtataggggttgtatcgtacctcggggaccatcccagggcatcactcattgccacatactccatccatcct

SEQ ID NO: 167122 - DNA, 647 bp, Homo Sapiens
ccgtactgggtccactggcacaccatcctgagataccagggcagatccaagtagatgcagagggaggtcacagtcacagccaacaccagcatggtggcaacgatggtgacgatcagcagagttatgttgcaggataattcagacatgtgaaagtcctttagtagggttcctctataacttcccgggtagtcacacttataagaatcaggccagccctctaacacttcacttgatacttggtctatatttttgacaaattctcctagctcacaggtacattggaatggattgtcccctgcttttattgacctcatcttctggcagctctggaagaaatcagccgatgggtgggaaactgaattgtgatcaatgatcaatacagaaaggctgctaaagctgccacatccaggaaggtcagttaaagaattgaaagcaacatcgagttcttgcaaagcttccagttttacgacttgtttaggaatgcctgttattttcttttccttattcaaatctatttgtaaccactggtattcatcagtggcaaaagcagcccaaggcggtccaggttttttcagcctggcttttttgggtttccaactgttctcttggcctgtgtggtcagtccactccaactcatatcaaacatt

SEQ ID NO: 167123 - DNA, 694 bp, Homo Sapiens
cggacgcgtgggtctggagtctggtgtgatcgcggatcctcaaataacagcatcatctgtgctggagtggactgaccacacagggcaagagaacagttggaaacccaaaaaagccaggctgaaaaaacctggaccgccttgggctgcttttgccactgatgaataccagtggttacaaatagatttgaataaggaaaagaaaataacaggcattataaccactggatccaccatggtggagcacaattactatgtgtctgcctacagaatcctgtacagtgatgatgggcagaaatggactgtgtacagagagcctggtgtggagcaagataagatatttcaaggaaacaaagattatcaccaggaggtgcgtaataactttttgccaccaattattgcacgttttattagagtgaatcctacccaatggcagcagaaaattgccatgaaaatggagctgctcggatgtcagtttattcataaaggtcgtcctccaaaacttactcaacctccacctcctcggaacagcaatgacctcaaaaacactacagcccctccaaaaatagccaaaggtcgtgccccaaaatttacgcaaccactacaacctcgcagtagcaatgaatttcctgcacagacagaacaaacaactgccagtcctgatatcagaaatactaccgtaactccaaatgtaacc

SEQ ID NO: 167124 - DNA, 921 bp, Homo Sapiens
agcgcgtactgctagttatatcataaaccagaaacagtacagaactgatgttgagggaggtgtagtttttttactctagaaatgggtgcataatataactaggcagtggcggtgccttggtacaacctgaaaaatgttaaggcttattgaaacctttcaagtaggggatggtacatttatttcatctgcaaatgataataaatcctttgtcattataactgtccagaagtgtgggctatgtattatctgatcagtctatggtcccagtaaaagtaaagatgcaggaaacacagtctgtaaatgagcgacttttctttgttcagctttagttttagcaaacaccacaaatatgttttaagtaacatcgctcaagtttaagtaacatcgctcaagttgataatctcttgataagctctgttgttgacattttgcagtgatacaacagctccactcatagatttaaacttttatttttacttatcttggtcataagttggcattctctcacattccacatgatatagagggctacgttttggaattttccttttcttaattgcccagagttatcagacagattataaaaatggcttttaatggcttaaaccatttctaaacctctatcttagcagatcaatgcaggatctaattcttttgataagttctagctctaaaagtgatagtgggactgtatgttttctgatactggtggcttatgttattaaaccttttttaaaaaaggttcactctaaaagctgaactacatccttagttttcagtctacttgactctatcaggagcttttttaaggaaagtaagtatacacatgcaaaaggaagcttttttggggtaattcattgtggactcctgtccaattaaaaatagaagttttgttgaacaacaacaacaaaaacaggcggc

SEQ ID NO: 167125 - DNA, 366 bp, Homo Sapiens
cagacataatgacacaggtaatatctattatcatttgacaaataagaaaaccagggcacaaagaggttaagcagcttgctcatagttacacagatagcagatgactatttcaaaaagggaaatatatagcttccctcatgtaagatgagggaatgtgagcttctgaatgtgatgagcaaacgaaagaaaatgaaggaggcaaagtacaaagagagttgaatgaaaggactgaattgaaagaaatgctttctccttcacaattttctctaatcttatttggctgactgtggtgctcaaaaaaatgacaataaacaggtaagagaattataatcttacctgtttattgtcatttttggagcaccacag

SEQ ID NO: 167126 - DNA, 860 bp, Homo Sapiens
cgagacagtagaaacttctgttttcttgggagctgcatgtggtcggattcatctgtcatggccttcccacacaccatcttcatgatgcaagcttggaactggagagaaaggtacaattggagataaccttggcagatgaggaagtatgggaaaaaagaccttattctctgtatcaccaaagccttgcacaatgctttgtacccagaacgcccttaggtggttatgaatctatcttccccatcctgaaaactatctagattccagtctagaactactcctgggtctacggtaatcctaaactggtcaagtctgagacctcactgttggtaaattcacaaaccatcctgcttcataaaagcactgtcagcagaggcccctccattactagcaggtgctcccagctggaaaggactgccaattctcttctatccaggaggtttcaaattagttttgagtctacctctgggattgaggaaacaataccatctgaaagtagggtttttgccacttagggtttggtgtttattagctcggatttcagatgggataggaaatcccccagtaccttcagatgataagatattttagagatttttgcatgtggtatgatttctgtgcttcacacatgctcgtgcaggctaaaagttggaagggaaatgatttaaggaaaatttatttaaatgcaaaggactgaaaattgagaggaatctcggagttccattttgcactttatttaatttttatttaacgtcccggatacatgtgcacgatgtgccggtttgttaacataggtaaacgtgtgccaatggtgggttagcttgcacgaagtctttcataaaaatgctttcatcatcctggtt

SEQ ID NO: 167127 - DNA, 972 bp, Homo Sapiens
ggggcgggcgtcgtgcacgcggttgtagctgcccggcggcggcagaagcggcgctcgcgccaagggacgtgtttctgcgctcgcgtggtcatggaggcgctgccgctgctagccgcgacaactccggaccacggccgccaccgaaggctgcttctgctgccgctactgctgttcctgctgccggctggagctgtgcagggctgggagacagaggagaggccccggactcgcgaagaggagtgccacttctacgcgggtggacaagtgtacccgggagaggcatcccgggtatcggtcgccgaccactccctgcacctaagcaaagcgaagatttccaagccagcgccctactgggaaggaacagctgtgatcgatggagaatttaaggagctgaagttaactgattatcgtgggaaatacttggttttcttcttctacccacttgatttcacatttgtgtgtccaactgaaattatcgcttttggcgacagacttgaagaattcagatctataaatactgaagtggtagcatgctctgttgattcacagtttacccatttggcctggattaatacccctcgaagacaaggaggacttgggccaataaggattccacttctttcagatttgacccatcagatctcaaaggactatggtgtatacctagaggactcaggccacactcttagaggtctcttcattattgatgacaaaggaatcctaagacaaattactctgaatgatcttcctgtgggtagatcagtggatgagacactacgtttggttcaagcattccagtacactgacaaacacggagaagtctgccctgctggctggaaacctggtagtgaaacaataatcccagatccagctggaaagctgaagtatttcgataaactgaattgagaaatacttcttcaagttatgatgcttgaaagttctcaataaagttcacggtttcattaccaaaaa

SEQ ID NO: 167128 - DNA, 482 bp, Homo Sapiens
  misc_feature (134)..(134): n is a, c, g, or t
ctctagagcatcccctgcacacgccgaatatccacacacagaaagttttagggtaaatagtaaactacaaataccctcttggttaagttaattcatcaaggtaataaagggcatattatctatcttctgctggngacaacttgttgtctcagtatagtctgtctcaagaaagaactggctcaggttggattttggaaaaggaaaaagactttcattaacttcactccagagtggaagaggcaccaagttctctcctacacttaggagcagaatcttaaacttgcataaatcattttcagtgatcaacatctgcatcctcaaactgtccagcaactgttggggtggtatccacctccatcccatcttcataatctcttattgaatcttctgtcctgaccccagccatattatactggctgctcacagactgagaaagcattccttctaatctctccagtatgggtattcggcgtgtgcaggga

SEQ ID NO: 167129 - DNA, 948 bp, Homo Sapiens
  misc_feature (126)..(126): n is a, c, g, or t
  misc_feature (197)..(197): n is a, c, g, or t
gcctttcccccacatagatttgctagtttacaaatggatgcccccagtcaagggtgggatttatagccttactcagagggtacccagcccccgaaagtttttagggtaaatagtaaacttcaaatnccctctttgttaagttaaatccatcaagttaataaaggtccatataatctatcttctgctggtgacaactngttgtctcagtatagtctgtctcaagaagaaactgttcagggtgggttttggaaaaggaaaaagactttcattaacttcactccagagtggagagggcaccaagttctctcctacacttaggagcagaatcttaaacttgcataaatcattttcagtgatcaacatctgcatcctcaaactgtccagcaactgttggtgtggtatccacctccatcccatcatgtgcttccacatcatattcttctccatcgtagtcatctgaatcctcatcctcaggatctggatgcaaggcctggcattcgcacattgcagtgaacattgcctccaacgctgatttatcactaggcacaaatctaaattcagtaataggttcaacatcatcatcactgtcttcctcttcttcatcagcaacaggttcttttgattcttcttcaaatttggcattcaccataacatacaaatgctctcctagacagtcacttcggtccctggataatgcatgtaaactaatggtggggtattccagtgagaatcctaatccagagccatctaaccaagacaggcggctctcagcgatgtaaagggtaccagtgccgaggcccttcccgttcagcacagcctcagtgtctggctgctgccgcaggagcccctccgctggcccaggcggcgggaaacttttgaggaagctcatagcagcagagtgcggcaacacaggccctgagggagttggagcacagcaatgcgtgcacc

SEQ ID NO: 167130 - DNA, 1455 bp, Homo Sapiens
  misc_feature (63)..(86): n is a, c, g, or t
cccaaaacggaaatgtttttagaaagctttctcgagggccggaggccggcccgacatgttttnnnnnnnnnnnnnnnnnnnnnnnnttttgatatagaaaacctaggtttatttgttaagctattacaaaaacaaaacaattaccatttgaagtactttgaggacttcatcccagactcacttgttctgttacagaaactaacctaaaaggctggaaattaaaggatacaacctaagaggttataacagcagactggtaaaacatggcgaaaggagctctctctttcccccgcagtctaccaagctcctgtgcattttcaccacatagatctgctagcttacaaatgatgcacacagtcaaggtaggaattataggcctactcagagggtacccagacacagaaagttttagggtaaatagtaaactacaaataccctcttggttaagttaattcatcaagttaataaaggtcatattatctatcttctgctggtgacaacttgttgtctcagtatagtctgtctcaagaaagaactggttcaggttgggttttggaaaaggaaaaagactttcattaacttcactccagagtggaagaggcaccaagttctctcctacacttaggagcagaatcttaaacttgcataaatcattttcagtgatcaacatctgcatcctcaaactgtccagcaactgttggtgtggtatccacctccatcccatcttcataatctcttattgaatcttctgtcctgaccccagccatattatactggctgctcacagactgagaaagcattccttctaatctctccagtgtggcttggccttctgctgttagatgggataatccttcttcataggtgtaaaatgtagggatgtccccctgtccttgttcatgtgcttccacatcatattcttctccatcgtagtcatctgaatcctcatcctcaggatctggatgcaaggcctggcattcgcacattgcagtgaacattgcctccaacgctgatttatcactaggcacaaatctaaattcagtaatagggttcgaacatcatcatcactgtcttcctcttcttcatcagcaacaggttcttttgattcttcttcaaattcggcattcaccataacatacaaatgctctcctagacagtcacttcggtccttggataatgcatgtaaactaatggtggggtattccagtgagaatcctaatccagagccatctaaccaagacaggcggctctcagcgatgtaaagggtaccagtgccgaggcccttcccgttcagcacagcctcagtgtctggctgctgccgcaggagcccctccgctggcccaggcggcgggaaacttttgaggaagctcatagcagcagagtgcggcaacacaggccctgagggagttggagcacagcaatgcgtgcaccacaccgcccgccctggaagagccc

SEQ ID NO: 167131 - DNA, 958 bp, Homo Sapiens
  misc_feature (572)..(583): n is a, c, g, or t
ttcggacgagggctgatctcctttgcgcacaatgtagcagcacaagggaagtacattgctatagttagtacaactgtggaaaccaaggagcctgagaaggaaatcagaccagctttggagctcttggaaccaattgaacagaaatttgttagcatcagtgacctcctggtaccaaaagacttgggaacagaaagccagatctttatttcccgcacatatgatgccactactcattttgagacaacgtgtgatgacattaaaaacatctataagaggatgacaggatcagagtttgactttgaggaaatgaagcgcaagaagaatgacatctatggggaagactaacagcagtacatgttattatgtaattaggacacatttaaaatttggcaaataatgcatataatgaaatcaatattgtaaggcctgcttttgtaatgaaaatggagagaatgaagagcgctgtgccagtaaatactccccttcacctttctaattattaacttgttttcatggagtggctattcagcattggcagttaccacattctgttcaatttaaccaaactggcnnnnnnnnnnnnctagtgaagttaaacaaacattgggataccgacacagacaacttgagacagtttttttaatcttttaatcagtgtagctatgtgctgctgctgctcaagagctggatccatacaggttgtgtgccatctgtcctcttgaggttcaggagattctaaattgaatattccacggtttgggacagcatccgggaagttttccctatgactttatattttggattatggcaaatgttatggcaggggcccaaatagcatagcccacaagtttggttttatgtggggcataaaattctaaccaaacccccaaaacataggggagtcattttggagaaagccctgtatggggggggttttaacccaaataaaattgtattg

SEQ ID NO: 167132 - DNA, 1923 bp, Homo Sapiens
  misc_feature (1753)..(1764): n is a, c, g, or t
gggcccgcccagttcttctcttcccgtctgaggtggcggtcggtctcgccttgtcgccagctccattttcctctctttctcttcccctttccttcgcgcccaagagcgcctcccagcctcgtagggtggtcacggagcccctgcgccttttccttgctcgggtcctgcgtccgcgcctgccccgccatgaatgaggagtacgacgtgatcgtgctgggcaccggcctgacggaatgtatcctgtcaggtataatgtcagtgaatggcaagaaagttcttcatatggatcgaaacccttactacggaggagagagtgcatctataacaccattggaagatttatacaaaagatttaaaataccaggatcaccacccgagtcaatggggagaggaagagactggaatgttgacttgattcccaagttccttatggctaatggtcagctggttaagatgctgctttatacagaggtaactcgctatctggattttaaagtgactgaagggagctttgtctataagggtggaaaaatctacaaggttccttccactgaagcagaagccctggcatctagcctaatgggattgtttgaaaaacgtcgcttcaggaaattcctagtgtatgttgccaacttcgatgaaaaagatccaagaacttttgaaggcattgatcctaagaagaccacaatgcgagatgtgtataagaaatttgatttgggtcaagacgttatagattttactggtcatgctcttgcactttacagaactgatgattacttagatcaaccgtgttatgaaaccattaatagaattaaactttacagtgaatctttggcaagatatggcaaaagcccatacctttatccactctatggccttggagaactgccccaaggatttgcaaggctaagtgctatttatggaggtacctatatgctgaataaacccattgaagaaatcattgtacagaatggaaaagtaattggtgtaaaatctgaaggagaaattgctcgctgtaagcagctcatctgtgaccccagctacgtaaaagatcgggtagaaaaagtgggccaggtgatcagagttatttgcatcctcagccaccccatcaagaacaccaatgatgccaactcctgccagatcattattccacagaaccaagtcaatcgaaagtcagatatctacgtctgcatgatctcctttgcgcacaatgtagcagcacaagggaagtacattgctatagttagtacaactgtggaaaccaaggagcctgagaaggaaatcagaccagctttggagctcttggaaccaattgaacagaaatttgttagcatcagtgacctcctggtaccaaaagacttgggaacagaaagccagatctttatttcccgcacatatgatgccactactcattttgagacaacgtgtgatgacattaaaaacatctataagaggatgacaggatcagagtttgactttgaggaaatgaagcgcaagaagaatgacatctatggggaagactaacagcagtacatgttattatgtaattaggacacattttaaaatttggcaaataatgcatataaggaaatcaatattggaaggcctgcttttgtaatgaaaatggagagaatgaagagcgctgtgccagtaaatactccccttcacctttctaattattaacttgttttcatggagtggctattcagcattggcagttaccacattctgttcaatttaaccaaactgggcnnnnnnnnnnnnctagtgaagttaacaaacattgggataccgacacagacacttgagacagtttttatctttatcaggagtagtgtgtgtgtaaagtgactacgtggccgcctggcgatcatatccgtgactcatcatatatagtggcaactgtgaacagtatgtagaact

SEQ ID NO: 167133 - DNA, 808 bp, Homo Sapiens
  misc_feature (246)..(257): n is a, c, g, or t
gatctatggggaagactaacagcagtacatgttattatgtaattaggacacatttaaaatttggcaaataatgcatataatgaaatcaatattgtaaggcctgcttttgtaatgaaaatggagagaatgaagagcgctgtgccagtaaatactccccttcacctttctaattattaacttgttttcatggagtggctattcagcattggcagttaccacattctgttcaatttaaccaaactggcnnnnnnnnnnnnctagtgaagttaaacaaacattgggataccgacacagacaacttgagacagtttttttaatccttttaatcagtgtagctatgtgctgctgctgctcaagagctggatccatacaggttgtgtgtcatctgtcctcttgaggttcaggagattctaaattgaatattccacggtttgggacagcatccggaagttttccctatgactttatattttgtattatgtcaaatgttatggcagggcccaaatagcatagccacaagtttggtttatgtgggcataaaattctaaccaaaccccagacatagggagtcatttggagaaagcctgtatgtggtgttttaacctaataaagttgatgagagagaaggggagaggaagcgaacataaagcgggtcaagtgtagtgcatcttttgtatctcaggcgtggcttcttcagtggaccaagctgcaatgcagtattgacttgacagagcctctacttctgtctcaaaatggctccaaatgatttctgtactgcaaaataaagccaaattctggaaactacgaa

SEQ ID NO: 167134 - DNA, 345 bp, Homo Sapiens
ctcatctggctgggggaagcaatcattctgatgagagccattcctgagagctcacctccctcaggaatcacatccgcatcaagacaccaccccaggagaacctgccgcatctagcagcagacctgtggcaccttctggaactgctctttccaccacctctagtaagctggaaaccccaccgtccaagctgggagagcttctgtgtccaagttctttggctggagagactctgggaagtttttcaggactgcggcttggccaagcagatgattctacaaaaccaaccaataaggcttcatccacaagcctaactagtacccagccaaccaagactcaggtggtgtg

SEQ ID NO: 167135 - DNA, 1148 bp, Homo Sapiens
  misc_feature (39)..(39): n is a, c, g, or t
tgaaggtcttagggaggagcacatcaggtagaggttcanagccatggaaagtggaggaaaggcggcagagaggagcagcaccagaggccaggagagagtggaaagggccacagcttgtttttaaaaaattctataatttggaagagggtggcgattaattttcaaaatacacttcagagtcccactttccacatagctcccttactcacagccctttggttttttagacaaaatttaagagctctcataaagccagaagtattgataactccttagtgcatccaaaaaaaagtgttcacatcaatcccttacaaagactatgtgctgtagactttgcttcttcctatacatttgtcttacgactcaggtggtgtgtacaccacctgagtcggatcctgaccctaaaacctagtattttccacttgttcatcaatatggaaaactcagattccaatgacaaaggaagtggtgatcagtctgcagcacagcgcagaagtcagatggaccgattggatcgagaagaagctttctatcgatttgtaaataacctgagtgaagaagattataggcttatgagagataacaatttgctaggcaccccaggtgaaagtactgaggaagagttgctgagacgactacagcaaattaaagaaggcccaccaccgcaaaactcagatgaaaatagaggaggagactcttcagatgatgtgtctaatggtgactctataatagactggcttaactctgtcagacaaactggaaatacaacaagaagtgggcaaagaggaaaccaatcttggagagcagtgagtcggactaatccaaacagtggtgatttcagattcagtttagagataaatgttaaccgtaataatgggagccaaaattcagagaatgaaaatgagccatctgcaagacgttctagtggagaaaatgtggaaaacaacagccaaaggcaagtggaaaacccacgatctgaatcaacatctgcaaggccatctagatcagaacgaaactcaactgaagcgttaacagaggtcccacctaccagaggtctagaggagggcaagaagcaggagcccagaccatcggagaaccagacgcaagagctgaaagaagtaggtcacctctgcatcctattgatgttc

SEQ ID NO: 167136 - DNA, 877 bp, Homo Sapiens
  misc_feature (558)..(575): n is a, c, g, or t
ctctttccccccttgagaagaagggtttggaccaatatgggaaaaaaggaagtgtgttccctcctccaggccaggaggtttcccaagccctggaacggggggaaaagtgggcaggagagggagcagccaccagaggtccagggagaggagtgggaaaggggcccacagccttgttttaaaaaaaattctttaatttggaagagggggggcgattaaattttcaaaaatacacttcaggagtcccactttcccaccatagctacccttactccacagccctttggttttttagacaaaatttaagagctctcataaagccagaagtattgataactccttagtgcatccaaaaaaaagtgttcacatcaatcccttacaaagactatgtgctgtagactttgcttcttcctatacatttgtcttacggctcagtggtaaggtagctgtagagacacattacggggtaaatggaaaagggaaataaaggggaagcccaggcacatgggtgcagggaggggtggggaataccacttccactttctttggtctttttctttnnnnnnnnnnnnnnnnnnggcaggggtgtgattggttggaagggtagagaacaaaccccagaacagtgtaagctccagaggtgggtgatgggaacagtccccaaagtgagaagagggaataggtcagggcaatgcttgcagcatcaagttcctcaggagtttctgtcggcccagctcatagtcctcctcgtctacatttaccagcagcttgatggcttcatggcccacagcttgcttgagggagtctgtgatgaagacacctctaagtgcctctaataaagagccattgatgtagtcacgccagaatgcatcgaggtacc

SEQ ID NO: 167137 - DNA, 813 bp, Homo Sapiens
ctctcaagagaatattctttcacctcgtctctcaaaccacctagacctttagaggatccatctttaagggccggtgtggatgaatgagaaaatgcacctttctgacagtatctccactttacttaagaaaactagccaatatatgaaaagacccttagtacccaatacactcaattgcctttttaatgaatgtacttgtcttggataggttgctggtaaaccattttaaactattttttatagctgaagttcttcactactataaacatgtcttctgtactataaaatccatttaactggtgttcttaaaatcagagcgtccagaggaaattcttcctaaaactaggattcctgttcctttgtcttctcactcgcactctggcactgctccctctgaagtgcagtgggatctcgtgtgctttgtcttgattctgtgctgcgctgccgctgggcgatgcagaccacctgtcttctactgaaggacagtccgctgtctccagtgggggcagcagctgtcccccagcctcgatggagacactggggcagtctgccttgtctgtggagctgctccctctccctcatcccaccccaaatacttaaaatgacactacacccagacggcgcccagctggctgcagcacttgtaccatgcacatgactctggtagtaaccaacaaaaacttgttttatggattcctcgtttactgaggaaagggaacatgctggttctggaaaagccacaatattgaatctaaaaggaaaccgtttattgtttgatgaaagtttcactggttaaataaaaaactaaattaa

SEQ ID NO: 167138 - DNA, 492 bp, Homo Sapiens
aatcacatgatgcatgctatccccatgagggaaggactgtacattgctcatttcacactcttcagaagacatttcatacctgccctggtcctgcttgaaggtttgtccaggcagagcagctcctgcagcgcctcggtctgtgacagtcctcctagcacccccatggctttgagcctcggggactcatcaagtccaagaaaagagggaggggtggcagaggatctgcagccctggccccgcggtgcatgaggctgggtgcagttctaaacctacattctcgatttttcttaagccaaaaatgaatgctaactcctttgccagtaaaattctgggaaacagggactgaggccacacatcatttccagtcatctgtgtgtttttagaggccagccacttgcccctgttgaggcctggctatggaactaaatacagtgttggtcttgcctgtccttcaaaatcaacaacagattgtctctcgactcaggtggtgtg

SEQ ID NO: 167139 - DNA, 663 bp, Homo Sapiens
ggaaagctataacagggaaacagctatacaggacacaggtttaccgcggcatcagcctcaccagtgcatgggtatacaggcagtgagccacattgacccagaccattccttgtacttggaatgatggctattcccgcgcttcacaggccagaatgatggagataatagtctcaactgattatttcctcctccaagaaaagctgaagaatgcatagtgttaagcacacggggtgcttgatagcatagtgctaaggttcaagaactttgaagccaagcagtccatctgttagctacgagaccttggagctctcttagcaaagaagagaggaatgtctatagcgtggcaatctgtggtgcctgccaaaaaagatagaatacaaagattaatcatacagtaatactcagtcttcaacctcgaggtgctcttaaaggagcccatgaaataaaataataaaccatagaaaatgataagtactactaggtaaaaaatcaaggtagagagtgatagtacttacaaaagagatacagaaagaaatgggagtggaaaggagggagacagtcaggagggcttcttgaaggaggtggccaggagaaacaaggatttgggtccatggaattcagagcaagaatattctgcgctatgaggatagcatgagcaaaggc

SEQ ID NO: 167140 - DNA, 713 bp, Homo Sapiens
ctcacgaaagtagacccctctgtcgtgaaaccgatcaagcattttgacaggaagcccttcattattcataacattgtatgctgaccaagacgtcagaagaccacctgtgcccttttctctcgtggaagataaaacctggactcagggagcaaccacaggctctccactttgaaactttagtttgaattttaaaagataggaagtaatgacagtttaagttcctttctcacactcagtatagcatgcttagtgctggttttcttacaacattttggcaggtgtagctttttctgttaaaaatggtatacatgaagtcacatacttttttaaaggaacactcagaacattctgtcattccagtcagaaactgtcttttgaaatatttctttacaacctaccaaaaaaggaaggttgttttttctacatgtgcttgggtatctaacatctaccattaaaacaacaaatggcttgcagacagggcagtaatggtttatcctaaattactcaaccccttgtagccttgacaaactttaccttaaaaccaaaatgaaacacaaaaattaatccttaataatgatagcaagtgatctttctttttagttttagccttcccttttcaatagtaatatttaaacccacttttgaccaatggtttgcccaaatattcttgtcatttggagtcagtggaaaatccagcacgccaagcaccagtc

SEQ ID NO: 167141 - DNA, 761 bp, Homo Sapiens
attggccgagtaatcactatgaaagaacatctgatctgctatctggtcatatttgctactggacccaaagtcacaaattaaaagatgtccatgagagtctgtgcatgcaaaatgctgaccatcaggagagcatttgcagtcaaatactgcgccatgtccttggccttcaatcatattgaaataagatcgtattttgactcctcttgccagatcccacactatcacgtttccatcatgaccagcagaaaagagaactctaggatcgaacgggtgtggttcaagaacaaatacctcatcttcatgacccatcaggacatgaattagttgaccagtgtaagaattccaaactttcagagtcatgttattaactgcagttataactgtattgtcatgtcgatcacaagctaccatagtaaccttcatttttgtgattttatcttctattccttgaaggttttggcctgctggacgagtagccatatccaacaaaatgctcttccactctcttcgtttaaattgccaaatacgtgctgtcccatcacgactgccacttacaaaactgttactagtgttggaaaactggatactgtcaactttgtcagtatgaaactccaattctgatattttctctggctgacctgatccaaaaaaataaacccgaataatatgatctgtgcttcccgtcgccagaaacattccaccagcactaaaaggagaacagatcatttgaactccaggccgagggcgctctgtaaattttg

SEQ ID NO: 167142 - DNA, 574 bp, Homo Sapiens
gactgtgaaagactatttgagagatattgatctaatcggtagtaatgccttagaatacaatccagatagagatcctggagatcgtcttattaggcatagagcctgtgctttaagagatactgcctatgccataagtaaagaagaacttgatgaagactttgagcagctctgcgaagaaattcaggtaatctagaaagaaaagaggttgtagctcctccaaatatgccccgtcttactaccatgtgatgccaaagcaaaattccactcttgttggtgataaaagatcagacccatagcagaatgaaaagctaaagacaccgagtactcctgtggcttgcagcactcctgctcagttgaagaggaaatattcgcaaaaagtcaaactggtacttaggcaccataaaaaagcgaaggaagatttcacaggcaaaggatgatagccagaatgccatagatcacaaaattgagagtgatacagaggaaactcaagtacacaagtgtagatcataatgagaccggaaacacaggagagtcttccgctggaagaaatatgtcaactagcaaaatgcctctg

SEQ ID NO: 167143 - DNA, 279 bp, Homo Sapiens
gtactacaggatcctctcgaggctttacccctgcgcaggtcgactaccacctccagtggtgccagccgcccctttgaaatagccacgacgcgggtttgatagtgaacctgcacaccactctctttaagttctcgcgaagcccaaatggaaagttgcgaggtgtcaaatgcgcactcattgacccaatatacttgctcaatcaatcgaggttcaaacaacgcacgtaaagaaggctcagccggttgatcccggtaacagccgtcggggtccttagtcgct

SEQ ID NO: 167144 - DNA, 351 bp, Homo Sapiens
gaggtgactctacggatcctaaacggtctgttaccttcttcgctgtgtagacactgagctcgctgtatagggacctgggcatgcctgtagacgtatccatgcacaggcgcgccgtgttgatctacctcatacgggtcttgcataaacgaccgaagcttgggtatttcaacgtaactgattgcgtttcaaacgagataggttcgatcccatgggtctccgtcacgcagggtgcgcaaaaccttggcctttttgccagcggctttggcaccaaccctgttgccatttgcttttggggccattgaaacgggatcctgggcttgaaaaaccacttgtgagaagctgtatgccctg

SEQ ID NO: 167145 - DNA, 452 bp, Homo Sapiens
ttcgtaccaccactggcacgaactcgggtgcgttcggctagttacacccttttactacctcatgcaagcttctctccacatgtaccgatcagtagtgcgatcctcgcaagatcatacgagcgtaagaccgtcacccgctagctggcgccaagcgctcccacttgaattgacggggtagggtgccagaaccgacgccgcatttcgaccagcctgctgcttagcttttgttgtgatatttagcgtataaagtcactttgaatgtctcaacacaccaaaaggactagatgtgaacgccagccaaatttctcttataaacgccgcaaaaacacatatcgactcgcggacacagtccaacctgttgtctgcacaggccctcacaacttggaaagaaacgcttcgcaattgtcatggcgagcatcaagcaatgggtgacccggtaacagaccgttaag

SEQ ID NO: 167146 - DNA, 287 bp, Homo Sapiens
  misc_feature (56)..(56): n is a, c, g, or t
cctgacggctgttacctcgatgaaagctgaagacctgatcaaaaatgaccaacgantgcctgagcgtctgttcaccccgatacgccacccagtgctacacgtctagccttgcaaaaatattgccaaggagatcagcgaaacctcctatacctatctgctggccgagctggccgaaagttcgctgagttcggaaattctaggccgtccaggcgccaatatcagcctggtcaggatcgagatagaggaggtcatgctcgaagccgatgtgatcaaggtaaagaccgtcg

SEQ ID NO: 167147 - DNA, 236 bp, Homo Sapiens
ctgttacctgatccccaagcgcggtatgatgctggcgcggatggtcggccacattacctacctgtacgacgactccatgggcgagaaatactgtgccgtggcctcaagagcgagaagctcaactacgacttccacagcgtctaaattcccaggtggaaaagctaccctgcgttaccaggggcgacggagttctcgcgggcgtattcgacgccaaataaccttaccttgcttgatga

SEQ ID NO: 167148 - DNA, 339 bp, Homo Sapiens
gtggaaagctacctgcgttaccagggcgagggagttctcggggcgtttcgacgccaatacctacctgctgatggaccaaggccctggactacttcgacccggccgccaatcacgatgacgacctggcgaaaaccttcgagcacgccacggccaagttctgcgtaatgtcgttcaccaccgactggcgcttttcgccagcgcgctcccgtgagctggtggatgccctgatggccgccaagaaagacgtctgctacctggagatcgatgcaccgcaaggccacgacgccttcctgattccaatcccacggctacctgcggtaacagaccgttaaggcatcg

SEQ ID NO: 167149 - DNA, 591 bp, Homo Sapiens
tcgacggctgttacccttctaccatttggcagcatgctcaccgggtcatcggagaacacggtggaatcttccatgcggccttggcgcaggcggacacaagcgccgtccttgagatcgatagcggggataatcagcatctggcaaaccttattcgatattcagcaatgcttgggaaatcagggtttctcaagcgaccacaagtcgctttcgatgctttcgaacctttctttaaggagcgtctgcgtgtcgaaaatcgccctgttgtaataatgcggcgccacttcggtggtgaacagctcaagaatttcggcgacctcgaacgagcccagcttgagctcgaagcggtcttccatgaaccgcttgatcttgtcggtagcctcacgctcctgctcgggcgcgaggttcaagatcggcggcttcggcttcctggccatttaccagcgaccatcccacgcggcgaaattctgcagcaattgcaggccatgggtatggcttatctccgggtgaaactgcacggcaaagcgcgaaccatcggccagtgcggcggcaaaatctgacgccgtaatgcccgccacgtgtacagaccgtcga

SEQ ID NO: 167150 - DNA, 402 bp, Homo Sapiens
cggtccgcggaggagaaaggctgaatatatcagaacatctgagcacatttagaagagtcaactcttaagattatcattagaaaacaaatacgtcaacacctatgaaaagaagcggggaaaacaacaacaaggacaacaacaaaaaaccagtgaaattctacaagtgtcccttttaaaaatagtatgtgctaactaagggctattcattctgccatttttaacttgagacacatttaagaataaagttggatgttctttttctgtgattatgaaatgcaataaaatctgaataaagggcaaagtttcttcctgatcagattagattaagtgcttagttttattcctaattctgccccttttaacctgatgtgtaccttactctttcctccctttcgtcccccg

SEQ ID NO: 167151 - DNA, 729 bp, Homo Sapiens
caggcaatgcactgatggggagaaccggtctgctctcatctctcatccagaacagtgttaggggtgtgggtggcttggtaactctttcactgggcccactctcacataagcatcccccagagaaatgtggggcaggcccacacacaatcacagtcctgtcggtgccactccacaaacctatcttcccactcttaccctgcagtcacaagtgcatgctccccaatcatggaggcggtcctgctcatgggatcatcaactcctgattaattgggagtagaaaaaataaaattcgaagcattcccaaaccactcggtatccttcctaatgaaatttattgccaaaagctggtaagtagcaatgcaattggcctatatcatgtctcattcctccttttcttgtctacttacttcatgggttactgagctgtgaaatagcttgggaagggggagtaggatggtaacagttggaggctcagacaatctactcaaataatctgctcccgaataatcaagagctgaccatgagcttttcttcaaagagccaggcaccctccagttggtgcaggttccaagctttactatccttgcctatttcttggtgatcttaagacaaagataaacagtattcttggtggacacacattgggcagatacctgcttttggaatggttgtcttaggatgaacatttacatacctaccttttttcttaagtgataaaaacctaacagt

SEQ ID NO: 167152 - DNA, 194 bp, Homo Sapiens
ccgcgggggcgaaggcgttcataaggcacaggaatcgcagcaagccagctgaaggcagggccctagtgggagaggaagttggcactggggtccccctgcagctgttgatggggaggtagagaccccctctaaagtgccatggtctgaggctgaactaattggccaagcagtatgctaggcagcggcggggtggg

SEQ ID NO: 167153 - DNA, 525 bp, Homo Sapiens
ggagaagttagaaaataacttcatactgaaaatatatcttaaaaaaacaacaacaaaaacctctatacaaatgtagtacagcatacaaatttttaaaagatggaatgaaggcaggaaccattgcaagtctttaggaaatgtatgaacgtaggcatgctaagttgaaaatagtcttaaaaaactagtgaaaacttcatgtatataaaataattcagaaataaatctgctaacattcttcactttcaggttgcatgtgtgaatccaacatgttccttcttcataaatagtcaagcgttccttcagtggtgtttgtgtggtctgtcttcgtgctggtcaccagcctcagtatgtctggtagacgtcggggatggggacctgaatggcagcagcagggaaggcctgaggtatgtagcctgcgtatcctccatacacggcggccgcggctgccgcgttcttctgtagtgtggcgatcgtggctgtagctggagcagcaaatggcacgtaactggcccctttcgtcccccg

SEQ ID NO: 167154 - DNA, 269 bp, Homo Sapiens
cagggagttggtggactcatgtttgactcggcactttccgacccgtgaaacagtaaccagaatccgtacttcctaaacttcgaggtactcaggagctttccttgctgctcttgggagtaatcggtagcctgctgcctttgtagctgggcgtgtaccgttcctacgtgagagtcttgctttccttccagtggattcatgtcgccacttggctatggggtgcaatggttcttcaggctttatggtctcaattttttccctttcgtcccccg

SEQ ID NO: 167155 - DNA, 493 bp, Homo Sapiens
  misc_feature (122)..(409): n is a, c, g, or t
  misc_feature (430)..(440): n is a, c, g, or t
cgggggacgaaaggtttctggagtttggacggcttacatgtaacctggcgacaccttcacgccccagggttgccatggcaccacctttccgaaatactgcttcctaggtacaatatatcttnnnnnnnnnnnnnnnnnnnnnnnnnnnnnnnnnnnnnnnnnnnnnnnnnnnnnnnnnnnnnnnnnnnnnnnnnnnnnnnnnnnnnnnnnnnnnnnnnnnnnnnnnnnnnnnnnnnnnnnnnnnnnnnnnnnnnnnnnnnnnnnnnnnnnnnnnnnnnnnnnnnnnnnnnnnnnnnnnnnnnnnnnnnnnnnnnnnnnnnnnnnnnnnnnnnnnnnnnnnnnnnnnnnnnnnnnnnnnnnnnnnnnnnnnnnnnnnnnnnnnnnnnnnnnnnnnnnnnnnnnnnnnnnnagtacaatctatctttattannnnnnnnnnngtaattttatgtatctactgcatccccatggagccctttcgtcccccgcgtac

SEQ ID NO: 167156 - DNA, 379 bp, Homo Sapiens
atggatggaggtgaatggatgcctgagaggcacccagcagcccctgcagtgaggatcggagggttcagtcacttgttgaaactgtgcatgtaatcttgagagctggaaggacagaggtggcagtcacctgacagccttcacttcattgctaaataatcttttcctattgattgctgaagtattttgagttgtcaacccattttttatatacccaagatgcttctctttttaaaattattcaattcagagatcaactgatcttaaaaatctatatctgaagcctccattttctctgattctaagctcattcctttctgaaatattgtttcatcctggatcatttcttgagatcagagttcatctgaatagcttaacaata

SEQ ID NO: 167157 - DNA, 400 bp, Homo Sapiens
ggatcccccgttcgatgaaagggtgaggagaatgtgcaaagaattcaggacatgcctggagtgtctgaggaacagtaaggaggcaatgcagccagatcagagtatgtgagagaaagagcagcaggtgatggggtccatcagaagtaatggggaccaggtcatgtacacacagagctgtaggccactgtggttcccagtgagggggtcaagtggagatcagaaatctaagtcagaggagagggaagggagtctggcttgaccaactgatggaaaactggagaagaatcaggagtgtgggcaaaggcaaaagaggagaggatgaaaagctcagaatccagacctgaggaaagcagagacaagaaaatcagtggcaagcactgccctgtcagcggctcatggt

SEQ ID NO: 167158 - DNA, 394 bp, Homo Sapiens
ctggtatcctttatacaatcttgtgtgctctaggatctcataagctagttgggaaacagtctgaacttaagaagaaacaaccacaacagtaaggcagttacggtgtgtacaaaaagagtaacacagcaaaggctttgcagaaaaggaactagcaaaaagaggattttatttagtcaagtatgcctgaaggtttgtgttggaaaatactaagtaagaggcaaaatattgggccaattggtctttattctatagtatgctggtccctccagatgctacatgaaaaaacaaggtgtagcaaaataactctgggaaacaatgcattctatcctttgatcctttaggttcacaatgtacattagcttactgaaggatcctagaagcctttcgtcccccg

SEQ ID NO: 167159 - DNA, 693 bp, Homo Sapiens
gggacgatagcacgcagggcacatctccctgatgataaccaatgcttcaggattgcctataagggcatattagaaggcttttgataatctcaaacactgagttttgctgcctgacatatcaatacaggtttagcctaagtgctcacatcttgcttttgattttcagatagaacaaatgtttacattagtatacagaatgtgcaatgcaagcaggcagcattggtatgagaaccttaactgaatgcattccttggctttgggatcttatttattttttactctataaactcaactctataataagagaagagtttcatttgtattttaagttcccacagaccaaacgacattaatagaatctacattttagagtaggatctgctaccaataccaataagattttattggaatatggaatgtataacaaatgtttcaaacaaacatctaaccttataaaaatgtatggcattattaaatagttaataaagaaatcttaaagggtgatgtggtagacacctctagttctagcctaggtgtgtgaagtccccacagctgtggcatggccctgcagctggggtgaggggactgcctacaaaccatgttgctcctgagtccccaaaatgaaatcagccctatttttgtttaaacaaactctaggctttctctgctaacatgaagggtttgcaaaatggg

SEQ ID NO: 167160 - DNA, 616 bp, Homo Sapiens
ggtcgactactactactaattcgcggacgcgtcgacccgaggccgaggccgtggacgagggagaggtgcccttgctcgccctgtattgaccaaggagcagctggacaaccaattggatgcatatatgtcgaaaacaaaaggacacctggatgctgagttggatgcctatatggcgcagacagatcccgaaaccaatgattgaagcctgcccatcctcccatgagagactcttgttagtcaacacatctgtaaataaccttgagataacagatgagaagaaatctgattgatgctggatggacctatcacaataggctgtggacttactcgccaccagcttgtgcatttagtgtgttccttttactttttgatactgtgttgtatgaaacccttttgtcctttgatttggttttttgaataaaaaataaaaaggggggagcggggatttcccctcctttgcacagacttctctttgaacacaaatgcattagccttgtggctagtacaccctcttcctacctctgtctcccctcacttgtcatatgctctgacatgctacatttcttttgttcatccgtgttgcccccactagtctatcccagtagccgggcagtgt

SEQ ID NO: 167161 - DNA, 708 bp, Homo Sapiens
gagttgatgtacaggtcactgattatgaatatctggatacaactacctggcatatgatattggaaatcatttcaatgaattgcaggtgtgagtgatgtagactatagtctgtatccagatagagaactacagagtcagtggctgcgtgcttaccttgaagcctacaaagaatttaagggctttgggactgaagttactgaaaaggaggtagaaatactcttcattcaagtcaatcagttggcattggcttctcatttctttgggggattgtgggctttgattcaagccaaatactccactattgagtttgatttccttgggtatgcaattgttcgttttaaccagtactttaaaatgaagcctgaggttactgcattaaaagtgcctgagtaaagaagagatttaattattctccagtagctgagcaatgcttgtgaatcttttcttaagaaatcccaaaaagccaatattagttaaaattctgttgtttaatttggttatcttgctttataaattatgcctctaaacaatcaaatctatttttgaaatagactgaatgatgtcaagaaatatacctactgctatccgtatgtggtggattagaaatgtgttaaatctgcaaaaggtataaagatgtcagtttaatttctttgataatttaacctatgttgtatgtgaattatttattataaacttagcacgattctg

SEQ ID NO: 167162 - DNA, 520 bp, Homo Sapiens
tacggacgctgatttatggatatgaaacttaccttttgtttgtttgtttgttgtggttactggaaactgaaaagagcagtatttgaggttgcttctattctggttttttattcttagctcaattaatatttagccataaatgagtagagactggcaaatggtgctttagtgttgctttcctcatccccacatcttgagctccttatttacattcacactaaattttggtgccttccagcacattagtggcaggcacccttctggaacactaggcaataatttcatcaatacagtcaggtctcttgagtttcaacagatactcagttgaaaagtcgctgtcatcttgctgcataagtattttgaaaggtctgtataacgaagccatttttatatccaggcttagaaggtcactactatatagtaccttcattgatctatctattctgcttggaacttttcatagctaagtataacccccaaatgcatggttcctgggtcaggagacaccaaatcaattata

SEQ ID NO: 167163 - DNA, 1174 bp, Homo Sapiens
ggtctagtagcggaggtaactcagcagttgaaggcgcgattcttaccaagtccagttgttattaagaaacgtattgaaggacttattgagagagaatatttggcacgaacacctgaggatcgcaaagtatacacatatgtagcataaaatgcgttcagaaatttgatttattcttggactgtactcttcgcatggactgggaagttcttttaaatcattaaatattaagacgaccatctcttctattaaattacagtacatgttcctagaccattgagatcaagcctttactccctttgagagtttcccaacatcagttgattgagcctcaggctttacaacgtttatccctgtagagatcatctttacagttcctcgggaaaatgtgaatgtgctgcgttttgttttctttactgtatgaaaacaggaaaataaaagagaaatttagaaaatacagctcattacaataaaattgttggatttcatttccccaggtcttcagtgttgatgtaaatgtgttttgtagtgttgcttagcactttgcgcattgtgtaagttgggtaacaaaaatggcaaaagaaatgcagatttcccagttatcttgctctgaagacatttctttagctagtcttatttaattttaaaggtttgataaatatacaaagacccaagcatacaatttgagcatgctgtattctaccacttgcacttactcatcttctagccttatgaccaggaacctttgttttgggctcaagtacacatcctgatttggtttctccctgttgtaatttgagatttcccaaattaagtcttataatgattaggttttgttctgagttatttctagagaaagaaagtattttagtatgtgtaaattgtacaataatttttttgctgttgtactcactgctaatagtggattgtatagggtggtgtttttatttcatttattgtagacaaaaataatgaatttagtatacacatacccactaattcaagtatgtcagagcacaaagttggcagctggttatatttaattcagcccctctgaaaagcacatacagtctatactttttgtttataaaaaccctagggtcctcccctgcccctaaatatatattttttggtgaacctgtgggtgcactatttaatttttctgggtttcaaaatg

SEQ ID NO: 167164 - DNA, 1091 bp, Homo Sapiens
attgaagaaaaccaagatggacaatctaaaatatgtaaatcagttgaagaaggaaaatgaacgtgcccaggggaaaatgaagttgttgatcaaatcctgtaaacagctggaagaggaaaaggagatactgcagaaagaactctctcaacttcaagctgcacaggagaagcagaaaacaggtactgttatggataccaaggtcgatgaattaacaactgagatcaaagaactgaaagaaactcttgaagaaaaaaccaaggaggcagatgaatacttggataagtactgttccttgcttataagccatgaaaagttagagaaagctaaagagatgttagagacacaagtggcccatctgtgttcacagcaatctaaacaagattcccgagggtctcctttgctaggtccagttgttccaggaccatctccaatcccttctgttactgaaaagaggttatcatctggccaaaataaagcttcaggcaagaggcaaagatccagtggaatatgggagaatggtagaggaccaacacctgctaccccagagagcttttctaaaaaaagcaagaaagcagtcatgagtggtattcaccctgcagaagacacggaaggtactgagtttgagccagagggacttccagaagttgtaaagaaagggtttgctgacatcccgacaggaaagactagcccatatatcctgcgaagaacaaccatggcaactcggaacagcccccgcctggctgcacagaagttagcgctatccccactgagtctcggaaaagaaaatctttgcagagtccttcaaaccaacagctggtggcagcagatcacaaaaggtcaaagttgctcagcggagcccagtagattcaggcaccatccctccaagacccccccacgaaaatcccgccccagtccataatccttccctgaagagaaaatccgaactgaaccacccccaaaagaagggcctgtgaggggtcaagcggagggccgaatttgttcccccaagccccaaaacctgggaactgggaatttccaacgcgccaagtggaaaaaattggaaaggggcccagggggaaaaggccccttgt

SEQ ID NO: 167165 - DNA, 964 bp, Homo Sapiens
ggtaaacaagattcccgagggtctcctttgctaggtccagttgttccaggaccatctccaatcccttctgttactgaaaagaggttatcatctggccaaaataaagcttcaggcaagaggcaaagatccagtggaatatgggagaatggtggaggaccaacacctgctaccccagagagcttttctaaaaaaagcaagaaagcagtcatgagtggtattcaccctgcagaagacacggaaggtactgagtttgagccagagggacttccagaagttgtaaagaaagggttcgctgacatcccgacaggaaagactagcccatatatcctgcgaagaacaaccatggcaactcggaccagcccccgcctggctgcacagaagttagcgccatccccactgagtctcggcaaagaaaatcttgcagagtcctccaaaccaacagctggtggcagcagatcacaaaaggtcaaagttgctcagcggagcccagtagattcaggcaccatcctccgagaacccaccacgaaatccgtcccagtcaataatcttcctgagagaagtccgactgacagccccagagagggcctgagggtcaagcgaggccgacttgtccccagccccaaagctggactggagtccaacggcagtgagaactgtaaggtccagtgaaggcactttgtgtgtcagtacccctgggaggtgccagtcattgaatagataaagctgtgcctacaggacttctctttagtcagggcatgctttattagtgaggagaaaacaattccttagaagtcttaaatatattgtactctttagatctcccatgtgtaggtattgaaaaagtttggaagcactgatcacctgttagcattgccattcctctactgcaatgtaaatagtataaagctatgtatataaagctttttggtaatatgttacaattaaaatgacaagcactatatca

SEQ ID NO: 167166 - DNA, 436 bp, Homo Sapiens
atcatttccacaactgcattatcttagtaaccaaataagcactttatcatgatgtagtcatgattaatatgtttttttaaaggacctaaacttcccccaaatttcagcacaggtagttttattgttatgtttcacctagtaggcaatttttaaaaatagtgtgtagaaatgaatagtttcaaactgagtaaatatagtagtataccatgtcataaaacaatcaaatcaaaagcaactgccaagctaataataagtccaagaaatagtaattctggcttgtatagatatgtgcagtgttttcaaagctcttaacagttaaccactaacatgtatctccacagcttaacttagagttggaagatgaatttcacagtaatgtaattttaaccaccatttacattcacttaatatatactaagatgttactctatgtcta

SEQ ID NO: 167167 - DNA, 190 bp, Homo Sapiens
cgtgattaaagcgtcgtgcaaaagttacacaaagtagcagcctccaaaaactattgtatactgtaaatgaacaaaaaatgaaatggaaaacataagtaaaacattattaagtacaatgaattaatacttaaaatctgtctatgggatttaaaattgatatagccccttaggaaaactgtttgacagaatc

SEQ ID NO: 167168 - DNA, 357 bp, Homo Sapiens
gtgtgtgtgaaaagactgagccaagtcacctccagggcagtgaaccttgtctcagggaccaatgagatgaaatgtacaagctcaaattgaaaacatttgtgtactgcagtctttccaggaagtgttctctaaccactgagctaaacacagaagaatgtataaatatgtatgctctgccaacagaagaattctatttgattataattttctgtttctatcaagtgcgtatccctctctgttggaaacacatggagtgtaagctgagtgggttattattttagcaatcatactttgccaaagatctggtcattttttccactaaggtatactgaggcactaatcagcgtcagtccgcgt

SEQ ID NO: 167169 - DNA, 564 bp, Homo Sapiens
ttataattcattttttaataaaatatagactgttttatccaaaatatttatacattctgttacaatatattgcttttgccctcaataactgccaatataaaatctggatccagtggcctaaaatgtacaaatgcacttaatgtaaatgctggagtttgaggtgtctgcttggccactgtacaaaagtgatgaagtggtaaaattaaataataagcctacaacatagaatacattaaaacttgcacatatacatgttcacagcatgtatacaatgataatccctacggtttaaccaagttatggttcccttctacagcagacacaaaaccaaggtgaactaggttggcagatgtagagtgaataccaaaaaaagggtaatcggttcactgattctgaaagatatgactgaacatactgagcatctagactttgggaatgcatacaggtaacaatatcttggttcggctgattaaaagtcctcattcttaacatcttaagtaaatgctgatcctgtttgtttcagcactgtttaataaacaaaaaaattgttgggcaatcaagctt

SEQ ID NO: 167170 - DNA, 322 bp, Homo Sapiens
gtcgaccgttcctttccactcttgctttcctgctcttcttcaatcctgcgctgtagtgtttcaatataatgctggaccgccatatagataaatcggtactgtgcttctgtctggaccatccctgacctctgagaccgcaccatctggatggttttgggaacgtcaatatcgcagtcaacacctttctctctgatgatgtcaataagaatatcaatcacaatgaacgtccctgtccggccaattccagcactgcagtgcaccacgaccggccctgcatccatgatgctctcctgcttatggtgcgtcgacgcggccgcgaatt

SEQ ID NO: 167171 - DNA, 433 bp, Homo Sapiens
caagcttaatagtgtccaaagattcaaactcagaaaagaattgaaaggttgcctgccagccatatccccagacgaacctagaccactggggtttcactatcatacagaatagagaaaaacattggttactgacacctgaaatcaaaaagcttggatatttttcagtcccaaaccagaacatagctcccgtatataaatgtaaatcttccttcaaaagtataattaagtataattatgggtgtatgtcaaaaatatagaggaagatggatttttacttataggttgttatacaaagttgggacagcaatcaaatttttaaacacttttcaagaatgtatgaccttaaaagaaatgtgtgaccctgatcactttccatatttgtaataaccggagacctaatggtctgacacttacagttccactatcagtgtca

SEQ ID NO: 167172 - DNA, 451 bp, Homo Sapiens
caaagatatctgtctttatatccccagtacctattataatgttggtacagagcaacatcttgacaatttgaattgccatactccttcagaaagccctggcttcaaatcttgactttaacaaggagaaattaatttacagatatttataaatttaaaatctactattagaatgagattttgcagaaaataaaattcacccgaatattgtttatctatggaaacaagattctcaaatccgcaactgagcatatagaaaactaatacgaaagaatatcctttgaattaactgagaaaaaattttcgttacccactcaagaaacttttttcttttggttatttagaactatgacattcttcttggccatagttacatcagagttaaatatgtgcctcactacagctgaaagacctgtggtgtttgtacactctttgctgctagtgcgacgttata

SEQ ID NO: 167173 - DNA, 863 bp, Homo Sapiens
  misc_feature (18)..(18): n is a, c, g, or t
  misc_feature (41)..(41): n is a, c, g, or t
  misc_feature (61)..(61): n is a, c, g, or t
  misc_feature (76)..(76): n is a, c, g, or t
  misc_feature (79)..(79): n is a, c, g, or t
  misc_feature (95)..(95): n is a, c, g, or t
  misc_feature (111)..(111): n is a, c, g, or t
  misc_feature (118)..(118): n is a, c, g, or t
  misc_feature (128)..(128): n is a, c, g, or t
  misc_feature (138)..(138): n is a, c, g, or t
  misc_feature (150)..(150): n is a, c, g, or t
  misc_feature (165)..(165): n is a, c, g, or t
  misc_feature (190)..(190): n is a, c, g, or t
  misc_feature (217)..(217): n is a, c, g, or t
  misc_feature (268)..(268): n is a, c, g, or t
ccggtttccaaattgggnttcccaggccccattcccttttnctgggaaaaaggcccaaaantttggggtttccccnttncccggttttcaaaccnatttccccaaggcttnaaatttncaggtaggtntacccatttncaaatatccccnttacctcaaaggggnctgctctgggttgaactttacctgncaactgactttactgagattaagtgcntgttaaccataatgatctttccagcagaaaatgcagtatgtgctttttacnctttgaataaactcaatttcagaccaaaaagaggctacttccatttccacatgacaaacattaaagacaactgaaccactctcaacactaattatgctgagaacttccagaaagtggattctctaaacaagatcccaagtattaggagctatttcttaaatagtttaaatttgcctttgaaaaaagttccattacttaaaagtattaatttaagcaaaatcatggaacacattgactaaaaaataccttttatttttactcaacttgttaaaggggcagataaagactttggcaaatttgattaactgcacaaaataatgttatccaaactgagtaatgtattgctggtctgaggcttgccttgtttacacttaagtagaatttacgttgtttccacaaatggcagatatcaacatttaaaggaatttaatagtgacctattcaataaggcaatcatcttggtagcaaacttttatttaaatcttacataactcaagctttataaaaagccaacataattgaaaattgggttctccctctaaagccttaagtattcaaagctcaaaacagttaatttaaaaataagcaaacaaat

SEQ ID NO: 167174 - DNA, 175 bp, Homo Sapiens
tcggaccaaagcttatagtgcatgattattatacttctgatatgtgaaaggtagaggaagagaatatgttgctgaaatgcagtaactaagcataggtctgcagagagggcactgctacagaaaaggaatagttataccttccttgattgtgagctattcctttaatttctaaaaa

SEQ ID NO: 167175 - DNA, 100 bp, Homo Sapiens
ggcagctctgggtagtgtaattaaagtgattcttattttcttcctcatgtttatcagcgtattctagttttcttacaatacagacgtaacatttttgtgg

SEQ ID NO: 167176 - DNA, 433 bp, Homo Sapiens
aaaaggaagccttaataggaaacaatttgtatggaatgcctaagaatggccaagcctcaagcctttggtccagtgcaacccttgcctcgcttgtcaacagtgaaaaattagtttggttagaagaaccatctggaaacacaccagcttctgctaccttcatgctcattgttaaaaaaagattaaccagtgtgaacattctgatctgttaattccaggaactgttttctttccaatggactgtttgttggtagaataacccccaaaagctcaaagctaaaatgcatcatcagtcctagtcggcagttccttaagaatggactggcggcgtggttgagctgatatggaaagctgaccttcctgcagagatcactgactgctatccacccaatttcagctgagtatattcaggaggagtagtgtgtctaaacagaag

SEQ ID NO: 167177 - DNA, 1452 bp, Homo Sapiens
  misc_feature (15)..(15): n is a, c, g, or t
tctagaggatcccgncttacttaacccagtgtgtcaacacgacattggaaatcaagggcaaaattaactccattacagtagataactgtaagaaacttggcctggtattcgatgacgtggtgggcattgtggagataatcaacagtaaggatgtcaaagttcaggtaatgggtaaagtgccaaccatatccatcaacaaaacagatggctgccatgcttacctgagcaagaattccctggattgtgaaatagtcagtgccaaatcttccgagatgaatgtcctcattcctacagaaggcggtgactttaatgaattcccagttcctgagcagttcaagaccctatggaacgggcagaagttggtcaccacagtgacagaaattgctggataagcgaagtgccactgggttctttgccctcccttcacaccatgggataaatctgtatcaagacggttcttttctagatttcctctacctttttgctcttaaaactgcttctctgctctgagaagcacagctacctgccttcactgaaatatacctcaggctgaaatttggggtgggatagcaggtcagttgatcttctgcaggaaggtgcagcttttccatatcagctcaaccacgccgccagtccattcttaaggaactgccgactaggactgatgatgcattttagctttgagcttttgggggttattctaccaacaaacagtccattggaaagaaaacagtccctggaattaacagatcagaatgttcacactggttaatctttttttaacaatgagcatgaaggtagcagaagctggtgtgtttccagatggttcttctaaccaaactaatttttcactgttgacaagcgaggcaagggttgcactggaccaaaggctgaggcttggccatctagcattccatacaaaattgtttcctataagcattccttttattctctattctatcctgggtctgcctcaaccgtgagataggagagtctctggtactagctgctgtagcagtgcccttcatccagggcagttaatggagtcttggaccctttctttctctgggatccctgcccagcaccttcctatagagatgactttaaaaggaaaccacataaaaagaaatctaagcccacatgattccaaggagtctgggcatccctgaatccttcttccctgccaggtgcctgtcacctgtcttcactgcctcctttccctgtcatgctcatcagctaatggcttctgtctaagcacctgaacagaggactgaaacctccactgacaggcgtggttataacggtcctggaatcatgtaagaattcttgcacagaactgcctaattgtaacattccagctcgttttcccctctaggaccaaacactttaccaaacttatgcaacttataatgggcggcgacgacagatgtcctgggatttcaacccattacg

SEQ ID NO: 167178 - DNA, 1782 bp, Homo Sapiens
  misc_feature (369)..(388): n is a, c, g, or t
  misc_feature (768)..(768): n is a, c, g, or t
  misc_feature (770)..(775): n is a, c, g, or t
  misc_feature (777)..(827): n is a, c, g, or t
  misc_feature (838)..(844): n is a, c, g, or t
  misc_feature (847)..(847): n is a, c, g, or t
  misc_feature (849)..(849): n is a, c, g, or t
  misc_feature (851)..(851): n is a, c, g, or t
  misc_feature (854)..(855): n is a, c, g, or t
  misc_feature (857)..(858): n is a, c, g, or t
  misc_feature (863)..(969): n is a, c, g, or t
  misc_feature (999)..(1011): n is a, c, g, or t
  misc_feature (1179)..(1179): n is a, c, g, or t
  misc_feature (1182)..(1182): n is a, c, g, or t
  misc_feature (1371)..(1371): n is a, c, g, or t
  misc_feature (1418)..(1418): n is a, c, g, or t
  misc_feature (1421)..(1421): n is a, c, g, or t
  misc_feature (1423)..(1423): n is a, c, g, or t
  misc_feature (1427)..(1427): n is a, c, g, or t
  misc_feature (1434)..(1435): n is a, c, g, or t
  misc_feature (1439)..(1440): n is a, c, g, or t
  misc_feature (1445)..(1445): n is a, c, g, or t
  misc_feature (1502)..(1502): n is a, c, g, or t
gcgaggcctgggtggcgaattcggcacgaggctttttttaacatgagcatgaaggtagcagaagctggtgtgtttccagatggttcttctaaccaaactaatttttcactgttgacaagcgaggcaagggttgcactggaccaaaggctgaggcttggccatctagcattccatacaaaattgtttcctataagcattccttttattctctattctatcctgggtctgcctcaaccgtgagataggagagtctctggtactagctgctgtagcagtgcccttcatccagggcagttaatggagtcttggaccctttctttctctgggatccctgcccagcaccttcctatagagatgactttaaaaggnnnnnnnnnnnnnnnnnnnncccacatgatttcaaggagtctggcattcctgaatccttcttccctgccaggtgcctgtcacctgtcttcactgcctccttttccctgtcatgctcatcagcttatggcttctgtctaagcacctgaacagaggactgaaacctccactgcaggctggttttaggtcttgaattatgtaagaatcttgcacagcactgctaatgtaaatttcagttgtttttccctctaggacaaacacttaccaaaatatgcaacttttttttggtgggaagagagattgtcctgtgatttctacccatttcctgaggcctgtggaaataaacctttatgtacttaaagttatacagaaaatagaataaagttaataccaaacttgaanannnnnnannnnnnnnnnnnnnnnnnnnnnnnnnnnnnnnnnnnnnnnnnnnnnnnnnnaaacacccccnnnnnnnaanancnaanncnnactcnnnnnnnnnnnnnnnnnnnnnnnnnnnnnnnnnnnnnnnnnnnnnnnnnnnnnnnnnnnnnnnnnnnnnnnnnnnnnnnnnnnnnnnnnnnnnnnnnnnnnnnnnnnaaactatccattactcctatttttcgcttnnnnnnnnnnnnntatccgaacgtcactttttctaataaaaacccgagggtggggcaggcgggctaccacacgcccgggtacccccacctcgcccagagggctcaatcaacctcctccgccccctattagaccactctctaattagccaagatcctgcgacaaaggtattctcgtgccatntgncccccacccccgcacaccacgtttagaggtacatacacacgcgctgccgcgctcacaccgaatacacgctcatgctactgcctagtgtggtattccgacccgccgccccacatcatgacgagccgacccgcattattggtgtcttgtcgccacaccgctacttctctcgccgctgtacgtagtgacacntctctctcctaagacgatgcgccaccagatgtactacacccgactcncananccanctcggtnntatnncacgntatatcactcccccctgctccgccctccgtcatagacgagtcgcccgctcggccganacgttgcacttttatcgtctacaccccgcgcgacggccccgcacgatttatccgcacatataactatgatcgccaacccttcttactctcgatcacaccccacacagagatgcgaaaatatcacctcgcccatcactcggacacaatgacgatctcccgtcacccctacgcaagacgatctatctacactcgactaccgacgtaggcgaccatgttaccaccctcctctccccgacacagatttattgcacaccgcctactcaatcacagcctcagccac

SEQ ID NO: 167179 - DNA, 1038 bp, Homo Sapiens
  misc_feature (828)..(828): n is a, c, g, or t
  misc_feature (858)..(858): n is a, c, g, or t
gggtccggtgggggcgccgcgcccagtgagggcccggaagtgggtcgcgcggagattgctgggcggttcttgccggaagcggagagcggctgatcgcagtccggaggtggtccattatggctgacatgcaaaatctggtagaaagattggagagggcagtgggccgcctggaggcagtatctcatacctctgacatgcaccgtgggtatgcagacagtccttcaaaagcaggagcagctccatatgtgcaggcatttgactcgctgcttgctggtcctgtggcagagtacttgaagatcagtaaagagattgggggagacgtgcagaaacatgcggagatggtccacacaggtttgaagttggagcgagctctgttggttacagcttctcagtgtcaacagccagcagaaaataagctttccgatttgttggcacccatctcagagcagatcaaagaagtgataacctttcgggagaagaaccgaggcagcaagttgtttaatcacctgtcagctgtcagcgaaagtatccaggccctgggctgggtggctatggctcccaagcctggcccttatgtgaaagaaatgaatgatgccgccatgtttttatacaaaccgagtcctcaaagagtacaaagatgtggataagaagcatgtagactgggtcaaagcttatttaagtatatggacagagctgcaggcttacattaaggagttccataccaccggactggcctggagcaaaacggggcctgtggcaaaagaactgagcggactgccatctggaaccctctgcccgacaaggtccctccttccccctcaacaaggnccccccttcctccccccagtctcttaccanttcaaggctcaaaatgaaatctgcttccccgctcagcaactgttcgcgcaggataattcaggggggagaagccattacacatggccccggaaaaaatggtatcctggaggacatgaaagaacttcaccaggaacccctggccctgaaaagggttcaaaaagggggtccaagtaaagccca

SEQ ID NO: 167180 - DNA, 982 bp, Homo Sapiens
  misc_feature (772)..(812): n is a, c, g, or t
  misc_feature (814)..(814): n is a, c, g, or t
ggggattgctgggcggttcttgccggaagcggagagcggctgatcgcagtccggaggtgaggcggaactctgaggtggtccattatggctgacatgcaaaatctggtagaaagattggagagggcagtgggccgcctggaggcagtatctcatacctctgacatgcaccgtgggtatgcagacagtccttcaaaagcaggagcagctccatatgtgcaggcatttgactcgctgcttgctggtcctgtggcagagtacttgaagatcagtaaagagattgggggagacgtgcagaaacatgcggagatggtccacacaggtttgaagttggagcgagctctgttggttacagcttctcagtgtcaacagccagcagaaaataagctttccgatttgttggcacccatctcagagcagatcaaagaagtgataacctttcgggagaagaaccgaggcagcaagttgtttaatcacctgtcagctgtcagcgaaagtatccaggccctgggctgggtggctatggctcccaagcctggcccttatgtgaaagaaatgaatgatgccgccatgttttatacaaaccgagtcctcaaagagtacaaagatgtggataagaagcatgtagactgggtcaaagcttatttaagtatatggacagagctgcaggcttacattaaggagttccataccaccggactggcctggagcaaaacggggcctgtggcaaaagaactgagcggactgccatctggaccctctgccggatcagggnnnnnnnnnnnnnnnnnnnnnnnnnnnnnnnnnnnnnnnnnanttctctacccagtttcaggctcaaaatgagttctggctttcccgcttcaacactggttcccgccaaaattaaaccagggggggaaaagcattaccacatacccctggaaaacttgtaatcctggaggaaatggaaaaacttccccaagaaaaccccgggcccggaaag

SEQ ID NO: 167181 - DNA, 788 bp, Homo Sapiens; identical to SEQ ID NO: 71404

SEQ ID NO: 167182 - DNA, 1309 bp, Homo Sapiens
cgtatatttcagtgaagccggtacctggcttctcaagacagagaacagttttaagagcaaaaaggtagaggaattctagaacagaaccgtcgttgatacagatttatccccatggtgtgaagggaggcaaagaacccagtggcacttcgcttatccagcaatgtcgttcactgtggggaccaacttctgcccgttccatagggtcttgaactgctcaggaaactgggaattcattaaagtcacccccttctgtaggaaatgaggacattcatctcggaagatttggcactgactatttcacaatccagggaattcttgctcaggtaagcatggcagccatctgttttgttgatggatatggttggcactttacccattacctgaactttgacatccttactgttgattatctccacaatgcccaccacgtcatcgaataccaggccaagtttcttacagttatctactgtaatggagttaattttgcccttgatttgcaatgtcgtgttgacacacttgtatatgtaagccacctgtttcagctctgtgtcctcaatcaccaggttggaaacattttcctgattttccactctccacttcttgccctccagttcaagtacagctggctccttctttgtggctcgtttgggggatgggctggtttggggtttaggtgcagagaatggtttggggccactgcgtactggaccactctgagccttcagggcagggttcttgtgagtcttcatgtcatcagatacatgtttcagggcatgtgtaatgctctccccctgattaatctgcgcgaacagtgctgagcgggaagcagactcatctgagcctgaactggtagagactgggggaggaggggggcctggtggagggggaggaggacctgatccggcagagggtccagatggcagtccgctcagttcttttgccacaggccccgttttgctccaggccagtccggtggtatggaactccttaatgtaagcctgcagctctgtccatatacttaaataagctttgacccagtctacatgcttcttatccacatctttgtactctttgaggactcggtttgtataaaacatggcggcatcattcatttctttcacataagggccaggcttgggagccatagccacccagcccagggcctggatactttcgctgacagctgacaggtgattaaacaacttgctgcctcggttcttctcccgaaaggttatcacttctttgatctgctctgagatgggtgccaacaaatcggaaagcttattttctgctggctgttgacactgag

SEQ ID NO: 167183 - DNA, 1787 bp, Homo Sapiens
  misc_feature (177)..(181): n is a, c, g, or t
  misc_feature (183)..(183): n is a, c, g, or t
  misc_feature (185)..(187): n is a, c, g, or t
  misc_feature (189)..(245): n is a, c, g, or t
  misc_feature (248)..(248): n is a, c, g, or t
  misc_feature (250)..(250): n is a, c, g, or t
  misc_feature (252)..(255): n is a, c, g, or t
  misc_feature (258)..(279): n is a, c, g, or t
aaattcccaaacccctctagtttccttggccccggggattttcccttatggggaagccacgcttattggccccaaggttccccctttcccttactggggggcccggcgggcgcccaaaaagaaatggtttttagaaaagctttttttgaggggcccgagggcgggcccaacaaaagnnnnntntnnntnnnnnnnnnnnnnnnnnnnnnnnnnnnnnnnnnnnnnnnnnnnnnnnnnnnnnnnnnggngngnnnnggnnnnnnnnnnnnnnnnnnnnnngaaggttaatgctttaatgtattgacattttcacttacaaatgtacaatttgcgtatgtaggaaaaaatcagttctctagacacaacagaatactactagagacgggaaagcaatcacaaaaagatcaactctggggagaaagtggaactgcattccatgccttgtatctacatacactagggaaggaaaaagaaatattacacaggatcaaaacttgtggaaaatacacttgggtcattttgtctcaactgcaggaccttcttatgatccagatggctaccttaagtcctggatagcctaaaatgggcaaagtctggccttgttcacaaatgatgatccaaaacattaaccacagttctccttctctttagtatccaagacccctgaagttgactcaaggaatgaaaagaacaatccagatcagccatgtatataatatcattggccaacttcttcaagggtatggattatttaaaagtacacatggaagtaaaatgcttactcaaacctgaataagaagtttcttgtaactcaagcacttcttgactcacactaagtgtagcactgtaaacaaaagacatcgttgagaaactgaggctatcaaaaccattggcatctatgggagttgtggccaaggaaataaaatacctgagcaaccttatacccagtatgcatttcataccaggatcaagtcactaatgacagccaaagttccaggcttatctatggctgcctaatgagactggccccactaggatggggactggggaggggacacacatgagtgcccaagcttcagtctacacctccccccttcagccagaagcagccaggggagcacagggacatctgcttcaagagcattttggcagcaaaaatcaatactctgtggttcctggaattcccacccagtaattccaagttcaaaattaccaccagtgcaacatgaaaaactgttaatagtttttaagtaaagtgtacatacagctttaataacgattataatctgaagaaagccattcttcttatacaggatggaaaatcctcaaagcaacattttaaaccatggacactagagttgtcatacatctattcagagatgagagataaacagacatccttccatgtggaaacagacactcccatgtcaacaagtcccctaggatcagagagaaaagcagacccgtggtcatcactaggtgtctctggtgtctcgctaaagatggagtcctatgtaggttggcctaagttggcctcagagggaggtggctgagcagcaaagcaagacagcatgtgtgtaaccagccaggcaaaataacaagtctgtgctacctggagtgtattttcaggaaaacaggaccatatggagtgtggggcagggacattcgctgtgctaaactgccactgtcaaaagcggacgcgtggctcgacgatatcccgggaattccggaccggtacccagcctgcctttttacaccacggtcttctatatgtcaccaactacctt

SEQ ID NO: 167184 - DNA, 420 bp, Homo Sapiens
tatctctaacattataccaagagtgctgcagaaagacaaactctcagcaaatgagtcatttctacataagcaaaaaagtcacttttctccttccctttctcactgatgtcctgccagtagagaatctacagaaataatttgaatgaattaaaaccaaatcttgatagcaggagacagcttcctgatctagatgtacaattagagtttaggttggaaattactttaaaatgtgttttttggggatgtcttcaatctctgtgtaaatacccacatgcttatgcattgtaaaccaagtgtgtattcctgtgtatgaatttgtagaactgatttctgcttcaagagaagctgcacctttaattttataaggtcccctccacctgtaaccctataaatgtctgtaaataaacactaatttgtatg

SEQ ID NO: 167185 - DNA, 927 bp, Homo Sapiens
  misc_feature (540)..(587): n is a, c, g, or t
cttcactgtaaattttgttttcatttttaacccaattatggtactttatccaatgcacaactgatctctcagtagatattcatttgaaaatagtgtggccttgatcagtgagaaagggaaggagaaaagtgacttttttgcttatgtagaaatgactcatttgctgagagtttgtctttctgcagcactcttggtataatgttagtgatcggtctcctttttgattggggaaagttaatgtttttgaccctggagttaattcagttgagttatcttatatttttaggaagtatcagaattgctctgatgaataacaaagttgactgttttgatgtccaatctcaggttttagaatatagtggtgtaaagtcccactatttttaattcttaaaacaactttaatttcgtacaccctaaaagtcacatgcataaggcctgttcagagagcagagcctccatctttttgctccttttctactttgtacttcacttgaaaaaatatcaagtgactttacattgtatatttccattgtaaccctnnnnnnnnnnnnnnnnnnnnnnnnnnnnnnnnnnnnnnnnnnnnnnnntctttgtgtgatgtggatcatagtttctcaggctcccttagataattgcttatgaatattgttctaactctgtgtaagaagagtagaaatctttgctaatgttagaaggttcgtattattgatccagaatgcattttgctagtgtccaatggatgggagagtaaataatgctgcattcacaatttaataagttactttcccttgagccttaaggtaactttttcttttctgtcaactacaggccttgaagttatagtaagtgactgagattatcagtttccagggtggttaagaatactgtaaatcaattagctgtcttcctaaagaagtacaactccga

SEQ ID NO: 167186 - DNA, 406 bp, Homo Sapiens
ggtttgcatagtctgcacgtttaatcactttaaaacctctaacattatctcatgtccattaaatagaaccagcaatgctgggcctgtttaaattacaagaaaaaaatcactgtgcaccaacccagtatcttacaaaaccagccgggctggccacgagggcagcggggatgggagaggagggggcaccactgggcagatggctgggtaccaggaatggctagggtagaaaagaaaaggggactcccagatgggaggggactgattgtcctaatgggaggggtgcaaaaggcacgtcagaagaggaggtttgaggggggcatgacaggtcagtgctttctccaccagggcacagtgttgggggggctcagtgccaccacctgcccacctctggcacttggagagcccc

SEQ ID NO: 167187 - DNA, 578 bp, Homo Sapiens
ggacgcgtgggtcgacccacgcgtcgcggacgcgtgggtccggacgcgtgggtcattaagttgaatgtaacgatggtaatattaatttgtttgaactgaggcccactactgattctttgacaaattgaattcttatatttaaataattttatgggaatgttccatcataatttctaaatcatttatatatcaaggtagccttaatttgtatatgtttcagtacaatgagattttattgcctctgggatgctgtttagtttgtattttgttgaacgtttttatcctaggaagagaaacctatgacttgtgtacctagatcatctgttacattaaaaagctgctctttcagcattagagctataaatgaatgttaccttgtcgggaaacaatctagttttagctgtatgagctatgtttattatggtgctaatgttcagtagccacatttgactaatgtctccattctctgtgatgctgtggctagcagcagagctcgccagttcatgcctggacatactgtcagggctgggccctccagctagctcctttggggttgagtccgtatcttttgatgtgga

SEQ ID NO: 167188 - DNA, 335 bp, Homo Sapiens
  misc_feature (276)..(276): n is a, c, g, or t
  misc_feature (294)..(294): n is a, c, g, or t
  misc_feature (316)..(316): n is a, c, g, or t
agctggccggtacttctacattaggataaaaccctgtacatgtagcaaagtgtgggaaagactatagacaataggaatcttttacaaactcctacaggagagaagctgtatgaatgtagaaaatttagaaattgagggaagtcttcagttccaagtatatcccttattctacagcagagaactcaaaatggagagaaatctcatttaagagatgtagcaaagtgttcactaagagtgtttatcttggtacacatcagaagattaatggtagaacancctgaaggatttaggagntatgtataaatctttgcagtcncgctatttgtaaactggat

SEQ ID NO: 167189 - DNA, 353 bp, Homo Sapiens
ccatcgagctcgcacccgtatctctaacattaacataaaatgtggcgatggctgccttacaaactttagattctattctttgttgatgctctaggtgggttttctcaaattcaggcaaaacaatattcaactccttgatgtcactggttttcattccttctggacaccaaatgtgcacaatgtcagaagtatctgagcctatggctttacttcttgatttcttccttttgtcatgagatatcttcccttttttctgagttttcgattgactttctattgccaagttctctttttcaacagagggctgggcactaaggggtcctgtctttttagtaatgttagagatacgggtg

SEQ ID NO: 167190 - DNA, 426 bp, Homo Sapiens
ccaatgaggagctgcctttcagctttggaaaatatgcatctaaaacaaaaccaaacattattgtaatctgacacaggcaaaattatggttcccacaccccaaccccaaatgaaacctgggattttgaatgtggctctaagagttaacattgctgtctgtatgtcgtgtatgctaggtgatatcctcagtagggattgactactagactgtgtgttttatcaaagtgtgtaagaataaaaactcacttgcacgaattgaaacgtacagaaatgacacttgtgaacgtgtgaacgttaacactgtagttgatagatcttaagctgctaattgttgagagagatttaaatttatgttctgtctggtcgctgcagattctcagcagcacttttactgtatatagaaattgaaataaagacctcagctatt

SEQ ID NO: 167191 - DNA, 820 bp, Homo Sapiens
  misc_feature (771)..(771): n is a, c, g, or t
  misc_feature (784)..(784): n is a, c, g, or t
tgagagggcccagcttccaggaaccgttacaatggcgtcccgagtcatttttccctctcccacttgcattcgagagtgagaaaacacacaaggtggccttgattctcactcaccacaatccccctgtacagaggggtctgtttctaagtctggaacctcaacacgaggctgggatgcttcacaacgtgctctctcccactgtccagccatctttggtggtcttcccacagtgcttcccccatcctctcacactcctgtggagggaccatgggacgggccaggaggaaacctgggatcactctgacaggaaacggacaagcacagctgccaggagccagttgctctggcctcagtctccaactgttagtctcaggatcaacagagaactggaaagcagcagaatctggaggagcaggaagagagcccagagggagtgttgtgctgagtgacggttaacagatgaaacagaatttcatggagattctttgttacaaggagaaattgctcagtctcaactcacaaaacgtgaaagttgcctggtttaagagacctatgttttcttttgcagctcttcaaacctccgggaaagatcatcaaagtcaatgtcttcagatgctgaggtgctggcaccagcagatgcagttggtagtgtgcctggcacagatggcaactctggtaggacaaagttgtcatagttatctgcaggtctggaaggaagctttgcagaggctgctggcttgggtccaggctcaacaatctgtgcagaacagnatattcttatcangcattaatgtcatctaccatgaaacacaaagattgg

SEQ ID NO: 167192 - DNA, 1356 bp, Homo Sapiens
  misc_feature (87)..(87): n is a, c, g, or t
  misc_feature (125)..(125): n is a, c, g, or t
cccccaagaagggagggttgtttttctgtgggtgacccgggtttccccagtagggaaccccggatttttcaggggaggatttttttntttacaaggggagaaatttggttccagttttcaacttnccaaaaaagggtaaaagtttgccgggtttaaagaggacctaaggttttctttttaagttcttcaaccctccggggaaagatcatcaaagtcaatgtcttcagatgtggagggtggggccaccagcagatgcagttggtagtgtgtcggccacagatggcaactctggtaggacaaagttgtcatagttatctgcaggtctggaaggaaactttgcagaggcttctggcttgggtccaggaccaacaatctgtgcagaagagatattcttatcagcattaatgtcatctacagattcatacgatgggggagttgctggtatctgaggtggatgaatattgggaaaggcctgataagtccccattggcagtccattgaaatctgatggtccctttggcagtggatatgagaaaggcgtatttgcagatggcataggcatgggcatgggcatgggcattggcaccgttccatcaggtccaccaactggtgctgtgaagccaccactccctcctcttccagggcctcctttcttcacatcatctgtgaatccaacatcaataagatctgtctctaccccaggaggagcttctgccatgaccacagagtcaggttcatagggtacgttgtaattctttgcaatttcaatcaggtatctctccaccaggattttgggtggggcttccacactcagcttgtgcattagcctgtcattcacagttccaatctggttggtcctacatagcttgccatattccttgctatacttggcacagagctgatcagcaactattttcaactcagccacttctgactggagtcgaggagcagcccagatcaatgtagacacagattcagccagaccagaatctagttccttcatagactggataaggccaaaccgagccagcagcaggtcacagtacagctccaggatctccatggcctccacgaggtagtcttcccggataatgtgctccacacggatccgagctcgttcatctttcccagcagccagatagtcagcaatctccttccttgctttctgggccagttccgttttctttttctccaatagtttaaggcgatttatgactaatctcaaattcactcttaagcgctcagctttaaatccagagcccagcatgctgtgctgttcctcctaaccgaatcctgccgtgaacgcagcagacaccgacttcagggttcaccatccaaaatggcgactccctcccc

SEQ ID NO: 167193 - DNA, 1134 bp, Homo Sapiens
  misc_feature (434)..(434): n is a, c, g, or t
  misc_feature (826)..(827): n is a, c, g, or t
  misc_feature (831)..(834): n is a, c, g, or t
  misc_feature (838)..(849): n is a, c, g, or t
  misc_feature (851)..(852): n is a, c, g, or t
tagcagctgatctgtctggcatgtcaggagcagagatattttatatcaaaaatgtccacaagtcatttgtggaagtgaatgaagagggaacagaggcggcagctgccacagcaggcatcgcaactttctgcatgttgatgcccgaagaaaatttcactgccgaccatccattccttttctttattcggcataattcctcaggtagcatcctattcttggggagattttcttccccttagaagaaagagactgtagcaatacaaaaatcaagcttagtgctttattacctgagtttttgatagagccaatatgtcttatatctttaccaataaaaccactgttcagaaacaagtctttcattttctttgtaagtttggctctgtgggctgtttacacccatgaattttggcatgggtatctatttttcttttttnacattgaaaaaaatccagtggttgcttttgaatgcatcaagtaaagaagaagaaaagaatacatccgatgcgtagattcttgaccatgtagtaatctataaaattgctatatcctcctgatagccatgggaaaacatgataagatggtcatttattttgcagttagaattttggaagccacaaaatagacagacaccctgactgttgaagggaggtttaaaaacagatattcaattgaaatgtaagagagcaccccaattgagagcccaggttacgaagacaagcttgcctcgcctgacttttctgtcccttgttctgcaggattagtattctgttacagacctctagtttttagactcttcaattaaagggccaatggttataacctggcnnaaannnngaannnnnnnnnnnnannaaaaaataaaaccttgtcgggccgccctcggcccctcgaaaaagctttctaaaaccatttccttttggcgccgcggggcccagtaaggtaaatggaacatgggcccataacctgttttccctaagaaaaaccctgggccaggaactaagggccttggaattcctccccaaattaaaaaaacgccccgggggggcaaccgaaggcgtttctggaaacaaattcccaaatggaaatttccttgaagggcctttaactgggattcttttccaaccggggaggccc

SEQ ID NO: 167194 - DNA, 1366 bp, Homo Sapiens
  misc_feature (1278)..(1278): n is a, c, g, or t
  misc_feature (1300)..(1300): n is a, c, g, or t
  misc_feature (1342)..(1342): n is a, c, g, or t
gggaagagcagcggccctcggtgcctccttcctgacctcgcacccagctcggagcccggagcgtgcctcggcggcctgtcggttttcaccatggagcagctgagctcagcaaacacccgcttcgccttggacctgttcctggcgttgagtgagaacaatccggctggaaacatcttcatctctcccttcagcatttcatctgctatggccatggtttttctggggaccagaggtaacacggcagcacagctgtccaagactttccatttcaacacggttgaagaggttcattcaagattccagagtctgaatgctgatatcaacaaacgtggagcgtcttatattctgaaacttgctaatagattatatggagagaaaacttacaatttccttcctgagttcttggtttcgactcagaaaacatatggtgctgacctggccagtgtggattttcagcatgcctctgaagatgcaaggaagaccataaaccagtgggtcaaaggacagacagaaggaaaaattccggaactgttggcttcgggcatggttgataacatgaccaaacttgtgctagtaaatgccatctatttcaagggaaactggaaggataaattcatgaaagaagccacgacgaatgcaccattcagattgaataagaaagacagaaaaactgtgaaaatgatgtatcagaagaaaaaatttgcatatggctacatcgaggaccttaagtgccgtgtgctgggaactgccttacacaaggcgaggagctcagcatggtcatcctgctgccggatgacattgaggacgagtccacgggcctgaagaagattgaggaacagttgactttggaaaagttgcatgagtggactaaacctgagaatctcgatttcattgaagttaatgtcagcttgcccaggttcaaactggaagagagttacactctcaactccgacctcgcccgcctaggtgtgcaggatctctttaacagtagcaaggctgatctgtctggcatgtcaggagccagagatatttttatatcaaaaattgtccacaagtcatttgtggaagtgaatgaagagggaacagaggcggcagctgccacagcaggcatcgcaactttctgcatgttgatgcccgaagaaaatttcactgccgaccatccattccttttctttattcggcataattcctcaggtaggcatcctattcttgggggagattttcttccccttaggaaggaaaggggactgtaggcaatacaaaaatcaagcttagtgntttatttacctgggttttttantaggggccatttgtctttttatcttttacccattaaaaccantgttcccgggaaacagtcttttcc

SEQ ID NO: 167195 - DNA, 297 bp, Homo Sapiens
  misc_feature (211)..(220): n is a, c, g, or t
tagtggacgtatctctaaatattgcctaacactttccagtccctctttctgccaactagaacgggctttaaatctagagctcagaagaattgctctcacttggtggccaccctctcatggcaatgccctcctgtcttccctctgtctgcacaattccaaacagccccacagagaccctgtactccatgaagtattacttccaactcaccannnnnnnnnnctccttcaactctcagagaagtaaggctgtacatttctacggggtgcaaaacaatatctgccgtaatgttagagata

SEQ ID NO: 167196 - DNA, 792 bp, Homo Sapiens
  misc_feature (655)..(669): n is a, c, g, or t
ggggaaataggaggagcaattccctagggaaaaaggggggccctagggggaaacaatggttgcagtgcactgcagaatgaccaatggccgcttatttccagagttttcttcaacttaaaaagagatggcattttcttatgattcagtaaccgcattacttacatcaacattagggttgctatagacaagcctaggtagctagcctctatttacatcatcccactaagggtatccaaacccaagtaaccaaattttagaacactatcagatagtttcctgcattcaagacttcaactcataactctttgaactcttattagatataaggaatctaagatgtattataggcattcctataattagccatatttacaagatacaaaatatttggataaaaagcaaatttcatcacatcgtataatgtacagataaggtttataaagtaaattaatttatttttagcaccatatatacaatccaaacactgcaaattaatttcttttcaaactcaaaagatagttttcattaatcatgatggcacatcctctctctcaataaacgcaaatgctgttttatgggctgtgtggtaatagtttaacatttagtaattgattatataaaattatgttctcaagactaggctgcatttcctttnnnnnnnnnnnnnnncctcaggttaaaaattagccaaaaatttgtgattactatcacaaataatccaagatttaaataaccaagggcctccagaggcccctatcttccttttgccctgtctaaaatccaatgaaatcc

SEQ ID NO: 167197 - DNA, 296 bp, Homo Sapiens
tatctctaacattatcctaatttcagctgagggaattcataaaaagaaggtaaaaataactacggagtcattcattttagggttgttagtggggtttgtttaaacaataaagttttaaaatgagtaaacgattttgttgttatttgggctgggaaaaatttctagatctcaaaatggtaatttaagaacaacaacaacaaaaaaacaaacccttatatcaagctgtttgggtaaatatgcaaacaatattaacagtaaattctccacaaagatcctcttgcttaatgttagagata

SEQ ID NO: 167198 - DNA, 376 bp, Homo Sapiens
gctattactgtgctcttcctatacagacagatccacagaccacctttcagagcattcctctctcatttcctccatcacccaagataaatctagccacccttttttgttaactgtgccttttctttcaactttttgtccttgttaaaactcaaaatttgtccaacgtttcacatttcctaatgataaaaagaaagcttgcacagtttaccattgatctcaccaatgccctcactgctggaaccaaaaagccatgagaggtactgctgtgatacaccttacaagctacatagccatcttcaaaatgaaaaccaccttttaagtcctcatgctgccattacgcaggatctgaaccacctacacgtacggtggtctcata

SEQ ID NO: 167199 - DNA, 557 bp, Homo Sapiens
  misc_feature (368)..(377): n is a, c, g, or t
agagatggaatcgcaagaattcccaggccctctttttatttacagtgataccaaaccatccacttgcaaattctttggtctcccatcagctggaattaagtaggtactgtgtatctttgagatcatgtatttgtctccactttggtggatacaagaaaggaaggcacgaacagctgaaaaagaagggtatcacaccgctccagctggaatccagcaggaacctctgagcatgccacagctgaacacttaaaagaggaaagaaggacagctgctcttcatttattttgaaagcaaattcatttgaaagtgcataaatggtcatcataagtcaaacgtatcaattagaccttcaacctaggaaacaaaannnnnnnnnnctatttaataatacaccacactgaaattatttgccaatgaatcccaaagatttggtacaaatagtacaattcgtatttgctttcctctttcctttcttcagacaaacaccaaataaaatgcaggtgaaagagatgaaccacgactagaggctgacttagaaatttatgctgactcgatct

SEQ ID NO: 167200 - DNA, 442 bp, Homo Sapiens
  misc_feature (24)..(24): n is a, c, g, or t
  misc_feature (31)..(31): n is a, c, g, or t
  misc_feature (49)..(49): n is a, c, g, or t
  misc_feature (65)..(65): n is a, c, g, or t
  misc_feature (67)..(76): n is a, c, g, or t
  misc_feature (128)..(128): n is a, c, g, or t
  misc_feature (302)..(302): n is a, c, g, or t
  misc_feature (322)..(322): n is a, c, g, or t
  misc_feature (343)..(343): n is a, c, g, or t
cctattgtccccaaaccttggggnatccatnggcaaataatttcagtgnggtgtattattaaatngnnnnnnnnnnttttgttcccctaggttgaaggtcctaattgatacgtttgaccttatgatgncccatttatgcactttcaaatgaatttgctttcaaaataaatgaagagcagctgtccttctttcctcttttaagtgttcagctgtggcatgctcagaggttcctgctggattccagctggagcggtgtgatacccttctttttcagctgttcgtgccttcctttcttgtatccnccaaagtggagacaaatacntgatctcaaagatacacagtncctacttaattccagctgatgggagcccaaagaatttgcaagtggatggtttggtatcactgtaaataaaaagagggcctgggaattcttgcgattcca

SEQ ID NO: 167201 - DNA, 748 bp, Homo Sapiens
gcctcagatagcaatggtcggacaggacacttcagtgtgggaagcagcatccggtgaggctgtgctctggcacagggggatcctgaatctccccatctcttctaagctgacctgtccacacattctgagggattaagcttagagcacctaagaacagcagcctcccccaggagaggccagggaccaaagtggcaggaatcctagacaactctcgcgctttttctgtcactaaccagctgggtgactctaaacatgtcacctcccctctggcctcaactttctcatcgacaaaacgaaggagagtagactgtgctttcagctcaagacagaaaacgtatcttagccctcttctggtaccaatccttccatcctccatctctaaaggtgaaatgttccagaggtttcaataaatttacagaacagcattgcttgtaaggctgaaactagaagaagcccagaggaaatatgccgaaataagtaaaggtttgataatgagacccacgagaaataatgaaaattgctgagactttttttaacgccagtaaactaagggatgaaggtcaaatcagaaacactctttaaacaggtgtgagttgattaaagggatgatggtgaccagctgttcccaacttccccagtgctgagtgaaagaatacttgtagcgagagagaaattgttgtgaaacagaagttctgaaacaggaagaaatatggacacaatgtcacctgcctcttgcaggctctaggag

SEQ ID NO: 167202 - DNA, 420 bp, Homo Sapiens
tttttacctgacctaaagaaaagctatgctttctcctccagagtaaattagcagcttcatttctggcagaaattatgttagcaacaatagagggtctaaaaataaatagatatagagtgaacaatatcaaagtatcaatagaattctaagtaaaatgttattcacaagtaagataaagatatataaatgttactataccttcccgcaaacatagtttctgcctgagctgcaatttcatctatatcaggaacaatagctgatggtagtaaagtgtctggagatccactggcagatgtctccgcattgtcattgtcctctccgaactccttctcatatattgacagcatatatgagatcctataatccagtctgacactcaggataaactgcaaaatctcaatcctctccaaacgcgattgt

SEQ ID NO: 167203 - DNA, 1133 bp, Homo Sapiens
atatctgaaggttgttcagaatccaagaaaaggtcatcagaagatgaaaatgaaaataaaatagagtttaggaagaaaggaggatttgaagggggaggattccttggaagaaagaaagttccctatctggcatcatcaccaagtacttccgatggaggaactgactcacctggtactgcgtccccatctcctacaaagactactccatctcctcggcataaaaaaagtgattcttcaggtcaggagtacagcttgtgaaaactcaccaaaatgaatagttgtttcgttacatttagatgaaagttaaactttactgaatttcagtacattagtttttacactaaaactttacaagataaaattggacttcatttagtatctttttaacagaattacttggaataatgagatacaataatcatatctcttctgacattttggaaatttttgtaattttacaagtacatttaacagatcatttataaagcaggagtccattttaacacttaccgactttttttggtttggaaacatattaccacgtcttaataggatggtgcccatataggtgagcatccctttagatcatgggaaccagcagactgcattcctaatcttcattatgcctgagacttgtcttacaatgttacctttaagtgaatcacataattgtctttggaacttggtctcccaacacttattgtgattgcaaagtggttaccagatatttgatgaggtgctatgtttgtgaaaaacatatcatgtaattcaaaaacactattgatattgaataccagataccactatgtagtaagccttttacgatgatttttaatttagtcgtgcgtacattttctgattctcatccattggggagatcttaaatcttagcaagcattagcaatattaaatgccaaaattccattgaaactttcaagttggagcaattgtctgtgtttgaaaagatgaaataaaaataataatcaagggcaaagctttgagtgcccagaagggaaagctgtaccagttgaaaacctgtcttgtttcaggagcggcacatgcgttgggagcggcacaggcgttgggggctcaactagagtcggcctctactgtacgtagctaaaatcaaacaa

SEQ ID NO: 167204 - DNA, 367 bp, Homo Sapiens
ccaaatggaatccccaaatggaatccccaaatggaatccccaaatggaatcctcaattaaatcattatcaggttatttcctaatgtaagaatagctaaaatgttgcagagaaataagtgacccaacaaaatttattcatctgttatgggtaagatctgccataaattcttcctaaataatttgtttactaactctttaggccactgtgctttgcggtccattagtaaacttgtgttgctaagtgctaaacagaatactgctattttgagagagtcaagactctttcttaagggccaagaaagcaacttgagccttgggctaatctggctgagtagtcagttataaaagcataattgctttatatttt

SEQ ID NO: 167205 - DNA, 800 bp, Homo Sapiens
tgactctttcaaatgcaaaaaacctattttatgctttgttaaaattatggtgtcacttagattgactttagttgactgcactatataatatagaactatgaatatgtagaataacatgaaaaatgtggaggtgctggtggtatggctgaccctgtttcagaagcaggatagtataaaagcatcagcctaagaatggcactcccactaactagctatgtaatcttgacctctttgggctttagttcctctcataaaaggaagagatgtattggattagactagatgatcaccactttctcttctagttctaatttttttaattctaatacctatattttcaagttatgtcaattaaatcattatcaggttatttcctaatgtaagaatagctaaaatgttgcagagaaataagtgacccaacaaaatttattcatctgttatgggtaagatctgccataaattcttcctaaataatttgtttactaactctttaggccactgtgctttgcggtccattagtaaacttgtgttgctaagtgctaaacagaatactgctattttgagagagtcaagactctttcttaagggccaagaaagcaacttgagccttgggctaatctggctgagtagtcagttataaaagcataattgctttatatttttggatcattttttactgggggcggacttggggggggtttgcataccaagataacttatatatccaactttctgaaatgaaatggtttttagattacttttttccactggaaaataatgtacattttaatgtccccaag

SEQ ID NO: 167206 - DNA, 723 bp, Homo Sapiens
  misc_feature (567)..(567): n is a, c, g, or t
  misc_feature (612)..(612): n is a, c, g, or t
  misc_feature (621)..(621): n is a, c, g, or t
  misc_feature (689)..(689): n is a, c, g, or t
  misc_feature (700)..(700): n is a, c, g, or t
gaccctaactatagtccaggctatatctcaatagttacttagataggatcttcatttggaggtcatcaacaggtagaatttagttaaactcgttatctgttgactatgatttagtaagttgaaagaaaatttttgttaagctttttggtaattacggagctgcttgctcagcagatcaggggaggcccataaatatggcaatatttgctctttttctcagtgagcaaagagttgctctcttaccactactctgctttgaaattcctaagagcttttattgcatttgaattggtctgaaattctcagcccggtcaaggcttctccagagttatctaaccaaagactaagcacctttctcaagtcacactaccatggttccttcactgtttctaccagttttctattataaaagttttacctttcttcagaagtcttaatcctactccattcttctcacgcttactttggatctttaaaatttggggggggaatatgaaaacttaataccaatcaagcatttttcacccacgttgattcttctaggagcttgacctggatagtggttgnatgatggcacacgtctctgcaaatgcttggttgaagattggctgngctgcattntgggataattgggaggggacatattgcccttatctcaggaaacatttggaggaagaggacgagaaagnttgattttgcntctttaattgggaagaaaaggaa

SEQ ID NO: 167207 - DNA, 198 bp, Homo Sapiens
atccccaaatggaatcccatatttaagtgtctgttcccttccacgcttcttttcattttgataaaaatacagtatttcgtttctatttgtaaatgttcagtatttattcaacaaacaggagtgttgtatttcaggcactgtgccagtgcttgagttaaaacaaagggcaggctcttaacacctgcctgacaggggctt

SEQ ID NO: 167208 - DNA, 197 bp, Homo Sapiens
aagcaccatagagcaaaattaaaacctttcatcaattttctgctatatccattggatatcaactaataactttactccactagttgtagaaactatgcttttctccctttaattggccaatgtctacaaagaaattagccgattttattatacatttttttcacttgacataattctgtaacaacccttaatttaat

SEQ ID NO: 167209 - DNA, 330 bp, Homo Sapiens
  misc_feature (199)..(272): n is a, c, g, or t
tgattgacagcacgccccacacccccaggttttttgtagccagtgctatctggtcaaagggtcagtgggcctcttatggccagggcttcctcccggggtgatgggtctgctctgtgccagaaacagaggacacagcgcctccacagcactgcttccccactcatcctaccctaaggagcgcctcatctgccatcattcnnnnnnnnnnnnnnnnnnnnnnnnnnnnnnnnnnnnnnnnnnnnnnnnnnnnnnnnnnnnnnnnnnnnnnnnnnagaagtgtacaaggcaagattctccctcccccagctatggatttatattccgtacagg

SEQ ID NO: 167210 - DNA, 366 bp, Homo Sapiens
ccttatgaatctggaatcccgaaaaatttacgaccacttctctgctactttatacagcaggattcatcagatgacattttgctgtgaaaccattcagtgttctctggactaagatttcaccccagaggttaagtgctttaactagatatggagctcccatcaattccctccctggccctgcaagcacatatccccatccctgaaggtccatgcacagagattctccttgttcacataaggctttattttctactgtcttagaagcattccttagctatgcaccttcctacggtttgattctgactccagtaattccctaattatagagacagattttctgtcttgttattctaacacggattccat

SEQ ID NO: 167211 - DNA, 343 bp, Homo Sapiens
agtgatgcatgtgggggttggtgctgggtggaggggaagatgcagtaggccaagaaaagcctctaccttccaatcttttcctttggggctgacaggtacgtttcaagggaaattgaatctgcacatttcagcttcatttgcacttaacacatctggctggcagtgggcaggaggcttttgatgtctgcgtttcggtgcccaagcctttttaagcctcttttctttgaagccagggagacttgtgtttctgccaaggagtaaacagacttgtacaccctccagcaatttagtctttggagacctggctcccaaaggccctgggggctggagggggtaccgagct

SEQ ID NO: 167212 - DNA, 326 bp, Homo Sapiens
ctaaatggctgtttgagaagtaacatctttactttctaagagtccaaaaattagcaaacaggtacatgttcaaaggtaaatgctaagaaattgggtaatccactctaacagagaacagagattgtatctattaatctatagaaggaattgcgtaactcattattttgggaataatgcttgtctttacatggattatgtctatcaatctgtagaaggaattgcataattcattattttaggaataatgcttgtctttacatggggcaagtaagaggttaatcattagtgtggattcttcttaaaaggaaattagaaatcatctacat

SEQ ID NO: 167213 - DNA, 127 bp, Homo Sapiens
cttccgggcggcataaagctttttgcagtgttttataccctcggcaatcttgctgcgttagccagtacatgctttttaatgggacctgtgaagcaactgaagaaaatgtttgaagggtaccgagctc

SEQ ID NO: 167214 - DNA, 287 bp, Homo Sapiens
agaaaatgaaaaccacctcttggttgttccagagtcacggttcgaccgagattccggagagagtgaagaagcagaggaagaagtgggtgagggaacgccgcagagcagcgccctgacagagggcgactatgtgcccgactcccctgccctgtcgcccatcgagctcaagcaggagctgcccaagtaccagccggccctgcagggctgccggagcgtcgaggagttccagtgcctgaacaggatcgaggagggcacctatgagcggtgacaatcatatggatcctcta

SEQ ID NO: 167215 - DNA, 455 bp, Homo Sapiens
cttgaaggaaagagggaacatcccagctactgaacctcaggagccccacagggcctgaaaatggggagaggaaatacatgttgacttggaggaagcacttggatatatctttggttgcttcagggaaagctttggccccttaaaattacttttttcctcccttttctccccctacgggtctgttggggttggcatcaaagaaggcaggtaggaaggaaagaaaaagaaggtgggcagcaggcagaaagagttaatcggaccagtcgtcctcatcaaattcagaggagtcatcttctgagtcactgtactcaacagcaatgcgacgagacaagatggtggccacgtcattgcccacaacatcccgcttctcttgttcccgctgctcctcaaccctgcgcagctgaaaaccttgacggatggctgaaagcaggtcgctacatgcatcagggtaccga

SEQ ID NO: 167216 - DNA, 523 bp, Homo Sapiens
ttgtgggtgatctagaggatccctcttctccgaaaggcaacatgtatttcctctccccattttcaggccctgtggggctcctgaggttcagtagctgggatgttccctctttccttcaagtgcctgttgcatattgaaaggaaggagaaatcccaaagcagattcctttgatcgggtttctgttggagatggggcttcccttaggagccatattcaactacagccttctaaaacctgtgccctcagccacttcgaatgccagccaccttctggttctaaaacggggagtggtctgaatgaacacagctgacccctttcccgcgcactgaaagggcagagtaggccgaagggtccaagggccagactgcctcaccctctgccctaatcagcagggtgggcctgccttttgctaagcgatctctatgcctgggatgccctttattccaggaggcatcaagcctctaaagaatgtctcacctcctctgcccaaaaatgttgcctttcggagaagagggtccgagct

SEQ ID NO: 167217 - DNA, 478 bp, Homo Sapiens
cactgagaaatgttgttcacattaatgagtagatagaatgaattttattccacgccattcaaattctctgaactccttttgagttatatgatagaatgtaacagtgaaccatcaaaaaaatttaacaatcagtcaacatctacataaagtcctctaaattttgttgaaagcaagtaattgtacttgtggaaagaactgactgtgcctgagtcattcgtgttctcaatccagtatctcatagtgtccctttatgatatcaaacattttgtaccatggtaatattgcatacaagtgagaagtatgctgttctgtaaaatgggaggttgactataacggagaattacagaaaaaataatgtgtacttctatcacaggttacattctcagatcagctgaaggaaagagtgtatatggaatttaaagatatcgaaatggattcctttaaaaccatccatgtctatgaatatcatgtaaagcct

SEQ ID NO: 167218 - DNA, 210 bp, Homo Sapiens
ggactagtcgacggggattgaatctgtgaatacctgcttaattctagtgctgcgtagagaaaatattgtaggagatgcagaatgtctcctctctttttctcccagtgattgaatctgtgaacccctgcttaattctagtggtgcgtagagaaaatattgtaggagatgcagaacgtctcctctctttttctcccagtgagtgaatctgtg

SEQ ID NO: 167219 - DNA, 739 bp, Homo Sapiens
  misc_feature (562)..(571): n is a, c, g, or t
gtgtcgacggggatacaggcgtgatgcatcactcccagcctcgttaatcaagtttagttacagcaaccatatctgtaacttgaacatcgtagaactgaaacacttttggggaaaatggcttttttgctgggtcattttgcggtacaagcttattgatgtggccagtgcctccacatttgaccttgtctgggactaaaagatgtcaagcatcctctgcttgtggctagtccaggtcttaaaggagatcaagtttcaagacccttatggaagttttcctggcagtgccataaaggaataactttcttgaaagcccacctaaatatttctacttacttgtcattggttaccctatctgtaaggggagtctaaaaaaaagttttttagcagagtgtgtcactgcctccaacaatatgggtcatctattacaaaggaagaagagattgataatgttcaattgtatctgccacatttactttctgactgttcccttttcatagtattttgcttttttatgattgcaatatattgttttagctccctgaggatattataatattatagnnnnnnnnnncttcctgaattgcctctgtttcttccaagttcctttaattttcccttttggcttcggtctcttttaagttggaaacttcttttaaacttcgtggtagatccttggccaactgctttctggattctcaaccaatctctatatctagccatgttccttactacctttccc

SEQ ID NO: 167220 - DNA, 694 bp, Homo Sapiens
  misc_feature (54)..(121): n is a, c, g, or t
  misc_feature (157)..(262): n is a, c, g, or t
ccacccaaatctaaattcataatctagatctttctccttcactgtactggcagnnnnnnnnnnnnnnnnnnnnnnnnnnnnnnnnnnnnnnnnnnnnnnnnnnnnnnnnnnnnnnnnnnnncagaactttactacctatggaatcttggtgatgatnnnnnnnnnnnnnnnnnnnnnnnnnnnnnnnnnnnnnnnnnnnnnnnnnnnnnnnnnnnnnnnnnnnnnnnnnnnnnnnnnnnnnnnnnnnnnnnnnnnnnnnnnncggcctcgcacataatttgccctgagtaagcattagctggctgagcaccaaccccactaggttcaccacctgggtatctcatgcttacttcagactttcattatgtttaaaactgaactcgttttcaaacctactcttccttttaaatcccctatcctaggtaatggccctcaccacagtcacctaaattgccaagccagttctgtaacttttctccctttctctcaaattctatcttactggaccctgaagttgtacctaactgccattgtaatttgcatgtatatgctcttctctttctccatggctgctgtcttggttcacatgtgtgtcgtcttcacccacactatgccagtagtctgactgggtctttttgcctccctactcacccctgcacactgctgtattcactggaaaagcaaatctcatcat

SEQ ID NO: 167221 - DNA, 485 bp, Homo Sapiens
acggggatttcaccgattggtcgaccggggattctgttaataactgctctgccgcttgagaccagcatggtctggctcactgtttgcagaaaatcattctcagtctcccaaacaagtgaaaggatacttccaaagacagacagagggacggtagaatcagaaatacagatggcgccatcttcccaaagtccatactgtagccccacaaaaccaacttcatgcttaaatctgctgctcagacacactttggggagaaagcagtttttccaggagtgagctggagacagcacttccatgggagggaggtcaaatccaagactacccgctatttccagccatattcactatggatgaagaagggatggctctacccatgaccgtgcaaagcttccttgggaaccctgctgtccctaccacatgcaacctgtccaagatgcaagcctcagttcaccatgaaaagccactgggcctgccaatcccggtcg

SEQ ID NO: 167222 - DNA, 424 bp, Homo Sapiens
tgctgaggtcactccagaggatcccggtcgacggggatacaggcgtgagctaccacgctcagccaatatacagatttttctatttatcaacttttattgatcaattttagtcattctctattaacttcctgctatttataccacccgaatgcctttcccatgcctccaatatagccatgtcactaattatatatcctctattccttatctttctacctttaactaatagacttactctccctttcctctcttttaacttgtcaactgcacttttataattaacaaggttaaatatttacacttggttctataaccataattaagtcatccatactttgccagaaggtcatttctaaaagtttaagggcaataaagtgtttacatgattatgatcatgtaaatatagttccagaaagatccaatc

SEQ ID NO: 167223 - DNA, 423 bp, Homo Sapiens
cttgaggatccggtcgacggggatttgaagccaggctcagagcccaggatttgaccagtgtctctgtgcccactcaagggaggaagagtatcctgagtaagcagggaagctgcatgtggatccacggggaagttgctctgccctcacatcagctcctcatgtgtacagctccagatgggtgggtgttgtcggagaattgctcataggaagctacagttccttctccacagtctccccttctagatgctagatcttatccagatgacaggcttcctaaaaaccaaccactgagtgagtgctttctgtccgagctggaagtctcttgcacctaggcttaggacttctatgaatgtaggagaatcttgactctcatttcttcccaatttgtagctgaaccgggtgaatggcacgttcatcaccaca

SEQ ID NO: 167224 - DNA, 845 bp, Homo Sapiens
  misc_feature (474)..(534): n is a, c, g, or t
  misc_feature (577)..(711): n is a, c, g, or t
  misc_feature (721)..(736): n is a, c, g, or t
tcgaccggggattgaggaagaattacagtttgatttatctctcgtcattgaagaacagtcagagggaattgttaagaagcataaacccgaaataaaaggaaacatgagtggaaatttcacctatatcattgacaagttaattccaaacacgaactactgtgtatctgtttatttagagcacagtgatgagcaagcagtaataaagtctccctgtaaaatgcaccctccttccacctggccaggaatcagaatcagcagaatctgccaaaataggaggaataattactgtgtttttgatagcattggtcttgacaagcaccatagtgacactgaaatggattggttatatatgcttaagaaatagcctccccaaagtcttgaggcaaggtctcgctaagggctggaatgcagtggctattcacaggtgcagtcataatgcactacagtctgaaactcctgagctcaaacagtcgnnnnnnnnnnnnnnnnnnnnnnnnnnnnnnnnnnnnnnnnnnnnnnnnnnnnnnnnnnnnnaagttttattatgtagaaaataaagagcaaacagtacagctgnnnnnnnnnnnnnnnnnnnnnnnnnnnnnnnnnnnnnnnnnnnnnnnnnnnnnnnnnnnnnnnnnnnnnnnnnnnnnnnnnnnnnnnnnnnnnnnnnnnnnnnnnnnnnnnnnnnnnnnnnnnnnnnnnnnnnnncccttggcgnnnnnnnnnnnnnnnnaaaaattttttaaaacctttttttgggggcccggcccccaaaggaaaagaaaaatggccaaatttttttccaaaaaaacccggggcaggaaaagggtttggatcccccc

SEQ ID NO: 167225 - DNA, 558 bp, Homo Sapiens
ccggccaaggatgagaccatccccaatcccaaagctaagaagagggagctcagaggagagttagctggaggaacttcgtatttggggattagcatcatcttcagatcatctggctcctgagagaggcttctctgtcttaaaatatatctgttggaacaaaaattaatttgggtcaaactaaatttagagctattacgatgaagaattggggagggcaatacttaggcaataaagaacaaggtggcggagggaggcctgaataataacgatgaaagagagctgaatcagccaatatcctgatataaatgaaatatcctaccgaatacatcccaggacggagggagtggaaaaaaacacagatttaaagcctctgcagtgagaatcttttacagaggtccagcccccacaaagaattctagacaacagacttaaaacacaatggtcacttgagaagcagagacgtgtcaaagccaagaggtgtcagatatacacttgagatatctatcttagggatgagagaaacctgtacttctaagggttccaaccaaatcccggcga

SEQ ID NO: 167226 - DNA, 534 bp, Homo Sapiens
  misc_feature (302)..(333): n is a, c, g, or t
ggcatagagactcagggaagtatattagcttgcttgaaagatgctgatccatatcagccaagcaagggaaagatggaagtggagtcattttgcctttgaaggctgaggaaagattgatacccagttaattttgtttgctaaaggatgggggcaataatcggcccttgaggagctgcagcagtaggcatgtgctcagtctgcaggaattgttacctcactcccacagagtctagactagaaatccatcatctctatcgttgatatccttccatccaggaatagatttttcttactctacatannnnnnnnnnnnnnnnnnnnnnnnnnnnnnnnggcatggggttgtgtcctggttgtgatattgaggtcttccttcctaacaaattaatactaaaatgaaacagcttttcttgtgtccttaagacaaaataaggaaggaaaacgtagctgcagttgtccacgatggatattggttctttaaaatatatctgaaagtagtagtcagaatgaattatggttggaaaagtgaggaat

SEQ ID NO: 167227 - DNA, 1203 bp, Homo Sapiens
  misc_feature (673)..(682): n is a, c, g, or t
  misc_feature (1179)..(1179): n is a, c, g, or t
acagtgacgcaattgagacgctgctcacagccattgcggttatcaaacagtcccgggttgccaatgtatgagcgttgccgtgtcctcatctcctctcttaaggactgtcttcatggcatcgaagccaagtcctacagtgtgggtgccagtgggagctcttccaggaaaagacatcgctcccgggaaaggtcacctagccggtcccgggagagcagcaggaggcaccgggatctgcttcataatgaagatcggcatgatgattatttccaagaaaggaaccgggagcatgagagacaccgggatagagaacgggaccggcaccactgagaaaggagtctggttggaagcaaatgtttttttaatggacttgcatctcctcaccttgatcaggactaaaggacggaggccgccccacccccttccctttcctccaaacccctaactccctccagacacccaggggaatacccctctgccccacaggaatgaaagactgctttgtgcagtcctcccaatcccacaccctccttgttttgccagggggaaagaaaccatatatgacttccgtgtggattgccgagggtggtgcacataaccagggaatgaaaaacacatgttccaggggcccccatggggtctgccaatagaaaaaatgggtggccttttggtcccnnnnnnnnnnccgaaatggggggtttccgtggaaatccacccgggggaaggcccggtttccgaatggggctaataggacttgaaatagggggaagggagattttccccctttcccccgaagagggtaaggaattaaaaacttctcttcccacatgtggccgggggaatgccttaaggggaaaaaagcggcgacctgcgaacccggtttgccccaataagattagttggcccccggggggggttcacgtgtgcccccttcacagggaagggggaggaatttccaaaggggcagaggcacccaaagaaggggagacccacaaaaaacccccttttggcccctaacccataaacacacccccttcccttctctggagattgacaccacacccttgtgtctacgcctatttacccagagggccccctttatttgggagagagcagaggggcacgccactggagaattataccccggagagaatcttataccgtgtttgtgggaaaaaaagncgttaaccttatcgcgggcttccc

SEQ ID NO: 167228 - DNA, 596 bp, Homo Sapiens
cgtcattttgtccaaagggataactgagaaaataatttagtaataggtaagacttccatgggaaagaagaaataaaaaagaaaatgttatctctgctatcacaaaactaagtagaaactatttatctatatgaataagaaggctagaaggaaagcatataaaaacattgtgccagggcagtggctttatttttatttcttttgctagtatggtatcatgtttgagcaattcaaaaagtttttacacaaactcagtatgtcagaaagacattaatatggcagagaaacaccatttaaagttagtacatacctttattaaaactttgcattgatatagtctgaatcttgtgaaggagtctttaatgtcaagtttacactacggctgtgatcaactacgcagaaaaaaattcataaaatatgtatggttgacacacaggtattttctaatgaagcgtaagtaaggttaaatagacagcttaagaacatttattttaaaaaacaatggatgaaaatggactctaggtaccagcagggtaatttctaacattaaactgaaaggaaatgaaataaattttcagacactgccctttctggtgg

SEQ ID NO: 167229 - DNA, 185 bp, Homo Sapiens
tcgaccggggattggctgactctctgttagggagtataggaattgtagcacagatgaagccagactacgtgatttaatgagaatgaaacaaatgactagcccagctggacatcgtggctcacatcggtaatccctgtgctttgggagccatggcaggaagatcgatggaggccaggatttggaga

SEQ ID NO: 167230 - DNA, 354 bp, Homo Sapiens
attatacgctgagcgtatggtgcctttcagaataatggcattggagtcgaagcaggacacatcttcaatgaccacaaactccgtacctagttacattgaccttgacctccaggtgcctttccattggacacaggaagggaagaccgcttggtaactactccactcttcacagttttgggaactatagcagattcgctgctagagttacggtggcgagaaggagtaacatgattttgtttcttaatatcactgggagtgtggagaaaatcatggactaacagtcagccagtcaaatatgagaaacacacggagattgttgagaactactgtaaagcaggaggaatccccggtcga

SEQ ID NO: 167231 - DNA, 271 bp, Homo Sapiens
tacccctcggggatttcaatagatagttaaattgggaaacagtttaaaatatgggctgagatctgaggagagcaaaatcacttggtgactcatctgaactaggctcctagagacaaaaattccttatctgaggaattgcagaaggagcataaataccacctcgatgactatccaaacaggcaatctagaagcaaatgtccttatctggggaaaatgcagaagtaattaaacttcccagcgtgcgcagtgctcacgcctgtatccccggtcg

SEQ ID NO: 167232 - DNA, 517 bp, Homo Sapiens
tacctaaatgcctgtccatctgtcctatttgttattcatcccgctgctcaacttctccagtatgttgcttcccttaagttgccattcattctcttcatgacttttactaactcacttcggtctctgtctgttcaactaaaactttttctaaaggttacccagttatccaatcatcaaatccatggctttttctcaaagcttagtcttgtccttggcagaactggacactattgaccatccaaaatggaaattcccctttcttggtgtctctgacaaatggtcctttgccttatcttgtgctggtggtgaagaggccctcaaagccaggcctctctattcctttgactgtctcctcagccattaacccattcttcatcctcggagtgagtgattcccaagtctttgtcttggcttaatccctaaagaacccagttctgctggtatcgaatagttcagcttggttgtcattgaaagggatttctctcttctgtccatcagcctgtccctcccaactgtc

SEQ ID NO: 167233 - DNA, 834 bp, Homo Sapiens
tattttcctaagggagaccagaagacatcagatcctgctgccctgtttttgctcaagttctgaaatgagtggcatgataaagagctggtggagctgagggaaagagtcaaaccatgtggggtggggttactgaggaaggtgtatgaggaaacaaactgggccctgacgaaacaggcggattggggaaggagaaagaaggaagggagagaaacctaaccaaagaaacatgggaagctggaaagtcgagggcacagccggaataaaggcacagatgggcaccccacaggaggggccttggccaggttgggatgcagagaaaaacaggcaggagggtgtcaatctatagcatcctgaaccccaaaaggtctgtaactggattctctaagccttgagaagttcacaccaaagcttcagaccagggaaaatattttggaaagatcagtctttccaagagtgagctcctttccaagaagctggacaggaaacccaataaatgtggatctgaaaaaacaaaatccaagagagaagcaaaatgggctgggggtgtgcaataagagaagcaaggaaaatggaaagactgtagctgaggatcttttattacaaaaaaaatggatgggactttggtgatgagagagaaaaagggcaaagtctgcagttaggaatttaggtgaccgaagactgtcctagacagttgggagggacaggctgatggacagaagagagaaattcctttcaatgacaccaagctgaactattcgataccagcagaactgggttctttagggattaagccaagacaagacttgggaatcactcactccgaggatgaagaat

SEQ ID NO: 167234 - DNA, 468 bp, Homo Sapiens
tcgaccggggattagatcggtgctaggtcagggaggatctgtaaaaaactatatttgccaaactatgtacacataggcacacatgggaattattttactttcaacaagttctgaaagtagtaacaaaaccagggagagttaaaagaataatttaacactgatgtttcaggaatgctaaaggagaccaggcatttagacttcatgttgctaagtgtgttcatctcaaatctaaaagccactttcataacaacaactttgcctattccttagcattttgtctctttaggcagcttatttcccagtcaaagttataattttgtattcataataccataatcatttccatggtaacttcctgtgaagtcacagagaaaacactattgacttctcctgaggctctgatttcacagttgaaatcatatgttgattttattttttccaatgtaagtcaaagatgtatacttaaaa

SEQ ID NO: 167235 - DNA, 330 bp, Homo Sapiens
  misc_feature (279)..(288): n is a, c, g, or t
tgagcagtaacaaagagtattctaagagcccacaaatctcagatccaggtggcttccagttaatgagaagcttacaatgaagaatgtttctgttctaaagaagatatactgagatgagaattatgatctttatcagagatcatacctccagactgatatagccctagagctctcctcacaaaatgccctaaccttcaagagatgctttttccggctgggcactatatacaagactaacaggtctctccatatcagagcagtcaactcaattccttattnnnnnnnnnngaagaagaagaagaccagtactgactaggcctgtatccccgg

SEQ ID NO: 167236 - DNA, 448 bp, Homo Sapiens
cctctttcttcaacagtggtgttcagaaacccagacctggacactgccatatggcattgcttttaggccctctcagtcagcagagcaggaggagtgggggtgtgagcatgtgcacacgagcgcctgccacctacacacactaattgctatgtacaagccgtgagttcccacagatatcccagccccactcctgtgctacagtgagcgttctcccttccccgtccacctttgtaactccttagacagtaagaacctggaccccatcatccatggtgcctttactgacttgctgagtcctacaacacaggtaaagggttcagaagtccctgcccttacccgatggaaactccgggcatgctttcggtatttgttcagttctttttgtctttagcctcagggtgtggtgatacactgaatctacaaatgactgaaattagttaaaatcacc

SEQ ID NO: 167237 - DNA, 212 bp, Homo Sapiens
gagcgacggggatttcaattcagagaggtacccgttaaaatactgtactcctacgtgacttctggaggtcttcagtgaattacaaatccttttgcatatagcatctaaactggaatgtggtacagcaaattcacaatagtgccctgggtttaattttttaaaggaaacacagcaatagtcaatgtgacactagagtgaacacaatgatagtt

SEQ ID NO: 167238 - DNA, 756 bp, Homo Sapiens
  misc_feature (348)..(405): n is a, c, g, or t
gagctcggtacccctaggataccccattatgtgatggatggtgcttttcagtttagctacggcaatcctgaacttcctgaagatgtcccttgatgtgcagctggcattccttcgacttctctccaaccgagcttcccaagaacatcacatatcactgccaaaatagccttgcatacatggatcaggcccagtggaaatgtaaagaaggccctgaagctgatggggtcaaaatgaaggtgaattcaaggctgaaggaaatagccaattcacctacacagttccggaggatggttgcacgaaacacactgatgggatcttctcccatcaggctaatcagaagcaatatcnnnnnnnnnnnnnnnnnnnnnnnnnnnnnnnnnnnnnnnnnnnnnnnnnnnnnnnnnntagaaagatgagtgctttacacctagtatggctaagtgttatttcatgaaacttttcagttgtctgtttatataagtctgtatttatgtaaatccatccatgcacatacacaggtcacccatttgcatgtatcccgtaggtcctggggccctgtgtagaaagcaggtctcatcgtggatcacagtcaagcaaacgttgaaagctgcagctcaggaggctcctcacgccccctgctatgccatctttgtcactacttccttcagccacttgggattctgcttccctttctctaacttccagatgcatctttcttcccttaaagccagtcatgcattccagactggtagtgcc

SEQ ID NO: 167239 - DNA, 556 bp, Homo Sapiens
gctccaacaccaccacagcaagaaccaggggcaccaggaggtccaggaggacctggttgtcctgggtggcctggggagccaggccctcctggaccacctggtgctgctggtactcctggtctgcaaggaatgcctggagaaagaggaggtcttggaagtcctggtccaaagggtgacaagggtgaaccaggcgggccaggtgctgatggtgtcccagggaaagatggcccaaggggtcctactggtcctattggtcctcctggcccagctggccagcctggagataagggtgaaggtggtgcccccggacttccaggtatagctggacctcgtggtagccctggtgagagaggtgaaactggccctccaggacctgctggtttccctggtgctcctggacagaatggtgaacctggtggtaaaggagaaagaggggctccgggtgagaaaggtgaaggaggccctcctggagttgcaggaccccatggaggttctggacctgctggtcctcctgttcccaaggtgtcaaagtgaacgtgcagtactggtggacctg

SEQ ID NO: 167240 - DNA, 453 bp, Homo Sapiens
taagaatggagaacgaggtggccctggaggacctggccctcagggtcctcctggaaagaatggtgaaactggacctcagggacccccagggcctactgggcctggtggtgacaaaggagacacaggaccccctgatccacaaggattacaaggcttgcctggtacaggtggtcctccaggagaaaatggaaaacctggggaaccaggcccaaagggtgatgccggtgcacctgggccacctggtgctgctggtactcctggtctgcaaggaatgcctggagaaagaggaggtcttggaagtcctggtccaaagggtgacaagggtgaaccaggcggtccaggtgctgatggtgtcccagggaaagatggcccaaggggtcctactggtcctattggtcctcttggccagctggccagcctggagataagggtgaaggtggtgcccccggactt

SEQ ID NO: 167241 - DNA, 2229 bp, Homo Sapiens
  misc_feature (23)..(23): n is a, c, g, or t
  misc_feature (34)..(34): n is a, c, g, or t
  misc_feature (36)..(36): n is a, c, g, or t
  misc_feature (54)..(54): n is a, c, g, or t
  misc_feature (73)..(73): n is a, c, g, or t
  misc_feature (88)..(88): n is a, c, g, or t
  misc_feature (95)..(95): n is a, c, g, or t
  misc_feature (125)..(125): n is a, c, g, or t
  misc_feature (150)..(150): n is a, c, g, or t
  misc_feature (179)..(179): n is a, c, g, or t
  misc_feature (212)..(212): n is a, c, g, or t
  misc_feature (240)..(240): n is a, c, g, or t
ccttcgggtccaagttgaaaaanagtggtcccanangaaaaaagtggcccttgntggccctgttggtgctccnggttcctgctgggtncccaagntgcttcctggtcctcaaaggccccagtggntacaaaggtaaccaggttaacgtgnactgctggcatcaaaggacatcgaagatnccctggtaatccaggtgccccaggttctccagnccctgctggtcagcagggtgcaatcggncagtccaggacctgcaggccccagaggacctgttggacccaagtggacctcctggcaaagatggaaccagtggacatcccaggtcccattggaccacccagggcctcgaggtaacagaggtgaaagaggatctgagggctccccaggccacccagggcaaccaggccctcctggacctcctggtgcccctggtccttgctgtggtggtgttggagccgctgccattgctgggattggaggtgaaaaagctggcggttttgccccgtattatggagatgaaccaatggatttcaaaatcaacaccgatgagattatgacttcactcaagtctgttaatggacaaatagaaagcctcattagtcctgatggttctcgtaaaaaccccgctagaaactgcagagacctgaaattctgccatcctgaactcaagagtggagaatactgggttgaccctaaccaaggatgcaaattggatgctatcaaggtattctgtaatatggaaactggggaaacatgcataagtgccaatcctttgaatgttccacggaaacactggtggacagattctagtgctgagaagaaacacgtttggtttggagagtccatggatggtggttttcagtttagctacggcaatcctgaacttcctgaagatgtccttgatgtgcagctggcattccttcgacttctctccagccgagcttcccagaacatcacatatcactgcaaaaatagcattgcatacatggatcaggccagtggaaatgtaaagaaggccctgaagctgatggggtcaaatgaaggtgaattcaaggctgaaggaaatagcaaattcacctacacagttctggaggatggttgcacgaaacacactggggaatggagcaaaacagtctttgaatatcgaacacgcaaggctgtgagactacctattgtagatattgcaccctatgacattggtggtcctgatcaagaatttggtgtggacgttggccctgtttgctttttataaaccaaactctatctgaaatcccaacaaaaaaaatttaactccatatgtgttcctcttgttctaatcttgtcaaccagtgcaagtgaccgacaaaattccagttatttatttccaaaatgtttggaaacagtataatttgacaaagaaaaatgatacttctctttttttgctgttccaccaaatacaattcaaatgctttttgttttatttttttaccaattccaatttcaaaatgtctcaatggtgctataataaataaacttcaacactctttatgataacaacactgtgttatattctttgaatcctagcccatctgcagagcaatgactgtgctcaccagtaaaagataacctttctttctgaaatagtaaaatacgaaattagaaaagccctccctattttaactacctcaactggtcagaaacacagattgtattctatgagtcccagaagatgaaaaaaattttatacgttgataaaacttataaatttcattgattaatctcctggaagattggtttaaaaagaaaagtgtaatgcaagaatttaaagaaatatttttaaagccacaattattttaatattggatatcaactgcttgtaaaggtgctcctcttttttcttgtcattgctggtcaagattactaatatttgggaaggctttaaagacgcatgttatggtgctaatgtactttcacttttaaactctagatcagaattgttgacttgcattcagaacataaatgcacaaaatctgtacatgtctcccatcagaaagattcattggcatgccacaggggattctcctccttcatcctgtaaaggtcaacaataaaaaccaaattatggggctgcttttgtcacactagcatagagaatgtgttgaaatttaactttgtaagcttgtatgtggttgttgatcttttttttccttacagacacccataataaaatatcatattaaaattcaaaaa

SEQ ID NO: 167242 - DNA, 425 bp, Homo Sapiens
  misc_feature (106)..(167): n is a, c, g, or t
atgtcgcgtccggtaacggaggagacaatcatttcattattgctcgatgctcctacttagtgtatactagtagagatggtgttcaccctgttagccaggcaagttnnnnnnnnnnnnnnnnnnnnnnnnnnnnnnnnnnnnnnnnnnnnnnnnnnnnnnnnnnnnnntgagccactgctcatggctatgaattttcttataatcccatgaaaccatcatcagagtcacaataatgaatttatctaatctatcacctttgtattcacctggagcctttataaagtttttctctatgctcttcaaacaaccattgatttactctgctgtataatggagtactttccattttctagaatttactgactgatgtaataaagtgtttcctcttacgcccgcccgcattcacaaaacaccaacaaccctgt

SEQ ID NO: 167243 - DNA, 498 bp, Homo Sapiens
tcgaccggggattggagtataatctgccttccagcctgcttgactttgaaaatgatgtaagtgaatcaagctgcaaagtaactaggaaccttggcagctctgaacgtcagttttgtgcctccgatcctttgaaatcgctgaaagctctgatgacttctctgcctctgacagctgcccttgcttggcctgggttccactggactgttgccccacgcaccgtgttttctttgctgattttgctttgtaacactgtcactgtaataagtcataactgaattcaactgtgtgctgagtcctgtgagtcttcctagcaaatcactaaccctatggtggtcttgggacccctgataagcatgttcattctgaatttgctgtaaaggcttggttatcccagaggttctaatgttctaccgagaatgatcagagacagatggtattatgatccttttatggatgtgtgcacctgaggctgaaacgagagaaatttacatacgccgt

SEQ ID NO: 167244 - DNA, 277 bp, Homo Sapiens
tgacgcaaagcagtctatccagtggtggtgtgtgctcaggtcagaagagatcccagggcagaagctatcaggcttccttacgacagcctccataaatcccgaggacatcacttgcaccaacgtcagatcaagcaagcccagctcagcttcaaggaaaggaaatttctctcttagagaaggaatgcatgcatatcgatggtaggcaggaactgatggtggccaccagcaaccaagctcccatatgagcatgtcgactctgattacgcgtcctctagag

SEQ ID NO: 167245 - DNA, 428 bp, Homo Sapiens
ccgtctagaggatccgtgtcgacgggaattagacacaagtactctctacaaatggcagacaaccaagttgactgattcactgttagggcaatggcttccatgaaacactgaatcacaaaagcggaaatactctgaactcccaaccaagggagagaacacaggcatttggagaccaccacattctttatatacttttggaaatctaaagcatacacctattacttatacttctgaaggtatgtccagacacccagttaagcaactctaagtagaaaaatgaaatttaaaggtttttaaaaatttaaactattcttaagtttaaaccagccccaacttcataccgcacggccatacacataaaacatcaagtcttactattacgatctctacttcaagaactacttctaccagtatgactaccctacaaa

SEQ ID NO: 167246 - DNA, 310 bp, Homo Sapiens
tcgatctagaggatccgggtcgacggggcatttttaaataatgaaagataactcaggatgaactggaaaatcttccaaaaatctgacacaagagccaaaacagattaatgccatggcaaaaatgggaaaagttcccaaaaatctactataaaaaaggcaccagttccaagatggtttttcaaaaaacttttataagcctaaatttcttatattcttcaaatggttctagagcagagaaattataatagaattttaacattcactgagtatttaatatgtgccaggcactacgctaaacaatttatatgta

SEQ ID NO: 167247 - DNA, 177 bp, Homo Sapiens
catgtgatctagaggatccggacaatgctggtttacattactctgacaggatgtttttacacggcagagtggatgtggatgcttctgagaaatgaagttggggcttacccacccatcttgagagttcttaactgtgtgtgccaatatgcataggaatccccggtcgaccgggttacc

SEQ ID NO: 167248 - DNA, 353 bp, Homo Sapiens
atactgtgctacactcaggcatttgtatattttccttatagtataggtcacattctactattctaattattcctatagagagcttacattttctgtgtccctctttataaagtgcctcaggtctctatctcaggtttctctaggtctttctgaaaattcttattacttaactttatcctgggacattgcttatacataaacgtctgctaattctaaatgtcattacttaactccagaaattttccttagcttctcttctgaaataaatttcccattaaattaaactattttgtacagctaattctctcctttgtgattctatagaattcccatgatctgaagcacagtaaaaa

SEQ ID NO: 167249 - DNA, 205 bp, Homo Sapiens
atctagaggatccggtcgacgggataactgatgcttctattatgtagcgggggtgaaaaaattgaactaacatgcagttttactcagaaatataacagctatgaaaacatttctttataaggtaagtagttatcaacataatgtttatggcattatccaggatttctgggtaacagtattccattaacaatacgtatactacttg

SEQ ID NO: 167250 - DNA, 972 bp, Homo Sapiens
  misc_feature (754)..(805): n is a, c, g, or t
tcgctgacggggatctcatctatgtttatcacgttcattcatttttcaaattttcattgtggcacattttatgacacgcactatgctgccgatgctggcgactagggaagggagttaaaatgagagtgtctactcggaaagatgaacagataaataatcaccgtgataagtgctgcgctagagatatgcagatgtcaaaagaccttagaaggtctacaatccacttggagggtagggaatacagaaggcatttcagtgaaatagggtgcctttgacaaatcattaagaatgagttctacattaaaaaggggaagagagggtgatagctgaggaggcagcataggcaagaacatccagcatgaaagaacagtgaaggacatcaggaacatctttcaggaacatcaggtaaaacagacttagggcccaagtcaaaggagctaaaataatacaccctggaaagtggtatgatcatttctgcatctgctccagagaaacctgccaaaatatgattagcataatacccaagagaacatcacattccccatgtgtgaaaatgcaagagggagttatttctaatagttcataagctcagcaacaacagagtagacacaaaagccacagaatgtgcttaggctttactttaatgatatagggatatcacatatcatcagcctgtggagtacagaggtagtttacaaaggataaaccttcattgtttggaaaggaaagatcagagagctctttatgaagtttnnnnnnnnnnnnnnnnnnnnnnnnnnnnnnnnnnnnnnnnnnnnnnnnnnnntacattgaggacagtccaatctaactgtgaactcataaggggcagccagtaaattcaaaacagcctactgtttttttgattacttgtgctactctattaaaaaagccacaaacacaaaactagtctacctctttctctccccggatgcagggggatcctcaagagtc

SEQ ID NO: 167251 - DNA, 339 bp, Homo Sapiens
tagaggattactacctaaatggctgtcttgctgtagtaaatacgtgggtaaatctctgtttggggctctcagctctgaaggctgtgagacccctgatttcccacttcacacctctatatttgtgtgtgtgtctttaattcctctggcaccactaggttagggtctctctgaccaagctggtctcagcaacaggcatgcaccaccatgcctagctactgttttggttgtttaaggagatgtgatcttgatatagttcccagcgctggtcttgaactcctgggctcaagcgatcctccctcatcactgggattacagccatttaggtagggtaccgagctc

SEQ ID NO: 167252 - DNA, 578 bp, Homo Sapiens
tacctaaatggctgtaagtaacagatcacaatctgtggacaccaaaaatgtaatgactttagggaagtcatcttttgtttcagataatagcttaaacaggtctcctagatcagaaaatgaaaagccgggtctcagctccagatctgtatccatgatttctgttgctagttcagaagattcctgccatactacagtgacaaccccaaggcctccagttgagtatgactctgactttatgttagagagttcagaatcccaaatgtccttttcccagtcacctttttttgtcaattgccaaatctcctgctcttcatgaaagggaattggacagcctggctgacttgccggagcggattaaaccaccatatgcaaacagactttcaacatcccatcttaggtcatcttctgtagaagatgttaaactaattataagcgaggggagacctaccatagaagttcgaagatgtagcatgccttctgtcatttgtgaacataccaaacaattccaaacaatatcagaagagagcaatcaggtagcttattaactgtgccaggagatactagtccttctcccaaac

SEQ ID NO: 167253 - DNA, 148 bp, Homo Sapiens
aagttcaataagcacacataatataatgtgtggcttatttgaaacttttcacatgagcccttcactgtgaacccctaaactgcaagcattttggataagggggactcaacctgtcccacattttgtttacccatacagccatttagta

SEQ ID NO: 167254 - DNA, 414 bp, Homo Sapiens
ctgactctaaggatccctacctaaatggctgtcagcgtggaaacaacatgtactaactttccttgaacgttggtatggcctctgaggttaaggcagtggattgtgaatagaagtcatgtgtgacacctttgtgttttgccttaaaaagcaatacatgagtactgccccctacctgtgtcctcttcttgtgtactgataattgatgaaaactcgagtccgcagaatttggacccagagattgaagtatgtgttgacctgcctcaccagctctacacagcttatttctagactattacttgagaaggaaatcattttctatcatatttaagccatgtattttaggatctctttgttacagggtcttagcctatatcctaactgataccttttaaagaacagccatttaggtagggt

SEQ ID NO: 167255 - DNA, 1967 bp, Homo Sapiens
  misc_feature (157)..(169): n is a, c, g, or t
acatatctttctcccattccatagggaatgagctgggctgtcctttctccccacgttcacctgcacttcgttagagagcagtgttcacatgccacaccacaagatccccacaatgacataactccattcagagactggcgtgactgggctgggtctnnnnnnnnnnnnnttcagctcttgtatcactcagaatctggcagccagttccgtcctgacagagttcacagcatatattggtggattcttgtccatagtgcatctgctttaagaattaacgaaagcagtgtcaagacagtaaggattcaaaccatttgccaaaaatgagtctaagtgcatttactctcttcctggcattgattggtggtaccagtggccagtactatgattatgattttcccctatcaatttatgggcaatcatcaccaaactgtgcaccagaatgtaactgccctgaaagctacccaagtgccatgtactgtgatgagctgaaattgaaaagtgtaccaatggtgcctcctggaatcaagtatctttaccttaggaataaccagattgaccatattgatgaaaaggcctttgagaatgtaactgatctgcagtggctcattcttagatcacaaccttctagaaaacttccaagataaaagggagagttttctctaaattgaaacaactgaagaagctgcatataaaccacaacaacctgacagagtctgtgggcccacttcccaaatctctggaggatctgcagcttactcataacaagatcacaaagctgggctcttttgaaggattggtaaacctgaccttcatccatctccagcacaatcggctgaaagaggttgctgtttcagctgcttttaaaggtcttaaatcactcgaataccttgacttgagcttcaatcagatagccagactggcttctggtctccctgtctctcttctaactctctacttagacaacaataagatcagcaacatccctgatgagtatttcaagcgttttaatgcattgcagtatctgcgtttatctcacaacgaactggctgatagtggaatacctggaaattctttcaatgtgtcatccctggttgagctggatctgtcctataacaagcttaaaaacataccaactgtcaatgaaaaccttgaaaactattacctggaggtcaatcaacttgagaagtttgacataaagagcttctgcaagatcctggggccattatcctactccaagatcaagcatttgcgtttggatggcaatcgcatctcagaaaccagtcttccaccggatatgtatgaatgtctacgtgttgctaacgaagtcactcttaattaatatctgtatcctggaacaatattttatggttatgtttttctgtgtgtcagttttcatagtatccatattttattactgtttattacttccatgaattttaaaatctgagggaaatgttttgtaaacatttattttttttaaaagaaaagatgaaaggcaggcctatttcatcacaagaacacacacatatacacgaatagacatcaaactcaatgctttatttgtaaatttagtgtttttttatttctactgtcaaatgatgtgcaaaaccttttacctggttgccatggaaatcagcccaagttttataacccttaaatcttaatgttcctcaaagcttggattaaatacatatggatgttactctcttgcaccaaattatcttgatacattcaaatttgtctggttaaaaaataggtggtagatattgaggccaagaatattgcaaaatacatgaagcttcatgcacttaaagaagtatttttagaataagaatttgcatacttacctagtgaaacttttctagaattatttttcactctaagtcatgtatgtttctctttgattatttgcatgttatgtttaataagctactagcaaaataaaacatagcaaatggcaaaaaaaa

SEQ ID NO: 167256 - DNA, 676 bp, Homo Sapiens
  misc_feature (103)..(161): n is a, c, g, or t
ggcgtcgcatcgcagccgcctgtctgtgcacgaacggtcggtcactaggagtcctcaaggcttctctggttgagccgcacatcccgcaccccctgtcgaaacnnnnnnnnnnnnnnnnnnnnnnnnnnnnnnnnnnnnnnnnnnnnnnnnnnnnnnnnnnngggcccaaggcgtcccgtggcaccgggcgttctccaggcgtgcagcgccgagcggtgtactgagcgctgtcccccgccaccgtctcgcggcccctgaccgcattctcggggtgtctccttgtggtgtgacaccccacgcgttttgtaggcgcggacctcgggcccagagaacggggagaggaactgttcccgggtttaccacgtagctcagcgccagcgtccgatccggccggctttccaagctcccggcgcggggcactgtccgctccccgccagcgggcgaggggcttctcttaggacggcgttgcacacgtttcagtctcgcgttgcacctttatgtccgtggaccatctgtactgctatttaccaaatgttacattttttaaaaaattcaaactgactctttttttctccttaaatatatttaaggcggcaacttcaatcacaaaccgggtactggaaagccagttatttttctaatgcttataaaaaaaataaatatctgtctgttaaat

SEQ ID NO: 167257 - DNA, 344 bp, Homo Sapiens
atcccttattcgtgttgcacaagactaatgtgcacattaacagatgtactttctaaggttttatagggaggctgtgcatcgctcaaaagctgttgggaacgccttctgaacagttgccttcagaactagtttgagctgctcaataaaaccagtgactttactcataccttgtttttgaccaaaggttgtattctttacatcatccagtcttgtctctcatccattctacctcctagaatatttctctctcatctttccacttccctaactaggcactatatcctatttagctattaactcctccaaattggtgcaacacgaataagaaatcctggagagtcacc

SEQ ID NO: 167258 - DNA, 594 bp, Homo Sapiens
ttattcgtgttgccatataaaagtgagagaacgaatacaggaattcctgtcacccaaatcaccaatgattattgattgccatacttgcgtgtagtttgggaaacttaaagagattaaaacaaatcgtaggcatcatgacacgtaaggattgtcaaaagacaaaattgcaacacatttagtgagaagatcttaattggcatttattcgtgaatctacaatcaaacaacatctaattatggaaaatagcgtgagtgttccgatgagctgagcagaggttgttttcagagacaaaggactgagaaaatcagaaacggaaaacaaaaagctagttgattaaattgattaacttgattaaatttctaagttaaaggttaaagtagagggggacttccattatcaggtgggctaaaactgggtagtaaggggatatggctattaatctctctcctgatatctcagaagatcagatatcaacttagttttgggcttggaagcatggaactttagcatgagtgtctccattttggtttgatctgttgaacctagtgcaggagctcaatcctaaaccaatgaccttctataatactgacccgg

SEQ ID NO: 167259 - DNA, 650 bp, Homo Sapiens
  misc_feature (390)..(395): n is a, c, g, or t
  misc_feature (397)..(487): n is a, c, g, or t
gggtttgggaaagcaaaagctcccagtgagctggtgtccccgtgtgtctttcatgggactgtcccctttagagatcccacctgtcagagccacagcttcggggtcctgtcatcacatcccctgggaggggaggcaggaggaggccgagggccccaggatgtctgcctggtcccttctcactgtgaggacgcccttggcacacctttctcaagtcacacaaattactgcagttacatacagaattgctgacaggagcaggagacgctgagggaaacagctggcaatgtgacaaaagtcttttctgggacaacaatcaaatcatgtatttgtatttttttaagtttaccaatgaattgtacaacaatgtaaaaataaagttcatcctaatannnnnngnnnnnnnnnnnnnnnnnnnnnnnnnnnnnnnnnnnnnnnnnnnnnnnnnnnnnnnnnnnnnnnnnnnnnnnnnnnnnnnnnnnnnnnnnnncttgtccggcccgctctcggcccctcaaaaaatttttcataaaccattctcttttggggccgccggccccccaaaagggaaaggggaacttgggcccatacctgtgttccccaaggaaaaacccctgggccatgaccatagggctttgggaatctcccccccc

SEQ ID NO: 167260 - DNA, 520 bp, Homo Sapiens
tctcgaggatccccttattcgtgttgcaccctacccgtttggtcatggtatattattttcttaacatagttcaatttagttttaaaagactcatgttcttaaaaagaattcatggtctcaaaaatgctataaagataacatgaaaaatactggacagaaaactacttattctgtggccaaagtatataagtttctgtgttgtttagataccaatgtattaggttataagaaagctactataactatttcagaactaccaaatttatctatagatagctagagagtaataattagatactgaaaagctataatgtatctctccaaatatttgttagtcagaagaaaaatagcatcatcatccctttcacaggaaggtagaactataaaattcatgcagctttagcttcctctggtagctttaatataacaatacatgagagtatcaattcaaacaggagtcacatgaaaaagtaaggaagaaaggatgccatagtctcgtgcaacacgaataagggatcct

SEQ ID NO: 167261 - DNA, 389 bp, Homo Sapiens
tccttcttgactggataagctaaagtgaaaaagagattatgttttccatagcagaaaagctgacaccaaattcagcaagcagattaattatgcatgtgaattgcaatctcccagataatttgctttccttctttttctggttgcactttctagagggaagtgaattaatggaacaattaccttgtatttaaataataccctgcattttgtttcctcagcctggtagtagtcactaaaatttatccaagctatgtatccaaatgtgtgaagtaaaaggatacacaaatgttatttgtataaaatttgcatattttccctattcagcattccttaggcaaagtctaaaattagaagtggatctatataaacctcaggagcaaaacgaataa

SEQ ID NO: 167262 - DNA, 579 bp, Homo Sapiens
ggacgcgtgggtcgacccacgcgtcgcccagtctcactaccgttttatgtcctgcagctgggtaaagccactattgtgtggaaactctcccatgtgccctgtactctagcctactggacacaccagctccttcttccacctattctattcctcagttaagccaagtgatcagaagtagtattaaatgggtagataattttaacaggatgcctaatgtgaaataaggagttatttttactcttctactatagaaagcctaaggtaattcttaccatctcaaagactgagtattccatttaggtttggagaccacttgtgctgtgctgcctgatatttaccaaacttgaataagtgttcgtcaacttgatagtgaatgtaccccttctcaccttatattttgattaaatcaattaactataggtcatctaccaagaatgtaatccaagcggttgataaaacattattaggcagatagattattgattattaaatattgagcagtgcaaaaacggtatagctgcttggagttcagattcagtccctcaaagaggtgatgatcactgaaataaactctgaagg

SEQ ID NO: 167263 - DNA, 457 bp, Homo Sapiens
tggggtgactctagaggtatccctatattcgtgttgcactggaaatgaatggaatggacatgaattcagaaatgtccctctaatcatgcagtctcacaacagaggcaggatcagccccgctcttcccctcagaggaactagctgctgacagcaagtagatatagtgtactgaaacaatttccaaggggcttgtcaatgtaaactatcggctgctataagaaatgtcaaatctccatgataaggtattttaagagctccccaccagagtcaacaacaggtttactataaaatgcgagagagcatatctgaagaggagttgctgccagtgccgaagcatttctcagcctgcttccaaatgtggatggcatcgtcccactggatgaggcgcctgctcagataatgtcttgcacagaggcaggcagcttctcttcacccttagggtgtgcaacacgaataa

SEQ ID NO: 167264 - DNA, 433 bp, Homo Sapiens
tcggtacccttattcgtgttgcactcattcgtgttgcctgagaatgccgcaaggcaagggaaggctaccttaaagactctaagcggaaccatttctcagtgacctgaggtttataatgcaccccaccacccagctgccactcagacccagtcttacctttttgctattatttagtgaaaaattagccgcagaagtctggatcactttaggtcctaaagtgtaacagaaaaggacaaaagcagattatagcaatattgataatttagtatttttttccaaattccaagaaagactcacacattacacggagatgaccttaattcacctggtttttctttagagattatacaatgtgtaagtagaagatataaacacacaaacacagacacagaatatccactctgctgtgcaaccgaataagggatcctctaga

SEQ ID NO: 167265 - DNA, 407 bp, Homo Sapiens
tcagaggatcccttattcgtgttgcaccttccacaatgtctaatataattctgggcacagagtaagtatttaatacagtattcttgtcctgaatattattgaaaaataataatatattagatggctaatctggtagaggaaaatcagaaaattgattcaaaggagtactgactgaactgactattcaattgacagaaatcaggaaataatttgggaagcaaagacacccacaaattattccatagtatatagcatcaaacatcataagaaacaagaaattcgcaatcattaggtaattttgcttcatgaagatatttgattgttaaattaatatgtgctattagtaaagttgaaataccagaagtcgggagagataatatcacctcagtgcaaacaggaataagggt

SEQ ID NO: 167266 - DNA, 480 bp, Homo Sapiens
gcgaggtactctcgacggactcccttatcgtgttgcacttactggccatgctgatgcttcctacagacatgtttcatgtttcaaacattttcacttttaaagcctggggctcagggaggggccaaggcagggagacaccctgagaagaagaaatactatttcttccaccagagccactaaggatcttttctcacttgcaagttgcaatgaaagggatttcattttatgtaattctgcaagacatgcaacatatgctgaatatatgcatactataaagtatgcacaacagcattattaataaatatgattattataaagctttaaaggaaggctttattctgtaaataaccctcactttgtaagtaggatctaagtgaaaacaagacagtgatatcttgtaccaagtcttaaagctcccaaataactgggataccaatactctgtccctttatcttaagcacccaggtgcaacacgaataa

SEQ ID NO: 167267 - DNA, 481 bp, Homo Sapiens
ttattcgtgttgcaccatgctcagatcaagtaacccaggtttccagatatccaagggaataccctggaactcttaatggtccttggaggaatcattaaatggcctcttccctggactcattgaaccagcagtaactcctaagttggatggatctcaatcttgatttcaattcaggtctctaacatttgagtacttgcttttcatgtaggtgctcaggatctgctatataccatagattttaaggtgacttgttgagactgagaaaagaaatgtctaacgaacagtattaatgcagtcttaatacaactcaggacctatgtgacctttagtttctcatcagaaagggaaatttacatgttattgcctcataattatgagccagccttttgtagggctaacagtgcatttgaccagctataaatgtggcctccagatattatgtcatatttatagaagttattttttaagtgcacacgaataa

SEQ ID NO: 167268 - DNA, 213 bp, Homo Sapiens
ttattcgtgtagcacctgaaggaaagaccaaggatgagactaacaatcctgtatataccccaattcttggtatgagagtcaacacctcctgtatgttaaatccaagtacacaagtcacatttttagaatgaattgaatcattgaatgagagacacaatccctcttactggctgtttcaccttagtggaatcacagactaacagtgtgttcaat

SEQ ID NO: 167269 - DNA, 151 bp, Homo Sapiens
cttaactttggactggattcacttataagagtaaattttccaacttgcaactgtctctggatatgagattcagaacatccagtggattgtattcatgtgaaaagaggacaatctttactgtcgtgcaacacgaataagggatcctctgggc

SEQ ID NO: 167270 - DNA, 551 bp, Homo Sapiens
  misc_feature (469)..(469): n is a, c, g, or t
  misc_feature (482)..(482): n is a, c, g, or t
  misc_feature (510)..(511): n is a, c, g, or t
  misc_feature (520)..(520): n is a, c, g, or t
  misc_feature (536)..(536): n is a, c, g, or t
ggggcgatctagaggatcccttatcgtgttgcacagtgaaagcagttacacaggtggacaagaatggttcttgtccccagaatctgacaataattgaaactaggatcattaataaatgaaagaaaatgagtgaaggcttatccacctagttcaggcctgcttttcatagtcaacactgcaccaacacaccaaagtggtagggagatcttggactgatgggctgaaaaatgggacaatcagtactgtgtttattaataacacagaaggggctttgggtagtcagcatactcagaagcaatgcgaaaggaagtagaggggttcatgtataatgggtgggaccaaggaaagtgcaactgagaattgtttaagtccaagaggaaggccttgtctggtcaacattacccagcaaagaggctaaagggcagggcagagggaagggaagagggagacagccaatcttacctaatanctgcaaatatggncccttgagaattgggagccatagtctgnnaaatggggnccaaggggaccttggnggggatcctttaaaa

SEQ ID NO: 167271 - DNA, 472 bp, Homo Sapiens
tagaggactgatatcgtgtgcacaactgaagatataaaagctgcttttgcaccatttggaagaatatcagatgcccgagtggtaaaagacatggcaacaggaaagtctaagggatatggctttgtctcctttttcaacaaatgggatgctgaaaacgccattcaacaggtgggtggccagtggcttggtggaagacaaatcagaactaactgggcaacccgaaagcctcccgctccaaagagtacatatgagtcaaataccaaacagctatcatatgatgaggttgtaaatcagtctagtccaagcaactgtactgtatactgtggaggtgttacttctgggctaacagaacaactaatgcgtcagactttttcaccatttggacaaataatggaaattcgagtccttccagataaaggatattcatttgttcggttcaattcccatgaaagtgcaacacgaataagggtac

SEQ ID NO: 167272 - DNA, 390 bp, Homo Sapiens
ttattcgtgttgcactactgaagcacgtcatcggggactacaaggacatcttccccgacctcttcaaacgggccgccgagcgcctccagtacgtcttcgggtataagctggtggaacttggacccaagagcaacacttacatcctcatcaacaccctggagcctgtggaggaggatgccgagatgaggggtgaccaaggcacgcccactacgggcctcctgatgatcgtcttagggctcatctttatgaagggcaacaccatcaaggaaactgaagcctgggactttctgcggcgcttaggggtctaccccaccaagaagcatttaattttcggagatccaaagaaactcattactgaggagctttgtgctacacgaataagggatcctc

SEQ ID NO: 167273 - DNA, 521 bp, Homo Sapiens
gaggcgactccagaggatcccttattcgtgttgcactgtgcgatgtttgtgggcttggctgtttctttgtattacccttggacttggtttttagcttcgttcttggagccacaagtttaagcttcagtgcgttcttcgtggtccaccattgtgttaatagggaggatgttagacttgcgtggatcatgacttgctgcccaggacggagctcgtattcagtgcaagtcaacgtccagccccccaactctaatgggacgaatggagaggcacccaaatgccccaatagcagtgcggagtcttcatgcacaaacaaaagtgcttcaagcttcaaaaattcctcccagggctgcaaattaacaaacttgcaggcggctgcagctcagtgccatgccaattctttacctttgaactccacccctcagcttgataatagtctgacagaacattcaatggacaatgatattaaaatgcacgtggcgcctttagaagttcagtttcgaacaaatgtgcaacacgaataa

SEQ ID NO: 167274 - DNA, 431 bp, Homo Sapiens
ttattcgtgttgcacccatgtcccttcagaattggttacctctcccactgctttgactttgtttcccagaactaacattccaattgggatacctctaaggttagggcagcttctgatgttgtgacctgaaggtcccgtcttcactaccttgtacatgcctggccctcctcgcaagaatgccatatcttgttcttgcattgttgcttcctgtgggcagcaggagtttatgtctttgaaaaagtcatcagtattagttttagattcgtcaacagggaccagaagactcttgccaagatgttgattaaaagagaggcaccaggcttcagtgtaaccattcatgttagggacatacttctttattgtctcatcattcagcctcagccacacaccatcatcattatggatgtgcaacacgaataaagggatccctc

SEQ ID NO: 167275 - DNA, 598 bp, Homo Sapiens
  misc_feature (344)..(368): n is a, c, g, or t
  misc_feature (541)..(549): n is a, c, g, or t
tctagaggatcccttattcgtgtagcacacctaccactgcaagaacagcattgcatacatggatgaggagactggcaacctgaaaaaggctgtcattctacagggctctaatgatgttgaacttgttgctgagggcaacagcaggttcacttacactgttcttgtagatggctgctctaaaaagacaaatgaatggggaaagacaatcattgaatacaaaacaaataagccatcacgcctgcccttccttgatattgcacctttggacatcggtggtgctgaccaggaattctttgtggacattggcccagtctgtttcaaataaatgaactcaatctaaattnnnnnnnnnnnnnnnnnnnnnnnnnctttctctttgccatttcttcttcttcttttttaactgaaagctgaatccttccatttcttctgcacatctacttgcttaaattgtgggcaaaagagaaaaagaaggattgatcagagcattgtgcaatacagtttcattaactccttcccccgctcccccaaaaatttgaannnnnnnnncaacactcttacacctgttatggaaaatgtcaacctttgtaagaaaacc

SEQ ID NO: 167276 - DNA, 1419 bp, Homo Sapiens
  misc_feature (1334)..(1334): n is a, c, g, or t
  misc_feature (1363)..(1363): n is a, c, g, or t
  misc_feature (1376)..(1376): n is a, c, g, or t
  misc_feature (1382)..(1382): n is a, c, g, or t
  misc_feature (1390)..(1390): n is a, c, g, or t
gacatcggggagagcgcggttaccctggcaatattggtcccgttggtgctgcaggtgcacctggtcctcatggccccgtgggtcctgctggcaaacatggaaaccgtggtgaaactggtccttctggtcctgttggtcctgctggtgctgttggcccaagaggtcctagtggcccacaaggcattcgtggcggtaagggagagcccggtgaaaaggggcccagaggtcttcctggcttaaagggacacaatggattgcaaggtctgcctggtatcgctggtcaccatggtgatcaaggtgctcctggctccgtgggtcctgctggtcctaggggccctgctggtccttctggccctgctggaaaagatggtcgcactggacatcctggtacagttggacctgctggcattcgaggccctcagggtcaccaaggccctgctggcccccctggtccccctggccctcctggacctccaggtgtaagcggtggtggttatgactttggttacgatggagacttctacagggctgaccagcctcgctcagcaccttctctcagacccaaggactatgaagttgatgctactctgaagtctctcaacaaccagattgagacccttcttactcctgaaggctctagaaagaacccagctcgcacatgccgtgacttgagactcagccacccagagtggagcagtggttactactggattgaccctaaccaaggatgcactatggatgctatcaaagtatactgtgatttctctactggcgaaacctgtatccgggcccaacctgaaaacatcccagccaagaactggtataggagctccaaggacaagaaacacgtctggctaggagaaactatcaatgctggcagccagtttgaatataatgtagaaggagtgacttccaaggaaatggctacccaacttgccttcatgcgcctgctggccaactatgcctctcagaacatcacctaccactgcaagaacagcattgcatacatggatgaggagactggcaacctgaaaaaggctgtcattctacagggctctaatgatgttgaacttgttgctgagggcaacagcaggttcacttacactgttcttgtagatggctgctctaaaaagacaaatgaatggggaaagacaatcattgaatacaaaacaaataagccatcacgcctgcccttccttgatattgcacctttggacatcggtggtgctgaccagggaattctttgtggacattggcccagtctgtttcaaataaatgaactcaatctaaattaaaaaaggaaaggaaatttgaaaaaaactttctctttgccntttcttcttcttctttttttaactggaangctggaatccttncctttntttctggnacatctacttggcttaaaattgtgggggc

SEQ ID NO: 167277 - DNA, 532 bp, Homo Sapiens
  misc_feature (451)..(488): n is a, c, g, or t
caagaacacaaaagagggtttccgcccacgcgtaaagggcaactgtcttgtggctccatttcattatctcctccccaaaatatccctttcaaagggaatgtttgtgcaaataatgtgcatacttttaattgggaataagatggaaaatatgaatgctaaatcaaattttttaaaaaatacaccacacgatacaactcaatacaggagtatttcttctcaaattcttctagcaccatcaacattcttcaagcatctgaaatactattaattagcacctttgtattatgaacaaaacaaaacaaggacctcagttcatctctgtctaggtcagcacctaacaatgtggatcacactcatgggaaagtgttttgaggtagtttaaacctttggaagtttgggttttaaacttccctctgtggaagatattcaaaagccacaagtggtgcaaatnnnnnnnnnnnnnnnnnnnnnnnnnnnnnnnnnnnnnncttaccaaggttggcattttccataacaggggtaagagtgtttg

SEQ ID NO: 167278 - DNA, 679 bp, Homo Sapiens
  misc_feature (14)..(14): n is a, c, g, or t
  misc_feature (215)..(215): n is a, c, g, or t
  misc_feature (231)..(231): n is a, c, g, or t
  misc_feature (304)..(304): n is a, c, g, or t
  misc_feature (306)..(306): n is a, c, g, or t
  misc_feature (605)..(635): n is a, c, g, or t
cccagcctggaagnccttcagcggcccagccttgggctccccgcctgtgagactttggccaagttacttctgcgcctcggtttcctctggatgtaacacacacagttgcatcccttgtgtgacagcgaatgagatgacacaggacacagcacacaaggacggttccggccacgcggtcagagcaccgtcctgtggctccattccataatctccgntccacaaacatccccnttccaaggggatgtttgtgcaaataatctgcgatacttttaattgggaataagatggaaaatatgaatgctananatcaaattttttaaaaaatacaccacacgatacaactcaatacaggagtatttcttctcaaattcttctagcaccatcaacattcttcaagtatctgaaatactattaattagcacctttgtattatgaacaaaacaaaacaaggacctcagttcatctctgtctaggtcagcacctaacaatgtggatcacactcatgggaagtgttttgaggtagtttaaacctttggaagtttgggttttaaacttccctctgtggaagatattcaaaagccacaagtggtgcaaatgtttatggnnnnnnnnnnnnnnnnnnnnnnnnnnnnnnnttacaaagggttgacacttttccataacaggtataagagtgttg

SEQ ID NO: 167279 - DNA, 577 bp, Homo Sapiens
  misc_feature (44)..(44): n is a, c, g, or t
tttgtaggaaaaccaaattaaaaatggaaaaattaaacccatanacatttgcaccactcggggcttttgaatatcttccacagagggaagtttaaaccccaaacttccaaaggtttaaactacctcaaaacactttcccatgagtgtgatccacattgttaggtgctgacctagacagagatgaactgaggtccttgttttgttttgttcataatacaaaggtgctaattaatagtatttcagatacttgaagaatgttgatggtgctagaagaatttgagaagaaatactcctgtattgagttgtatcgtgtggtgtattttttaaaaaatttgatttagcattcatattttccatcttattcccaattaaaagtatgcagattatttgcccaaagttgtcctcttcttcagattcagcatttgttctttgccagtctcattttcatcttcttccatggttccacagaagctttgtttcttgggcaagcagaaaaattaaattgtacctattttgtatatgtgagatgtttaaataaattgtgaaaaaaattaaataaagcatgtttggttttcca

SEQ ID NO: 167280 - DNA, 1431 bp, Homo Sapiens
ataaagtacccaaactttcctaagtagcgaggcctgggtggcgaattcggcacgagggacagatcgcagcctcctcccaggacagcgtgggacgtgttttgcgccgcacccgaatcgccaaaaacttggaactggaacaagtgactgtcccaattggagttctgctggtgatctttgaatctcgtcctgactgtctaccccaggtggcagctttggctatcgcaagtggcaatggcttgttactcaaaggagggaaggaggctgcacacagcaaccggattctccacctcctgacccaggaggctctctcaatccatggagtcaaggaggccgtgcaactggtgaataccagagaagaagttgaagatctttgccgcctagacaaaatgatagatctgatcattccacgtggctcttcccagctggtcagagacatccagaaagctgctaaggggattccagtgatggggcacagcgaagggatctgtcacatgtatgtggattcccaggccagtgttgataaagccccccaggctaagtcatagactctaaatgtgaaatatccagacttgccctgtaaatgcttttggaaaccttttgttaaacccacccgggatctgcctcaggaacacccattaatttgcaccacaattccttttgatatggcccgacaagttgccacaaggtcaaaaacaattccatggcatgtgcccccaaaaatttggcccttcctaattctggaacctttcatccccccctcccgcacatggaaaatcacctcccctaaacttggaacaatgtgcggggaaccctggcaaattattgccattgtgtaacgtcacttgggacacaaacgccttcataggaagagccaatttgagatctcaccttcctcccccaagtcactgggggaaaccccaccccacagccgcaaatgtctaaattctcgccccttattagggcgccctataagccacatacccttgtggatccattctccctctgccaacctcaccttacaaaacaccaagaccccgcactggccacgtttccctcgggaaataggtcacgagaccatctccacgccttttatctatgagagagtgtgttacacaccacccttttacacaaccatatcgtatattatctgagaagaacgcgtacaatatccaagctgtcacatctcgctatgaaatactcactcacctccctctctggggtcgtatactcacacgtttcttgtcaacttttctcgtagcgggcacatctcggtctttctattcatcccaggatatacctactccgccttttatcccctcttctcacagtcccgtaattttaggaccccctcaacgccggagcggccctccaatacgggaaatgtttaccctccccttttttcaaaaccatcccggccgaagcttaccaccc

SEQ ID NO: 167281 - DNA, 347 bp, Homo Sapiens
tattcgtgttgcacttatacgtgttgcacaatgttaattgatgatgaagcttattcccaaaatgccttttgtgcatatgatacttggaaagtcactaatgtgcctcagttaatacatcagtaaaatgttgtgtttcttttccagtgtagtgtttttggaatataaattccccatgctagtatagtatctcagcaaagagaatttccccccaggaggctcagtaaaggaataccgtgtcttacccatcgttatgatggaaggctgctttgaaaatggctgttttaccttataaggttaaaattttgatccatatgttaagtgatagaagattttggtgcaacacgaat

SEQ ID NO: 167282 - DNA, 667 bp, Homo Sapiens
ggttacgcctggtcgggagtggtgatgtccatatcatgtgcgcttggcgcttaacactgggctcagcctgctctaccctcctggtgcacctcatctagaagggaggacacaaggacattggtgcttcagagcctttgaagatgagaagagagtgcaggagggctgggggccatggaggaaaggcctaaagtttcacttggggacagagagcagagcacactcgggcctcatccctcccaagatgccagtgagccacgtccatgcccattccgtgcaaggcagatattccagtcatattaacagaacactcctgagacagttgaagaagaaatagcacaaatcaggggtactcccttcacagctgatggttaacattccaccttctttctagcccttcaaagatgctgccagtgttcgccctagagttattacaaagccagtgccaaaacccagccatgggctctttgcaacctcccagctgcgctcattccagctgacagcgagatgcaagcaaatgctcagctctccttaccctgaaggggtctccctggaatggaagtcccctggcatggtcagtcctcaggcccaagactcaagtgtgcacagacccctgtgttctgtgggtgaacaactgcccactcccgtaccagggggatccctctagagt

SEQ ID NO: 167283 - DNA, 260 bp, Homo Sapiens
ttattcgtgttgcactccctgcagcctgctgacagatgcagtaaactcaaaagaggttcagatttgggtctgttcctctttcaatcgtgatgcaggttccttactagcctccagccccagagcaccatttacagtttctcttaaagcactcctagaaatgaaggctgtggcccttcccttcctagccagccaccttcatatcctttattgcaaaacaaataaacaaaataaaactcattgctatgtgcaacatcgaataa

SEQ ID NO: 167284 - DNA, 1089 bp, Homo Sapiens
ttattcgtgttgcactatcacgggccgctttccacaatgcagttgctgtagtcatctacaataataaatccaaagaggagccagttaccatgactcatccaggcactggagatattattgctgtcatgataacagaattgaggggtaaggatattttgagttatctggagaaaaacatctctgtacaaatgacaatagctgttggaactcgaatgccaccgaagaacttcagccgtggctctctagtcttcgtgtcaatatcctttattgttttgatgattatttcttcagcatggctcatattctacttcattcagaagatcaggtacacaaatgcacgcgacaggaaccagcgtcgtctcggagatgcagccaagaaagccatcagtaaattgacaaccaggacagtaaagaagggtgacaaggaaactgacccagactttgatcattgtgcagtctgcatagagagctataagcagaatgatgtcgtccgaattctcccctgcaagcatgttttccacaaatcctgcgtggatccctggcttagtgaacattgtacctgtcctatgtgcaaacttaatatattgaaggccctgggaattgtgccgaatttgccatgtactgataacgtagcattcgatatggaaaggctcaccagaacccaagctgttaaccgaagatcagccctcggcgacctcgccggcgacaactcccttggccttgagccacttcgaacttcggggatctcacctcttcctcaggatggggagctcactccgagaacaggagaaatcaacattgcagtaacaaaagaatggtttattattgccagttttggcctcctcagtgccctcacactctgctacatgatcatcagagccacagctagcttgaatgctaatgaggtagaatggttttgaagaagaaaaaacctgctttctgactgattttgccttgaaggaaaaaagaacctatttttgtgcatcatttaccaatcatgccacacaagcatttatttttagtacattttattttttcataaaattgctaatgccaaagctttgtattaaaagaaataaataataaaat

SEQ ID NO: 167285 - DNA, 461 bp, Homo Sapiens
  misc_feature (30)..(30): n is a, c, g, or t
  misc_feature (390)..(417): n is a, c, g, or t
gattccgatatggaaaaggcttacccaagnaccccaaaggtggttaacccgaaagatcagccccctgggcgaccttcgccggcgacaactcccttggccttgagccacttcgaacttcggggatctcacctcttcctcaggatggggagctcactccgagaacaggagaaatcaacattgcagtaacaaaagaatggtttattattgccagttttggcctcctcagtgccctcacactctgctacatgatcatcagagccacagctagcttgaatgctaatgaggtagaatggttttgaagaagaaaaaacctgctttctgactgattttgccttgaaggaaaaaagaacctatttttgtgcatcatttaccaatcatgccacacaagcnnnnnnnnnnnnnnnnnnnnnnnnnnnncataaaattctaaatgccaaagctttgtattaaaagaaataaat

SEQ ID NO: 167286 - DNA, 440 bp, Homo Sapiens
  misc_feature (11)..(11): n is a, c, g, or t
gaaaggccttnacccggaaccccaagctgttaaaccccgaaggatcaagcccctgggcgacctcgccggcgacaaactccccttgcccttgagcccacttcgaacttcggggatctcaccctctccctcaggatggggagcctcactccgagaacaggagaaatcaacattgcagtaacaaaagaatggtttattattgccagttttggcctcctcagtgccctcacactctgctacatgatcatcagagccacagctagcttgaatgctaatgaggtagaatggttttgaagaagaaaaaacctgctttctgactgattttgccttgaaggaaaaaagaacctatttttgtgcatcatttaccaatcatgccacacaagcatttatttttagtacattttattttttcataaaattgctaatgccaaacttgtatagaa

SEQ ID NO: 167287 - DNA, 215 bp, Homo Sapiens
ttattcgtgttgcacaagaaaaaagacccttcaataatggacatcactgaaatccacaagctgatcaggagacctgtactgccctggtgccaggagccattaaaagatggaatgtgctgccacttaaagagaaacggataaaggtaactaacagtgaagcctatgcaccaagtggagcataatcatcatgaaggcactttgggcaaaaaatgtgg

SEQ ID NO: 167288 - DNA, 413 bp, Homo Sapiens
ttattcgtgttgcacccccatacagcattctgtcctagaatattcctgagatgttaagattagaaatatttattgtcagttttaaccctacttcctcccactcttcacagtgtaatgccatttcttcagatttctacctagagaaatcttttcaaaatcagttgacattttcagtacaactttgtaatttttacaaagccaacctttctggtgatctcatgggttagaaaattttgcaaaagaattttgtcttaagcagtgagtatacttacctatttggaacactggaaaatgcagccgttgtgttctccttgtcaggttgtagcagttatctcttctagtggagtcattttattcccgttggctctatcactacttgtgtgcaacacgaataagggatcctcggagtcgac

SEQ ID NO: 167289 - DNA, 344 bp, Homo Sapiens
ttattcgtgttgcacctctagggtgaggctagggattaagtggagaaacaaattgggaaaagtccaggaaaagagaaaagggtgttaaattaggatttcttggcattatctttcctatcaagatatatgttcattatagacattttagaaaatataaacaagcaaaaagaagaaaataagttttcaacgtttttaatgtatttacttctggacacacccaccacaagaacatttcttaagaaacatctcactcaactttcagacattttagattcatttcaacaagtaggtgtccccccaatacatggatatatatatgtgcaacacgaataagagatcctcta

SEQ ID NO: 167290 - DNA, 461 bp, Homo Sapiens
tctagaggatcccttattcgtgttgcacgtacaggcatgtaaacattaggaacatgtggacagagatcacttcattatccacctgaattacatgcatatttttgtgggcacaggaagaagtctggaaaggatatgcaaatatatctgacaatatgagttacctgggaaggcaggtaatccaattcatgccatgtcatatgttaccagttatatgagcaggtagtgctttatagtaaaatgtatttcttaaacatctgtcacatatgttgaaagtgaatggtgaccatgaaaattgcatcccaaggggcatggctcacataaccgtctttcccctaagagcttagatagtaatcacaccacaaagaaaagaaggggtgatgttggtgaaatagtggagcaatgacctccagaaattctctcctctgtaaaggcaatcagaaaactgggtgcaacacgaataa

SEQ ID NO: 167291 - DNA, 1288 bp, Homo Sapiens
tacaggatccccttattcgtgttgcacggcggtacggcgtgttggtcccagcggttcagctgaggtagggacgtgctgtaggccggaatgttaccggctgttggatctgcggatgaggaggaggatcctgcggaggaggattgtcctgaattggttcccatggagacgacgcaaagcgaggaggaggaaaagtctggcctcggcgccaagatcccagtcacaattatcaccgggtatttagttattcagaggctgctctgctgagaagatgaacaaatttcttgcccaaaacaatgtatttcaaacgtgccgctcgggcctttcccgtattgctcactggtgctgggaagacaacacttctgaactatattttgacagagcaacatagtaaaagagtagcggtcattttaaatgaatttggggaaggaagtgcgctggagaaatccttagctgtcagccaaggtggagagctctatgaagagtggctggaacttagaaacggttgcctctgctgttcagtgaaggacagtggccttagagctattgagaatttgatgcaaaagaaggggaaatttgattacatactgttagagaccactggattagcagaccctggtgcagtggcttctatgttttgggttgatgctgaattagggagtgatatttatcttgatggtatcataactattgtggattcaaaatatggattaaaacatttaacagaagagaaacctgatggccttatcaatgaagctactaggcaagttgctttggcagatgccattctcattaataaaacagacctggttccagaagaagatgtaaagaaattaagaacgacaattagatccataaatggactaggacaaatcttagaaacacaaacatcaagagttgatctctctaatgtattaaatcttcatgcctttgatagtctctctggaataagtttgcagaaaaaacttcagcatgtgccaagaacacaacctcaccttgatcagaagattggtacaatcacatttggaagtaccaggaaaagcaaaaggaaaaacatcttaatatgttttatccaaaatctcctgtgggaaaagaatgtgaggaaacaagacaatcactgcatgaaggtcataaggctgaagggattggtgtccatcaagaccaattcccaccaggtggttgtcccagggtggcccatgagcctctatgatcttggagggagactccagtgggacctggaaaggatgacccctgagaaaaacaaattccgatgggcccttccctgggcaaa

SEQ ID NO: 167292 - DNA, 418 bp, Homo Sapiens
  misc_feature (364)..(364): n is a, c, g, or t
ctgtatcattagtaaaggggattggtctaaaaaaaaccaatacacagaaacctattttgaaaattaaaaacattaagaaacttcttgtaattcacaaataattgaaattaagtaattttctcagcttaagagtttgtattttataagtgaatatcagtaattaatccattaacaatgatgctctatttcatgctttaaagtttgaactgaggactagatcaatgttcaatcaattctacctttgaacagggattggtgtcaatcaaagacaaatcacaaacaagtgattgatccagggtgtccatgagctctatgatctggaggagactacaagtgagctggaagaatgacactgagagaacanatcgattggtcctcattggtaagtctcaaaggattcacagttttaaaacaaagt

SEQ ID NO: 167293 - DNA, 690 bp, Homo Sapiens
  misc_feature (578)..(611): n is a, c, g, or t
cttctgtgtgtgttgggcgtgcgcggctgcggtacggcgtgttggtcccagcggttcagctgaggtagggacgtgctgtaggccggaatgttaccggctgttggatctgtggatgaggaagaggatcctgcggaggaggattgtcctgaattggttcccattgagacgacgcaaagcgaggaggaggaaaagtctggcctcggcgccaagatcccagtcacaattatcaccgggtatttaggtgctgggaagacaacacttctgaactatattttgacagagcaacatagtaaaagagtagcggtcattttaaatgaatctggggaaggaagtgcgctggagaaatccttagctgtcagccaaggtggagagctctatgaagagtggctggaacttagaaacggttgcctctgctgttcagtgaagtgaggaatgtgtttactgtgtacatggtttactagaaatgtttattgattatatttccagctttaattttcttgagtaatttaactgaatttacacagtttgcttcattgtattttcaaacaaatagaaaataaacttattaggaaagcttnnnnnnnnnnnnnnnnnnnnnnnnnnnnnnnnnnacccatggtccggcccggccctccgggcccctttccgagaaaggccttttccttaaaacccaattttcctttttttggg

SEQ ID NO: 167294 - DNA, 825 bp, Homo Sapiens
  misc_feature (680)..(680): n is a, c, g, or t
  misc_feature (694)..(694): n is a, c, g, or t
  misc_feature (812)..(812): n is a, c, g, or t
ggggggagtggcgtgctgggcgtgcgcggctgcggtacggcgtgttggtcccagcggttcagctgaggtagggacgtgctgtaggccggaatgttaccggctgttggatctgtggatgaggaagaggatcctgcggaggaggattgtcctgaattggttcccattgagacgacgcaaagcgaggaggaggaaaagtctggcctcggcgccaagatcccagtcacaattatcaccgggtatttaggtgctgggaagacaacacttctgaactatattttgacagagcaacatagtaaaagagtagcggtcattttaaatgaatctggggaaggaagtgcgctggagaaatccttagctgtcagccaaggtggagagctctatgaagagtcggctggaacttagaaacggttgcctctgctgttcagtgaaggacaatggccttagagctattgagaatttgatgcaaaagaaggggaaatttgatgacatactgttagagaccactggattagcagaccctggtatcataactattgtggattcaaaatatggattaaaagtgaaataccactaaaggcagaagagaatgaaatcatcccacccactgacccgttcccaatctgagcatatggatagggcccaaagcacatttaacagaagagaaacctgatggccttatncatgaagctactangcaagttgctttggcagatatcattctcattaataaaacagactttggtcccagaagaagatgtaaaagaaattaagaacgacacttagatccataaatggacttaggacaatcttanaaacaccgagatc

SEQ ID NO: 167295 - DNA, 915 bp, Homo Sapiens
gtgttgtgtgtcccagtagagacttgcttgtgtattatccaatcctttcgataagaaatgcctctagtgttatgtacatacttgatcttcgtttgaaatgtgttgtccactgcttttctgtttctgtcacagtagctataaacagctgtttaaggatatccttatctaaatttctgccaaggaggaccaatcgatttgttctctcagtgtcatccttccagctcactggagtctcctccagatcatagagctcatggacaccctggacaatcacttgtggtgatttgtctttgattgacaccaatcccttcagccttatgacctccatgcagtgattgtccttgtttctcacattcttttcccacaggagattctgaataaacatattaagatgttcttcctttgcatttcctggtacttcaaatgtgattgtaacaatactctgatcaaggtgaggttgtgttcctggcacatgctgaagttttttctgcaaacttattccagagagactatcaaaggcatgaagatctaatacattagagagatcaactcttgatctttgtgtttctaagatttgtcctagtccatttatggatctaattgtcgctcttaatttctttacatcttcttctggaaccaagtctgttttattaatgagaatgatatctgccaaagcaacttgcctagtagcttcattgataaggccatcaggtttctcttctgttaaatgtgctttgggccctatccatatgctcagattgggaacgggtcagtgggtgggatgatttcattctcttctgcctttagtggtatttcacttttaatccatattttgaatccacaatagttatgataccatcaaggtaaatatcactccctaattcagcatcaacccaaaacatagaagtcactgcc

SEQ ID NO: 167296 - DNA, 816 bp, Homo Sapiens
ggggtgctgggcgtgcgcggctgcggtacggcgtgttggtcccagcggttcagctgaggtagggacgtgctgtaggccggaatgttaccggctgttggatctgcggatgaggaggaggatcctgcggaggaggattgtcctgaattggttcccattgagacgacgcaaagcgaggaggaggaaaagtctggcctcggcgccaagatcccagtcacaattatcaccgggtatttaggtgctgggaagacaacacttctgaactatattttgacagagcaacatagtaaaagagtagcggtcattttaaatgaatttggggaaggaagtgcgctggagaaatccttagctgtcagccaaggtggagagctctatgaagagtggctggaacttagaaacggttgcctctgctgttcagtgaaggacaatggccttagagctattgagaatttgatgcaaaagaaggggaaatttgattacatactgttagagaccactggattagcagaccctggtgcagtggcttctatgttttgggttgatgctgaattagggagtgatatttaccttgatggtatcataactatagtggattcaaaatatggattaaaacatttaacagaagagaaacctgatggccttatcaatgaagctactaggcaagttgctttggcagatgccattctcattaataaaacagacttggttcccgaaagaagatgtaaaagaaattaagaacgacaattagatccataaatggactaggacaaatcttagaaacacaaagatcaagagttgatctccctaatggattagatc

SEQ ID NO: 167297 - DNA, 760 bp, Homo Sapiens
  misc_feature (235)..(236): n is a, c, g, or t
  misc_feature (238)..(361): n is a, c, g, or t
  misc_feature (364)..(366): n is a, c, g, or t
  misc_feature (380)..(393): n is a, c, g, or t
  misc_feature (421)..(468): n is a, c, g, or t
  misc_feature (554)..(566): n is a, c, g, or t
ggtgatctggaggagactccagtgagctggaaggatgacactgagagaacaaattgattggtcctcattggcagaaatttagataaggatatccttaaacagctgtttatagctactgtgacagaaacagaaaagcagtggacaacacatttcaaagaagatcaagtttgtacataacactagaggcatttcttatcaaaaggattggataataaaaataagtttctactgatannannnnnnnnnnnnnnnnnnnnnnnnnnnnnnnnnnnnnnnnnnnnnnnnnnnnnnnnnnnnnnnnnnnnnnnnnnnnnnnnnnnnnnnnnnnnnnnnnnnnnnnnnnnnnnnnnnnnnnnnnnnnaannnatttttggggccgnnnnnnnnnnnnnngaaaattttttttaaaaacaattctttnnnnnnnnnnnnnnnnnnnnnnnnnnnnnnnnnnnnnnnnnnnnnnnncccctaaagttttgttcccccacaaggaaaaaccccccggggttaaaacacacaaagaggggttggggggtttcccccaccccacnnnnnnnnnnnnncccccccgggggggggacaccccaaggaggggtttttttgagagaaacaatccccccccaagaggggggggtttctctcggggagggtgtttatattcgtgggggggtgttttcttcaaagggggccgggagcttatatttccccctgcactccgagtggtggttttatgcttccgcggggcctcagggatgcg

SEQ ID NO: 167298 - DNA, 469 bp, Homo Sapiens
tctagaggatcccttattcgtgttgcacgacccatcaaatgaaatcactgtaaggaatataaaaattatagttaaataacatttcaaatatgaagctatttaaatgtcaactgtgcaggcaatttttaaatatttctagtcaatcataatcactgctttctcagtctttctattcttcctataagcatttgattaaagttgataacacagaattctcttttaatatgcattctgttggggataccaattaagatttctttaacttgtttattttagaaattgtttataacgccaggcaacagttgtaaagaggataacattcccagtagatggttttgaaaacttctataatatctaattatgtatagatccagactgtttatgtttggcatacaaataattgctgggagttagaatggtttgatcaatacatgcaattaagtgcaacacgaataagtgcaacacgaat

SEQ ID NO: 167299 - DNA, 456 bp, Homo Sapiens
ttattcgtgttgcacgacccatcaaatgaaatcactgtaaagaatataaaaattatagttaaataacatttcaaatatgaatgctatttaaatgtcaactgtgcaggcaatttttaaatatttctagtcaatcataatcactgctttctcagtctttctattcttcctataagcatttgattaaagttgataacacagaattctcttttaatatgcattctgttggggataccaattaagatttctttaacttgtttattttagaaattgtttataacgccaggcaacagttgtaaagaggataacattcccagtagatggttttgaaaacttctataatactctacattatgtatagatccagactgtttatgtttggcatacaaataattgctgggagttagaatggtttaataatgtacacgaagtgaaacacgaataagtgcaacacgaata

SEQ ID NO: 167300 - DNA, 528 bp, Homo Sapiens
aatcccttattcgtgttgcactgagaaaattgtccattttattcatcagaagaaaaattcaatgacctttactcactgacaacagtgagaatcagaatgaatgaatcagagtgtctgtcctaactactccctctggtcctactgcagttcctgctgtctccatatggttcatcagtgtgtgggagatgaatgtggtaaaactgaagtagctgcttgtgcttggagaacaacaacaacacactgaaattcactgcttagaagctgttgaaagagtttggcgataaatacaacccaatattcacaataaagagcaatgatctataagcccattttcacatctattgtaaaggccaaccatgtgttttagccaaaacaaactgattttattaatacaatgaccagacatatataaagaataatatgagtttattttaccagaggacttggctctcacacttgcattctattgtaggttttgacacagtatccaattcttacaagagcttggataaactcagggttttcact

SEQ ID NO: 167301 - DNA, 435 bp, Homo Sapiens
cgactccgaggatccccttattcgtgttgcaccacgaacttgggccatcaacacaatcacttcagacaagaggcccctttcgggatgttcctatccccactccatccccacccccagttcatagtggcagggaatgagtcccaggccctgggtcttatttatttatgccacccttgtcagtttaggagaatcccagcctccagtgcctgcaatacacatggtgctttgcttctgtgatctccaaaactttgcagacaaggaaatgaccactcagaggctgagtagcttgcctaagataccacagatagttcatcacagaagcgagattctaactcagtttgtctcattcaaacctgaattcactgaagtgcagggtgctgccttgagcgtgtgtgtgactcttatttataagacataacgtgcaacacgaataaa

SEQ ID NO: 167302 - DNA, 282 bp, Homo Sapiens
ctgttgcactattctggaggcaataaaggattttcctaagcccagtgaagagaagattaagttaattctcaatcaaagtgcctggacttctcaatccaattctttggcgtcttgcttgtctagactttctggaaaatctgaaactgggaaaactggtcttattaacctaggaaatacatgttatatgaacagtgttatacaagccttggttatggccacagatttcaggagcaagtattatctttaaatctaaatgggtgcaaccgaatagggatcttaagt

SEQ ID NO: 167303 - DNA, 473 bp, Homo Sapiens
gcgactctagagcgatccccttattcgtgttgcacgcccttggagagaaaactttcagaatccaagcattatgatcacatgccacataaagtttcagtcaacaaccgactgcatataaaaaggtggccccataagattataatagagccaaaaagttcctattgcctagagacattgtagttgaattactttatttttaacattaatttatagtcgtctaagtatacactgtttataacatctacagtagtgtacagtgatgtcttaggccttcacattcactcgccactcactcactgacttaccagagcaacttccagtcctaaaagctccattcacggtaagtgccctatacaggtgtaccatttcttatcttttatactgtaccttttccatgtttagatgaagcttgcccaatgcacagccagcgggccacacgtggcccaagtcagctttcagttacactttttttt

SEQ ID NO: 167304 - DNA, 906 bp, Homo Sapiens
gaaagaaaaaggggtctgaacctggggggacccccctttccccggttcagaaaggggacccccgttccccaaatgccccagggctcatttttcaggttctgttggaaccaggtaagggtacagggagtcatagattttcacgtttaatatgtaatggaagcttctgtaccatgagacagatagcaagcacggactctgctcactggtcgatgatggagcgctgcaacacctgattcatcaggtcctcttcatcaacatcataatccacaaaagtgtcataagaaaaccggtgccggcgctggatgtgctctctgaagttggcgctgcggtacttggggtctccccagggcatcgaggcacatatcggacaaaccacagatttggtatccgtgctatggaataattttgccagtgttccacaagtccttcctgatcaaagttcttctcaggaccagtaaggacaaggaaaggtgtaacggtttggaacattccttggctgaagagatgcatccttaatggtggccttcacaccttccatgatgtaattctggtatttggaacaagtagccacgtgggaccggatcttggacaggaagaaattcttacggcagccatggcaagaagtctctgtgctctcgatctgccgctcgagctccacggctcggacgccaggtgccagagcgctgcgacacaccccacagacaggcttcttcggcttcagacattcctgcaggcatgcagagcaaaagacgtgtccgcagggcacctgtaccggcttctcgtacacctctaagcacacgggacacgtgaagcgtcctagggggtcagcctccgccgccggccccgccagctgcgcagcacccccgcagtcccgctgttgcgccgccatcttggacccacgcgtcc

SEQ ID NO: 167305 - DNA, 1175 bp, Homo Sapiens
acggataccaaatctgtggttgtccgatatgtgcctcgatgccctggggagaccccaactaccgcagcgccaacttcagagagcacatccagcgccggcaccggttttcttatgacacttttgtggattatgatgttgatgaagaggacatgatgaatcaggtgttgcagcgctccatcatcgaccagtgagcagagtccgtgcttgctatctgtctcatgttacagagcttccattacatattaaacgtgaaatctatgactcctgtaccttacctgttcaacagacctgaaaatgagccatggcattgggacagggtcacttctgacaggggaagtgggtccccaggtcagcccttctcttccctttgggctcttgccaaagctgtcttcccctactgttaaccttgtttgtcacacggtcgagttcgtattggttctcggctacttcctggagcttctgccgcctcctgtggaagataatctagcttctccacctcttgtttcacactcattcctcccatccagtgtttgtctctcgggtccttcaagccagccaggaccttttctgggtcatgaatagcacaatgaagcaagtgtctcctttccttgtccccaaggtgtgcagactttggcagccatgcacctgaccagagctgaagctcccgctgggctgtggggttgccagaagctggggttgcaatcccggggtacatgtcaccagtcctcttggggttttgtaccatctgatgctggaagttttgattagtgatattttctactactacatatttagagttcactggttcagtcttaaatgcctgcatggtgcctttttaggataaggtataaccatacatttttggtggaagtgtttctgggttagggaagttaaagtctgtttatccgtaagtggggaggagggtcagctaagagaagtgggagggccagagctttttggttctgatttacaaattaatgaagtagtttcaaacaacgcggtcatgtttacctctccatttgggagcctgcctacattcttgttctagaagcacaaaaaatcctcagatgaattaggaagaaagaggtttgggggactcagcgggatactagttccttttacctttctgccttgggtaccttaaattaaaactgggcaattgtttttttctggca

SEQ ID NO: 167306 - DNA, 921 bp, Homo Sapiens
caagatggcggcgcaacagcgggactgcgggggtgctgcgcagctggcggggccggcggcggaggctgaccccctaggacgcttcacgtgtcccgtgtgcttagaggtgtacgagaagccggtacaggtgccctgcggacacgtcttttgctctgcatgcctgcaggaatgtctgaagccgaagaagcctgtctgtggggtgtgtcgcagcgctctggcacctggcgtccgagccgtggagctcgagcggcagatcgagagcacagagacttcttgccatggctgccgtaagaatttcttcctgtccaagatccggtcccacgtggctacttgttccaaataccagaattacatcatggaaggtgtgaaggccaccattaaggatgcatctcttcagccaaggaatgttccaaaccgttacacctttccttgtccttactgtcctgagaagaactttgatcaggaaggacttgtggaacactgcaaattattccatagcacggataccaaatctgtggtttgtccgatatgtgcctcgatgccctggggagaccccaactaccgcagcgccaacttcagacagcacatccagcgccggcaccggttttcttatgacacttttgtggattatgatgttgatgaagaggacatgatggatcaggtgttgcagcgctccatcatcgaccagtgagcagagtccgtgccttgctatctgtcctcatgttacagagcttccctttacttatttaaacgtgaaattctatgacctcctgggacctttacctgggttccaccagaaccgggaaaaatggagcccatggggcctttggggaaaagggggtcccactttcttgaaaagggggagaaaaagggggttcccccccaagggtttaagtccccccttttcattatttccgccca

SEQ ID NO: 167307 - DNA, 930 bp, Homo Sapiens
  misc_feature (23)..(23): n is a, c, g, or t
taaaaaggaggtcctgatccccntaggggggatccaccatttttcccccctgttcaggaaaaagtggagccccttttccccaaaagtcccctggggttccatttttccagggtctggttgaaccgggttaagggttccgggaagtcaatgggttttcacgttttaatatgtaatggaaagcttctgtaccatgagacaggtagcaaagcacggcctctgctcattggtcgatgatggagcgctgcaacccctgattcatcatgtcctcttcatcaacatcataatccacaaaagtgtcataagaaaaccggtgccggcgctggatgtgctctctgaagttggcgctgcggtaatttggggtctccccagggcatcgaggcaacatatcggacaaaccacagatttggtatccgtgctatggaataatttgcaagtgttccacaagtccttcctgatcaaagttcttctcaggacagtaaggacaaggaaaggtgtaacggtttggaacattccttgggctgaagagatgcatccttaatggtggccttcacaccttccatgatgtaattctggtatttggaacaagtagccacgtgggaccggatcttggacaggaagaaattcttacggcagccatggcaagaagtctctgtgctctcgatctgccgctcgagctccacggctcggacgccaggtgccagagcgctgcgacacaccccacagacaggcttcttcggcttcagacattcctgcaggcatgcagagcaaaagacgtgtccgcagggcacctgtaccggcttctcgtacacctctaagcacacgggacacgtgaagcgtcctagggggtcagcctccgccgccggccccgccagactgcgcagcacccccgcagtcccgctgttgcgccgccatcttggacccacgcgtcac

SEQ ID NO: 167308 - DNA, 737 bp, Homo Sapiens
  misc_feature (615)..(615): n is a, c, g, or t
  misc_feature (655)..(655): n is a, c, g, or t
  misc_feature (660)..(660): n is a, c, g, or t
  misc_feature (709)..(709): n is a, c, g, or t
  misc_feature (723)..(723): n is a, c, g, or t
gggccatcccggggtacatgtcaccagtcctcttggggttttgtaccatctgatgctggaagttttgattagtgatattttctactactacatatttagagttcactggttcagtcttaaatgcctgcatggtgcctttttaggataaggtataaccatacatttttggtggaagtgtttctgggttagggaagttaaagtctgtttatccgtaagtggggaggagggtcagctaagagaagtgggagggccagagctttttggttctgatttacaaattaatgaagtagtttcaaacaacgcggtcatgtttacctctccatttgggagcctgcctacattcttgttctagaagcacaaaaaatcctcagatgaattagaagaaagaggtttggggactcagcggatactagttcttttaccttctgcttggtaacttagattaaactgagcattgtttttctgtcacaaatgttttccttatgacactggtttcgacatgtaaaatgtgtttgaaaacctgctttgtagatgcagagagaagctataggaaacccagtaccacccccgggtctgttctggacgagacatcgtttcataagggcacagcacatncgcaagaggaacagttgttaataaaagctggtgctggganacttngctttagggtacagctcaagaacctgggagttcatattttcacaagttnttaattaatttatnaggtcccagagtct

SEQ ID NO: 167309 - DNA, 983 bp, Homo Sapiens
tggtactggcccggaattacgggatatcgtcgacccacgcgttccggctatctgtctcatgttacagagcttccattacatattaaacgtgaaatctatgactcctgtaccttacctgttcaacagacctgaaaatgagccatggcattgggacagggtcacttctgacaggggaagtgggtccccaggtcagcccttctcttccctttgggctcttgccaaagctgtcttcccctactgttaaccttgtttgtcacacggtcgagttcgtattggttctctgctacttcctggagcttctgccgcctcctgtggaagataatctagcttctccacctcttgtttcacactcattcctcccatccagtgtttgtctctcgggtccttcaagccagccaggaccttttctgggtcatgaatagcacaatgaagcaagtgtctcctttccttgtccccaaggtgtgcagactttggcagccatgcacctgaccagagctgaagctcccgctgggctgtggggttgccagaagctggggttgccatcccggggtacatgtcaccagtcctcttggggttttgtaccatctgatgctgaagttttgattagtgatattttctactactacatacttagagttcactggttcagatcttaaatgcctgcatggtgcctttctagaataaggtataaccataacatttttggtggacagtgttctgggttacgggaaagttaacagtccgtttatccgtaaagtggggaggaaggtccagctaacaaaagtgggcagggccagagctttttgggttcctgattaaccattcattgaagtagttcaacagcgcgcctggttaccctctcatgggagctgctaattcttgttagaggcgaaatctcgatggattatacaaacggttgggaccgcagacaagcttacctcggggaactacatcgccgtgttcggacacgtccaaacatgcaa

SEQ ID NO: 167310 - DNA, 618 bp, Homo Sapiens
ctattcgcagttatcatatgcaacaagaggagaaatcaacgggataatcccctcacgcccccccgcattttgtacttaagcagacagttctgagagcattccattccataggttcctaaaaaggttctagtggaattgaacacctgctgcctaggcgctatcagatccttaaattttctttccctccttctcatttcactttccttgtcctgaactcctgcttcctgggactgcactccatataaacttccctgcatgcaagtctttctaccaggctgatgttcaggctaagacatcgggtgagtggaaagtttttccaccagccactttttggtttcacacatttcatgctcttctacttgcagattccagtgccagatgtgttagaacacactcctgtctcaatacaatgcagggcttgtacctttgagtgacatccacattgttggatatcatttatgcagtgagatggccaccaataactatacatcaaagtgactgcaaccacagagatatatcccagtaaactcaaacaaagtgtatatccacagcttaactttccacacagctgaatcccaaaaatgcttgggaccactccaacattgccacacacatact

SEQ ID NO: 167311 - DNA, 343 bp, Homo Sapiens
tttccgtgcctcagggaatatcacagggaagagaactaagacagagcagtgtgccagttaggtttgagtagaggaggaaaagtctgcgaaagagactgagaatgcatgggtagatatgtagaggtaaacactgtagaatggtgctgagatgagctagagcccatagataatttgctgtctttcgctacaaggtggtgatttgtaagcctgacatgacgacataggtctttacgaaggagtagttgggctagatgaaagtaggcttttgagtgataggccaggaaaaaagtaacagtaagagtactgttcattgagtttcaattgtgattgggacggaagatca

SEQ ID NO: 167312 - DNA, 655 bp, Homo Sapiens
tcgactcttaggatcccctgatcttccgtgcccaacgagaagatcgcgatatggctcaaggactgccgtacacctttgggagcctcactggatgaacaaagcagtagtacactcaagggtgtgcttgtgagaaatggaggaagttttgaagatgatttgtcattgggagctgaagccaaccacctccatgaaagtgatgctcaaattgaaaactgcaataatatcttggccaaagagagaagattacagtttcatcagaaagggagaagtatgaattccactggatctgggaaaagtagtgggacagtttcaagtgttccagaattgttggaactttatgaggaagatcctgaagaaattctttataatcttggatttggacgtgatgaaccagatattgcttctaaaattccttccagattttttaattcatcatcctttgccaaagggatagatattaaagtatttttgagtgctcagatgcaacggatggaagtagaaaacccaaattatgctttaacaagccgttttcgtcaaattgaagtgcttactactgtggccaatgcgttttcttctttatattctcaagtctccgggacgcacctgcagagaattggaagtatgtcctcagtgacctctaacaaggagacagacc

SEQ ID NO: 167313 - DNA, 660 bp, Homo Sapiens
ttggctcacagcacaaatcatgttgtcagtgtgaggtccaagaacagatgatgtggaatctgatgatgtgcctgtttcatgagtagctgtattctgagaagtgtcctcctctgagtgatataatttgagccgaatatgccatgctaaactgcatacagctgaaactgtcttgaactgatgaacaacattcctgggacagtggagggtcatgtaaatctaactgcattcgttgaactacttctaagaaatcttcagcatgaaaacaaattacatctttggttataccggggtgatcaggccactcttccacagtgcacaaccttcagcactccaacagcagctgtagtctgtcgttcaaaaccttgtcctatatgatctgcatgagctcttgtcctgtcttcaaagagcatctcacggggctcacttgttcgaggtaggtactgaagattttttatttcattggtagttcttttccttttgaaaggtgactttggcatatcagccacagggatcatttgttctcctggacgaacccacatgatgggaccatcatcactatcttttcgactctgtaattttagactagatagcgtcccccatggcagtgtacattttaaaaatggtgactcttccaacacactcaggaagtccggtaccgag

SEQ ID NO: 167314 - DNA, 314 bp, Homo Sapiens
cactgtgctcacctccttgtctgcagtgcgcctggctccttgcctgtatttttcattgtttttttaactactggaaaaataacacacacacgcccaaaatcttaacatgattttaacttgcatttttagtacttgtggagtggagaatatgagcttgagatttagagtaaaacagacatgaactctgctcgtgacttgacagtcttctagtttgtgaaattttgtactttataattaaactcagaatcttagattcttcatttatgaaatggttgttataggggcggaaggtcaggggatcctaaagagtcgag

SEQ ID NO: 167315 - DNA, 534 bp, Homo Sapiens
tgctggggtgactctagcggatccttttcgtgccactgtggctgaagagcaggtctagaggagaaacccactgtgggcagagaaggctgttcatgggggagataggtggcagccttcttaagagccagaactgtatctctaatgttgcctcctctgcaaatgaggccaaaagaaatgtaaagttatattaatttgcattttccagattttagagaggctataaaatttgccttgtaaacgagagactggctttcagaaaactgtttggcacccagcatctggtaatgcacgttactctgagctgcccagtgaaggggtttgaggcaactggacttaactgtacctaaaggccccaaaacctgagtgggcctgagacagcctcaggagtttgctggcttccaatgcactgtgggaacagacagactcctcttttagaaaaataaagatggaatttttttcccctctttcggttgcagcttatttcaaaggtcatcaaagtaaacaaaaggaaaagactgtggggcacgaagatca

SEQ ID NO: 167316 - DNA, 458 bp, Homo Sapiens
agtcttaaaatcctgctctggccggattccagactcgtgggggaaaggctgtttccaaggcaggaaaggtaaagagacaaagaaagtgccttgtacagatgcaaacggaggtgtagactgtgcagctgccaaagtggtgacaagcaatccagaggaccatgaaaggatcttaatgcaagtcatgaacttgaatgtgccgatgaggcctggcattcttgtccagagacagagtaaggaagtgttggccacacccttagaaaacagaagggacatggaggcagaagaggagaaccaaataaatgagaagcaagagcctgagaatgctggagaaactggtcaagaagaggatgatggtttgcagaaaatacacacatctgtcactagaactccttcagttgttgaaagccaaaaaagacgcctccttccctgaggaggcgggtgggtcaaggtaactctgg

SEQ ID NO: 167317 - DNA, 266 bp, Homo Sapiens
ctctagcggatccttatcttcgtcccttaacagtgaggcatacaccaggttccaaggaggaaattttgtgagaaataaaactctaacataatgtagaaaatgaagagatggcagattaagccaggtgggcagggacgaactagtttaggacattaacacaagggcccaagtaaagaagatgaatgcctagaatcgggtagcaaagaggaaatgggggagaaatggaggttcagtaagggtaaaaaagcaacatgctcaagtgtgaa

SEQ ID NO: 167318 - DNA, 350 bp, Homo Sapiens
tcccacatgcagtcgttattgaaaacacatctggttcagaaggaaaactaaaacaaacagtgtataaagactgcaatctcttcttgaatagttacagagatgggggggaaaaaaagcatgtccctcacctggctcagaaaagattgcttagaaaacaagcttcaagtgcttgtagactgttattatgaacagtttttacatttgatggtgtagctggcttgttaacttggaaggctacaataaagatatctcattagaagagaaaaacagaatcaagagctacgcagttgtgcaaaaattatccacgaattctcaccgtccaaagagataaggggaggggcggacgatca

SEQ ID NO: 167319 - DNA, 116 bp, Homo Sapiens
cattacagaaaactgaagaggtattacttactgtcctactcattttaatgtgccataaacaccgtgatactaaaacctcataaagacattataagaaaagaaatcacattcctatg

SEQ ID NO: 167320 - DNA, 267 bp, Homo Sapiens
cggatccctgatcttccgtggccatattgaacgaagtagtctgtgaaaacttgttggctttctgacgccttcctaagtgtactggaatactctctataaatatgcagcagctgagatgggtgagagcaaggtgagcagtcagagtagtatagattgaattcaaaaaggctgagagaacatgggacagcattataaacattgagggatgatgaacaaaaacgaaatgagtgatcatggtgtattctggggacagggacggaaggatca

SEQ ID NO: 167321 - DNA, 210 bp, Homo Sapiens
tgatcttccggccccttctcaaacatttaacaatttacttattaaacattaagctgagtcagtttaaatcaaatgatataactgattattactccaaacaggaatctgttgtttcttagtgtctgtaggtagaagtttcacagaatgcaaggacattatttacctgaaggatcattcctgttacaattagaggcacggaaggggatcctc

SEQ ID NO: 167322 - DNA, 427 bp, Homo Sapiens
gcagaagaagcaactgcagcagctctccgcctggttaacactcacagaggagcgcattcagaagatggaaacttgccccctggatgatgatgtaaaatctctacaaaagctgctagaagaacataaaagtttgcaaagtgatcttgaggctgaacaggtgaaagtaaattcactaactcacatggtggtcattgttgatgaaaacagtggtgagagtgctacagctatcctagaagaccagttacagaaacttggtgagcgctggacagcagtatgccgttggactgaagaacgctggaataggttacaagaaatcaatatattggggcaggaattattggaagaacagtgcttgttgaaagcttggttaaccgaaaaagaagaggctttaaataaagtccagacaagcatcttcagaatccaaaat

SEQ ID NO: 167323 - DNA, 328 bp, Homo Sapiens
gccttccgtgcccgcgtgtcaagttgcctaattctgaggactttcaagcaaaagatgatggaagcattgctgttgcccttgtttatactgcacatctggtctccatgatttcctttttcctacaagtgcccctcagatatcctataattcataaggggtctagatcaacaatcaaagacaatatcaatgacaaactgacggaaaaggagagagagtttccactgtatccaaaaggaggggagaagttgcagtttgattatggtgtctatcttctgaacaaaaatatagcacagctaagatatcaacatggactaggcacggaagatca

SEQ ID NO: 167324 - DNA, 1278 bp, Homo Sapiens
  misc_feature (1061)..(1073): n is a, c, g, or t
ctgggtcaatggagatggcctctgctgactcagatgaagaccaaggcataaggttgggaaaacacctcatttgaccttgcagctgaccttcaaaccctgcatttgaaccgaccaacattaagtccagagagtaaacttgaatggaataacgacattccagaagttaatcatttgaattctgaacactggagaaaaaccgaaaaatggacggggcatgaagagactaatcatctggaaaccgatttcagtggcgatggcatgacagagctagagctcgggcccagccccaggctgcagcccattcgcaggcacccgaaagaacttccccagtatggtggtcctggaaaggacatttttgaagatcaactatatcttcctgtgcattccgatggaatttcagttcatcagatgttcaccatggccaccgcagaacaccgaagtaattccagcatagcggggaagatgttgaccaaggtggagaagaatcacgaaaaggagaagtcacagcacctagaaggcagcgcctcctcttcactctcctctgattagatgaaactgttaccttaccctaaacacagtatttctttttaacttttttatttgtaaactaataaaggtaatcacagccaccaacattccaagctaccctgggtacctttgtgcagtagaagctagtgagcatgtgagcaagcggtgtgcacacggagactcatcgttataatttactatctgccaagagtagaaagaaaggctggggatatttgggttggcttggttctgattttttgcttgtttgtttgttttgtactaaaacagtattatcttttgaatatcgtagggacataagtatatacatgttatccaatcaagatggctagaatggtgcctttctgagtgtctaaaacttgacacccctggtaaatctttcaacacacttccactgcctgcgtaatgaagttttgattcatttttaaccactggaatttttcaatgccgtcattttcagttagatgattttgcactttgagattaaaatgccatgtctatttgattagtcttannnnnnnnnnnnnacaggcttatcagtctcactgttggctgtcattgtgacaaagtcaaataaacccccaaggacgacacacagtatggatcacatattgtttgacattaagcttttgccagaaaatgttgcatgtgttttacctcgacttgctaaaatcgattagcagaaaggcatggctaataatgttggtggtgaaaataaataaataagtaaac

SEQ ID NO: 167325 - DNA, 372 bp, Homo Sapiens
tgactctagaggattactgatcttccgtgccccgctgtgccaataagagaggcctttataggtcaaagtcataggaacgcacccacttgacagaggggaagactgaggtgcccacaggatggcagagccaagaagtcaaatgcaggtgtctacatggccccgactgtgccctgtcatcggaccgggaggggtcctgaggaagtctttagtacggctttgctagtttgagtcttagagagtgtctgcaggaaataggaagcgggaagtaggtttttaaagaaaaaagtgtttatgatataattccatttttggaaaacaaaaagaaccatccatctctttatgtatgagtgtttgtttagggacggaagatca

SEQ ID NO: 167326 - DNA, 400 bp, Homo Sapiens
  misc_feature (261)..(275): n is a, c, g, or t
gactcttgaggatcccctgaccttcctgccccatgagaggtgaatgttgaatgtttactttatgtctacttaattggtttctgagtgcagctttggctgagtctcataatacgaaatatagcgtgataattttggttatttttaaacctacttgtaaatgaccgctattattatttctcaccactctggaattctgtttttggtttcttttttggtacgttgcttatttaggaaagagtttcaaaatcgtaagaaactgannnnnnnnnnnnnnnatcttcttaaacttaggtcattggagattttttttctcctgactttattgctgtggagtcggacattacaactttataattttactattttgcatatatggagggttttactttgggcacgggag

SEQ ID NO: 167327 - DNA, 195 bp, Homo Sapiens
tgcctgctgtcgctattgttggggaagtcctcatggaaacttgaattgggccttggagttgaatgggatttgggcacatccccctgagcgtggggagatcaccttatttggctttgtatttttagcaggtggtacagcataggttggaaataatttttttagatgaataaatgaggggaagggcacggaagatca

SEQ ID NO: 167328 - DNA, 347 bp, Homo Sapiens
gactcttgagatcccctagtaagggaaatcatatggattatatataataaagaactctctggttggtaaacattattgaatataagaagaaaagcttcaaactttttggccctaaaaaatttgcccataggataaaaataacaagactaggcaaacacattccctataggttacagaacaatggaggaattaaaagacaaataaattccatttcataatatacttgtcatacttatgtaaaagttgtcattcttctcacaagcccctgcatcccccacaaaggcaaacctgaacaataattctcattaaagtatacttccataatctactatgggcacggaagatca

SEQ ID NO: 167329 - DNA, 821 bp, Homo Sapiens
  misc_feature (687)..(687): n is a, c, g, or t
  misc_feature (690)..(690): n is a, c, g, or t
  misc_feature (784)..(784): n is a, c, g, or t
agtcggttctaccataataaaagtattgttggagggaaacagaagccagtggccacctgccctgggaaggtaggcactcagtgaaaaatgaaattcatttcaaggaactaccctaatggaaacccaggggaaaggttaaaaacagaagaaaaacaaacccaaccctatccctgcaaactgaaatgtgaaagagtctgttataagtttgagacaactgcattatcaccaagatgtaaccgaaccccctcggtttgtccctatgagtggtaatcagtttcatttagggccttcaaacctgaggtagttgagggtcacctgaaagacatgtctggaaaaatctactctcagaatcgaacccaacagcattgaattgtttcctgttgctttggctcctgacaacaccacggtgtggtgctgatcttgtatttggtctggacctgggagaggaaggaatttggcagcaaacagctggctggtttgctgcgccgatggctggcaggtccgtggtggtggttttctatgctacaggtggtgcagtctctggaggacaaggatggcagagagagggcaaagccagtttgcttggaaagccaatgttggaactggaggctttccctggcaggatttccagagatttggaaaggtggtaagaaggtagcaagatgctgaccggttattaaagaccanggncaaatggagccaggagacccctctaaactaaagagctaagaaggaactttcagctgcaacctgaaactagttcttcacagggtcgaaggggccnaagccaattaatttgaccggaaccggacatgcgtttg

SEQ ID NO: 167330 - DNA, 1066 bp, Homo Sapiens
  misc_feature (999)..(1007): n is a, c, g, or t
tatctaatttctttgtttcatttagaatatttatgatatctcaaatcttgtaaaaagactctagaacatagcaaagcaaaactgtaatcaaagatatcaaaaagaactaattaaactgaaagatagttcatgtccatggataagaaagctcaatattttctagatgtcagttcttctcaacttgatctatagattcaatgcaataccaatcaaaatcccagcagattattttcgggatactgttaaactgattctaaggtttatttatatggaaaggcaatagacccagaataaccaacacaatattgaagaacaaaggtgggagactgacagtgtctgacttcaagacttatctaaagttacaataatctagacagtgtggtattggtaaaagaacagacaaaaagatcagtgaaacagaacagagagcccagaaatagacccatataaatacagtcaactgatctttgataaaggaaccaaggcaatataatggagcaaagatagttttttcaacaaataattctgaaacacctggatactcacatgcaaaaaaacttaatctaggcacagattttatacccgtcccaaaacttaagtccaaatggatcacacacctacctatttcaccatcgcgattgtgaaataggtaggtggaaaaagggaagcaagcaatccaaataaccacttgcttgcccagagacctttccctcaaacagatgctttcaagagctgcgagagagtagggcatcccttgtggtggtacctctatgtttaaagaaagaagaaaaaaacccagatttggttgtagaaaacaatgcccagcaacagactggccagtgcttagacaaatttggggttggggggaacactttggtttgaaagcacagagcagtttgccatgtttcttctgtgcctaccattctcccttggcctcaacttctgtaagatggggggggaccaaaagagaagtaaagttaagaagaaagtggaaaattnnnnnnnnngatgtcaagtttttacatgcatatatttcagcttatgctgaagacctacctatttcaca

SEQ ID NO: 167331 - DNA, 603 bp, Homo Sapiens
ggcagctcttgaaagcatctgtttgagggaaaggtctctgggcaagcaagtggctatttggattgcttgcttccctttttccacctgggacattgtaatcataaaataacagtaaattccaaacctcaaaaactattatggcctgagcacagctgaaatctagcagagtttaactcttctgcctccatgtctgtcacttataattcaggttctgctgttggcttcagaacatgagcagaagaatcgttttatgctagttattgcattcatggttgaaactcaacttagggaaagggttccaatgtattaagcaatgggctgcttctccccaatcctccctaacaattcgttgtgtggacttctcatctaaaaggttagtggcttttgcttgggatcagtgctctctattgatgttcttgctggtctccagacacattcctgttgcattaagacttgaaagacttgtagatgtgtgatgttcaggcacaggatgctgaaagctatgttactattcttagtttgtaaattgtccttttgataccatcatcttgttttctttttgtaggtataaataaaaacactgttgaccattgtaaaacatac

SEQ ID NO: 167332 - DNA, 924 bp, Homo Sapiens
  misc_feature (319)..(327): n is a, c, g, or t
  misc_feature (374)..(375): n is a, c, g, or t
  misc_feature (821)..(821): n is a, c, g, or t
  misc_feature (828)..(828): n is a, c, g, or t
  misc_feature (835)..(835): n is a, c, g, or t
  misc_feature (845)..(845): n is a, c, g, or t
  misc_feature (875)..(875): n is a, c, g, or t
ggcactacaacaggatagggacatcagacagccccagaaaccccttccagatctgatatgggactattaatttttatgctgttaattggtattcattcacaatgcagttgaagggggaaggctccactgcattctttggctaaggcctgaatgcttgctcatctgtaagatctatactcgaggttttgttttccttttaaaattctttagggagagagggatggtttctgaggggttctgaaagtatgattcaatgtgcaacatacaggtaggtcttcagcataagctgaaatatatgcatgtaaaaactttgacatcnnnnnnnnnaattttccactttcttcttaactttacttctctttttgtcccccccnnatcttacagaagttgaggccaagggagaatggtaggcacagaagaaacatggcaaactgctctgtgctttcaaaccaaagtgttccccccaaccccaaatttgtctaagcactggccagtctgttgtgggcattgttttctacaaccaaattctgggtttttttcttctttctttaaacatagaggtaccaccacaagggatgccctactctctcgcagctcttgaaagcatctgtttgagggaaaggtctctgggcaagcaagtggttatttggattgcttgcttccctttttccacctgggacattgcaatcataaaataacagtaaattccaaacctcaaaaactattatggcctgagcacagctggaaatctagcagagtttaactcttctggcctccatgtctgtcacttataattcaggttctggctgttggcttcagancatgagncagtagnattcgttttnatggctagttatttgcatttcatgggttgnaaactcaacttaggggtaaggggtttccaatgtatttaaggcatggggg

SEQ ID NO: 167333 - DNA, 664 bp, Homo Sapiens
ccctaggtctgtcataaggacctggggctggtagagggtataacagcattggcagaggagctggctttgagatgatgaggcgtggtgcttatggtggaggctatggaggctatgatgattacaatggctataatgatggctatggatttgggtcagatagatttggaagagacctcaattactgttttggaggaatgtctgatcacagatacggggatggtggctctactttccagagcacaacaggacactgtgtacacatgcggggattaccttacagagctactgagaatgacatttataattttttttcaccgctcaaccctgtgagagtacacattgaaattggtcctgatggcagagtaactggtgaagcagatgtcgagttcgcaactcatgaagatgctgtggcagctatgtcaaaagacaaagcaaatatgcaacacagatatgtagaactcttcttgaattctacagcaggagcaagcggtggtgcttacgaacacagatatgtagaactcttcttgaattctacagcaggagcaagcggtggtgcttatggtagccaaatgatgggaggcatgggcttgtcaaaccagtccagctacgggggcccagccagccagcagctgagtgggggttacgaaaacggcatcttcatcgg

SEQ ID NO: 167334 - DNA, 515 bp, Homo Sapiens
  misc_feature (67)..(67): n is a, c, g, or t
tcacagccacggagggcaggcagtgacaggtactggagggctcaggcagtggttctttccagtatgncaaggatttcaacattttaatagtggttaggctaaactggtgcatactggcataggcccttgtggggagcacagacacaggataggactccatttctttcttccattccttcatgtctaggataacttgctttcttctttcctttactcctggctcaagccctgaatttcttcttttcctgcaggggttgagagctttctgccttagcctaccatgtgaaactctaccctgaagaaagggatggataggaagtagacctctttttcttaccagtctcctcccctactctgcccctaagctggctgtacctgttcctcccccataaaatgatcctgccaatctaatgtgagtgtgaagctttgcacactagtttatgctacctagtctccactttctcaatgcttaggagacagatcactcctggaggctggggatggtagaaccgact

SEQ ID NO: 167335 - DNA, 1026 bp, Homo Sapiens
gagggaccccgaaggcccttcccagggcccccccctgccagggcgcgcccaggcgctgcttcgtgctcccggggtcttggaacaggagggacttccaggtttttcggtctgggcggccagaagcccccctgcatggagagcccccccatccctttccaggttgctgagccggagtccagtccctgacttctttgctggagtgcctcaaaggcttccgagtgtctgaagcctccgtcctccttcggccccgtgggaatcggacttcagctggcggagctcttcctccagtctccggatctccctccgggaggcgggagacggactcctcagacctgagaagcttctccgtgagggcctgcagggcgagccgctccgtgtcggccgcctccttgaaagcctgctgctcctgcttgaggctcaccagctcgcggacctcggtgtagatgtcagactccatagtctgaagggtacttctcagggcctccatgtcctactctctggacttggctgaggtctgtatctccttcacagcttcctttaaggctttcaaatcctgcttgttcccctcagattcttccagggaggcaacctttgccttcatgtcattgatctccttctggctcctcttctggacttctgtgaagatggcgatgttgtcgttgatggatttggtgagctccgtcagccgctcctccaccgtgttctccagggacgtgaagtcccgctcccgggcgtccttcaccacatggatcccatccgagaggtctttgagaatctcattctggagtttctgcagcacttcgctgatccggctgacctcactctccccttgcttcacagctttctctgtgaggtcttgtttatgttgggagcttctcaagatggactcaaaagttccaaatgtggcttgcaaagactgcaccttctgtcgacgcctgcaaccctgcccagctcctccctctgccgggagaagtcctggcggcgccggacctgctggacctcctccaggacgtggtggacgcacca

SEQ ID NO: 167336 - DNA, 391 bp, Homo Sapiens
ttcgcggtatcataattaaacaacccatattggggaccccctgtgactagtagcagctggaaaattctggtttttatcacttgtaaagacatgcagatggcgtggaaccaaaccatgagaaaactccagccatcctggagttgatattcaccatttgtgaggagaaatactaactggactgaccctattgctaggcttaaatacttatttgatcttaccaaagaagtcaacacatgggacctttgtgtcacatgaaccattttctttcctcttctattaagtgtatttctgtttaagttacagttctctaagagaattacaatgtttgtcccatttctaagggcttctcttcaactctaataacagcattattcacgttatataccgcgaa

SEQ ID NO: 167337 - DNA, 469 bp, Homo Sapiens
tagaggatctccttcgcggtatcataacacaagcgtcctcttatcatctgaggacgactgcttgagccttctggaccatcactcaaaggcaacatagaatatgaaagggactctccatccttcttaggatctaaaggactttttggtctagcaggtaaacctactttatcaaaaactagcttaactcttctagtatgtcttttacgatttttaaattctctttcaaaattcccaaggctatgggtatattggtcccatacgatctcaggcaattgaacaactctctgtggatatggaagcccaatatcagccttcttctggagtttttccacaaatccaatgggatttttcagtgcttctctctggtgcctgcctaattttcaaggtcttggactgcttgagaacgctgagcctcgagtacagcgtcgagattctacattatgataccgcgaagcagatcctctagagt

SEQ ID NO: 167338 - DNA, 325 bp, Homo Sapiens
ttcgcggtatcataaacccaaccccgtatccttcctcaaaatagccaccatacctacctattatggtatttccatagccattccgagatatatttccatgcaactttccaccgttccgtttattatgacacgctccatcattgcaatattgctttgcatgatcatgtagttgacatcgtatttgtggcaaagccaccgttcatcattttctatacatgtcgctcttgattcattgcacatcctgctacaacgccggaggcattcacatagagtcatatttttgttctagtattatgataccgcgaaggagatcctctagagtgac

SEQ ID NO: 167339 - DNA, 456 bp, Homo Sapiens
cggatcttatcgcggtatcataactcaccactaggctcgtatttcggggctcaagcaatcctcccacctcaggtcccaaagtgctggaattacaggcatgagctgccaaggtctggcccccatttttattttttatgttattagactttacatgggtctctggcagatgaccaaaacctggattctgctttctgactcattcacacctatttaaaagatgtttgacctaattacatggccatagctgatataactagttttccttgtgttatcttgtttatttttcccttccctatattttctggttagcttaaattactagtttcttttctcctctcaagaacaacaaaacatataaaacctcatttaaatggtatcattatctgtaaccattcatatagctttttaaaactacagaagcaagtggaatatggtaatattttatgataccgcgaa

SEQ ID NO: 167340 - DNA, 656 bp, Homo Sapiens
accccaggattcttcgcggtatataagagactgtttcgagtagctgaaattgggatttcaggctcgtgcccacgtcaagaggtataggaccttcgacgattttcttagcctgcagactaagggagaaaagctcaatcgttgagcttgtgctcaaattgtctgagtagaacaatcacttgaatcgagtgggagttgatcttccagatgagatagtgatgtttctccaaagtcattaccaccacggtgctagagctttgtgatgaactgtaacatatcagggatagatatgatgatccttgaggtattcacgatgtttgacaccgcaaagtagaaatcaagaaggagcatcaatcgttgatggttggtgaaaccactagtttcaagaagggcaagggcaagaagggacacttcatgaaacggcaaatcagttgctgctccagtgaagaaacccaaggttgaacccaaacccgagactaagttcttctgtaataaagggaacaaccactggagcagagtaccctagatacttggtagataagaaggctggccaggtcgatagaagtatattggatatgcattatgctaatgtgtactttactagtactcctagtagcaccagggtatttatgataccgcgaagacatcctggagagccg

SEQ ID NO: 167341 - DNA, 294 bp, Homo Sapiens
tcttagggaggagtgtgactcacgacgcagcatctttctctttccccaaagcacgggcgtgggccggacgggcaccttcattgtgatcgatgccatgatggccatgaggccacgcggagcagaaggtggatgtgtttgaatttgtgtctcgaatccgtaatcagcgccctcagatggttcaaacggatgtgagtcatgccttcctcttgccctgatctagcttcccaaagcaaacccgatgcgcttcgcccacacaggtgtgcaggccttaatctgatggcacgtgcaacagcc

SEQ ID NO: 167342 - DNA, 285 bp, Homo Sapiens
caggataacggcttagggaggctgttagcatatggttctactgagcagcagtgccatctggtgcctgagatcatgtgcttcaggcagttgtcacactgcatctacagccaagcatcacagaaacacgtttccacgtacactggtggtcacgggaaggtgggactgattcacatgttagagacaggtcagatgggaaaattaaggcccaacttggtgttggggaataaccatactctggtctttcaagtgtagtagctgatgacccccaagaccctactccctaag

SEQ ID NO: 167343 - DNA, 916 bp, Homo Sapiens
gggagggtgggtaagaaatacctgcaactgtcagcctcagcagagctctggggagtctgcaccatggcttggaccccactcctcttcctcaccctcctcctccactgcacagggtctctctcccagcttgtgctgactcaatcgccctctgcctctgcctccctgggagcctcggtcaagctcacctgcactctgagcagtgggcacagcagctacgccatcgcatggcatcagcagcagccagagaagggccctcggtacttgatgaagcttaacagtgatggcagccacagcaagggggacgggatccctgatcgcttctcaggctccagctctggggctgagcgctacctcaccatctccagcctccagtctgaggatgaggctgactattactgtcagacctggggcactggcatggtgttcggcggagggaccaagctgaccgtcctaggtcagcccaaggctgccccctcggtcactctgttcccgccctcctctgaggagcttcaagccaacaaggccacactggtgtgtctcataagtgacttctacccgggagccgtgacagtgccctggaaggcagatagcagccccgtcaaggcgggagtggagaccaccacaccctccaaacaaagcaacaacaagtacgcggccagcagctatctgagcctgacgcctgagcagtggaagtcccacagaagctacagctgccaggtcacgcatgaagggagcaccgtggagaagacagtggcccctacagaatgttcataggttctcaaccctcaccccccaccacgggagactagagctgcaggatcccaggggaggggtctctcctcccaccccaaggcatcaagcccttctccctgcactcaataaaccctcaataaatattctcattgacaaccaaaaa

SEQ ID NO: 167344 - DNA, 760 bp, Homo Sapiens
  misc_feature (655)..(655): n is a, c, g, or t
gggggtgggtccaggaggcagaactctgggtgtctcaccatggcctggatccctctacttctccccctcctcactctctgcacaggctctgaggcctcctatgagctgacacagccaccctcggtgtcagtgtccccaggacagacggccaggatcacctgctctgcagatgcattgccaaagcaatatgcttattggtaccagcagaagccaggccaggcccctgtgctggtgatatataaagacagtgagaggccctcagggatccctgagcgattctctggctccagctcagggacaacagtcacgttgaccatcagtggagtccaggcagaagacgaggctgactattactgtcaatcagcagacagcagtggtactttgtggtattcggcggggggaccaagctgaccgtcctaggtcagcccaaggctgccccctcggtcactctgttcccgccctcctctgaggagcttcaagccaacaaggccacactggtgtgtctcataagttacttctacccgggagccgtgacagtggcctggaaggaggatagcagccccgtcaaggcgggagtggagaccaccacaccctccaaacaaagcaacaacaagtacgcggccagcagctatctgagcctgacgcctgagcagtnggaagtcccacagaagcttacagctgccagggtcacgcatgaaagggagcaccgtgggagaaggacagtggccccctacagaatgtttcataggtttttcaaacc

SEQ ID NO: 167345 - DNA, 842 bp, Homo Sapiens
ttgggaaggaaaaaaaacccctcttccccttggggattccttgcagctttttagtttttccccttggttggggggtaagggaattaaaaacctatgaaacctttctgtaggggcccactgtttttttcccacggtggctccctttcatgcggtgaccctggcagctggtagcttttgtggggactttcccactgtccaggcgtcaaggctcaggtagctgctgggccgcgtacttgttgttgctttgtttggagggtgtggtggtctccactcccgccttgacggggctgctatctgccttccaggccactgtcacggctcccgggtagaagtcacttatgagacacaccagtgtggccttgttggcttgaagctcctcagaggagggtgggaacagagtgaccgagggggcagccttgggctgacctaggacggtcagcttggtccctccgccgaacaccatgccagtgccccaggtctgacagtaatagtcagcctcatcctcagactggaggctggagatggtgaggtagcgctcagccccagagctggagcctgagaagcgatcagggatcccgtcccccttgctgtggctgccatcactgttaagcttcatcaagtaccgagggcccttctctggctgctgctgatgccatgcgatggcgtagctgctgtgcccactgctcagagtgcaggtgagcttgaccgaggctcccagggaggcagaggcagagggcgattgagtcagcacaagctgggagagagaccctgtgcagtggaggaggagggtgaggaagaggagtggggtccaagccatggtgcagactccccagagctctccc

SEQ ID NO: 167346 - DNA, 445 bp, Homo Sapiens
  misc_feature (334)..(334): n is a, c, g, or t
  misc_feature (409)..(409): n is a, c, g, or t
gaggcagcgctctcgggacgtcttcaccatggcctgggctctgctattcctcaccctcctcactcagggcacagggtcctgggcccagtctgccctgactcagcctgcctccgtgtctgggtctcctggacagtcgatcaccatctcctgcactgaaaccaccactgacgttggtggttatgactatgtcgcctggtaccaacaacacccaggcaaggtccccaaactcattatttttgatgtcaataagcgaccctcagggatttctcatcgcttctctggctccaagtctgggcaacacgggcctccctgaccatctctgaaactccagggncgcggacgaggggttcatattaactggcagctcatattcgaagtgccaacagttcatgtgggtttttgggcggcngggaccgaactcaccgttcctttgttcaggcccaag

SEQ ID NO: 167347 - DNA, 690 bp, Homo Sapiens
  misc_feature (99)..(99): n is a, c, g, or t
  misc_feature (144)..(144): n is a, c, g, or t
ccgtgggtggggggtagggatgagaactataaacattcggtaggggcactgtcttctccacggtgctcccttcatgcgtgacctgccagctgtagcttntgtgggactcacctgctcagggcgtcaggctcaggtagctgctgnccgcgtacttgttgttgctttgtttggagggtgtggtggtctccactcccgccttgacggggctgctatctgccttccaggccactgtcacggctcccgggtagaagtcacttatgagacacaccagtgtggccttgttggcttgaagctcctcagaggagggtgggaacagagtgaaccgagggggcagccttgggctgacctaggacggtcagcttggtccctccgccgaacacccaatgattgctgctctcataagactgacagtagtagtcagcctcgtcctcaggcttcagtccagagatagtgagggaggctgagttggaggagctgtcgatggagccagagaaccgatcagggaccccagagggtctttggttatcttcatagatcacagtggtggggcactgcccgggcgctgctggtaccactgcacatagttggcgcaatgctgcctctgttgccggtgcaggagatggttaccgtcttccccggagactccgacacagagtggggctgagtcagcaagaaattggcccaagaacc

SEQ ID NO: 167348 - DNA, 399 bp, Homo Sapiens
acataattggtgcctccaaatgagctgcaagtaatagtcagcctcatcctcagcctggagcccagagacggtcaggaaggccgtgttgccagacttggagccgaagaagcgatcagggacccccgagggccgcctagagacctcataaatcatgagtttgggggccttgcctgggtattgttggtaccaggagacaaaattataacgaccaacgtcactgctggttccggtacaggagatggtgactgactgtccaggagacccggacgcggagggaggctgagtcagggcagactgggcccaggaccctgtgccctgagtgaggagggtgaggaggagcagagcccaggccatggtggtgacgtcctgagagcgctgcctccacaacgtgccgaattt

SEQ ID NO: 167349 - DNA, 504 bp, Homo Sapiens
ggtctccaccatggcctgggctctgctgctcctcaccctcctcactcaggacacagggtcctggggcccagtctgccctgactcagcctgcctccgtgtctgggtctcctggacagtcgatcaccatctcctgcactggaaccagcagtgatgttgggagttataaccttgtctcctggtaccaacagcacccaggcaaagccccaaactcatgatttatgaggtcaataatcggccctcaggggtttctaatcgcttctctggctccaagtctggcaacacggcctccctgaccatctctgggctccaggctgaggacgaggctgattattactgctgctcatatgcaggtaccaacagtgtcgtcttcggcggagggaccaagctgaccgtcctaggtcagcccaaggctgccccctcggtcactctgttcccgccctcctctgaggagcttcaagccaacaaggccacactggtgtgtctcataagtgacttctacccggg

SEQ ID NO: 167350 - DNA, 287 bp, Homo Sapiens
ccagacttggagccagagaagcgattagaaattcctgagggccgatcagtgacatcataaattatgagtgtggggcctttgcccggggtgatgtcggtaccaggagacaaagttataactcccaacatcactgctggttccagtgcaggagatggtgatcgactgtccaggagacccagacacggaggcaggctgagtcagggcagactgggcccaggaccctgtgtcctgagtgaggagggtgaggagtagcagagcccaggccatggtggagacgtcccgagagc

SEQ ID NO: 167351 - DNA, 487 bp, Homo Sapiens
  misc_feature (18)..(18): n is a, c, g, or t
  misc_feature (31)..(31): n is a, c, g, or t
  misc_feature (53)..(53): n is a, c, g, or t
  misc_feature (63)..(63): n is a, c, g, or t
  misc_feature (73)..(73): n is a, c, g, or t
  misc_feature (88)..(88): n is a, c, g, or t
aatgttgattccgacttnggcggagggcccnaagcttgatcgtccttacgttnaccccaaggntgcccccctnggttactttgttccngcccttcctctggggagcttcaacccaaaaaggcccacactggtgtgtctcataagtgacttctacccgggagcccgtgacagtgccctggaaggcagatagcagccccgtcaaggcgggagtggagaccaccacaccctccaaacaaagcaacaacaagtacgcggccagcagctatctgagcctgacgcctgagcagtggaagtcccacagaagctacagctgccaggtcacgcatgaagggagcaccgtggagaagacagtggcccctacagaatgttcataggttctcaaccctcaccccccaccacgggagactagagctgcaggatcccaggggaggggtctctcctcccaccccaaggcatcaagcccttctccctgcactcaataaaccct

SEQ ID NO: 167352 - DNA, 735 bp, Homo Sapiens
  misc_feature (51)..(51): n is a, c, g, or t
  misc_feature (65)..(65): n is a, c, g, or t
  misc_feature (69)..(69): n is a, c, g, or t
cctaggtgaccccggagggtacatctttgtcgaacagtcaaatcgaggaangggtaactgtccgnagtnccaggtacggccccaaactctatctatagtgataatcagaggccacagggggccctgaccgattctctgctccaagtctggcacctcagcctccctggccatcaagtgggctccagtccgaggatgaggctgattattactgtgcagcatgggatgacagcctgaatggtccgtgggtcttcggcagagggaccaagctgaccgtcctaggtcagcccaaggctaaccccactgtcactctgttcccgccctcctctgaggagctccaagccaacaaggccacactagtgtgtctgatcagtgacttctacccgggagctgtgacagtggcctggaaggcagatggcagccccgtcaaggcgggagtggagaccaccaaaccctccaaacagagcaacaacaagtacgcggccagcagctacctgagcctgacgcccgagcagtggaagtcccacagaagctacagctgccaggtcacgcatgaagggagcaccgtggagaagacagtggcccctacagaatgttcataggttcccaactctaaccccacccacgggagcctggagctgcaggatcccaggggaggggtctctctccccatcccaagtcatccagcccttctccctgcactcatgaaaccccaataaatatcctcattgacaacca

SEQ ID NO: 167353 - DNA, 446 bp, Homo Sapiens
  misc_feature (28)..(28): n is a, c, g, or t
  misc_feature (40)..(40): n is a, c, g, or t
  misc_feature (46)..(46): n is a, c, g, or t
  misc_feature (53)..(53): n is a, c, g, or t
  misc_feature (83)..(83): n is a, c, g, or t
  misc_feature (99)..(99): n is a, c, g, or t
  misc_feature (433)..(433): n is a, c, g, or t
agatagataggtaggttactcccaactnccccggcccttngaaccnggagggncttgcctatctgccccatcccaggcccacntgcacggctcccgggnagaagtcacagagacacacaaatgtggccgggttggcttgaaagctcctcagaggagggcgggaacagagtgaccgagggggcagccttgggctgacctaggacggtcaacttggtccctccgccgaatgacacataggggtaaccactactgtctcgggagttacagtagtagtcagcctcatcttccgcctgagtcccagcgatggtcaaggaagccgtgtttcctgagctggaggcagagaatcggtctgggatccctgagggccgggtatttttaccagaaatgagaagtataggggcctgtcctggcttctgctggtaccaatttgtanaataggttctgac

SEQ ID NO: 167354 - DNA, 221 bp, Homo Sapiens
gcctactactactatacggctgcgagaagacgacagaagggagcaccgtggagaagacagtggcccctacagaatgttcataggttcccaactctaaccccacccacgggagcctggagctgcaggatcccaggggaggggtctctctccccatcccaagtcatccagcccttctccctgcactcatgaaaccccaataaatatcctcattgacaaccaac

SEQ ID NO: 167355 - DNA, 672 bp, Homo Sapiens
cgaacagccccaaactcctcatttatgacaatactaagcgaccctcagggatatcctgaccgattctctggctccaagtctggcacgtcagccaccctgtgcatcaccggactccagactggagacgaggccgattattactgcgcaacatgggatagcagcctgagtgctgtggtattcggcggagggaccaagctgaccgtcctaggtcagcccaaggctgccccctcggtcactctgttcccgccctcctctgaggagcttcaagccaacaaggccacactggtgtgtctcataagtgacttctacccgggagccgtgacagtggcctggaaggcagatagcagccccgtcaaggcgggagtggagaccaccacaccctccaaacaaagcaacaacaagtacgcggccagcagctacctgagcctgacgcctgagcagtggaagtcccacaaaagctacagctgccaggtcacgcatgaagggagcaccgtggagaagacagtggcccctacagaatgttcataggttctcatccctcaccccccaccacgggagactagagctgcaggatcccaggggaggggtctctcctcccaccccaaggcatcaagcccttctccctgcactcaataaaccctcaataaatattctcattgtcaatcagaaaaa

SEQ ID NO: 167356 - DNA, 502 bp, Homo Sapiens
  misc_feature (16)..(16): n is a, c, g, or t
  misc_feature (28)..(28): n is a, c, g, or t
  misc_feature (108)..(108): n is a, c, g, or t
  misc_feature (155)..(155): n is a, c, g, or t
tggggggaccgaaatnaccgtccttcgnttaaccaaagctgccccctggggtaattcttgttcccgccccttcctctgaggaagctttcaaacccaaacaaggcccanactggtgtgtcttcaataagtgacttcctacccgggagcccgttganagttgccctggaaggcagatagcagcccccgtcaaggcgggaagtggagacccacccacaccctcccaaacaaagcaacaacaagtacgcggccagcagctatctgagcctgacgcctgagcagtggaagtccccacagaagctacagctgcccaggtcacgcatgaagggagcaccgtggagaagacagtggcccctacagaatgttcataggttctcaaccctcaccccccaccacgggagactagagctgcaggatcccaggggaggggtctctcctcccaccccaaggcatcaagcccttctccctgcactcaataaaccctcaataaatatttttctttgtc

SEQ ID NO: 167357 - DNA, 550 bp, Homo Sapiens
  misc_feature (20)..(20): n is a, c, g, or t
  misc_feature (25)..(25): n is a, c, g, or t
  misc_feature (44)..(44): n is a, c, g, or t
  misc_feature (63)..(63): n is a, c, g, or t
  misc_feature (528)..(528): n is a, c, g, or t
tccaaactccccgtggtggngggtnaaaggtttaaaaaacctangaaaaatctgtaagggccnactgtccttctcccacggtgctccccttaaagcgtgaacctggcaactgtaaccttctgtgggaattccaactgctcaagcgttcaagctcaaaaaactgctggccgcgtacttgttgttgctttgtttggaaggtgtggtggtctccactcccgccttgacggggctgctaatcctccttcccaggccactgtcacggctcccgggtagaagtcacttatgagacacaccagtgtggccttgttggcttgaagctcctcagaggagggcgggaacagagtgaccgagggggcagccttgggctgacctaggacgggcaacttggtccctccgccgaacacccagttaccatctttgtagagcaggcagtagtagtcagcctcgtcctcaggctgcacactgacagtgtcagggcagctttgcccccaaggagggagcctgagaaccgggcaggggtccaggacntcttattgtctgtactataaat

SEQ ID NO: 167358 - DNA, 425 bp, Homo Sapiens
  misc_feature (43)..(43): n is a, c, g, or t
tcaaagcccaacaaggccccaaactggttgttgttcctccatnaagttgactttcttacccgggaagcccgttgaacagttgcccctggaaggcagatagcagcccccgtcaaggcgggagtggagaccacccacaccctccaaacaaagcaacaacaagtacgcggccagcagctatctgagcctgacgcctgagcagtggaagtcccacagaagctacagctgcccaggtcacgcatgaagggagcaccgtggagaagacagtggcccctacagaatgttcataggttctcaaccctcacccccaccacgggagactagagctgcaggatcccaggggaggggtctctcctcccaccccaaggcatcaagcccttctccctgcactcaataaaccctcaataaatattctcattgtcaatgag

SEQ ID NO: 167359 - DNA, 476 bp, Homo Sapiens
  misc_feature (50)..(50): n is a, c, g, or t
  misc_feature (71)..(71): n is a, c, g, or t
  misc_feature (81)..(81): n is a, c, g, or t
cgggaaaacaaaatgaacaatggggttggcccttgggcctgaccctaaanaggtgacccttggtcccccanttccccaaanacataaatggggatgttttgtccaatgaacatgcaagtaataatcaaccctcgtccttcaaccctggagccccagagatggtccagggaggccgtgttgccagacttggagccagagaagcgataagaaatccctgagggccgactactgacatcataaatcatgagtttggggactttgcctgggcgttgttggaaccaggagacatagtcataagtaccaatgtcactgctggttccagtgcaggagatggtgatcgactgtccaggagacgcagacacggaggcaggctgagtcagggcagactgggcccaggaccctgtgacctgagtgaggagggtgaggaatagcagagcccaggccatggtggagacgtcccgagagccctcgtgccg

SEQ ID NO: 167360 - DNA, 396 bp, Homo Sapiens
  misc_feature (74)..(74): n is a, c, g, or t
tcaaccttggtccccttcggcccgaaaatattaacaattgctgcctggcttgccatatgaggccgccagtaaanaatcaaccctcgtctttcagcctggagccccagagatggtccagggaggccgtgttgcccagacttggacccagagaagcgatcagggacccctgagggccgattactgacctcataaatgatgagtttgggggctgtgtctggggcctggtggtaccaggagacacggctataagaaccaatgtcagtggaggttccagtgcaggagatggtgactgactgtccaggagacccggacacggagggaggctgagtcagggcagactgagcccaggatcctgtgccctgagtgaggagggtgaggaggagcagagcccaggcc

SEQ ID NO: 167361 - DNA, 468 bp, Homo Sapiens
ctccccctgggaatcctacaagctcccaggactcccgtgggtggggttaaaagttgggaaacctatgaaaaattctgtaagggccaactgtcttctcccacggtgctccccttcaatgcgtgaccctggcaactgtaaccttctgtgggacttcccactgctcgggcgtcaggctcaggtaagctgctggccgcgtacttgttgttgctctgtttggagggtttggtggtctcccactcccgccttgacggggctgccatcctccttcccaggccactgtcacagctcccgggtagaagtcactgatcagacacactagtgtggccttgttggcttggagctcctcagaggagggcgggaacagagtgacagtggggttggccttgggctgacccaggacggtgaccttggtcccagttccgaagacataagtgccactacctgcatatgagctgcagaaataatcag

SEQ ID NO: 167362 - DNA, 698 bp, Homo Sapiens
  misc_feature (548)..(548): n is a, c, g, or t
  misc_feature (589)..(589): n is a, c, g, or t
  misc_feature (592)..(592): n is a, c, g, or t
  misc_feature (596)..(596): n is a, c, g, or t
  misc_feature (600)..(600): n is a, c, g, or t
  misc_feature (615)..(615): n is a, c, g, or t
  misc_feature (623)..(623): n is a, c, g, or t
  misc_feature (648)..(648): n is a, c, g, or t
  misc_feature (685)..(685): n is a, c, g, or t
agtctcctgcactggaaccagcagtgacattggtgattataattatgtctcctggtaccaacatcacccaggcagagccccaatctcataatttatgatgtcagtaatcggccctcaggggtttcttatcgcttctctggctccaagtctggcaacacggcctccctgaccatctctgggctccaggctgaggacgaggctgattattactgcagctcatatagacacattagtccccccctttatgtcttcggaactgggaccaaggtcaccgtcctaggtcagcccaaggccaaccccactgtcactctgttcccgccctcctctgaggagctccaagccaacaaggccacactagtgtgtctgatcagtgacttctacccgggagctgtgacagtggcctggaaggcagatggcagccccgtcaaggcgggagtggagaccaccacaccctccaaacaaagcaacaacaagtacgcggccagcagctacctgagcctgacgcctgagcagtggaaagtcccacagaaagctacagctgccaggtnacgcatgaagggagcaccgtggagaaaacagtggcccctanagnatgntcanaggttctcaaccctnaccccccnccacgggagactagagctgcagggncccaggggaggggtctctcctcccaccccaaggcatnaagcccttctccc

SEQ ID NO: 167363 - DNA, 411 bp, Homo Sapiens
  misc_feature (382)..(382): n is a, c, g, or t
cgggacgtctccaccatggcctgggctctgctgctcctcaccctcctcactcaggacacagggtcctggggcccagtctgccctgactcagcctgcctccgtgtctgggtctcctggacagtcgatcaacatctcctgcactggaaccagcagtgatgttgggagttataaccttgtctcctggtaccaacagcacccagggcaaagcccccaaactcatgatttatgaggtcactaagcggccctcaggggtttctaatcgcttctctgcctccaagtctgggcaacacggcctccctgacaatctctggggttccagggttgagggacgagggttgattatttattgcttgttcatatggcaggttagttaggcagggtntttcgggcagaaggggaccaaggttgaac

SEQ ID NO: 167364 - DNA, 446 bp, Homo Sapiens; identical to SEQ ID NO: 167353
  misc_feature (28)..(28): n is a, c, g, or t
  misc_feature (40)..(40): n is a, c, g, or t
  misc_feature (46)..(46): n is a, c, g, or t
  misc_feature (53)..(53): n is a, c, g, or t
  misc_feature (83)..(83): n is a, c, g, or t
  misc_feature (99)..(99): n is a, c, g, or t
  misc_feature (433)..(433): n is a, c, g, or t

SEQ ID NO: 167365 - DNA, 850 bp, Homo Sapiens
tggggtgtcctgtgccaggtttataagttctcccccctgggtggggggggtgcaagggacataagaacaccttaatgaaccccttttctgttagggggggccccctgttttttctcccccggggtgtttcccttttcaatgcgggggccctgggccagccgtaaggctttttggggggattttcccctgctacagggcgtccaggcttcagggtaggctgctggcccgcggtaacctggtggttggctttggtttggaggggtggggtggtctcccactccccgcccttgaccggggctgttatctgccttcccaggcccactgtcaacggctcccgggtagaagtcacttatgagacacaccagtgtgggccttgttggctgaaagctcctcagaggagggtgggaacagagtgaccgaggggggcagccttgggctgacctaggacggtcagcttggtccctccgccgaacaccatgccagtgccccaggtctgacagtaatagtcagcctcatcctcagactggaggctggagatggtgaggtagcgctcagccccagagctggagcctgagaagcgatcagggatccccgtcccccttgctgtggctgccatcactgttaagcttcatcaagtaccgagggcccttctctggctgctgctgatgccatgcgatggcgtagctgctgtgcccactgctcagagtgcaggtgagcttgaccgaggctcccagggaggcagaggcagagggcgattgagtcagcacaagctgggagagagaccctgtgcagtggaggaggagggtgaggaagaggagtggggtccaagccatggtgcagactccccccc

SEQ ID NO: 167366 - DNA, 765 bp, Homo Sapiens
gggactgcgggggtaagaggttgtgtccaccatggcctggactcctctcctcctcctgttcctctctcactgcacaggccccctctcgcaggctgtgctgactcagccgtcgtccctctcggcatctcctggagcatcagccagtctcacctgcaccctgcgcagaggcttttatgtttatgactacaggatatattggtaccaacagaagtcagggaggtctccccagtatctcctgaggcacagatcagattcagataaacaacagggctctggagtccccagccgcttctctggatccaaagatgcttcggccaatgcaggaattttagtcatctctgggctccggtctgaagatgaggctgactattactgtatggtttggcacaacagtgcttgggtgttcggcggagggaccaagctgaccgtcctaagtcagcccaaggctgccccctcggtcactctgttcccgccctccctctgaggagcttcaagccaacaaggccacactggtgtgtctcataagtgactttctacccgggagccgtgacagtggcctggaaggcagatagcagcccccgtcaaggcgggaatggagaccaccacacccctccaacaaagcaacaacaagtacgcgggccagcagctacctgagcctgacccctggaccagtggaagtccaacaaaagctacagctgccaggtcacgcatgaaagggagcaccgtgggagaagacagtggccccctacaggaatggttcatagg

SEQ ID NO: 167367 - DNA, 396 bp, Homo Sapiens; identical to SEQ ID NO: 167360
  misc_feature (74)..(74): n is a, c, g, or t

SEQ ID NO: 167368 - DNA, 384 bp, Homo Sapiens
  misc_feature (46)..(46): n is a, c, g, or t
tgtggtggtctccaactcccgccttgaacggggctgctaatccttnttcccaggccactgtcaacggctcccgggtaagaagtcacttatgagacacaccagtgtggccttgttggcttgaagctcctcagaggagggcgggaacagagtgaccgagggggcagccttgggctgacctaggacggtcaccttggtccctccgccgaataccacagcactcagactgatatcccacgttccgcagtaataataggcctcgtccccagtctggagaccggtgatgtccagggtggctgacgtgccagacttggagccagagaatcggtcaggatatcccggagggtcgcttagtattgtcataaatgaggagtttggggctgttcg

SEQ ID NO: 167369 - DNA, 195 bp, Homo Sapiens
tgcactgcatgtgagcggtgatggtgcctgatgcggtgtctcgcctatctccttatttaagcccttaactccttgccctttgagagtgtccattgctgcacatggtcactaaatttgaagttccagtcctcactttggagtggacattttaaaatctgcagcgattctactgcttcagttccctccctaagaccc

SEQ ID NO: 167370 - DNA, 243 bp, Homo Sapiens
gactctccaggatttcgtccttagggaggcagagaggagtttggagacaagggagatcatgattcctcttccctgtgttccgagttaaccaggataaccctgcctcgttttaatgcatctgtaggattttgattgataaaatatttcatttcttgcaaatgttgcatggtgaaatcaagagattgaaggcttttatttgagaaagggtacccgagctcgaaattcggtaaatccatgggtcat

SEQ ID NO: 167371 - DNA, 304 bp, Homo Sapiens
atctagagagattctagggttagggagcaggttgcagtcaggcagcaactcgaagaatttctggtacgatgcctaaggaactcagacggaagaggcctgaatgtccaaggctctagtgatctgtgtgacttttctcattctaagtaagtggggttatccaggtaactttgtattcttaaagtaggcctcccagtttgaatgagtttctaggacccacaactctgataagttaagagataaaagcaaggtatctacctccatatacccccagggttgggggaaccatatcctccctaagacccta

SEQ ID NO: 167372 - DNA, 331 bp, Homo Sapiens
  misc_feature (20)..(20): n is a, c, g, or t
tgacctagaggatcccaggncttaggggcatttgcgtccaattgtcctgacctctgttgccaatttatgccacacaaaaaatattccaggtaagtgaaactcaggtaattccagtgttaaaagttcttaataggaatttttcttctctctcttaaatgtatttagccacgatatgtccatatacacagtggcaaacagataatttactgaaaggattggttaattgtgataaattctaagtagcagatagaatcaaaagtttttcatactaaaccaacagcttgtgtgtaacttttctaatatcttccttggttttctccctaagacccta

SEQ ID NO: 167373 - DNA, 180 bp, Homo Sapiens
aaggattataggtcttagggagggaggctgaatctgtaaccaagacctaccaggtcagaatctgcattttaacatgattcccgggtgattcctttgacattaaaatggtgacatgcatgacttagagctatctgaatcacagtgcctccagggcctatgcatcctctccctaagacccta

SEQ ID NO: 167374 - DNA, 149 bp, Homo Sapiens
tttagggaggagcagacaagtagcagagtgaatgagggaaaccagtgactctgaagttacagaagaccagagaaaacattgtagctagaaggaaaatgtagttatttcagtaaagtagtgaggatgaaaactcaattggagtgattgca

SEQ ID NO: 167375 - DNA, 281 bp, Homo Sapiens
tcttagggagggagggaaggaaggtagaagcaaggaaagatataatgtgtggaaaatgatggacatgcaagtaaacactctaccaatgatagtctttctcttgttttggctgttacatgacgtagcatgtacattgatgtggtgtacaggggtatttccccaatccccttcatgatggagaggattacctattattatactgggcacaaattaacttcctgtccagagcatgacagaaacaacaaaatgctgactccctaagacctaggatcctctgagat

SEQ ID NO: 167376 - DNA, 245 bp, Homo Sapiens
gtaggaatagccagccccttgtaacaatggcacccaagtgatcgggatgaaggaagtcccataaactcaaagaacagagccggatgggataggtgggtacctaccctctctaccctctccttgagtgaggctcgcacccgactcagctcatcagtctcaggtacatggtcctgccttctgcagtgctgcctaggccagagatggccctttgtggagtataaacaaaggatcactccctaagaccc

SEQ ID NO: 167377 - DNA, 311 bp, Homo Sapiens
acgtggtatctcgttcctctaaaactggagatgggcaggtatgatcagaaaggtgctcaagatgagcaccaaacacaagctctcctaatagggaagtctgaaaaagaactgaaggggaatgactttgtcaccttttgattcagttatttaatgtcctattccattgttatcgcctaaatctataacatagcagtctgttttgtcatattcttacttatgggataggtcttggcctgactttgaaaatcattcagccatgttgtgaagcctctgttctgggcactggagccgggtacttgtctttgggtctg

SEQ ID NO: 167378 - DNA, 184 bp, Homo Sapiens
tagggtcttagggagactttaaaaatgtgacaaaggggatgacatcgatcaggataatacaatgaccccgtggcccaaatttgggatgagccttctcttttgatgtatctcacagcccctcctcactcctggacacattctacccatgcttcagttgccggcccacctactccctaagacccta

SEQ ID NO: 167379 - DNA, 350 bp, Homo Sapiens
tagggtcttagggagggcgatagagtagagacagttccctatgtcaacaccttatctcagtcctccccagaaacttggccttgtcactgctgcagactgaagttctcattttcccttcaggggtgttggatttcctcatacacccaaacgtggggatcatctcccactcctaaatacttttgcaaagctgaagcttgttgttgctatttcctctctatttcaccttcacatcatcagcagacagtatcatcgcctgcctgtgggcttagctgctattactctaggtctgaatgtgtgatgaaacaagagctcttccctctgactttgtgaccatctccctaaagacccta

SEQ ID NO: 167380 - DNA, 264 bp, Homo Sapiens
gaggagtaaaggtcagagtgctccacaagaatccaaacagtttccagcttcagcgagcccacaagtcccacgtgtatcgcagccttttgcacccacagtaacaggtaccggctcaatcacttttcagttccaatttcattatttctcgaccactgacactgacacatgaaatcccctctgtgaggttggccagagttcctaacctctgctgaactcagtactgtgggattcagcattttgcgactatcttccggctccctaaga

SEQ ID NO: 167381 - DNA, 515 bp, Homo Sapiens
ataagggtgttacctctcgcaagctgttggtgtcactgctggctttccgagcctcagggaggaagagtgttgctattgtagtgaaagctccaccctgtttgttaatctgtcttaactctataaattatggactctgagacttagtctaattacaattgaaacgattctgaagcattgtaatgcagtgaagtattcaaagtaatatgaacattgcatttacatttttctaaatgtcaaattgacatcattctggcctcctaccatggcacaagttttaccaaataatagctaatctgacaacatgtggtacactccagtatttggttttccattctatttcattccatcccactccattccattccagtctgttacaaaaaaattatttcacaaaccatttgaggaagccttaatgtgagataactcacagttggagaaacactggttcacttaataaccacctacctgtatacagcactcttccaaagaagcagtctttgtcctttataaccgta

SEQ ID NO: 167382 - DNA, 1426 bp, Homo Sapiens
  misc_feature (1131)..(1131): n is a, c, g, or t
gggagagttgcggttccctcgggagaggggcggaggctcagaggtgcaccacgtggggtttgctgccggagcggagtctccggccggcgtccagtttgagtctaggttggagttggaaccgtggagatgcggaaggaaaccccaccccccctagtgcccccggcggcccgggagtggaatcttcccccaaatgcgcccgcctgcatggaacggcagttggaggctgcgcggtaccggtccgatggggcgcttctcctcggggcctccagcctgagtgggcgctgctgggccggctccctctggctttttaaggacccctgtgccgcccccaacgaaggcttctgctccgccggagtccaaacggaggctggagtggctgacctcacttgggttggggagagaggtattctagtggcctccgattcaggtgctgttgaattgtgggaactagatgagaatgagacacttattgtcagcaagttctgcaagtatgagcatgatgacattgtgtctacagtcagtgtcttgagctctggcacacaagctgtcagtggtagcaaagacatctgcatcaaggtttgggaccttgctcagcaggtggtactgagttcataccgagctcatgctgctcaggtcacttgtgttgctgcctctcctcacaaggactctgtgtttctttcatgcagcgaggacaatagaattttactctgggatacccgctgtcccaagccagcatcacagattggctgcagtgcgcctggctaccttcctacctcgctggcttggcatcctcagcaaagtgaagtctttgtctttggtggatgagaatgggacagtctcccttgtggacaccaagagtacaagctgtgtcctgagctcagctgtacactcccagtgtgtcactgggctggtgttctccccacacagtgttcccttcctggcctctctcagtgaagactgctcacttgctgtgctggactcaagcctttctgagttgtttagaagccaagcccacagagactttgtgagagatgcgacttggtccccgctcaatcactccctgcttaccacagtggggctgggaacatcagggtcgtccaccacgttgtgcccacagaaacctctcccagncccctggacctgcaaagtgttaactgagtaaaatgggatttaaggacaaaaagcaaggccccccatgaatgtccacttcctttgccctgccctctcagcttgtgagacaacacaggagccttctatagtatgttgatatgctagatctgtgccgttaataggcatcgtctctcagcctgagggaggctggattctgggttcctgtagtcacagggaggaaaagctttcttaaaaatggacatgtatgtgcgtgtgagtgtgtgtgtagatttatagtttcggtagtggcaggaat

SEQ ID NO: 167383 - DNA, 472 bp, Homo Sapiens
agctcggtacccggtgagtaagtccaacattgagaacgtttactttggagcaatctccaattaaccaaagtgatacaaacacagtgatttgggaatgccttcaattacaatgcaatacttaaattttaatactcttgtaggagaaaaagcaactgtataaatgaatgtagagtgaatttctgcaatatttcaaacctgtatcagagaattacactgtgggaaaactaccattgtaataagtgtagcaaaatcttcttagatatctgaaaagtcatactggatggaatccataggaaacggttctattttgagggaagggggattcctttttgttttttaagtgaattcagaaaatgttataaataaatcttttggtttattataaaccttctgcttgctgattttttcccacagcatgtgattctgaaaatgtaactacaatattgacataaaaaataaacagtagtttttc

SEQ ID NO: 167384 - DNA, 1081 bp, Homo Sapiens
  misc_feature (186)..(200): n is a, c, g, or t
  misc_feature (448)..(465): n is a, c, g, or t
  misc_feature (534)..(547): n is a, c, g, or t
  misc_feature (1047)..(1047): n is a, c, g, or t
tacgtcactgcagtaccttaagaggtgactcttaagaatgcatcccctcctgattcctcagctggttcacccttgaggttatttgcaaaaagaaaaggaggttcttgagggcaccgattgcgagcattctggtgcctggctccccgcctgggaagcgatggggtgctcagagcagcaggcaggttnnnnnnnnnnnnnnntcatagttgggttccagctcctggcttgatgagcccagggcgcttacaggcagcccatgaagttgatgacagttttagcatgagaatcacacattcatctccacctggacacttgagccgcatggccagacccctcccacctgatgcggtggtgcgtgtgatttgtcaaaagaaagccttctggatgctgttaagatgtacccttcaggtgaacctggtatcagacccacagtacttgctgtttgagnnnnnnnnnnnnnnnnnnggtcacctgttctccagcccttttctcttacctggtatttccttcctttctcctcccccaccccaaatnnnnnnnnnnnnnncactagaatgtatatatatgtattgatgttgtaggtctaggtgaaaaaaagaagtaaatgttcactgctctatttatatataatgtctgaattaattctgtgcaggaaaggccaggaaattgcatgtgaagttcggtgcagtcaccacctctgtgtgacctgagctgcagtctcttcgctgagatgcaggttttaaatgagacttggggggctgagggcaggcctcaggcctcccagcgccccaacccctccttggtctaatgaaatgcagttcttagtgcagagatgttttaaggtgcaatatatctcttcctttcccgtggttttagagccaagctcaaggtagtaggacgtagggtcttattttgttttcaaacccccatcctcagagcgcagatacatgcagaggcttctgccagggataccacggggccttagtgggaacaggtggagaccagcacttccctttcctgcttgctgaggtaggggattggggggtncagaacccacttcacttttgcctgtttaaagttg

SEQ ID NO: 167385 - DNA, 536 bp, Homo Sapiens
gatacagagcttgactgatggtaaagctgtccgcaggtggcaccccgcaagatcgccgcttcctccacgccgtcagcctgtatgcatagcgaatttgcccagatgcgccgcgctttatgaaatgactgtcagaaatgcctccacggatgtgtacgcctgttgcaaacccatccaggagacatatttccagcagctggcacctgcagcacggagctccggcttcccaaaccctcaggatggcgccttcagcctctccggcaaagcaaagcagaagctgctgaagcacggggtgaacttgctctgaactgcacccaggaggtgactgggaaggagaaaaccagcaaaggaagctctgccttttataattgaaaaggcccctctattttatttttcttgaaaacattcccttttttaggaaccaaatgatatttgagtttttgttattccttttgcagatcgggatgtgtatagggggcaggggttagttcttcaggtcggcagacccagagcacttgataaagaactgtatttaatcg

SEQ ID NO: 167386 - DNA, 955 bp, Homo Sapiens
tggtaccggtccggaattcccgggatatcgtcgacccacgcgtcgaagagacgctgcccaggatgaggcagctccacgagcagcacctacaacttcacatagtacgaccgcattcagagcttgctgatggcaaacctgccgcaggtggccaccccgcatgatcgccgcttcctccaggccgtcagcctgatgcatagcgaatttgcccagctgcccgcgctttatgaaatgactgtcagaaatgcctccacggctgtgtacgcctgttgcaaccccatccaggagacatatttccagcagctggcacctgcagcacggagctccggcttcccaaaccctcaggatggcgccttcagcctctccggcaaagcaaagcagaagctgctgaagcacggggtgaacttgctctgaactgcacccaggaggtgactgggaaggagaaaaccagcaaaggaagctctgccttttataattgaaaaggcccctctattttatttttcttgaaaacattcccttttgtaggaaccaaatgatatttgagtttttgtgattccttttgcagattgggatgtgcttgggggaaaggggttagttcttcaggtcggcagacccagagcacttgataaacgaactgtatctaatcggtagtgttggggccgggacgggcttggctccctctctgccatactgagcctgagggtatttcatatctcctggctgttccatcccagccttgaattggtggccccagctttcaaggttgggcattttttctagaaacctgatcgtcaactagcccagagtggggttttgtttcacccccacaccccgtggtggttgcggggtggcttgcgcacgaggggccggacctggggcaggcgcgtccctcccgccgcgggggttctccgggcctgcgggggccgaccccggggaggggccggccctgtgttgggcc

SEQ ID NO: 167387 - DNA, 492 bp, Homo Sapiens
ctttataattacttcaatgccatgttgtcggtccgggcttgtccctctggggtggaaaccggaaatttctcaggataccaggtatctcccagtattgtaaagtctgccaagcatacaaggcaccacgttcacatcactgcagaaagtgtaacagatgtgtgatgaagatgggaccatcactgtccttggatcaacaactgttgtggttaccaaaatcatgcttcgttcacactgtttctccttttagcaccactgggttgtatccatgctgctttcatttttgtgatgactatgtacacacagctttatcatcggctctcctttgggtggaacacagtgaagatcgacatgagtgcagcccggagagatcctcttccaattgttccatttggattagctgcatttgctaccaccttgtttgccttgggattagctttaggaacaaccatagctgttgggatgttgtttttatccagatgaaaataattctca

SEQ ID NO: 167388 - DNA, 427 bp, Homo Sapiens
cgaacttgcatggctggttagtccgaacttgcatggctggttagtaccgaacttgcatggctggttagtcccgaacttgcatggctggttagtcccgaacttgcatggctggttagtcccgaacttgcatggctggttagtccgaacttgcatggctggttagtccgaacttgcatggctggttagtcccgaacttgcatggctggttagtccgaacttgcatggctggtttgtccgaacttgcatggctggttagtccttgcatggctggttagtcctccaagggcccagttcccaggcccaggacaggaatcagccctgtgctagctgagttcacctgcaccgagaccagcccctagccaagattctactcctgggctcaaggcctggctagcccccagccagcccactcctatggatagactaa

SEQ ID NO: 167389 - DNA, 240 bp, Homo Sapiens
tgagttgtagtgagttaagatgtactgtctgatgagctgtagtgggttgagatgtactctctgatgggttgcagcgagttgagatgccctgccctacctatgcatgcctggtggttcccaaatctctgttttgattcgcactttttgggactaaccagccatgcaagttcggactaaccagccatgcaagttcggactaaccagccatgcaagttcggactaaccagccatgcaagctcg

SEQ ID NO: 167390 - DNA, 1384 bp, Homo Sapiens
cgaacttgcatggctggttagtccgaacttacatggctggttagtccgaacttgcatggctggttagtccgttcattgatgacaacaccagaaggaagttcctcatttatgcaggaaatgactaccagggtcctggaggcctgctggattacatcgacaaaagagattattccagatttcctgagtggggagtgcatgtgcgaagtgccagagggtggactggtccccaaatctctgtaccggactgcagaggagctggagaacgaagacctgaagctctggactgagaccatctaccagtctgcaagcgtcttcaaaggagccccacatgagattctcattcagattgtggatgcctcgtcagtcatcacttgggatttcgacgtgtgcaaaggggacattgtgtttaacatctatcactccaagaggtcgccacaaccacccaaaaaggactccctgggagcccacagcatcacctctccgggtgggaacaatgtgcagctcatagacaaagtctggcagctgggccgcgactacagcatggtggagtcgcctctgatctgcaaagaaggagaaagcgtgcagggttcccatgtgaccaggtggccgggcttctacatcctgcagtggaaattccacagcatgcctgcgtgcgccgccagcagccttccccgggtggacgacgtgcttgcgtccctgcaggtctcttcgcacaagtgtaaagtgatgtactacacccgaggtgatcggctccgagggatttcaaaggttccatgaccagcctggagtccagccacagcggcttctcccacctgagtgccgccaccacctcctccagccagtcccactccagctccatgatctccaggtagtgccgcgctgcctgcacctagtgtgcaaaggggacggccgcccctcctcggacagccagctgcacccgcccacccagcggcgacattgtacagactcctctcacctctagatagcaaatagctctcaaatggtaaacgtagtccgtttgatcccaaaactaccttggcaggaagttttaactctgatcctaacttaactcaataaccatagattttgtatacgtggggcacaaaatccaaccagagcgcaagggcttctcttgaaaagaaaagtagtttcctgtacccaattaaaaggattgacgtgggtccttttcaaaggacccagaacagaccggggggagagacccttgtcggccccccttcgggtccttcgaagaacctttttcaaaacaatttgctttgggccggccgggcccccggcaagggaaaagtgaaacatgggccataagccggcttcccaaggaaaatcccgggggccatgaactaacggccctgggaattcccccccc

SEQ ID NO: 167391 - DNA, 510 bp, Homo Sapiens
aggtgactagaggaccccgggagtagtccaacttgactctacctgggagaaatgacacagaaagagtgcaatcgatgtggaaagggttacagcttctaggaagactgtcatcagtccagctaagcataatggggcgtgcaaaatacagataggtggggatggtgtataaaaatgactgaggatgtcaaaggcctagaaaagagagttttctccctgggcttatagaagtctaaaacatataggactcactcctaccttcacctgtgacatcgttagctacatgaccttcatttttatgcaccatttctgagctcctgttgacttgtaaaattagcatggccatattcaattatacaagaatcacagaaagtgaagaaagaacccaggggagaaagataagataacctaggaagcctaaaactcctcctagaatgaaaagttaaagggctggagacagaaggccaccaacacatgtaaagcatcagtgatttggactactcccggggatcc

SEQ ID NO: 167392 - DNA, 538 bp, Homo Sapiens
ccagaggatccccgggagtagtccaaatatactttgaaatataaactaggtcttctaggtgctaggctccctttgttttcttttaatattcactgtgttcctaggaaacttgatctattccatcatctgattcattaatgaatgctgggtggccaatgaaggatacagatgtagatatcaggtcacctgattttctagttaagcttctacattaatttcatcatctttcatcatctttccattaagccactagtaaaatatttcaatttagggtcaacaataaatcattcctccagacagaaacatatttctttttctattttctgtaaaattaatctttagtcaacacttaaaagtgttaaaccatcatgcagatattccaataagctgctaattgatgaaaattatgtgtttccctcattgaatacaaaaagggattttattaatatactggatcctctcggccataaacatctatatcacaaggaagtgttcattggtaaaagagctgattggacttactcccggtaatcctctg

SEQ ID NO: 167393 - DNA, 317 bp, Homo Sapiens
ctctacaggatctcaggagtagtcaaaacaataatccaacattggacagtaacattttacaaacagcagcaaactagtgagttaacagttaaaactctaggaaaaaactgcttagaaaacaagcctattttgttataagcctaaatatcaaccctagcatttgattttaaccttcaaacatttggcgctttttccaagaggaaattacaactgcctttgcatatgcccctggtttaaatacttgcagaaaaatacccatgtatcatcacctattcagcaaatgcctgaaaccaatacataatgcagcattggactaa

SEQ ID NO: 167394 - DNA, 460 bp, Homo Sapiens
ttagggagcacactgctgcttttatgtggcctttcagctagcgcagaggatggaaaccagagtgggctgatatatttggatgccaggcctgagccaggtgagtcctgtactcattatactagtaaagtgagctgctctctaagcctccctgattacttagcactcccagtccctagcaggagtccctgcagaagggttaatcttgcattaggccctctgctgttttccctctgtaagccttactccaccttgcagtgagttctagtataacttctattccagtaagatcaaatggttaaggactccagaaaagaaatttggtgaacacaaagggtttgtcatactttaactatttgtccctttcccaggtggcccatgcttctaggccagcctcccaattcctagcttgcttcatgctcctggcctttgcctactcaaaacaatctgtcctccctaaaga

SEQ ID NO: 167395 - DNA, 317 bp, Homo Sapiens
atctagaggatcccgtcttagggaggagatgcttggctgatgaaaacgagggaaacagtcacaggcagttacaggaggcacaaccagaaacaggccaggaaactctggggtcatgaaggaggctgaagctgtggctttgggtggatccaaaaaccagtgtgggccttgattcccttgactgcacagtggtataacaatccctgcttcctcacaaggctctccctaagaaccaggtaagatcgtggacacaaaagcactttgtaggttaggcatcaggctgacatgagaccacctgcagtttatccccagtgtcctcg

SEQ ID NO: 167396 - DNA, 187 bp, Homo Sapiens
aattccaactttaaacaaggtgcccagggctgcaacttcctctcccaccccaacacatattgttagtctttcaaccagttctctcgtttactttaagcttctgtgtccgtgcggccactccgctagcctgaatcatggcaataaacacggggatatctccctaagaccctaggaatcctctagagtc

SEQ ID NO: 167397 - DNA, 777 bp, Homo Sapiens
gggaaaaaaagaacgttctcaggttgaccagctgctgaatatttctttaagggaggaagaacttagtaagtcattgcagtgcatggataacaatcttctgcaagcccgtgcagcccttcagacagcttatgtggaagttcagaggctacttatgctcaagcagcagataactatggagatgagtgcactgaggacccatagaatacagattctacagggattacaagaaacatatgaaccttctgagcacccagaccaggttccctgtagcctcacacgagaacgaaggaacagtagatctcaaacatccattgatgccgcactgctgcccactccctttttcccactttttctggagcctccatcttcccatgtgtctccatcagcccaccggagcctctcttcaaataaccacgtctcctactttccaaacccatggcagtgtccctgctccagactcatcagttcagattaaacaagagcccatgtctcctgaacaagatgagaatgtgaatgctgtgccaccaagctctgcctgcaatgtgtccaaggaattactggaagctaatagtatgtaagcttttctctgggttaagggcatcccagtagtgagactggggcatttttatatgagtgatataagccatacttgctcattaaaactaaaatgagcaagtacaactaatttgtcactgggaattctcttcatatatacaggagggattctttttaaaatattttagaagaatgtaaattaaaatatcagtccattttctt

SEQ ID NO: 167398 - DNA, 158 bp, Homo Sapiens
tgctgagattacagtcctgaggctcccggccttacagaattgttttgttcttggggcatctcagaagtctgacataaaaatcaacttgagacttttatgttcattccttttatcttccattttctttccttcctgatttaaaaataccttggactact

SEQ ID NO: 167399 - DNA, 919 bp, Homo Sapiens
  misc_feature (56)..(56): n is a, c, g, or t
  misc_feature (224)..(258): n is a, c, g, or t
ttaccggacaaacataaactgcaaaattcagcaatactttagtcttacttttttangtatagaccataatcattcatcagaagcaaatactagaagaaatctgaggccacaacaccattcccaaatgagaaatgtgggaatttcttcaatattaagagggagaaaaagggccaattttggttgtgccaatccttgcctgtgtaccaacgccaggtactgagcannnnnnnnnnnnnnnnnnnnnnnnnnnnnnnnnnncctgggcctcagaccccgaggttacatgcttgagggccagagagcacgtggggtcaaattaccaaaagactcggttattttttaacctttgaagaagcattccagtattttcccttcaacttttccatatactgacaaagcttaaatttgcaatatttagcattttaatcacctgtgcctgtaacagcaagtgacagtctgtcctccctaccaaccttgcccccaatacctgtccaacagctgcatccccactgcgggaaacaccaattctctatgtgactggagtgagcaggggagaggcaaccaactcaggagtcagatccctggccagactaaaagcgaacattcaggctataattttggggttaaaaaaatgttgtaggagggggggaaaacacaaatgagcacacaaaagtacccacaatatcttgcaactcattttacctgaacaaagataacaattctgattggcccaatttaagttacagattcatccctgcagatatagttttgagttgcacttgaagtacatcaaagagaggaaaatcatcgtggtgaatgtcctcgagtttccgcagacacctttgtggtcggcatggtcacgtgctcaccattcaacagcaatgcgaggatggacggcccgggctggggacgggcctct

SEQ ID NO: 167400 - DNA, 817 bp, Homo Sapiens
  misc_feature (136)..(177): n is a, c, g, or t
agctttgtcagtatatggaaaagttgaagggaaaatactggaatgcttcttcaaaggttaaaaaataaccgagtcttttggtaatttgaccccacgtgctctctggccctcaagcatgtaacctcggggtctgagnnnnnnnnnnnnnnnnnnnnnnnnnnnnnnnnnnnnnnnnnntgctcagtacctggcgttggtacacaggcaaggattggcacaaccaaaattggcctttttctccctcttaatattgaagaaattcccacatttctcatttggtaatggtgttgtggcctcagatttcttctagtatttgcttctgatgaatgattatggtctatacataaaaaagtaagactaagtattgctgaatttgcagttatgttgtcgtgtataagagctacttccaagtgtggttacaaatgaacccatggaatgatgacttcatgttcttctcgtgggtttgtgccgtgctgctttccaaataggtattgaatttatgcattagtctggtgatttcagttctgtgaaatattttgggatctataccaattaaacattttcatagttctgcctattggccttccctgaggctccattgctgcttggtggccattctctgcctttttacagtcacctgaacaatgacccatcatctcttgcttgcttgaaatcttgctgaaatgttctcatttcctgtttgctgtatgggctcgggtggggatgtttgttggctctgctgtgtttattcaccaatttgtacattatttgttgtcctttactactggaaacaagaaatatagtttggtattcttgc

SEQ ID NO: 167401 - DNA, 876 bp, Homo Sapiens
  misc_feature (691)..(691): n is a, c, g, or t
agccatgtccgaggagaagcccaaggagggtgtgaagacagagaatgaccacatcaacctgaaggtggccgggcaggacggctccgtggtgcagttcaagatcaagaggcacacgccgctgagcaagctgatgaaggcctactgcgagaggcagggcttgtcaatgaggcagatcagattcaggttcgacgggcagccaatcaatgaaactgacactccagcacagctggagatggaggacgaggacaccatcgacgtgttccagcagcagacgggaggtgtgccggagagcagcctggcagggcacagtttctagagggcccgtccccagcccgggccgtccatcctcgcattgctgttgaatggtgagcacgtgaccatgccgaccacaaaggtgtctgcggaaactcgaggacattcaccacgatgattttcctctctttgatgtacttcaagtgcaactcaaaactatatctgcagggatgaatctgtaacttaaattgggccaatcagaattgttatctttgttcaggtaaaatgagttgcaagatattgtgggtacttttgtgtgctcatttgtgttttccccccctcctacaacattttttttaaccccaaaattataggcctgaatggttcgccttttagtcctgggccagggaatcctgacctcccttgagtttgggttgcnctcctccccttggcttcacttcaggttaacatagaaaaaattgggtggtcttcccccgcaagtggcgggaatggcacgcttgcttgggaccagggcatttcgggggggcatacgggtcttcgcttccgcggaaggacatacaaattggtccccctcttgcctgcgcataacctcggctaacaagg

SEQ ID NO: 167402 - DNA, 951 bp, Homo Sapiens
  misc_feature (43)..(94): n is a, c, g, or t
  misc_feature (498)..(498): n is a, c, g, or t
  misc_feature (507)..(507): n is a, c, g, or t
  misc_feature (560)..(560): n is a, c, g, or t
  misc_feature (599)..(599): n is a, c, g, or t
  misc_feature (699)..(707): n is a, c, g, or t
gcgcacagttgcggcgggagagcggcggggccgagagcgtgannnnnnnnnnnnnnnnnnnnnnnnnnnnnnnnnnnnnnnnnnnnnnnnnnnnagccatgtccgaggagaagcccaaggagggtgtgaagacagagaatgaccacatcaacctgaaggtggccgggcaggacggctccgtggtgcagttcaagatcaagaggcacacgccgctgagcaagctgatgaaggcctactgcgagaggcagggcttgtcaatgaggcagatcagattcaggttcgacgggcagccaatcaatgaaactgacactccagcacagctggagatggaggacgaggacaccatcgacgtgttccagcagcagacgggaggtgtgccggagagcagcctggcagggcacagttttctagagggcccgtccccagcccgggccgtccatcctcgcattgctgttgaatggtgagcacgtgaccatgccgaccacaaaggtgtctgcnggaactcgnagacattcaccacgatgattttcctctctttgatgtacttcaagtgcaactcnaaactatatctgcagggatgaatctgtaacttaaattgngcccatcagaattgttatctttgttcaggtaaaatgagttgccagatattgtgggtacttttgggtggctcatttgtggtttccccccttcctacaacannnnnnnnnaaccccaaaattaatacccctgaaatggttcgcctttttagtcttgggcccaggggatcttgacctcctggaagttggggttggccctcctccccctggggtcccttcccaggtcacaaataaaagaactttgggtggttttccccccgcccttggggggaattcccaccttcggttgggaacaaggatatttggggggggcccaaggttttgtgctctaggggcaagcggacaccaaacttgc

SEQ ID NO: 167403 - DNA, 961 bp, Homo Sapiens
  misc_feature (548)..(548): n is a, c, g, or t
  misc_feature (600)..(600): n is a, c, g, or t
  misc_feature (605)..(605): n is a, c, g, or t
  misc_feature (742)..(742): n is a, c, g, or t
  misc_feature (756)..(756): n is a, c, g, or t
  misc_feature (811)..(811): n is a, c, g, or t
gggccgagagcgtgactcgcccgctccgcgctgcttcccccgcgccgcctccccgcgccgctcgcgcagccatgtccgaggagaagcccaaggagggtgtgaagacagagaatgaccacatcaacctgaaggtggccgggcaggacggctccgtggtgcagttcaagatcaagaggcacacgccgctgagcaagctgatgaaggcctactgcgagaggcagggcttgtcaatgaggcagatcagattcaggttcgacgggcagccaatcaatgaaactgacactccagcacagctggagatggaggacgaggacaccatcgacgtgttccagcagcagacgggaggtgtgccggagagcagcctgccagggcacagtctctagagggcccgtccccagcccgggccgtccatcctcgcattgctgttgaagggtgagcacgtgaccatgccgaccacaaaggtgtctgcggaaactccaggacattcaacagcgatgattttcctctcgttgatgtacttccagtgcaactcaaaactatatctgcanggatgaatctgtaactttaattgggccaatcagaattgttatctttgttcangtaanatgagttgcaagatatttgtggtacttttgtgtgctcatttgtgttttccccccctccctacacattttttttaaccccaaaatttatagcctgaatggtcgctttttagtctgggccaggggatctgaactccctngagtgggttgcccntctcccctggctcacttccagtcacatagaaggaaattggtggtttcccgccaantgggggatgcaacctgtttggaaacaggtatttgggggggcaaggtttggtataggaagggaaagaaactggtcacttggcttgtttccggggcaacaggggggaatttaaaatggcgtaaattaattggcaaaatttttaagagctttt

SEQ ID NO: 167404 - DNA, 857 bp, Homo Sapiens
ggggcggccccgcgcacagttgcggcgggagagcggcggggccgagagcgtgactcgcccgctccgcgctgcttcccccgcgccgcctccccgagccgctcgcgcagccatgtccgaggagaagcccaaggagggtgtgaagacagagaatgaccacatcaacctgaaggtggccgggcaggacggctccgtggtgcagttcaagatcaagaggcacacgccgctgagcaagctgatgaaggcctactgcgagaggcagggcttgtcaatgaggcagatcagattcaggttcgacgggcagccaatcaatgaaactgacactccagcacagctggagatggaggacgaggacaccatcgacgtgttccagcagcagacgggaggtgtgccggagagcagcctggcagggcacagtttctagagggcccgtccccagcccgggccgtccatcctcgcattgctgttgaatggtgagcacgtgaccatgccgaccacaaaggtgtctgcggaaactcgaggacattcaccacgatgattttcctctctttgatgtacttcaagtgcaactcaaaactatatctgcagggatgaatctgtaacttaaattgggccaatcagaattgttatctttgttcaggtaaaatgagttgcaagatattgtggggtacttttgtgtggctcattgtgtgttttcccccccgtcctacaacattttttttaacccccaaaattagtagcctgaatgtttcgctttgtaagtctgggccagggggattctgactccgtgagttgggttgcccttctccccctggcttcactccaggtcacagtagaagaattgggtgggttccccgccg

SEQ ID NO: 167405 - DNA, 139 bp, Homo Sapiens
gggagatctgactgttacaattagaacatacatatttttgggtgtcagtcattatctctgggccatttttgtcaaaaattaacgtatttaatagagaaggtgtttaaaacaaaaggagggtttgttgtacccgagctcg

SEQ ID NO: 167406 - DNA, 252 bp, Homo Sapiens
atcccggggaggtggctttataagagtggtctgcttccctgccctgccaccacctttagtgctttgtcttttttcccctttgcccatgctcagctgttaacccataaagacttcgttgattttgtgtgcatagtggaatggtatggctgcattaatccattcactgcctgtataccctagaatttgtccctgacactgacttcagagcataatttgagtgcatctccccggatacaggaatcctctggagtc

SEQ ID NO: 167407 - DNA, 611 bp, Homo Sapiens
gtgaatagctagacacacagatcacaagaccttgagctgacccaaggtgaagattgagagttggcattaagccagcattgacaagggggctgtatatccatgacaaggtggacaggtgagaaaaacaaaacgacacaaaaaatcctctttatcttcaagttgatataatgtctgtcttgactttgccttaaacagagggggaaaaaaaacccctaatcttttctcataatttgtaactaagctgtctactcacacaagttgtggttttaaatttacttcacctgtggtgtttggaagactccaagctaatgaattaaagtagtttgtgtttatagcccccaagggtgcctgccaggaacaaacattaaacttctgtagaggaagctactctcaaatctaattcctcggggttcatgcagatggaaatcagtgaaataagagttcatactctgtgttatatccattatgagtgagaggcagcagagaaaatagaataaaaacagaatgtacccttaaggacttaaggatctgttacaaaatgtaaaataaacaaaacgtgtttaagagaaataaactcgcattttttaaggatatatacaacttagtaccag

SEQ ID NO: 167408 - DNA, 257 bp, Homo Sapiens
tgtatcccgtggagctgtatccggggagactctacttacctggcaatggtgtaggcaatcttgaaactcaaaacccaaacaggattttcctcagttacagcctcctgaaaactagctacgctcagaagtacccaaggatgtacccaagaagtaccaagcatggatctgaacctgttttctgacaaggtttccgcccactgcgaggcggtgaaccacaggcacttaccatcctccatgtcctcctccccgggatacag

SEQ ID NO: 167409 - DNA, 333 bp, Homo Sapiens
cttatcccggggagagcattctgggagtagggtctgtgtgcagatgggtttttcggaaaccttaagactgccccatttgggatggttagagcatttctcaatctttcctttagcagcaagctctggtccttggagagagcatagaaagatgaggactgaaattattccacaaatacatcaccggacaactgaatacattatgagaaatagttctcaatccatggctccactgtatcaatgtatttcattgtcatttttcctttgaaaatccctcaagcttatcaggatttagttgtacaatgaagaaatacattatccctccccgggatacag

SEQ ID NO: 167410 - DNA, 363 bp, Homo Sapiens
  misc_feature (48)..(56): n is a, c, g, or t
tgtatccggggaggattctaaagatgcagtcatttgtcaatctgaaannnnnnnnnaaaggaagaatacttgggttgggcttacaagaaaaataaatgccagtaagtgttaaaacttgccagtcaattacaggaatatataagtgttccatcgtagtttctaaaaccagacaaaatcatttcttgcaagcaggtaattccacagaagtttccaaacccatgagtttcactctcaggttccctctaggagcagaagtgcaggtttgcttgggctcctagcctctccctcagatccctcttttccctctaatggatccctagatgctactgatggctccccaggatacagctccccgggatacag

SEQ ID NO: 167411 - DNA, 268 bp, Homo Sapiens
  misc_feature (1)..(1): n is a, c, g, or t
naaaaagatatataaccacataaaatatcaagtactcatgatttatctaataaaagactgcaagacttctacatagaacactataacatattattgtaagaaactgcagaactaaataaacagagagctatgtcatgatcagacttagaagactcagtaaagttgtcattctctctccaattgttctatagattcatttcactaccaggtcaaagacacaatcaaaagcccgacaaatggaatttgtggaatgggaacacaaaggtaa

SEQ ID NO: 167412 - DNA, 481 bp, Homo Sapiens
  misc_feature (13)..(13): n is a, c, g, or t
actgtatcccggngagtgcagaggcttaaggtgggatggcagaagaagctatgcaaaaaagtggggagcaggaggctattagtatataaacaacacaaatgaagaaccaaccccttctgtattctgaagctgagcagagttaaggaacctcaaggacaggatgtctacttactgatgggccctgagggctcttggctgggtgttattcccctctcttcagatggagctttggacaagatctgaagttgattctggtggaagtcagagataagcagtatgtacttgctggttttggttggctgcttttaaaagaatcagaactgaagagtgggtgaagacagagggatgtaaagttaacctatgggaagcagaatgaataccactatactgccatagtttcattttaaacaaaatagagtcatagaccagaccaaagtattaccttgcttctgaaagaaatgtctccctccccgggatacag

SEQ ID NO: 167413 - DNA, 330 bp, Homo Sapiens
ctgttcccggggagccgtcacagaagatatatggctccctctgggctttcagtaatcttttctattaaataatacatagtctttgggtcagcttatcttctatttagagaatgagtcagcatgtctggaacactgtggtaagggcgcgggggagagatgtcacgtcctggagacacctgctaaggtcttgggtgacccaccagcgccaccgtgtggaagggctcctgtgatcaggcggccgtacctccagcttcctctctctctacttaccttctatgctgtgctaaaaattaatgaaagttgccatactcccggatactagctcctgtg

SEQ ID NO: 167414 - DNA, 717 bp, Homo Sapiens
  misc_feature (645)..(645): n is a, c, g, or t
gggcagcacatctctgattctcccatcatcgatgggcagcagcagtcggaaaccccaaccccctcagacattgctgacattgacaacctggagcaggccgaccaggagagggaggtgaagaggcggaagtacgagtgcacaatatgtggacgcaaatttatccagaaaagccactggagggaacacatgtacatacacaccgggaagcctttcaagtgcagcacttgtgacaaaagcttttgcagggccaaccaggctgcccgccacgtgtgcctcaaccagagcatcgacacttacaccatggtggacaaacagactctggaactctgcacatttgaagaagggagtcagatggacaacatgctggtgcaaacaaacaaaccctacaaatgcaacttgtgtgacaaaacattctccactcccaatgaggttgttaaacattcatgccaaaaccagaactcggatgtttttgccctagacgaagggcgatccattctcctgggcagtggggactcggaagtaacggagcctgaccacccagtgttagcttccatcaaaaagggacaagaaaccgtcttactagactgaatgtcacttatctttttaaaaaactctcatttttacaagactatcttccctcccttncctgaattcagaactgtagttctccatggcatgatacaaacaggtcctgttctcttctcctctccccggata

SEQ ID NO: 167415 - DNA, 272 bp, Homo Sapiens
atcgtctagaggttactgtatccggggaggggcacggaatttcactcttgttacccaggcgtgagtgcaatggcagcattgatatattgatcagctgcgacacatcaggtgctctcatgttcgcttcccgcttcatcccctatccatgctgccggatgggtggtaactgtggacagatggaagcagagactcagggaggtagaagggcttctctgaggtcacacctggctgcacctggtttgctccccggcatacagctccccgggatacag

SEQ ID NO: 167416 - DNA, 387 bp, Homo Sapiens
  misc_feature (140)..(243): n is a, c, g, or t
ctgtatccggggagagagaaaattcctttacacatcatccttacagtattattctgaatatgactatgtcttacttacaccatttagtgctttttgcttttataagttttattgtatcaaattagggagccctttttatnnnnnnnnnnnnnnnnnnnnnnnnnnnnnnnnnnnnnnnnnnnnnnnnnnnnnnnnnnnnnnnnnnnnnnnnnnnnnnnnnnnnnnnnnnnnnnnnnnnnnnnntctgaggaatagctttgctgagttaagtatttcttggttgccagttttgtttttcttctacactttgattatattatcccacccttttatggcctgcagggattctgctgagaaatctgctggtgctgtttttggactccccgg

SEQ ID NO: 167417 - DNA, 1075 bp, Homo Sapiens
tgccaagtttatagtctaaattttattatctccaagtcacaatgctgatcacaaatgggcaccctttaaaacagtaacaaaaaacaccaccacacatggaaaaatccttgcaactaaacacagtggaccaacagagacaactctcacagtgtcttaaggtctgggaatctgggcatgctgccacaggcttgaggagacatcttcaggtttaaggcaaagggaacagcctacaaaaggcacaagcaccagctaccccgtagaagaatctcttagttatttcctccttgggggttacagattaagtgcctctccccactctccatcccacacctgtgactcagagtgattaggccagctgctagatggaaggaataaaaacagtgacattaccggggagagacacagccaccatctttgccctcaggttctgtagaaggacagggacagtggccaggttacccctggcagacgtatgtactgcagtaataggaatctcttccacagaggcagcagagaagtggtttagtgccatggatagggaggaaagataggagcccttgcccagaaggtgactggcttccttaggccttaagcccaggagtttttatattctgtctgcaaggacaaaaatagaattcggggaaaataaggtagtaacatctaaaacacttgtagcaggaaagacgtggacaagagcaattgcaaaggacagggtagactgcttgctggataatatttgcctttaaagagatgcattggtccacagcaactggaaaaggggtgtagcaagaagaatggaaagaagagaagcaaggccctctaattccacttacctcaaaagactgagccctgaggactatgtgaatacacacccctaaaggcaaaggctctcactccaccatccctttctcacaaaagcatctggtgtgccatctctccccacagtagggtattggccctcagcagagaacagaagcccatcatagtacaggtattgatggatgctcagactcctaaaaaactaagtcaaagaggagggctcctacccacctactctgagcttctctgctggata

SEQ ID NO: 167418 - DNA, 470 bp, Homo Sapiens
agcagagaagtagaacctatgcttccacctagtggcctagccagacaaatcaggtagcatactggagaaaaaggtcatagtcccgacaatctggttaccctgccttctatcaaaaccacaaacagaaaaaactcaaaagaaatctgctatccctcggcagaaggctttggaatacgctaagaccatccccaaacccaaaccagcaaatctgactcatcaagcatcaaaggaacaaaaaaatccaaacctatgctgggaaagaagaaagtttacctgaaatctcactgctggaaatactgcagaacagacacgaaagggaaaaacaggctgtggctgctttcaatagtccttcacatcgtatagacaacaattgataggataggagacccaaaaatggtccaggaatgaacgtggagaaaagaaacgccaaccaccttctctgctggataccttgggttccgagctcgaat

SEQ ID NO: 167419 - DNA, 852 bp, Homo Sapiens
ctgtatccggggagtacaagagtagctttatcatggatttagggctgtggttacaaggaagctgtaaggaataaaatgactcccatgaagacgtaccgtgcggacgagtggaaggagaaatttggccattacaaagacacaggaatatgttaagaagtgaggggcaggatgaaatcatctagggtaggtatttagagggagggcgccgtgcaaaataaaatcctcactatgaaacaaaggcggaggcaggaggctgcgttaggtggaagcagcggaggaaggagacgaaagggattgtcattttcatgtcgtggctttttagaagacagccatgtcctctactctgattctatcaaaatgtgttctcggggtgctggtaacgttcagccaacgaaataattcctatggcggcagtaggaataacaaaacgcagaagcgggaacgatgtctttttattcctccccagacgcaaacgtggatgcatgaggtttggtaacaggcaaagtcatctggttaacgtgactgatgcaaaaagtccaggcctgggcaaaaagaagtcactgggtgaatgggatggatcagactccctgtcctgagggggagatggtttcttgcagaacgaggtgaaggaggtggttctgctcagcagtcgacagtggccacatctccacctgcagcgacttgatggcttccgtgtccttttcgtgggtagccatgaccaaaggctggagcagcagaaagagctcctcgggaagctggccgctgctctcctgcccgtggctgtcaaaagcctcccaggagtacttctccagggtctgggcgtgctccggcagcagcttgcgggcgtagtga

SEQ ID NO: 167420 - DNA, 386 bp, Homo Sapiens
  misc_feature (37)..(37): n is a, c, g, or t
  misc_feature (342)..(342): n is a, c, g, or t
gggagtctgatccatcccattcacccagtgacttctntttgcccaggccgggactttttgcatcagtcacgttaaccagatgactttgcctgttaccaaacctcatgcatccacgtttgcgtctggggaggaataaaaagacatcgttcccgcttctgcgttttgttattcctactgccgccataggaattatttcgttggctgaacgttaccagcaccccgagaacacattttgatagaatcagagtagagggacatgggctgtcttctaaaaagccacggacatggaaaatgacaatcccttttcgtctccttcctccgctggtttccacctaacggagncttctggcttccggcttttggtttcataggggaggggttttatt

SEQ ID NO: 167421 - DNA, 586 bp, Homo Sapiens
  misc_feature (332)..(332): n is a, c, g, or t
  misc_feature (342)..(342): n is a, c, g, or t
  misc_feature (409)..(477): n is a, c, g, or t
agggctgggcctcatcttgtattctgaaagctgagaaacggctggtcagctggaaggctggtggatgggcaggagtgagccaagctgaggcgttctgcaagaagcaggtctgagtctgtccaaccaatttgtatcctgtggggagaacaacttcattcttaacataccctacaaaccagaaaacaagtttttaaggaagatgctgggcatgctgatagcttttctggtctcctaaggaagagtttttaaaactaaatccaaggaagaaaaatgtaacaacacgtggaagtgaacactaggatgaataagcttgtttcccaaattagaatccntaacgtccantcatttagcttcatgtattcccctttggcggccacagttcaacgtccttttatttttgagacagggnnnnnnnnnnnnnnnnnnnnnnnnnnnnnnnnnnnnnnnnnnnnnnnnnnnnnnnnnnnnnnnnnnnnnggttaaggctgtagtctatccaaacaatttgtatcctgtggtaagaaacaacttgattcttaacgtactctacaaaaccagaaaacaagtttttacaggaagatgctgg

SEQ ID NO: 167422 - DNA, 147 bp, Homo Sapiens
gtggttcagacagaaatcttaccttgtgtatcagcattattccctagagttagagcccaagtattgctccactgctaatcctttgattctccccaaatctatgttcttaatttacctcacctacctcccggatacaggtcctctaga

SEQ ID NO: 167423 - DNA, 405 bp, Homo Sapiens
  misc_feature (139)..(139): n is a, c, g, or t
gatcccctttatccgggagtagggtacatgaagagtacagtttcctcatgtgataaaataatggaacctactatgctttttcctttctaaaagagaatcataaatattttgggggtatggggggtggtgatgacgaagncctcaatattaaaagatgtataacaccatattccttctaacatggtaagttgagactatccagctggtaatgatataaaaatttgagtcaaatagatactttcataaagattattcctgtgtgccacaactgcctgaaagtattcaggcttaaagtgctctgacatacttggtatatttctgtcaattacttaatctcttctgtatatgctctcccaagggtaccagttattcccattaatttatgccataaaaggggagatgctt

SEQ ID NO: 167424 - DNA, 530 bp, Homo Sapiens
acccctgttatcccgggaaggtaattgaatgatggaggcaagtctttcccatgctgttctcatgatagtgaataagtctcatgagatctaggttttaaaaagaggagttcccctgcaaatgctctctctctctttgcctgcttccatccatgtaagatgtgacttgctgctccttgccttctgccatgattgtgaggcctctccctaagccatgtggaagtgtgagtccattagacctctttcttttgtaaattgcccagtctcaggtatgtctttatcagcagcgtgagaatgaactaatacatgtggggacaaggaggcaaacaaattgtcatatgttggttctgctgttgatgtcttgattttgcatctacttcatctccttagcccaagctgtgcacctgctcccggttgttcctttatagtttccaggtgggtcaggtctgtttctttttggcctatgtttacaacagtgatttcaggtcacagccactgctctgatggctccccgggatgcagggggatcctca

SEQ ID NO: 167425 - DNA, 1192 bp, Homo Sapiens
  misc_feature (31)..(31): n is a, c, g, or t
  misc_feature (39)..(41): n is a, c, g, or t
  misc_feature (360)..(360): n is a, c, g, or t
  misc_feature (1077)..(1077): n is a, c, g, or t
cgcgtcacaagacgacgcgggagcgggcganaacatcgnnngtcgaggtctggcctgtggtccggcggcgcggcgtttcatgcttaacaacggtgtgccgcccgacttcccgttggggatttggataaaaagccccttggccccccggggataagccactcgcggagggggggacaaaaagacggtccctttcagataaggtttctgtgccgtgaggagcgcatgagcaccgaggtggcgcagttctcgcagccatttagttgagggctctccctatccgtacagatagaggagaagcgctagctcacttggctgggctgggagagatccgtcctgctcgacgacaatctgcagagtgcncaaatgagcagtccccacccagccaaacctcagaaagccaatcagatggtttcagaacagcagccagtgggatgtgagtgttgcccactgtcagtccccttctgtgagttggccccctcgaccccctcctgggccacatccagtcaacgccacaattcctcaacgccccctcagtccttctggaatgcctctcttggcacccctgccccaacaggctgctgggatctgcacgtggaatcacagggctggttgcatgcaacggcaaagggcatgctcttctgcctgggggagggcctcttgtccctcccagcaggtcccgggacagggctggcagccaccccagcacccaaaataagatgacaaacaagaggaaacaaaccaaaatgaaggagagccatccgggctggaggagggcagaggctccccaaggggatctggggagggcttcaacttatgaatgcatcaggccttggaagacgtggatggaagaggcgagggcaaaaggaagagatgaggggcatggagagagactcagggaagaaggagaaagagcaatcatgcagcttgggacaaatcttttgttgctttatcagattctcagtcaatcaattggtgtttgctagaaccggggtacgcaggggagtgttgaagagagagtgcgcgcgccgagaagagagagatcaagagaaacgggcatcgccagctgcccggggggcncttcactttgcagtcatcatctgtacaaactcttcataattgacctggccatctccatcgatgtcagcctccctgatcatcttcatccacctcctctatcggtcagcttctcccg

SEQ ID NO: 167426 - DNA, 880 bp, Homo Sapiens
aagaagcgaggcctgggtggcgaattcggcacgaggccaggagggggtcgagggggccaactcacagaaggggactgacagtgggcaacactcacatcccactggctgctgttctgaaaccatctgattggctttctgaggtttggctgggtggggactgctcatttggccactctgcagattggacttgcccgcgttcctgaagcgctctcgagctgttctgtaaatacctggtgctaacatcccatgccgctccctcctcacgatgcacccaccgccctgagggcccgtcctaggaatggatgtggggatggtcgctttgtaatgtgctggttctctttttttgtctttcccctctatggcccttaagactttcattttgttcagaaccatgctgggctagctaaagggtggggagagggaagatgggccccaccacgctctcaagagaacgcacctgcaataaaacagtcttgtcggccagctgcccaggggacggcagctacagcagcctctgcgtcctggtccgccagcacctcccgcttctccgtggtgacttggcgccgcttcctcacatctgtgctccgtgccctcttccctgcctcttccctcgcccacctgcctgcccccatactcccccagcggagagcatgatccgtgcccttgcttctgactttcgcctctgggacaagtaagtcaatgtgggcagttcagtcgtcctgggtttttttccccttttctgttcatttcatctggggtccccccaccaacttccccagcccggaccgcgaggcccctggctttccccgtcaactggcccagggtcgcatccaaatggggctttttccctggggaagcgggcgcacagctgttggagaaa

SEQ ID NO: 167427 - DNA, 1157 bp, Homo Sapiens
agtcacggggaccacagacagggggtgataagaaattgtggtcacggtgtaacttcgccgggtgtgtggttttggctagcagcggggtcaaagaggcgcagggcttattttggaactggggggggagggccccgttattttccccttccccagcaggggtacccgggggccagggatatggctagtcctacccccaaacatggccaaaggtaaggttgcccaaccccagggtgaaaccatgccccaataagggaggggagagcccttcccggggctgtagggggggccagaaggctcccccaaagggggaatgttggggagggccttcggctttatgaaaggcatcagggcccttggaagggcatgggatggaagagggcaaggccaaaaggaagagatggggggccatgggagagaggctcagggaggaaggagaaagagcaatcatgcagcttgggacaaatctttggttgctttatcagatttctcagtcaatcaattggtgtttgctagaaccggggtacgcaggggagtgttgaagagagagtgcccccgcgagaagagagagatcaagagaacgggcatcgccagctgcccggggggccttcactttgcagtcatcatctgtacaaactcttcataattgacctggccatctccatcgatgtcagcctccctgatcatctcatccacctcctcatcggtcagcttctcccccaggttcgtcattacgtgacgcagctctgcggcgctgatgtagccattcccatccttgtcaaagacacggaacgcctctcggatctcctcctcactgtctgtgtccttcatctttctggccatcatggtcaggaactccgggaagtcaatggtcccgttcccatctgcatccacctcattgatcatatcctgcagctctgcttcagtggggttctgtcccagggatctcatcactgtccccaactccttggtggtgatagtgccatctccatccttgtcaaagagggagaaggcctccttgaactctgcaatctgctcctcagtcagctggtcagccatggcgaggcccggggtgtccggagcacggggatcaaggttcctccggcggcggcagcagctgcagcagttccagctccgccgcgcgtccgcgcctccacccc

SEQ ID NO: 167428 - DNA, 1016 bp, Homo Sapiens
  misc_feature (159)..(193): n is a, c, g, or t
  misc_feature (382)..(401): n is a, c, g, or t
  misc_feature (484)..(612): n is a, c, g, or t
gggcctcttccctcgcccacctgcctgcccccatactcccccagcggagagcatgatccgtgcccttgcttctgactttcgcctctgggacaagtaagtcaatgtgggcagttcagtcgtctgggttttttccccttttctgttcatttcatctggctnnnnnnnnnnnnnnnnnnnnnnnnnnnnnnnnnnntgcttcccctcactgcccaggtcgatcaagtggcttttcctgggacctgcccagctttgagaatctcttctcatccaccctctggcacccagcctctgagggaaggagggatggggcatagtgggagacccagccaagagctgagggtaagggcaggtaggcgtgaggctgtggacattttcggaatgnnnnnnnnnnnnnnnnnnnnaaccgggcaatattgtgttcagttcaagctgtgaagaaaaatatatatcaatgttttccaataaaatacagtgactacctgannnnnnnnnnnnnnnnnnnnnnnnnnnnnnnnnnnnnnnnnnnnnnnnnnnnnnnnnnnnnnnnnnnnnnnnnnnnnnnnnnnnnnnnnnnnnnnnnnnnnnnnnnnnnnnnnnnnnnnnnnnnnnnnncaattggtacggccgccccctccagccccccaaaaaagaatacttcctaagaaccccctcaatttatgggaggcgggggggccccccacaagggaaaagagaaaaatagggccccataaagtgtttttttctcttggaggcccccccgccgcccctccgaaaaaaagaggtttttgaaaaaccccccgccacaagaagagagagacgccccgccccccggcgcacacggaaggggaggctctcgaaagcaaacacctcctctgcgtgttgtggctttcaaagagggaaaccccgcttctcgcgtgacaactccaagctccgggggcggactcctccccccgcaaagaaaaaaacatcccgctctagtctaacacaccccaccagccgcgtgtcaagcacataac

SEQ ID NO: 167429 - DNA, 695 bp, Homo Sapiens; identical to SEQ ID NO: 81753
  misc_feature (569)..(607): n is a, c, g, or t

SEQ ID NO: 167430 - DNA, 1065 bp, Homo Sapiens
  misc_feature (1002)..(1010): n is a, c, g, or t
gatttaacccttgattgaaagcaggctggtccggtccggaatcttagggatatcgtcgacccacgcgtccgccttgatccccgtgctccggacaccccgggcctcgccatggctgaccagctgactgaggagcagattgcagagttcaaggaggccttctccctctttgacaaggatggagatggcactatcaccaccaaggagttgggaacagtgatgagatccctgggacagaaccccactgaagcagagctgcaggatatgatcaatgaggtggatgcagatgggaacgggaccattgacttcccggagttcctgaccatgatggccagaaagatgaaggacacagacagtgaggaggagatccgagaggcgttccgtgtctttgacaaggatgggaatggctacatcagcgccgcagagctgcgtcacgtaatgacgaacctgggggagaagctgaccgatgaggaggtggatgagatgatcagggaggctgacatcgatggagatggccaggtcaattatgaagagtttgtacagatgatgactgcaaagtgaaggccccccgggcagctggcgatgcccgttctcttgatctctctcttctcgcgcgcgcactctctcttcaacactcccctgcgtaccccggttctagcaaacaccaattgattgactgagaatctgataaagcaacaaaagatttgtcccaagctgcatgattgctctttctccttcttccctgagtctctctccatgcccctcatctcttccttttgcctcggctctgtcatcacggtttccagggccggtgcattcatgagttgaggcctcccagatccctggggagcttgcctctccagccgatggtctcgtcatgtgggtgggccctgctgactctatttggtgctggggggcgacccctgtcggggctgtgggggaaaaggcccccaggagagatgcttgcggtgaccctggtccgaccgccggggcggcgagtccgannnnnnnnncgtccgggggcagagggcctctgcatggggcgcacccgccgccccgcttggctct

SEQ ID NO: 167431 - DNA, 890 bp, Homo Sapiens
  misc_feature (245)..(283): n is a, c, g, or t
aaagcaggctggtaccgcctccggaattcccgggatatcgtctttgacaaggatgggaatggctacatcagcgccgcagagctgcgtcacgtaatgacgaacctgggggagaagctgaccgatgaggaggtggatgagatgatcagggaggctgacatcgatggagatggccaggtcaattatgaagagtttgtacagatgatgactgcaaagtgaaggccccccgggcagctggcgatgcccgnnnnnnnnnnnnnnnnnnnnnnnnnnnnnnnnnnnnnnntcaacactcccctgcgtaccccggttctagcaaacaccaattgattgactgagaatctgataaagcaacaaaagatttgtcccaagctgcatgattgctctttctccttcttccctgagtctctctccatgcccctcatctcttccttttgccctcgcctctgccatccacgtcttccaaggcctgacgcattcataagtcgaagccctccccagatccccttggggagcctctgccctcctccagcccggatggctctccttcattttggtttgtttcctcttgtatgtcatcttattttgggtgctggggtggctgccagccctgtcccgggacctgctgggagggacaagaggccctcccccaggcagaagagcatgccctttgccgtgcatgcaaccagccctgtgattccacgtgcagatcccagcagcctgttggggcagtggtgcccagaagaggcataccagaaggactgagggggccgttgaggaaattgtggcgttgactggcatgtggcccaggagggggatcgagtgggacaagtcacagaaagggactgacagagggccaacacttcacatcccactggctgctgtctggaaac

SEQ ID NO: 167432 - DNA, 1050 bp, Homo Sapiens
  misc_feature (14)..(14): n is a, c, g, or t
  misc_feature (824)..(824): n is a, c, g, or t
tccctgtatccggngaggacaacagcgatgagaaaatccgcatttacacctgcgtctgcatctcctctccgccatgagccaggagacgtacctttaccacatagacaaagtggactccaacgacagcctctacgggggagactcccagttcctggcagaaaataacaagctgtgtgagacggtgatggctcagatcctagagcatctgaaaaccctggccaaggacgaggccctgaagcgccagagctcgttgggcctttccttctttaacagcatcttggcccatggggacctacgcaacaacaagctcaaccagctctccgtcaacctgtggcacctggcacagaggcacggctgtgcagacaccaggaccatggtgaaaacgctagaatacatcaagaagcaaagcaaacaaccagacatgactcatctgacggagctggccctcagactccctctgcaaacaaggacctgacccccgggcccatccccaggctcagggactctggtgccaaatccagaaagatctgctctgctgccctgaactcttacggcaatttaggtttctcatttttcttttctttttacatatgtacaaattgttttaagctttggcctctatccaggttattctgacaatgaagaaatgggagttgtcagagcattaaaatgcaatcttcactaagaagcagtctctgtgttggctttgcacaagtggccttcggtctactcagccccatctgatgggcctttttaccaagagagaaacaagaatggaagtaacatctttcctcctcgggaaagggggttggttttttcacaancttaacaaatacggggcttttcaccagtggcgcggcccccttccaagtggcgccgggttccccacccgattctcttgccccaagcctgggcacttgaaaagggtaaggcccgccccccaaagtcgtgggacaggggcgtcccggaaccctccgcagggggggacggtggatttaagcggcggaaaataggcccgcgcccggcccaaagctgagtgtgcgtcacaca

SEQ ID NO: 167433 - DNA, 1251 bp, Homo Sapiens
  misc_feature (50)..(50): n is a, c, g, or t
  misc_feature (258)..(258): n is a, c, g, or t
  misc_feature (352)..(352): n is a, c, g, or t
  misc_feature (361)..(361): n is a, c, g, or t
  misc_feature (883)..(883): n is a, c, g, or t
  misc_feature (1129)..(1129): n is a, c, g, or t
  misc_feature (1138)..(1138): n is a, c, g, or t
  misc_feature (1159)..(1159): n is a, c, g, or t
  misc_feature (1166)..(1166): n is a, c, g, or t
  misc_feature (1188)..(1188): n is a, c, g, or t
  misc_feature (1194)..(1194): n is a, c, g, or t
  misc_feature (1215)..(1215): n is a, c, g, or t
  misc_feature (1235)..(1235): n is a, c, g, or t
gctgctggctggttagaggttccctttgacgccatcccagccccaatgancaattatttattaaatgcccagccccttctgacccatgctgccctgtgagtactacagtcctcccatctcacacatgagcatcaggccaggccctctgcccactccctgcaacctgattgtgtctcttggtcctgctgcagttgccagtcaccccggccacctgcggtgctatctcccccagccccatcctctgtacagagcccacgnccccactggtgacatgtcttttcttgcatgaggctagtgtggtgtttcctgggcactgcttccagtgaggctctgcccttggttaggcattgtngggaagggngagataagggtatctggtgactttcctctttggtctacactgtgctgagtctgaaggctgggttctgatcctagttccaccatcaagccaccaacatactcccatctgtgaaaggaaagagggaggtaaggaatacctgtccccctgacaacactcattgacctgaggcccttctctccagcccctggatgcagcctcacagtccttaccagcagagcacctcagacagtccctgccaatggactaacttgtctttggaccctgaggcccagagggcctgcaagggagtgagttgatagcacagaccctgccctgtgggcccccaaaatggaaatgggcagagcagagaccatccctgaaggccccgcccaggcttagtcactgagacagcccgggctctgcctcccatcacccgctaagagggagggagggctccagacacatgtccaagaagcccaggaaaggctccaggagcagccacattcctgatgcttcttcagagactcctgcaggcagccaggnccaacaagacccttgctggtcccaccccacacacggccagattctttcctgaggctgggctcccttcccacctctctcactccttgaaaacactgttctctggccctccaagaccttctccttcacctttgtccccaccgcagacaggaccagggatttccatgatgttttccatgagtccacatgtttgtttctgaaagggacgctacccgggaagggggctgggacatgggaaaggggaagttntaggcatanagtcaggggttcccttttttngctgctnaaggctcgagcatgcctggatngggctntaccggctggcctgggccctnagggttccctggtgcaactnaccttttcctttgatt

SEQ ID NO: 167434 - DNA, 989 bp, Homo Sapiens
  misc_feature (764)..(764): n is a, c, g, or t
tgtcatgaaaacagtagcctacatggaatcacttttgaacagatcaaagcccagttagaggctttagaactaaagaagacatatgtgttgaatccgctgcacctgaatttatcccccgggctctaagactgcagcattcaggaagtaccaacaaacagcagcaatcaccacccaaggggaaaagtcttcatcatacccagaatgatcacttccagaatgatggaattgttcagcccaatccttctgtacttattggcaatcctattagagcatatactcctccaccccctcttggacctcacccaaatttgggacaatctccaagccctgttcaaagaatagatcctcacactgggacaagtattctttatgtacctgctgtctatggagggaatgtagttatgtcggtgcctttacctgtaccatggacaggataccagggtaaggtttgcagttgatcctcgaattattacacatcaggcagcaatggcctataacatgaaactattacagaccacatggacgaggatctcctaattccttatggccttggacatcacccacctgtcaccataggccagccacaaaatcagcatcaggagaaggatcaacatgagcaaaatcgaaatggtaaaagtgatacaaataattccggacctgaaattaataagattcgaacaccagagaaaaagccaacagaaccaaaacaggttgatttggaatcaaatccacagaacagaagtcctgaatcacgtcctagtgtngtttatcccagtaccaaatttcctcgcaaagataatctcaacccaagacacataaatcttccccttcctgctccccacgcacagtatgcaatccctaatcgccactttcatccccttccccagctaccaagaccaccctttccaattccacagcagcacaccttgttaaatcagcagcagaataatttggctgaacaagcaaatcagaaccacctcagccaatca

SEQ ID NO: 167435 - DNA, 425 bp, Homo Sapiens
cccttcactgtacatctaattcttttgacccacttcaattttcatcatagtaggtagagccacatcttgtagaaaccttaaaactatagatttactacaaaaaagatgagctaatacaaagtctaaagtaaactaaaagaggggttgatttacatctggcacaacttagtctttgttccaatcattttagaagtctcaatttaactccaggctagactccagtttgttctgggcctctcaggaattatgttttgtcatttacattgtatcagacagactacctctcaaaaaatgtatatcttaaatcttacggatgtgaaacaggtagggaagaaataagtatagactgtattagctcacaggattcacactataaagtacactgactcaaattttctctaatcattcatactcgcacattcact

SEQ ID NO: 167436 - DNA, 833 bp, Homo Sapiens
  misc_feature (27)..(27): n is a, c, g, or t
ctttggcagttgatacaaaatacccangggcccagggggctgctgctttagctcctctggtggcttctctagaaaggaagacgctcacccctggctccgactatgctgaaagtgagagcccacaccaattccagaaaggagagcctggggaggggtactgggaaagagttgggagaggaatggaggttcccagtcattaatatgccaatatcattgtccatatcatctgggaatggaaggtcaacaaacatatcatcattgttggggctaaacccatcttcattggggtagttggctggagccacctggatggttgatgatgttgggaacaccaagatgtgtgtacaagaagcatcttgaggggtgttgagctgagatgactgcatgttcagtgcagtacttcggccaaaaacagagcccattgtgacagcatctggcatcactacaaaggacccctggggctccatggcaaccaggcaggcactaaggatagaaggagagtctgcggcagagattccacacatccggcacacatccttgagctttttgctgattgtctgtagtgaacattctccaaggaggatactccaatctttaagctccccatggccaagacgcccaagtcgcccgattacaactctccagggtagagatgtcatttggacaatccctatgcaccactcccataacttctgtagtccaattttacgtgcagatactttactcctccgtgacctgtttggtaaagcaatatttacaacgcaggtctctaataattccccatggaggtcagtgcaggaagccaaaagccagcgctggtcgtgagacagacc

SEQ ID NO: 167437 - DNA, 454 bp, Homo Sapiens
gatatcccaggcagactcagcaccaaggctgctgaatggctgggcaggggcacatggaggaacagcataggggcttctggcttggctagtgccatttgcacaagagatatgggagaaatcatggtctagctcctttctaactcagtgccttaatttctcgttctacttctaggataaagtttaaaatctctaacttgacactgaaagttctctacaatccccctacatgcagtaggtactcgatacataccagttgattcaacaactgaaacaaacacacaaaaataactttctctatctaacatatcaatatttttctgattacaggtttggcttactattttgcctttggtgaaagaagagaaatagcttgcaacttattcaaagaataagataagtgcaaacatttttctgataacgtgctaatctcaaacacattttctccccggataac

SEQ ID NO: 167438 - DNA, 516 bp, Homo Sapiens
  misc_feature (499)..(499): n is a, c, g, or t
ctgtatccacggggaggtaggaaggctttactcttctggtgtggggtggggaggggagatgttgaagccaccacccccttcggaatagggaggaaggagaaagagcccaaacatcccattaggtgggaacattcccattcattagatgcctcttccccagtgggaacttctgtcagccccaggtgagattgcagctggtgatttattgagaaacttccaggttgagtaggcttcattcagggcatgtctctcccccaggccccatcttcatacacttccgctaagatgcccacaattcatcccccttcatgtgcagcttgaaaaaccctgacattgttgctccctgccgggcatacctgccattgccactgcccatctctgtgatgaggaattcaacaccagatctctggcagctcttgagggattggccagtggcatgtctcagggggtgctgtctagttttcccagagccccgccaaggtcctgggccaccgtggcnagagcgtggggaggttt

SEQ ID NO: 167439 - DNA, 580 bp, Homo Sapiens
gacactagccatgattcgattcgactccgtaccctgtatccggggaggggggacggtaggtatgactccaatttggggtaaggagattgagagtcacagtgattaagagactgctcaagctctcagagttcagggcattttgtaaaccaaacagaagaaaggctcatttaggagaaggaaggtaaagggttggcctttgacacttctagttctgctttcaacatttaatgatgggaaagacaggaaaatgcatggagaaaggggaatgaggaagtaggcaaagagaaaaggctcagtagtgctgaatgcaagccatgccacaccctctctcagcttgtttgctacatctggcatgagtccgatatgccagtgcacctcccttctctgtggcaggtactccccgggatacagctgtatcccggggagccggggaggacagcatgtgcaggaaattgtggaggagaggcgtccggcgaactggctgtgattgcaggagggcacgctgacggtagtgggattaattctgttacacaaggtaaaatttctgtctggacccacaaaacacacaaaaaatctgatc

SEQ ID NO: 167440 - DNA, 416 bp, Homo Sapiens
tgaggtgaggaaaggagaccaggtttagtaacttattaagtgtgattctgtgtctaccaagcatattctcagccagcctggaaccctggtacattggctgttcttcgctctctccttgaccccaccgtaccttgctttatccaccggtgaaatctctaggaatgcctcaccagtgcagagggaggcactgagtcagggtaacacgcaattcctcgctcctcaagggtctcccaaaaccacaggcggatgggagtcagggaaaatcgaaattacacgcaccaaatacgcaaggctgctgacacacgttggcagtgatttacctttctattaattgcaaggtttcgcggagtaggttagttgccagagttccagcccagaaaaaccgttaatgtagttagtcgctccccgggatacag

SEQ ID NO: 167441 - DNA, 279 bp, Homo Sapiens
ctgtatcccggggagagaccacgctgcccatgaggagcatgcacaccacctgacatgaccttgaactccagccagatgcctaccagacactcgtcttccttccctgaaactgatttatagaatcaggagagcaacctacttgaaaggagggtagttccagatgtgggggtaatgggaaatgctagtccgcaatgtgctcttttattttactatttttctaaatcatatcatattcctctctctccctccccggctccccgggagacagggggatcctca

SEQ ID NO: 167442 - DNA, 893 bp, Homo Sapiens
  misc_feature (158)..(168): n is a, c, g, or t
gcctgggtggcgaattcggcacgaggcaagaggcagtggtggctgtggcccccaactttggtgctccagggtgggccagctgcttgtgggggcacctgggaggtcaaaggtctccaccacatcaacctattttgttttaccctttttctgtgcattgnnnnnnnnnnncctcctaaaaggaatatcacggttttttgaaacactcagtgggggacattttggtgaagatgcaatatttttatgtcatgtgatgctctttcctcacttgaccttggccgctttgtcctaacagtccacagtcctgccccgacccaccccatcccttttctctggcactccatgtcccaggccttgggcctgaactactggaaaaggtctggcggctggggaggagtgccagcaatagttcataataaaaatctgttagctctcaaagctaattttttactaaagtttttatacagcctcaaattgttttattaaaaaaaagatttaaaatggtgatgcttacagcagtttgtacgagctcttaagtgttgattccatggaactgacggctttgcttgttttgattcttttccccctacttttcctaatggtttaaattctggaattacactggggttcttttgccttttttagcagaacatccgtccgtccatctgcatctctgtcccgtgactcaggggcgcccactctgcttcgattctcctcctgtggaagaaaccattttgagcatgacttttcttgatgtctgaagcgttattttgggtactttttagggaggaatgcctttcgcaataatgtatccattccctgattgagggtgggtgggtggacccaggctccctttgcacacagagcagctacttctaagccatatcgactgtttt

SEQ ID NO: 167443 - DNA, 841 bp, Homo Sapiens
ggggggttaaaaagaccaggtgttcttccaaggagtccaaggttccaaactcccggattgcgttccaggttttcgttaggtacccggttattttcccctttcaggaggggggaaccatccactccccagggtcctccccaggggattccccattaaaagtggcggacgtagggcttggatgctcaatgccggccggtctggagacttggttcccccagtgaggtgggatggggtttgggggcctctcggctgtagtactcatggatcagcacagagtgctctgtgatgtcatgggcccgtagcgtaccagcccaggatgagctcatttggagaaacttttttatgcagttcatacatattcttagcaaattccatgtcaacagccacttcatcttctgactcattgtgcggcactgaaaagcaattggtgacctccactgagtgtttgtcgacagttcccaacagggtcccgataactcgggcagcaccctcgttgcgtctctcgtagctgtccacaatggaggccaaaatgactgggtgcagcctgaccacgcggccgccggggaagggccctggaagagcaggaccaggcagaccgggcgctggggtctgcgctggagcttgcgctgaggccggggtctggccaggagccgcagttgcagccgctgctgccgcagggtctgaggatgaggctggagccgcagcgagaaccggagccgcagccggtgctggcgttggcgctggaactgaggctggggccgccgccgggactggggttggcgtggccggaggagcacttactggtaccgccggtgtggccatcttgtcgagaaagaagccc

SEQ ID NO: 167444 - DNA, 980 bp, Homo Sapiens
ctggcctcgggtttttgacgccgctgtcagcttgccccatcttttgcctccttgtggacagttcgaggtacccacgaggtgctgcccgggttatcgggccctggtggggaactgtcggccaccactccattggaggtcaccaatggctttttcagtgccgccacaatgagtcagaagatgaaagtgcctgttgacatggaatttgctaagaatatgtatgacctgcaatgaacaagtttctccaaaatgagcttcatcctgggctggtacgctaacgggccatgacatcacagagcactctgtgctgatgccacgagtactacagccgagaggcccccaaccccatccacctcactgtggacacaagtctccagaacggccgcatgagcatcaaagcctacgtcagcactttaatgggagtccctgggaggaccatgggagtgatgttcacgcctctgacagtgaaatacgcgtactacgacactgaacgcatcggagttgacctgatcatgaagacctgctttagccccaacagagtgattggactctcaagtgacttgcagcaagtaggaggggcatcagctcgcatccaggatgccctgagtacagtgttgcaatatgcagaggatgtactgtctggaaaggtgtcagctgacaatactgtgggccgcttcctgatgagcctggttaaccaagtaccgaaaatagttcccgatgactttgagaccatgctcaacagcaacatcaatgaccttttgatggtgacctacctggccaacctcacacagtcacagattgcactcaatgaaaaacttgtaaacctgtgaatggaccccaagcagtacacttgctggtctaggtattaaccccaggactcagaagtgaaggagaaatgggttttttgtggtcttgagtcacactgagatagtcagttgtgtgtgactctaataaacggagcctaccttttgtaaattagaaaa

SEQ ID NO: 167445 - DNA, 1692 bp, Homo Sapiens
  misc_feature (1242)..(1286): n is a, c, g, or t
gggctttctcgacaagatggccacaccggcggtaccagtaagtgctcctccggccacgccaaccccagtcccggcggcggccccagcctcagttccagcgccaacgccagcaccggctgcggctccggttcccgctgcggctccagcctcatcctcagaccctgcggcagcagcggctgcaactgcggctcctggccagaccccggcctcagcgcaagctccagcgcagaccccagcgcccgctctgcctggtcctgctcttccagggcccttccccggcggccgcgtggtcaggctgcacccagtcattttggcctccattgtggacagctacgagagacgcaacgagggtgctgctcgagttatcgggaccctgttgggaactgtcgacaaacactcagtggaggtcaccaattgcttttcagtgccgcacaatgagtcagaagatgaagtggctgttgacatggaatttgctaagaatatgtatgaactgcataaaaaagtttctccaaatgagctcatcctgggctggtacgctacgggccatgacatcacagagcactctgtgctgatccatgagtactacagccgagaggcccccaaccccatccacctcactgtggacacaagtctccagaacggccgcatgagcatcaaagcctacgtcagcactttaatgggagtccctgggaggaccatgggagtgatgttcacgcctctgacagtgaaatacgcgtactacgacactgaacgcatcggagttgacctgatcatgaagacctgctttagccccaacagagtgattggactctcaagtgacttgcagcaagtaggaggggcatcagctcgcatccaggatgccctgagtacagtgttgcaatatgcagaggatgtactgtctggaaaggtgtcagctgacaatactgtgggccgcttcctgatgagcctggttaaccaagtaccgaaaatagttcccgatgactttgagaccatgctcaacagcaacatcaatgaccttttgatggtgacctacctggccaacctcacacagtcacagattgcactcaatgaaaaacttgtaaacctgtgaatggaccccaagcagtacacttgctggtctaggtattaaaccccaggactcagaagtgaaggagaaatgggttttttgtggtcttgagtcacacctgagatagtcaggttgtggtgtgacctcctaagtaaacggagcctaccctttgggtnnnnnnnnnnnnnnnnnnnnnnnnnnnnnnnnnnnnnnnnnnnnngacgagacaacagagaattaaaaaatcacacatgctagattcacatgagaaccgtgtaatgatgcacataataaccatagacgtagcccggccacgctgtcaatattcctggagacggcgtggattcatgccgaagtgcacccaacgatttcgtagacgaccaaagttgtgagccatcgcagaatacgcgtcgatgctcgcgactactcttgcccagagccgctggcgtgcgcttttgacgctcgttgcttggtaccgaccaatagcatgcaggccaagaaacttcgtctaagggtgctctcataatggtcccgataccatccatccctgattgacgccccaggtgttagctccctactacgtgcatggacccaattcttgccataccatcctcaaactcattaaa

SEQ ID NO: 167446 - DNA, 446 bp, Homo Sapiens
  misc_feature (42)..(42): n is a, c, g, or t
  misc_feature (49)..(49): n is a, c, g, or t
tgccgtaatacccgtatttcaactgtcaaagccgtgaacatnactcccnagggccctccccagggactcccaattaaagtgctgacgtagcctttgatgctcatgcggcccgttctggaaaacttgtgtcccacagtgaggtggatggggttggggggctctcggctgtaagtactcatggaatccaagacagagtgcctctgtgatgtcatggcccgtagcgtacccagccccaggatgagctcatttggagaaacttttttatgcagttcatacatattcttagcaaattccatgtcaacagccacttcatcttctgactcattgtgcggcactgaaaagcaattggtgacctccactgagtgtttgtcgacagttcccaacagggtcccgataactcgagcagcaccctcgttgcgtctctcgtagctgtccacaaatggata

SEQ ID NO: 167447 - DNA, 983 bp, Homo Sapiens
tagaatcgagctcggtaccgtctttctggatcaaagtcaccatgtccccaagagaagtctaaagactcactagttcaaagttgccctggatccctctcactctgtgcaggagtaaaatctagcacaccaccaggcgagagctattttggtgtctcatctcggcaactgaaaggacaatctcaaacttcaccagaccacagatctgatacttcaagtccagaagtgagacagagtcattcagaatcaccatctctgcagagcaaatctcggacatcacctaagggaggtcggtccaggtcgtgatctccaggccatgagctggcatccagatctccaataagacaagatagaggtgagttctcagcgagtcctatgttgaaatctggaatgtctcctgagcagagcaggttccagtctgactcttcttcatatcctacagtggactcgaattctctcttggggcagagtagattggagactgctgaatcaaaagagaaaatggccttaccccctcaggaggatgctactgcatcacctcctagacagaaagacaaatttagtccctttccagtacaggataggcctgagtcttcactggtattcaaagacacacttagaaccccgccaagagaaagaagtggtgctgggtcatctccagaaacaaaagagcaaaatagtgcattgcctacgtcaagccaagatgaagagttaatggaggtggtagagaagtctgaagaacccgcaggccaaatcctgtctcatttgtcttcagaacttaaagaaatgtccacaagtaactttgaatcatctcctgaagtagaagaaaggcctgctgtgtctttgactcttgatcagagccagtcacaggcttctttggaagcagtagaagtcccttcaatggcctcatcttggggtggccacatttttctccagaacataaagaactgtctaactccccacctcagggagaacagctttgactt

SEQ ID NO: 167448 - DNA, 1082 bp, Homo Sapiens
tattcctgatgatctccctacgaactgtagtgcttccttctgcttcatcatcagaaatcagttcgtcatcagagcatatgttgagcacatttaccagcatctctgtgactttttccccaacaaaaggcaaagaccatgtgaaaacatccataaagtttggaagccagtaggggtgtggagaacagttaaactgcctgatattcatgacattgttttcatatttcaacacagcagctttattgttatagacatctaggtaattgggggcagagaaaattgtaataagtgatggaaagcctgtggcttggctcttcctgtacattcgatacccagcatcttgggcttcatgggctctgataattgatagtaaattattgttctgcaaaaattcacaaactgcagggtaactgtacaaataagagcaccctcggacagtgttgtgggaaaagtgctccaaggtcttctcattgccataatcctctaaggaatcagaccaaagcaggtcacacacaggcccaaaagcaggaggctcagaaaacctatctaatttcctaatgtcatctaaacaagtaatttcaggagacattcctccatgtacacagagaaactgctggtttaagagggcagcaagaggaagacagtcaaaagtctccatacacgcatcatacaccagctccgaatacttgatccgacattcctgtttgaaggtgaaatactctgtaagatgcctgcattcatgatttccccgaagcagaaacaatgttttaggatgattaatctttaaactccataaatacagcacacactctatactgaaatagcctctgtccacatagtcacccaggaagaggtagcgagtattactaggtgatcccccaacttcaaacaacttcatcaggtcaaagaattgtccatgaacatcaccacacactgtgatcggagcctccacctctatatggtcttctcctgcttcaggatggcagccccatcattgatgatctttaaggccacctcctcttccacccgaccttcttttactaaatggtttttcaaaagatccattttaggtttcccattctccc

SEQ ID NO: 167449 - DNA, 486 bp, Homo Sapiens
gtggtcccttggccccagacgtccataccgtaatagtagtaggtttaagtaccagctgctactttgcccgcctgtcgcgcacagtaatacatggcggtgtccgaggccttcaggctgctccactgcaggtaggcggtgctgatggacttgtcggctgagatggagacctggccttggaaggacgggctgtatctggtatcagagtcaccaggatagatgatccccatccactccaggcctttcccgggcatctggcgcacccagccgatccagtaactggtaaaggtgtatccagaacccttacaggagatcctcagagactccccgggtcttttcacctctgctgcagactgcaacagctgcacctcggcaaagacaccttggagaacagccaggacgagggaaaggatgacggttgaccccatcctggaggaggacagaaaagaaagcactgagatcccagctgggtggtgaaggagactcccc

SEQ ID NO: 167450 - DNA, 334 bp, Homo Sapiens
cgactcttgggatccccctgtatcccgggagagagaaaaaaggtttaagatgttgggggctgtattagtctgttttcatgccactgacaaagacataaccgagattgggaaaacaaagaggtttaattggacttacagttccacatggctggggaggcctcagaatcacggaggaaggcagaaggcacttcttacatggcagcggcaagagaaaaatgaggaagaagcaaaagtggaaacgctgataaacccatcaggtcttgtgagacacaatcactatcataagaatagcacaggaaagactggccccccgggtacagctccccggatacag

SEQ ID NO: 167451 - DNA, 463 bp, Homo Sapiens
catcccggggaggcagaaaatgaggatgatgggtatgatgtccctttgccacctgtgccggccgtgctggcccgcggaactctctcagatatctctaatgccagctcctcctttggctggttgtctctggatggagatcctacaacaaatgtcactgaaggttcccaagttcccgagaggcctccaaaaccattcccgcggagaatcaactctgaacggaaagctggcagctgtcagcaaggtagtggtcctgccgcctcagctgccaccgcctcacctcagctctccagtgagatcgagaacctcatgagtcaggggtactcctaccaggacatccagaaagctttggtcattgcccagaacaacatcgagatggccaaaaacatcctccgagaatttgtttccatttcttctcctgcccatgtagctacctagcacaccatctcccctccccgggatacag

SEQ ID NO: 167452 - DNA, 866 bp, Homo Sapiens
  misc_feature (743)..(743): n is a, c, g, or t
gggagttaagctgaggtcgtctgagccctgcgacagcctggacagcaactcaggatggcatcaggcagggcacgctgcacccgaaaactccggaactgggtggtggagcaagtggagagtgggcagtttcccggagtgtgctgggatgatacagctaagaccatgttccggattccctggaaacatgcaggcaagcaggacttccgggaggaccaggatgctgccttcttcaaggcctgggcaatatttaagggaaagtataaggagggggacacaggaggtccagctgtctggaagactcgcctgcgctgtgcactcaacaagagttctgaatttaaggaggttcctgagaggggccgcatggatgttgctgagccctacaaggtgtatcagttgctgccaccaggaatcgtctctggccagccagggactcagaaagtaccatcaaagcgacagcacagttctgtgtcctctgagaggaaggaggaagaggatgccatgcagaactgcacactcagtcccctctgtgctccaggactcccctcataatgaggaggagggggccagtggggggagcagtcccatcagaccttgggagcagcagcagcagcaccagccctgagcccagggagttacagacaccactggagcccccctttcaagggatcagaaggtccctggaggttctggtttcctccaaagccagactactcactgctggctcccctccatctacaaagggncccctgggtgggccaaggccccattgcaaggccttgaattgccggcctgtggggctgagcccttcgggctctgaaaagcaacatgggaaacagggtggcttgttccccaaaagcctgggccca

SEQ ID NO: 167453 - DNA, 321 bp, Homo Sapiens
tcaaggagaggatcgggatgagcaggggctcccggcattccaggtgactgtgaagcaaaatggctacaaaaacaacctgagctatgacatctgagattgaggcacatcccaccaggaaactgtatttgtgttttaagagaatgccagcatgggtccatgccattgcgtccatgaaaggaaaggcggcgaggtacaggaaggcccttctcgtcttgctccccaccgactcgtccacatggtgcagtttattgataatgtagtatcctaaatcactataagctatcagtgtgtgaaagacggcagcgatggccccgagcacca

SEQ ID NO: 167454 - DNA, 403 bp, Homo Sapiens
tcatgagccacaaacggacgtcattgagtgcagaggatgctgaggtgaccaaagcttttgaagaagatatagagaccccaccaacaagaaacattccttctcccggacagctggacccagacacacggatccctgttatcaatcttgaagatgggactaggctggtgggggaagatgctcctaaaaataaggatttagttgaatggctgaagctgcaccctacttacactgttgatatgccaagttatgtaccaaagaatgcagatgtgctgttttcctcatttcagaaaccgaaacagaaacgacatagatgtcgaaaccctaataaattggatataaacactttgacaggagaagaaagggtgcctgttgtcaataaacgaaaccggaagaagaaaatgat

SEQ ID NO: 167455 - DNA, 382 bp, Homo Sapiens
gtccaaggggaccggaccacccagcttgagctgacgctgaggggctaacgagtgaaccttggacaagcttggcttctgccatcagcaacagccaagagctcctgggaggggcaagccccggatggacctggccagggaggcctctgtcagaacgggccaacgccacccttcccagaccctccgtcgtctctcgatcccaccacaagcccagtgggccctgatgcctctccaggtgtggctggtttccatgacaacctaaggaagtctcagggaactagtgctgaggccagtgttagaaaagaagctttgcagtctctcagactcagtcttcctatgcaagtagacgcaactgtgctctacagatttcgcctgccctgaagaa

SEQ ID NO: 167456 - DNA, 490 bp, Homo Sapiens
  misc_feature (63)..(63): n is a, c, g, or t
cccgggaggggggtaggaagagatcataagaggtggcgatggaagacaaggaagaagaatcanacacaccacatgtcagggggtgccacacaactatgttcttactgaaaagaaaccactgtacacagttctttaagggtcaatcgctctttaagaatgactcaaaaatgtataaaatccactcctaaatccaaaaagaaccgagaaatacagaagtgtgcagagaacccacagagggatcacgtccatagagggagtagagtctactacgctgccagacactgcagagtcacggcacagaaggagtttaaaggacagtgccaagtgaaaaccgcgcaacagcacgacaaaatcgagtaggctcaacgatttcacacacacccttgacatgtttctccagatgttctccgtagttctacagccagccaacagaagattacctgaatgggattcttctgtgcttaatgttttcgaatggccatcttaatgc

SEQ ID NO: 167457 - DNA, 463 bp, Homo Sapiens
tcgtctcctagaggtatcccctcatttaggcaaattcaggaaggatgacctgtggcaggtgtcatccagaaagcaggctgggcttgtgcttaaaaacctgatgagataatttaattcagcaagatattaaataaagagggcaaaacatactgataatacactgtgcactaaaggggaagcaggaaattactaagcatcgtctggattttttatctgttcagttgcctatgagggacatgttatgtcacagtcaagggaaaaagggactttgtcttttgatcatgtacttctaatggaaagaaatgcaggggttatcctttttctaaaattttcttcccagagtgggagagtgttctaaagcatagttgaaaattatttatatctacactttctaaataatccacacaaatttatttgctcacttatatttgcctaaatgaagggatacctctaggaacaagct

SEQ ID NO: 167458 - DNA, 336 bp, Homo Sapiens
tcatttaggcaaatccatggagacagaaagcagataaatggttgtaagaagctgagagaaaggagtggggagagattgctaaaaaggagtttccttctagggtgatgaaaatgttctggaactacttattggggatgattgcacaacatggtgaaggtactcaatgtcactaatggtaaatttcacatacactttaccataatttttaaaaagctttattagctacattatgttatgatacttaaatgtcataacaatagcattctgtacgcttcactaggataaaaacttcggatttatatgcatctggaagagaaatttttcactgtaatttgc

SEQ ID NO: 167459 - DNA, 319 bp, Homo Sapiens
ccaacatattctggagtacttcttcatccaactccaaattcttcagttcaccttctcctttaagggtacttagatttatcttgtcaggagataaatttttggtaaatctgaaagagaatacacattgacatttatttatgtgtcagttactatactccagagtctttttttcaaatatacagagaactaaaaatataataggagtggacacaacataatgtccatcaacgacaaatggataaagaaaatgtggtacatatacacgatggagtattattcagccataaaaaagaatgagatcctgtcattgcctaaataa

SEQ ID NO: 167460 - DNA, 335 bp, Homo Sapiens
ttaaagcaacaaactcaaaatcaatattgtatttgtcagaattagagggcccacactaaattcatgaatttcctagaaagttttataagaaacagggatttttttccccctgtggtggcaaaagtacaatcaataaataaaagagactgtctttctaagggaaggaaaggaaggtacacaacatttttagcacctactataaattctgtgatagggtactttcaccattattccagtgaatcttctcaagatcacattgaagaaggtattactggtcccatttttatagtgagagtaactgagattcaatcaagttaagtgatttgcctaatgaa

SEQ ID NO: 167461 - DNA, 465 bp, Homo Sapiens
ttcattaggcaaatagatgtctagttatctcatttccaattgtttactacttgggcaaccttaggcaggtcatttaaactctctacacattgattttgtctgtaagatggtcacagttaatatcaacctgcctgaaagtggtcaatgcaggtattaatatacgtgaaaacactccataaagagttagatggcgtaaaacattgaatccaaggtctagtttagtacagcactttttgagattaacggatgtttgacaaatactaattttgacttttcaaatgtaaaaatatgtgatggattaatgaaaaaccaaaaacaaaggaacgctaatcatagctgtgaatatgaaaagcaaaaatcaccaggtagagtggctcacacacggaagagagaaatattctatatcttgattgtgcttatagtcacatgactataaacattgcctcatgaacggggatcctctaa

SEQ ID NO: 167462 - DNA, 301 bp, Homo Sapiens
ttcattaggcaaatatcctagtttaattctgattagcatcctgaaatcagccttaatttgtcttctgttttggctatgtagctaatttaagacaatgcacttagcctatgaaatctgaaggagatattacaaatgaagaaagctacttcttagcacttccattttagagtgagggaatctagccagggcaacatctgttaagtggtagaatacctttactggttctttttttaaacatcttgtctagggttctacttgagataaaataatggtgcatataaattacatttgcctagatgaa

SEQ ID NO: 167463 - DNA, 339 bp, Homo Sapiens
ttaatttaggcaaatggagtatatgaaaaggtcctaggacattacatcaggtttctccagtaactcaacgttaacaaggtggagggaagagaaagtgctctcaattaagatctctaagaatcattacaacctagtacaacatgagacagtgattggggtcccaatttgagcaaacatactattaaaaagatatgagacatatgaatgtagacctgattaaatgatgccaataaaatatttttaatttagttagcttagaaaactgattgtggttggataagaacaaattcagatgcacatatctagaaatgacgtgaggtgagagatttgcctaatgaa

SEQ ID NO: 167464 - DNA, 327 bp, Homo Sapiens
ttcattaggcaaattcggcagcattccctagccatacttaagcctcacatttaaaacactaactgcatacttttgaaactgtagaaattagggtaaattactttttaaatgagttacagtggaactatgccaattaatgcaggtaaaaagtactaggtttcagaagtagctcggaagtatcaaattattggctctgcagtccaaatgatgtaaaattcaaaactgaattcttctacataactgcaagaactgagtacgataatctcccagcataaatcctgcaaatttagaaatagtgactagagtcttgggatcttgcctaaatga

SEQ ID NO: 167465 - DNA, 318 bp, Homo Sapiens
cggcgacgctagagagatccccttcattcaggccaagtatcagtatctcagtttagtagatacataaaattaaccaccgcagataatgattttttgcataaattcatttatcatgtatttattgaacctctgtcttgtatttaatcttttgaataatataaagagctatgagataatttttttagctggaggaacataacatccaaattcctctcttaagaatagttttggacatgggctgggaagaaagtcttagcatgttcaaaacagaattcttgatttccaccacccatcacctgccacatttgcctgaatgaa

SEQ ID NO: 167466 - DNA, 259 bp, Homo Sapiens
tgaaggtaaaggaaaggagaggattaagagtagatccattgcacctgtcatgcctttcaatgaaagaaggaatgcaatgggaacacaggtttgggtgaagcaaatgaaataaattcagttttggacatcctgaatttgtgataccagtagccatcattgtttatggtttacctagcattgttgcaaatattttacatttatcatgtcgtacaattcttaccgtaatctcacaaaaaggacactattatttgttatcccc

SEQ ID NO: 167467 - DNA, 195 bp, Homo Sapiens
ggtggaaacaactcaagtgtccatcaacaaatgaatggataaaccagatgtactatatccatacaatgggtcatcattcagccataaaaagggatgaagttctggccgggtgcggtggctcacgcctgtaatcccagcctgagcaacaagagcaaaactccacctaaagaaaaagaaaagacaagacaagacaac

SEQ ID NO: 167468 - DNA, 210 bp, Homo Sapiens
tggcggtcctataggcaatgtaccatcatgttttgatagcaaaatgatctagtttcaggatcacaagctgcctttagttgtcatgtctcttcttcctcaatctgaaacagtttatcaggcctcccttgacattcataaccttaacacttttgaagattacaagactgttattttaaaatacgtccctcaatttggatttgcctaattcaa

SEQ ID NO: 167469 - DNA, 209 bp, Homo Sapiens
ccggaccatattggttggcgatttgtatgggtatctcttgtcagtattcaatattcatgtttacagtagcagatattgaaaaatggagggttatctgtgaatttggcttaaattgacacatgttgctctgcctagctagacactgcttcaagcgacttctcctggcatcaccctcctgctgtagcttggcactacagagtgtgtgccat

SEQ ID NO: 167470 - DNA, 763 bp, Homo Sapiens
ctagaggatccccattggttggacgatgtggagctgcgggaggctcagagagattacctggacttcctggacgacgaggaagaccagggaatttatcagagcaaagttcgggagctgatcagtgacaaccaataccggctgattgtcaatgtgaatgacctgcgcaggaaaaacgagaagagggccaaccggcttctgaacaatgcctttgaggagctggttgccttccagcgggccttaaaggattttgtggcctccattgatgctacctatgccaagcagtatgaggagttctacgtaggactggaaggcagctttggctccaagcacgtctccccgcggactcttacctcctgcttcctcagctgtgtggtctgtgtggagggcattgtcactaaatgttctctagttcgtcccaaagtcgtccgcagtgtccactactgtcctgctactaagaagaccatagagcgacgttattctgatctccccaccctggtggcctttccctccagctctggctatcctaccaagggatgaggagacccatcccccttgagacagaaatatggccttttctgggcctcaaaggatcacccagaccatcccccatccaaggagattgccgggagaaaggccccatccggggccagcctcccccggttctgtgggacggtcatttctgggatgaatcgcccttgggggggaataaacggcgaaccccctggggtgaacccggggtttcaagggtggggcgcggtaaaaa

SEQ ID NO: 167471 - DNA, 606 bp, Homo Sapiens
tggttggcgaggaaaatcacgaatgtgagagtaagagttatagccggaataggccttgcgaagaaggatatattgggagctagtgatccttacgtgagagtgacgttatatgacccaatgaatggagttcttacaagtgtgcaaacaaaaaccattaaaaagagtttgaatccaaagtggaatgaagaaatattattcagaaaaataattctggaaggacctaagaaactgtttactgtatttgctctgggggtgggacaaaggttcatcctcagcagcaccggcttctttttgaagtgtttgacgaaaaccgattggtaagttatattgtgcttatatgaaatatgaagtaagggtacatttcagtggagcagccaggggaagtgggtaagcagtctgggatttgagtgatggcttgggggtggttatggagactctgggcaaaatggtgagggagatagaatttgttttcttcctcctggtcctactcgctccctttccattctcctcccaagcacctcttctgattgccaacatattataaggtcttactcaagacctcttgtgacaggagaggacagaaaaccaacctcttcgtcccaccaa

SEQ ID NO: 167472 - DNA, 481 bp, Homo Sapiens
cctcgctaccatatggttggacgattcatcaaatgtattcgtcccagtaagcttgagatctttggtgacttttgaagggagtgaaaataccattttacatctttaatgcctttttcataattatgactttagatttctagaagctctcaatcactttgagaaagcaagaaccttgatttatcgtcttcctggagtgttaacttggcccacgagtaatgtgattattgaagagtctcagccacaaaaaataaagatgctgttagagaaatttgttgaagaatgcaagttccctccagtgccagatgccatttgttgctatcagaagtgccatggatattctaagatccagatatacataactgatccagactttaaggtaaataatgagtgtacagtgggacattaacttgcaaaatcatttcttaaaatgggctcaaaacaatctgtaattggagcacccagttctctggctagttagcag

SEQ ID NO: 167473 - DNA, 460 bp, Homo Sapiens
aatcgagctcggtaccatatggttggacgatgacaaccacatcacgttcactctgaagaggctgagacaactgaagtgcacgacagaatccttcaggacaaacgaagccataattactatttcggtctcagaatcatgccgactccaacctactcaattcccactctacacaaacagtctggtccatactgaaatcttccaaatgagtaaacaaccaaaaaaccccatcagcataatacacaccagatgaatctaccccctacaggcaactgccagccccttccgactaaactagttccgagccagcagagcaggctcaaacctgaaaggcccaagcatcaaggataaagtctgacatgctgccaaaacaagaacttcccaaaatacccaggactacctagcaaatctaactgcaaaatttaaacaccccaaggttaaactttaaaacctaagggtgctt

SEQ ID NO: 167474 - DNA, 410 bp, Homo Sapiens
gttggacgaggctgccactgagaaggaagcatggcctcacccggcaggtaacaaacatggactcattacgccagaaggtgaccttggcaggaccactgagggtttgggcaaatttatgaatggccagcccataaaaggctcagaagagaagcctggctaattcttaaccttgacctaacggaggacgacgcacctccccacgatgtgtcactggggtcagtgaggcctctgttggtaagagggcctggagtcggatgacagggggaccaagagccctaactaagaaccagcttcaccagcacagagggagaaaggcagggggctgaacaccgcccagaggtcagaagcagagacaggaagagccgaaagggttttgggattcgtccaacctatatggtacgcgagctcga

SEQ ID NO: 167475 - DNA, 416 bp, Homo Sapiens
cccaggcgagaagctggttcttccacaactctctcaagcataaaagtggaggtggcttcaagtcaggcagaaaccaccacccttgatcaagatcatcttgaaaccactgtggctattctcctttctgaaactagaccacagaatcacacccctactgctgcccggatgaaggagccagcatcctcgtccccatccacaattctcatgtctttgggacaaaccaccaccactaagccagcacttcccagtccaagaatatctcaagcatctagagattccaaggaaaatgttttcttgaattatgtggggaatccagaaacagaagcaaccccagtgaacaatgaaggaacacagcatatgtcagggccaaatgaattatcaacaccctcgtccaaccatatgggagcgagctgatt

SEQ ID NO: 167476 - DNA, 504 bp, Homo Sapiens
tggacgagcaggacacgcagccctggggacgaggacaaaggaacccagaacccgagctgggtagggcgggcaggctgggtctgtcacccagagggacacaagcttccatcccctctggtcagagctgagaagaggaaggcaggggaggaggccagaggccccgtcaaggccccgtccaggatggggggctacacccactagggttacgcatgtctgatggcaccaacctatgaagcggtctttccagagaagtggaaaacacaaacaggatcatgaagaagatgtcacgacaccactaacgcaaacctgaaaactcgcgtgaactaaacaatgaatgctggccgggtgcggtggctcatgcctgcaatcccagcactttggaaaacatggaaaacacagaaaagtataaagaaaaaaagacacccatatgaatcttaccactcaaagttaccacaaacagaagtcttgttctcattgtaattattcaagccatccacattacta

SEQ ID NO: 167477 - DNA, 374 bp, Homo Sapiens
gggttggacgagtgactgccctctagaaagggaatggacagctggtaaagaaccctggtacaagaggaaaaggaattcagctttggggttgttgtgtttggctgacagtgaagcatggagggggaaaggtttagtactcactgggaaaaaaggagctagaaatcatgtgagacgatggaactggaaataagcgagagtcatcagctcaagggagataattaacgtccctgagaaaacaagcatgaaagcctttataatgcattagcaaatgtgtttttcagttttatagctaaagaaacagaaggcgaggagaccttaatgaaatgacctcacctcttattttagatggaatggaagctagtcatatatttgaa

SEQ ID NO: 167478 - DNA, 619 bp, Homo Sapiens
ccggtccatataggttggacgactgcttatacatccttcctgtcacacattcattgtgtgtgcaaatattaactgaactaaacaaaatatcttagatgtccttcagttcaccgacttgggtaaatttctattaacattctagaaaaccaaaagacatcagagccattaaccaaatcatatagatcaaacagcaaggaatcttgaagatcaaacacttacaaacatgggtgatctggactggaatctgcaatgctgccatggggctagaagagatggctgtattatcttccaagcgggcaactcttatctgaacatgctgcacactggaattggtattactgtttggaactccagatcctgatttattctccaaaagcgttgggttgtttttttggttctcatgtaactgtttaagaccttttattaagactgaagggagatgggtagacaaaaagaacattgattctccgacagaccaccatctaagcagcaagggaggtggggggaggtaaggagggaaagtatttggaataaataactgcatactggatgtgagagcttataaaaataagatattttaaaaaacaacatatcctcgtccaacccatatggacaggct

SEQ ID NO: 167479 - DNA, 416 bp, Homo Sapiens
gcaatctgatgatggaatgattgggtaggttgagtcgtagctgtttctggggggctggaagacaaaggggaagataacctggggttggtgctcaggtgggcatctcttacagtgacaaggacgtgggaaggaatgtggcactcacaatggtgtcagaggtgagtacaatcatcatgcctgctctacgggaaggagctgacactctcagtgggaacaacgtatcaatctcatttacagacaaagcagcagactagactcaggactaacaacatgggctaatgcaaggtagtacccatactgacctcggaaggccgtgtgatcaggcgcctctaagagcagaggttgacgaatttttgatttcctgtgctcgagtgcatcatctcagtcgtcccacctatatgggacggagcatatga

SEQ ID NO: 167480 - DNA, 453 bp, Homo Sapiens
ccggacgacagagtgagacccatcacaagaaaaaaagaactttgtcaacctctgtcttagggcgccttgtcacaggcttcgggtcagacggattcaaccttgcatcagccatttgttagccaggtcactctgttctttgtctgtaaatgagattgatcgttgttcccactgagagtgtcagctccttcccgtagagcaggcatgatgattgtactcacctctgacaccattgtgagtgccacattccttcccacgtccttgtcactgtaagagatgcccacctgagcaccaaccccaggttatcttcccctttgtcttccagccccccagaaacagctacgactcaacctacccaatcatttcatcatcagattgccactgtctctagttcaggtctcttggaactggcactcagaaatctcataataaatcctcttgaggcttctcatacac

SEQ ID NO: 167481 - DNA, 678 bp, Homo Sapiens
aatcgagctcggtaccatataggttggacgatgaagggtaagaaattctggggtgggtaggtgggagagagtgggccacttcacagctgtggtggccacatgtctcagattttctggaaccatctagctctaaaatattctctatggttttagaccttaaatcctgaattttggcatggaaaatgaggctcaagtgacgtctgctcacgtgtctcttgcgttagttatctgtataacaggcctcttacatgatatttctaccctcaccaaaaaaggagaaaatgagaagaagatttaggttaaaaaaatatatattccccacccagcctctgcttgaaatgtgaggttttggttttggacagcggcgttggttgttgacgtcattgatccaactattttatttcccacttcactttgcttgcccaggtgtggtccaaggagtatgagggctgttaagataaaaccaggctccggaaattcaaatgaaatgtctacctgaacctcctcaagtctttcctgtgggctgtgtatttatttataagcctattgggctttggcagcagaaaaaaagaagaaaggaggaatttgtttctaaaatgaaaaccaaatttagttaatataaatgctacccatgtgcaactcgtccaacctatatggtacggagctcgattcgtatct

SEQ ID NO: 167482 - DNA, 637 bp, Homo Sapiens
ccggtccggactcctggtgtgtgtaccactaggaagattagtggggaaatttgctattacatgcctaagtaaactatgtaactaggatcacagccacaggaaatgatgttctggacagagttttagctcggctttagccacagatcgcaacgaacgaaataaaccagaacatcgttcttcaagccaaggacccttgtcatccattagagcggtaatcaagagatcttctcggacttctattcagagtgaacttcatcgagatagaaggcgcccagagatcaccattgtggcagctgagccactgaggccagcctcgtggtttccaggaaccccacccccaggactgggatttcctacatcatctgcagcaggctcttggaggcctaatgagctggttcctgctgagctcccaccatcttatgaacaagttataaaagaaatcaaccaagttcaagttaatactacaaataataataatgctgctgctactccaaggcacactattacttctgcaactcagactgacttttcagaagaaatagacaacgatctgcctcaaagtaatgcaacactacaggcacctctcaagcctcttcagcctttctcagcagtctcgtctgcaatcttccaacacatc

SEQ ID NO: 167483 - DNA, 776 bp, Homo Sapiens
gaatcgagctcggtaccatataggttggacgaggttgtggctgtgacagcccggaaggaagaggtggccttcctcatgagaagagagaggacacttgctcttccaaggaccctcttgtttgcaatgaggacagggtcctggaagtggcttgtaacctggcggtttggaacattctctactccagtgtcctggatttctgcagcaatgacaggcccccattctgttagtagtgtagggatgagccttggggttattagatgaagaaaaagaatgtgccaaggctgttgccatgtaattagcttagtgatggcattcttcctcctccaattcagccttttttatttttgatgttttctcctggttattgaaaacctcaaaggctgtatttaataaaataggaaagggagtttgtgggccttgctctaatttttggagtttttgtcttatgtctgggtaagcctgacttacaaaatgtacagcgagaatggattggccttcagggctttcagggtctaaatttacatatttacgcatggcctccaccaatctagcttggaaaagggtgaggttctcagacggctcctgggtgacttcttgtaatttagaaaatttaacaggtcttagtacaggctttttcattccttcccacaagcaagttatcatataatctcatccggccctgcctctgtttgggccgacatcagcagcctgatacagccaattgtttctgtgtcagggacagctttcgtccaaccaatatggtaccgactcgattc

SEQ ID NO: 167484 - DNA, 325 bp, Homo Sapiens
aatttggcacgaggatgggctgcatgcatgctgagtaaacatgcctgttacatgcaacccatgttcactttggggtggagacaacaggcatgtttactcagcatgcatgcagcaggatcccttcacaaatattcagagctccccctattccctgttgaatatgtatatgtggccagccagatcaacgtaaatcactattcgccctcccctccctgggaaacctactttttcgggtttaagcaggaagctatgcctcccagtctgtcagaatggccacttgcaggctgtaaccctttataaaaaattaaatttcctttttaaattt

SEQ ID NO: 167485 - DNA, 898 bp, Homo Sapiens
ggtcgagctcgtaccatatggtggacgaggtatggttgctttgttttttggaaagtgctaacaaagcccataatctctaaatgggactgggtgtaatgactgaaatataaacagcataaagtatatagaaattacacttctaaatgggatagtcaaaactttttagacagatgtcagcaattctgtaacctgggcaatcattacatacaagtatactttatatgctggccagactaataagataattcagtcttagtgtagccattctttactatctaatgtaaattaacacatgactggtgaaaatccaaaatctaaagctagaaccaaaacagtcataagctactctgagacaaataccacaaacagcagtgcccagaatttctagtgatgtctcggtctaatgaaagacctatacagttaattgaactgtttcttagcccttctcagaaggctgattttacccagattaaatccaaatccaatattgtttttttctttatatcagcccagaatttagagttattgatttgcttttgtcagtaacagagttagcagtgtgagtcagcagcctctgaacccctcaggtaggaagactgtagaaggtacttaaaaaagcatttattactagaagactgaatgagattaacttaaaaaaattaataatatttcagttagataacttgaaaacaagggccccaaatggtaatcttttagataatttggaaagtagggtttatcgattgacatgacatatcagcctcactaacacccaagcataacaccgtcttttcaaaataatcagtaattcatatgtaaatagcaacacaagctagtaatttccttactaaagtgatagctgtgcggcctctgccgtcgtccaacctatatggacggc

SEQ ID NO: 167486 - DNA, 883 bp, Homo Sapiens
  misc_feature (192)..(209): n is a, c, g, or t
gtaccatataggttggacgacggagacacgtcattcatgcgaactttcccttcacccaaatgcagagcaaatgttgctccccagaagcccacaaggtagctgaagccatttctagttgacatcggcaatctccattctcttcattccacactttgacaactcactctgtggagccatttggctcagtcaaannnnnnnnnnnnnnnnnnacatatatagcatagtgctgatgcttaaagatcctgttgactgaaataagttgcaaggaatattagttcagggaaatatcaaagtgtaaaaatatatgggatagtgagaaagaaaaagccatccaacaccagcacattagaaattactcaatcacttctgtcatgtgaaaaagggatcagcaccccacccagagcaaactcaaactctgagtctattaccagttaagtcaagacttggcttctattttggcaaagtaatcagtaactgagtcagctgtgaaattcctggttgctccttgatcttgtgtaacatttatccaatcatttaggctgttggggttgaaggagggttattacaataagaacatctttgagagactttttcaagaaaatggttcattgttggggggaaaaaacccttcatttgcccacaggaactaaggtttggtctgtcagctaaaggtattgttcattatttcaaactgggaaagtgtagctggtggggggcagttagaagtggagaggggaaaaggtagagatcaagttagaagagacacttttaaacagtattttttatttaaaaaaattctctcccacaggacttactacatccaacatcaaatcacttcaaaaaccaccatctctcgtccaacctatatggtacgagctcgatc

SEQ ID NO: 167487 - DNA, 895 bp, Homo Sapiens
cgggtccatatggttggacgaacttggaactctttagctatctgtatagttccaggagcctacaggcggtcggtttttcagcgcttgccaccgggccaggcaaggtctttgcatgattgctgaggcagtcggtgtgtttccctttggagtttatataggaacacaccacccaaggctgatgttttgttatatatatatatgtgtacacacatacaaaggcctgctactctttctttgtggaaactgacagctccacctcgggaagctggatgccaaccttattcccactgtcattgctagaagaggaggacagtcgggacttcttagaggccagggacaccccactcccctgtaacttgcctgtctcatcatcgctcccagtcacctcataatgacctttgctctttgaccccaatccaccaaaggtaccgaatttcagcttcccgtgtttccctttaactttcccaccttccagagacacttccccaccttcaaactccagcgtccccgtcggggtggaaggtccagagaactctctttcatcactgaatgaatttgagcggtgccgtggcttcttacttttaaataaggagaatttgcctttcggtgaagaggcttcggcctctgcctctccttccagagagcccaggcaggcctttgaacttttcaggtcacctttggacccagaaattgatgcttctggtgagccagtgacaccacctttccctttaggtttggaaaaattaaacttgggcattttgatcttggactttttcagtttgacttcagactcttcccactcgccgtctccagcaccagcttggatgctggcctctgctttagggaagtgaacatccacccccatttctcgtccaacctatatggtaccgagctc

SEQ ID NO: 167488 - DNA, 309 bp, Homo Sapiens
gaatcgagctcgtaccatatggttggacgaatttagattacaaaagaaatagatgcttagaatatgttaaataaaaaacatgtttcaagtacttttttagcatatgcaaaatttctggaaggttttgcagaatacttttggctacctctgcggtagttggagggaaagagggtttcattttccttttgtgccctcatgtactgttggaattttttgttgtttctcatcagtaaatactaattttatatttttaaaactgactttaaaaaaacccaagttctcgatcggttcagaataaaaaattaaatt

SEQ ID NO: 167489 - DNA, 511 bp, Homo Sapiens
gtaactgaagttggattttgcttttggtgtttgatttgattggagggtagctgttttgctggcacctcaagcagtgcctgatctaaaaagtgaacctcaaaaaggggatgcacgagatgatccacggggatgcacaaaaaaataggaatgtgtttctttacagtgtaatatttgtataccatacataccattattctactctccatttttatcaataaattagtatccatatattgagaggtcaaactcagccttttttcattgacatggctccaacaatcaaaaacaaactgaagacccagtggcagtctgaagcgtggaatggaaggcttgcaaaaaactgcaggaaggattgggaaaaagtgatgaaaccacaccaacgccctgcctgtcctagttattcacgttctcagtttagaaagaataattgtcaaaggagaatgatgatatttttctgaactccagttgaatgtgagaaaagggaagtgaacctgttcaataccacgttccc

SEQ ID NO: 167490 - DNA, 403 bp, Homo Sapiens
accccgctgaaagcacacccaaacccccaaaataacaaaacatctcaagcaagtagagacgataaacttcataacacaaaagaaagattcaaaacctgttccctcagtgattgctgttgtcagtttgggcatgcagcaaatttgttataaccatgatggaaatgaaaatattttaagaatctagacagtattctatttaacactaattcaaaaaccaagaggaagaaaaataacacaaggggacaccatacatacataaacatgaaaagctagcttacataattacataattagaaaagttaaataatttagtaaaaataaattcccagtataaacccaaaaaagcatagctataaatgcaatccaaaacaaccaattagtaagctggtcatgtttttactgg

SEQ ID NO: 167491 - DNA, 2262 bp, Homo Sapiens
  misc_feature (1614)..(1614): n is a, c, g, or t
gtccggacagatcggaacaaccagttcttccggggggaagacaatcccaatgtggagagcatgaggaggatcctgctgaactacgccgtgtacaaccctgccgtcggctattcccaagggatgtcggacctggtggcgcccatcttggccgaggtcctggatgagtcagacaccttctggtgctttgtgggtttgatgcagaacacgatcttcgtcagctcaccccgggacgaggacatggagaaacaactgctgtacctgcgcgagctgctgcggctgacgcacgtgcgcttctaccagcacctggtctcgctgggcgaggacggcctgcagatgctcttctgccaccgctggctccttctgtgcttcaagcgggagttccccgaggccgaagcgctgcggatctgggaggcctgctgggcccactaccagacggactacttccaccttttcatctgcgtggccatcgtggccatctacggggatgacgtcatcgagcagcagctggccacggaccagatgctcctgcacttcggaaacctggccatgcacatgaacggggagctcgttctccggaaggcgaggagtttgctgtaccagttccgcctcctgccccggatcccctgcagcctgcacgatctgtgtaagctgtgcgggtcaggcatgtgggacagcggctccatgcccgcggtggagtgcaccggccaccatcccggctcggagagctgtccctacgggggcacggtggagatgccttcccccaagtccctgagggaaggcaagaagggcccaaagacgccgcaggacggcttcggcttccgcagataggtcgggcccccgacaccggacaggggttgaggggacctcctcagaggccctgggcacgggtgggggtggggctgggcgtgaaggggacaggggacggtagaaacctaaggaaaatgctttgggcaacatgagaggaaccttttcatattaatgaccaaaattagagtctggaagtgacagaagtcagatctacagccacccagaggaaagtcagctcctgaaacgctgcagtggaacgcgcagcaccgcacctgagacgcaggctggctgggctctcctgctggctgccctggaggattccaacatgtcccaggatttgctccaccctcgagggcagccagacagcgtcgccaggcaatgaggaaagcagagacaggagaggaaggcctcactcacccactgcgtcgagggctgcagaacacagcggggtcctgtccaggcccagggacatctttgcaagccagacacacttcctcttgagacctcgttctctcggagtgagccaaacacacttcccaaaacgtccccagccacagctgggatgccgatggaaaggcatctgccataaaagaaaagcaaaagataaaaagcccaaccgatgtggggatagagaggcggaagagcagtcaggcttgaggagctggcgcttgtaatgtttatccgtttaaacatttcgtcctcctggtacacgaagggaactgtctgcccaggagcctgagcctcaggctgttggagaagcatctgatgcctttttctttgctgggggtcttctacgtgaggttcctntggcgttgtttaaggtcaactccaccaaatacagcaaccagctggggcttgagcaaaaagacccccaccaaaaacagcacccttgtcaagccgcctcggcccctcgaaaaacccttctcaagacccattcgcttgggcagcgccgggacccccataacgccaaagcgaaacaaggggcccaaacatgggttctccctagggaaaactcccggggcaatagacaccagacggcctttgccaacgtcccccagcccgtaacaagaaacagcggcccgccgcgagcggcgaaccccctaaagcggaagacttggtaccgccaggtcccccagaaccgcgaggccgcccgccgcccacgccacacatcactctgaggccgacgtgtccaaaaacgtagcagccccactccagagcgcgataatccacgcgctgcgacgaccgatagaacaaaccccgcagcacgcacagccccctcgcgcagtgctcaacagatacaagccggctggtatgaggctgcactcgatgtcgcaggagataaagaacgaagaggaaatagaagagaataagcaccaaacgacacaaaacaaccacggccggatctacgcggcagctgcgtgacgaggtcgacagcgtcggggagcgcatatggcg

SEQ ID NO: 167492 - DNA, 883 bp, Homo Sapiens
caggctggtacggcccggtgttccgggatatcgtcgacccacgcgtccgagagagtggggggcggcggcacagtggggccggggaggagagagccgcagagggaaaccgattttaagatgaaggtcgcccccgataagacatgcatgcagttctccatccgccgccccaagctgccgtcctccgagacgcaccccgaggagagcatgtacaagaggctcggcgtctccgcctggctcaaccacctgaatgagctgggccaggtggaggaggagtacaagctgcggaaggccattttctttggcggtattgatgtgtcaatccgcggggaggtctggcccttcctgctgcgctattacagccacgagtccacgtcggaggagcgggaggcgctgcggctgcagaagcgaaaggagtactctgagatccagcagaaaaggctctccatgactcccgaggagcacagagcgttctggcgtaatgtgcagttcactgtggacaaagacgtggtccggacagatcggaacaaccagttcttccggggggaagacaatcccaatgtggagagcatgaggaggatcctgctgaactacgccgtgtacaaccctgccgtcggctattcccaaggggatgtcggacctggtggcgcccatcttggccgaggtcctggatgagctcagacaccttctggtgcttgtgggttagatgccagaacacgatcttcgatcaggtcaccccgggacgaggacctggcgaacaactgctgtacctgcgcgagctgctgggctgacgcacgtgcgcttctaccagcacctggtctcgctgggcgacgaccgcctgcgatgctctctgcaccgtggtccctctgtgctccgcgggagtccc

SEQ ID NO: 167493 - DNA, 505 bp, Homo Sapiens
  misc_feature (331)..(353): n is a, c, g, or t
gcaacacacattgtaaactattcattttctccaccttgtttatatggtaaaggaatcctttcagctgccagttttgaataatgaatatcatattgtatcatcaatgctgatatttaactgagttggtctttaggtttaagatggataaatgaatatcactacttgttctgaaaacatgtttgttgctttttatctcgctgcctagattgaaatattttgctatttcttctgcataagtgacagtgaaccaattcatcatgagtaagctcccttctgtcattttcattgatttaatttgtgtatcatcaataaaattgtatgttaatgctgnnnnnnnnnnnnnnnnnnnnnnntaaaccatccctgtccttcagtttataatctagttggagagataagaaacgtacaaaccaaaagataacagaatatctgaagcatgtactcattgtcagatgttccctctgagagcacagaggaggcaaaagcttccgtgggatgtgctagt

SEQ ID NO: 167494 - DNA, 448 bp, Homo Sapiens
gagcttaactacatctgcaaaattctgttcaccagaggcaagtcatattcagggaaagagaagtgcacaaagtgagaacaccaaggtgcaaaaatcactggagctaccattataattgtagtaataaaattctcttctaatactaggtctcaaagttttattgtgaatcaaagttcaattttacaaagtaaaaattacttattttgcatctattgagatgatcatttaagaaaccatttgttacttgtgttgaattgcattacattatttactcttgttaatctaaccttgcatttgtccgataaactgaacttgattgtgataatactttgtttttattcattgctacttttggtatgttgatattctgcttaggactcttttaatctgtcttttcatgtgatgataataaagagaattttcaatactttaactccgtgtacactct

SEQ ID NO: 167495 - DNA, 627 bp, Homo Sapiens
tctagaggatcccgcgacactcttgagttgggctggttgactttgccagtcagctcctacagtgatcagttggccacctctagatctgtgttggccggtctagacgttatcggtgcacttccttgaagtgccaggttgcagcgatcccagagcgttgataacgtgatctgatccctaagttgagacctgtcttcctgtaacgcttccgaataagaggtccggtcgaaaagagttgaaagatacgaaattaggtggtcgttggaatcctgatcgcagtaaagtggtccttggtaactgctcgagtagaacatgtctgcatccgccaatagtccgctaatagggagggctgtgcgattaaaggcttccatcgattgggtagtgtccttcaagtgggtggcgaagagccagtcgggcatatgtcatgaaggtttctccgaccgattaatggtttgctgcttgactagcctagggaaataataataaaggtaaagtaaacttttttaatgacatatggggcacaaaataactggtgtcttgtaaatgttctgtttgtttaaataaaacttctctaatttagtctttactttaaaaatatgttctggggcccttattgggggggagcagggg

SEQ ID NO: 167496 - DNA, 366 bp, Homo Sapiens
gaaaaggtttgctcgctctcaagaaagtctattcctctgggttatctgaatgttagaaaaatgatgatgcacaagttgagtccttaacttgtgtgatgtgggaagattttttagtacgtaacctttgtcctttggtctgggaagcagtcactctataaggaacaggcatagaagattcttgatatcctgaccctggattccttcataataaacattactgagaaaatcgtaaatatatgcatgctccactgtgtttcacagcattccaggtgggtgaagggaaagattttgttttgcaaagggctacactgtcaccaaagcaatatttaatatttacacaactccaaaccccaaggtattttataa

SEQ ID NO: 167497 - DNA, 385 bp, Homo Sapiens
tgggcccagtgcagggttcataaaatacagcccttgcactgccaggggcctggcacattctgctattcttgctatgtaatgacccagcagcccccatcctggatgctgaaatcctacccttgtcgtcatgccacagctgagacagtcagtgttcaccaaagcaggtgcattctctctcaggacactagtgttctccatgggaacgctgaggaagaacatctctgccatccctggtgtcgctgtgaagctgcttttgcccttcccaggagctgacactgcagatgaagagacagcactgtgatttctggaagagacagcactgtgattcctggtcctaatatcttggctttgtttgggtttttttcccacaggaccattcctaggg

SEQ ID NO: 167498 - DNA, 418 bp, Homo Sapiens
acctgtgaaaaccccttaaatcgtaaatggtataatcataagggttctgtggctttttgtaaagggcagagtaatttaacaggttaaaagaagtacagtggcgttaaacccattatgttagaatcacagaattttgggtatagaaacccattagaaatgttgcccagtgccttcattatacaggcaaagaaaactgaggcccaagataaggagttccaaactgtgctttcttatttgttattttaaaaaaacaagtttttatttgctaattctctatggccctgcaaatcctttattggaaataaccttggtctcactgctgtctttctgtcctttgtactgcgtaatggggcttgaggattagtgtgctgatatttgtgcatgtaaatgcttctgtatatgcatgtgccttctgaaa

SEQ ID NO: 167499 - DNA, 365 bp, Homo Sapiens
cgggaacgtgagatgggataaaatgaaggaaggctgttggacttctggaattctacaaaatgggccaatagcgctatccagctgtaaacatgtcttatccttcaagaaaagagaagaataacccaaaggtagatcataggtcagcagggctgttacttctcccttgggcccagaggcataggcctagggaatgtggctatatcctccagatttcatctagccaggcatctgcttgtgagtgccagagggtgtgggtctgttttctagggctgaggtgagtagggctgctttccagagctgagaaggcttggccaccacctgggtgggctcagaggacagaacactgagccaaagaaatttatctt

SEQ ID NO: 167500 - DNA, 494 bp, Homo Sapiens
ccctgcgagtgaatcatcaggtcaccctggggggtgttgctgtcgtaaagacactgtgtcttttgatccatgaacatgggattttttccctccacttatttaggtcttcggtttctttcaacagtgttttgtggttacagggtgcaagttttacacttctttggttaaatttgttgctaaatattctttttgatgctgttttaaatggaaatgtttccttaatctttttcagattgttcattgcttgtgtatgatgatgatacagctgacttttgtatattgatcttgtatcatgcagctctgctgaattgattgactgactgactgaagaccttgttgcataccaagagatggttcttcatggagttgtatctcattctgaggttcccctacttggcaaaagacagctgtatcatcatcatacacaagcaatgaacaatctgaaaaagataaaggaaacatttccattgaaaacagcaggtaccggctcgatc

SEQ ID NO: 167501 - DNA, 372 bp, Homo Sapiens
ggcaccatcactataacattaagaacttggaatgcatgggatatcccaataggattctactagtgtagcactgatggtattagttatggaatttatctgatttaaaaattgccagcttagtgtcagcctgatagactatatagtattgtcttttttttaaaatactagagccaagtgtgagccatattaggtgatttgtaggtaatgcaggtaattagtaggatgaggcaatgaataggatacgatctgaggtcagaggagaaatatttggggaagattaagttaaataagttaaacaattttgagaggtagaaattctgtattttgtctctttgacttgagccaactactgataaaattatattttcaaaa

SEQ ID NO: 167502 - DNA, 431 bp, Homo Sapiens
ccccccttggcattacgcctttggctgctaacgatgcttttgtactatgacatgagtacaaaataagaatacaaattaagttctgataaagctctgtaattccggcactcttagcgcatttaaattccgtacattgcaattatacggaaacgcagtaacgatagaaatatctattctagttattcttgtacaacgacctataggaaacttaaaataaaggcatctataccggcctgtttccaatactggggtacacgaatggaaaatctcgagcagtcgataaaggatcaaaaaaaatctaaaagagtgataccttttttgttttattctcaaccaccggcttaatatttgggtggccattcgcaacgccttacgtattcgtcatgctgaaatacaaagcgttttgggcaatgatgacgttaggaattatc

SEQ ID NO: 167503 - DNA, 330 bp, Homo Sapiens
gaatacatcactgatgaaggaagagacaagcaactgaggagagagaagtgacgatctcacctagggcagtggcaatacaaatggagaggagaggatgaagtcaagaactatctagaaggtaaagctggcaagaagtggtaactgaacgtgacagatgagggctgaggacggggaaaggttgggagggttcagtggctagatggcagaaccactgtgagccaaaaaaaatccagataatccgaatacacgattacaactcaatacttactcacatgggttttctccttctcaaagacatcttatgcctgaacaaaagtggaactgtcgcag

SEQ ID NO: 167504 - DNA, 365 bp, Homo Sapiens
tgaaacacaccccttctgcctcagcctcccaagtggggccttagatttcttacagtaaaagtggggatgatgatagttcctacctgataagattgttgagaggacagtatgggttaatatgtaaatggctcaccacgcttggcctgaagcaggttttagattatttcagcaacactcaactgttatttatcgagcccctattatgtcccagggccttagaaatacagcattgaataaaacaaagtccctgtctcatgaaacttatgttccagtgagatagttttagggtgatatactagcagaggctgaacatccctgttggagggagattcaagttgcagggaccttccaacttagcctgttga

SEQ ID NO: 167505 - DNA, 691 bp, Homo Sapiens
aagcgcacccgaatctactgatgcccaggccagagcttcttccactattggcagctgaaatccatgctggacgtgcaagttgtgctcattacaaactgccagactgtgatacagctgtggtctgagcctggagcatccctctgccttagtcttattattctcttcattttaaacatttacccgagaagctgaattccaaagacacttttcctaaaaataactcaaagacatgcaggaggaaattagcatactgtattttcttcagctataatttacagtgtgtaatctaaaaatgtgcaacaaagcaatgctagtagtgcagagaaaattcccctgggatatttggttccatttaaaaacacctcagtatgggggggatgtgggagcagcagcctgtgacacacttccatcagggcaaaatgttattccagtgattcacagccagaggcctgacaaacactttgagtcgatataaaggttcttgccatcaggataaaaatgagaattgcagtgggtggtcccatcctagcctcatgtctccttctacttctgtcctggcttaggtggttgccctggaaacagtggggtagcaaacaaaaccatttggaacaactttctagaaagccttatgtacagaggcctgatgcttatatctgttgctgccttttccaaggcttcttcgcctgatggg

SEQ ID NO: 167506 - DNA, 461 bp, Homo Sapiens
aacctctgaaagcacacccacacacacacaaatctgaaatcctgtttaatgaagacataagaccaacctttcagaaagcctaaatcaggcgcatataaatgaccaatttatttctagctctgtagctaaacccagcagaattccaaatcagcatcacagtctaatggcaaaactcaaaaggaaacatgaatatactgtgatctacttgtcttgagctcactgttggcctcaccattttatgatcggcgtcatgcacactgggaaacagaaaagacggagaaatccgggaagcggctgtttcacttcagtgtgaagctcctactcaacagtcgcttagttatttgtgacctctcacaacactcatctgttctgtttctacaaaatgaataatccaagtggcagtagacatcaggacacctgttaccagcctgtcttttgccaagtaggaacctcagaatgag

SEQ ID NO: 167507 - DNA, 380 bp, Homo Sapiens
tatttaaggtacagatggtcctgcagttacaatggttcgacttacaatatttggactttataaatggtgcaaaagtcatacgtactcactagaaacagtactttgatttttgaatttttatcttttcctaggctattggtatgtggtagtatactctcttgtgatgctgggcagctcccagtcagccacacgatgacaggggtaaacaaccacgagatgatcaacactttattataaaataggcttcatgttattttgttcaaccgtaggctactgtaagtatgctgagtacatttacagaggctagtctaagctatgatgttcagtagactaggtgtattaatgcatttttaacttaatagtattttcaactattgctt

SEQ ID NO: 167508 - DNA, 414 bp, Homo Sapiens
gggagcagctctatcagtacatggttggaggacataggcgctttcaaacaggaatgcatagggagaaacataaatcaccaagttatcaaatcaaagaaggagataccataaatgtggatgtgacttgtccaggtgctactctagctttggctatgatctacttaaaaaccaataacagtgtcttctaggaagcccagacacatggagaagttctgagtgttttggccgatagtcccagatgaggttccagcaacagctgggatcacccatgagatgtgagtgaggaaggctttgagatggtttcagccctagccaccactgacctcataagagaccacaagaatgagaatcacctggccaagcccagcagaccttcagaattcagaaataaaataattcatcttattttaaaag

SEQ ID NO: 167509 - DNA, 1055 bp, Homo Sapiens
  misc_feature (38)..(38): n is a, c, g, or t
actttatatgcgcttaaaaaggatggagtttttggaangaagggtagggacccaatcaattcttctttggggttgttcatccccactgagtggcctttgtaggtaacttttaagaggggcatagcaggggcgtgtttgtgtccacatccacagggcactagaagcctggggctccgcggccagcacatagaggtgccggagagcctggagatgataccggtgttcagtgctgtgagctgggaagtgcggataaagggcacagagaagagcggcaatggaagaatttgatgtgctcaaagagtaccttcctcctcccaaaaatagaagtccaagggccatgtggtgggctaagtgaaaaccatagttcatttcaccacccgttttcatgtgtaagaagcgacaaagctgcaaaacctttaggtttcctgagccagccatgaccatggcgagagacagcagcaccacgctcagacaagtttctaggttatgaggacctgtaacagaagcattaggtgcagacaaataagtcataaaatctttggcaaatttatgcaaacagttaaatgctgataagttttctgagccagcaaatcgaaaacccagagacaagcaggctcctgcaattatgtagacatgtgcttgggacaaagtttccaaattcaaatcctctgagcacggcaattcgatttcactgagagagatactattttctcttataatttgaggaacattgctgtcaacccacttggaatttggtaaaatatcatcccacaaaatcaggcatcgagcaagtgtcctaagcaagagaaattctggcttcacaaagtccaacaaatacatggtgtcaggggctcgggagccaatctgcaatagatctgttattggtttttaagtagatcatagccaaagctagagtagcacctggacaagtcacatccacatttatggtatctccttctttgatttgataacttggtgatttatgtttctccctatgcattcctgtttgaaagcgcctatgtcctccaaccatgtactgatagagctgctcagcc

SEQ ID NO: 167510 - DNA, 439 bp, Homo Sapiens
tcgagctcgcgtactgtgaaacgcacacccacttgcaggactaatttgctgggaggtattcagttttagcacataatcatatttttagttctgtgctctttcgtttttttcctgtatgagtaacattaacttttgtctctagctcttttaaggaagaaaaagatataaagccaatcattaaagatgaagaaggtatgatttaatttaacgtggtagggagccagagtatggttccctatattttgggcaggaggggcctggtagatatacacacttctggattcagataatttgtttgtgttatgtggttacctggaatcaaccacgctaatggtttcttgtagagactagttttagatagttcgcaagcacctgcattttatgtttctcttgtggttgtcatctatgggatggtgaaaagcacattacaagaaaggaa

SEQ ID NO: 167511 - DNA, 916 bp, Homo Sapiens
gggacgcttgtaatgaagtccctccggctcctaaagagtcctcaaccagtgagggcgctgatcagaaaatgagctcttttaaggaagaaaaagatataaagccaatcattaaagatgaaaaaggtcgggtcggcagcggttctggtcggaacctgtgggtcagcgggctgtcctccacaacacgcgctacggatctcaagaaccttttcagcaagtatgggaaggttgtcggggccaaagtggtaacgaacgcccgcagcccgggggctcgatgctatggattcgtcaccatgtcgacatctgacgaggcgaccaagtgcatcagccatctccacagaactgagctgcatggacgaatgatctccgtagagaaggccaaaaatgagcctgctgggaaaaagctttccgacagaaaagagtgcgaagtgaagaaggaaaaattatcgagtgtcgacagacatcattctgtggagatcaaaattgaaacaaactgtaacttaacgaacggaagagaagactgaccacacgaaggaggaaacaaaagcctgaagacattaagacaggacagacacacaagaccaggatgagctgaaacccggacctacaaatcggtctagagtcaccaaatcacggaagcagcaggactggagcggacggtcgtgactggataaatcgaaaggagagcccgtcattagcgtgaaaaccacaagcaggtccaaagagagaagctccaagagtcaggatcgcaagtcacaaacgcccagaacagagagacatcttgtcgctctgataaaactcaaagaacaaacgggagacgagagcgccagaggcagccgggaacgggagatccgcgaaacggagaggccgccgggagcgcgaccagcggaagcgggagcacgccctcgagggccttcat

SEQ ID NO: 167512 - DNA, 636 bp, Homo Sapiens
tgcgcattaaaacgtaagtaattcaagtatggtaatataaaggcaggcaattacatgcaccaatatcaccctaaaatcaaaggcataaaaataaaggctgaaaactttgtgtttctccatctttcatttacatggctagatatcagaatcttactttagaaaatatacaattattatatatggtttccccagatggtaattttcggaaactacaaaaagtgtcaagatccataatttgcttcatcaaatgcttttctagctcgtttcaattcttcattcatagtaagcaagtctttaaccctggcaaacttccttgggtcctttcgaatcaagaagacgatatcttcaacttgtactcgaccttgtcttccaattgacattgccttgtgagtcatttcagtgataaactctatgacaagatcttcaagaatatccactgactcagtataaggattctggtcatccccaaagccatacatcatacatcgcaattctttagaaaaaagtctctttcttttaccctgtccaccttctgcacctcctccaatttcttcattttcttcctcaaacgtggggtcttcttcctcatctgccatcccactagcacgccatcacagcgtgggagtgcttcacgtg

SEQ ID NO: 167513 - DNA, 1429 bp, Homo Sapiens
cttaaactggaaatttggctttatgcataataagtcatgtgggtaaaacatccacattgcagttaggtttccagtatctagcttttatttattttttagcaatgacattaacaagattttgccaggttataaaaatgagggctttcttgagaattacttatagtttccgagttgaatggcagagcgcacgtagacacatctgaaggtggatggctgtatctcccagtactggaccgggttgctgaaaagactcacacccgaataagaagcctttttgggtgttgtgtccaggtgggcagaagtcacttgatccaactacagagatattgttgttatgaaggtagacaacctggatgtacttatgctctgccagcccaccaggtactctggtaagcttgttgttgtccaagtgaagctccctcagatgaggcgtgttggccagagagccattgtcaacagcagagatgctgttgaaactcaatcccaacttagccaaattattcagtcctttcaggctagctgcatcaactctgctgattttgttgccatcaagatgtaattccgtaagggaaggaggaagaccttgaggaatgctggtgatattggtatcagcaatgcggatgtaggagagcttcttcattccctggaaagccccattttcaattcctgagctcttcagcggattggtgcccagttctatgacaatcatctggttcagtccattgaaagtaacttttcgcactttggtgatctcattctcatgggcacgcagctcctgaagagttttgggcattttttctggcaattccttcagctgattcttggacagataaagtcgttccaacttcaccaaaggtgtaaatgctccaggactaactttgctaattttattgttgacaagaatcaatgcgtgaaggttcttcaggttcttaaagtctccatctttgatttcggttattttgttgttttgcaggtctagcagagttgtgtcagggggaagatcctttggcactttgtccagacccaaatcagaacactggaccactcgaagatggcattgacagcggaaggggcacactgggcctagggagggctcgaagtcgcggtcatcaggaacttctgggcctatcccagaagcctcatcttctagcataaagtcaaataagcctctctgttgaaacggtccagcccaggaaacttgtgcaagcagaaggaggatgatagtggccttcatgatttatctcatgtattttcacaaccagggaaccttttaatccgggaatttgccacaggagccctcaaagctgagatgtaattacactaaatattcagcccaaataaaagagtttgcaggtgtggaaaggaggagggggtaggtgctgctctgtgactaggttgaaaacctcctgcttctacctcgttccgaatt

SEQ ID NO: 167514 - DNA, 502 bp, Homo Sapiens
  misc_feature (372)..(372): n is a, c, g, or t
  misc_feature (446)..(446): n is a, c, g, or t
  misc_feature (460)..(460): n is a, c, g, or t
  misc_feature (477)..(477): n is a, c, g, or t
  misc_feature (488)..(488): n is a, c, g, or t
gagactttaagaacctgaagaaccttcacgcattgattcttgtcaacaataaaattagcaaagttagtcctggagcatttacacctttggtaaagttggaacgactttatctgtccaagaatcagctgaaggaattgccagaaaaaatgcccaaaactcttcaggagctgcgtgcccatgagaatgagatcaccaaagtgcgaaaagttactttcaatggactgaaccagatgattgtcatagaactgggcaccaatccgctgaagagctcaggaattgaaaatgggggctttccaggggaatgaaggaagctctcctacatccgcattgctggataccaatattcaccagcattcctcaaggtctttcctncttcccttacgggatttacatctttgatgggcaacaaattcagcagagtttgatggcagttggcttgaagggantgattattttgggntaggttggggttttagntttcaacagcnttttggtcgtttga

SEQ ID NO: 167515 - DNA, 377 bp, Homo Sapiens
gttcaaaagcaacacctagatctatatgtacaagttctgctgactgctcatttatcaggatattctgtacatgtctatcaccaagtccaagtatgtaaccaacaatagaagaagtagctacactgcgcgtataagccaatcgcttctcaaaccaaatagctggatccaagaatttttccatgcagaagtaacggaaaactggttgaaaattttggcaaacatccatgaagacttcatatttctcattcaaaagactttttttgcacctccatcattttcttttggcactgaaaggcactgaaatcatttggcctgtatcttttatgagcaccatcattcattgtgaacaagaaattcaccaatggggtgtgctttca

SEQ ID NO: 167516 - DNA, 348 bp, Homo Sapiens
acattcaataaacggagtgtaagcagaattgccagcactactgcacttgctattgctaaatattccttctctcttttatttgactgaatgtctggataaatttgtgtaatttaaatgaacatatgatatgactttaacacagtaaaataatgagattgtgcatccaagacaggggaaatgaatttggagaacaacttggagaatgcctacatgtatagaagacaaaccagggaacagaagaagagttataaaagagaacataacctctcaaaagttaaaggaagaaaaagaagggtagtcatctatatcaagggttcagaaaaaggcaaggggaatcagggtggctgt

SEQ ID NO: 167517 - DNA, 590 bp, Homo Sapiens
aacgcccccagagggggtgtggataaaaacaaagggagcaaaaaaattgtagatcctgatgaggttgaggaatagtggttgtaaaaactacaaggataagagtttgtgatccaagatagcagcgttgtaaatatttcagaaaaggtagcacctttctgaagcaaagacatggtctgggttggcatggtactggaagtggctatctaaaatggaatgaatttgaatgatcatcggcttagaaaaagccaagccaacaagaaactaagctgttcactagaaagtgcaatgaccactgaagttatcctagttaatgacaggaatagggataaaaaagaaagacacattcggtgccgaaatatataataaatgagatgtagtgactagaaagtttatgacagcaagaaagccgtaaaggatgaaactgcaaacgtgttatgaatctcaaaggagaagagaagatgtggagttatgtgtccagatgcggaattgaggcaagagaatcttgaccctcccagcttggtggaaaaataggtggcacctacttaagacagctgctataaaagcccctgtcatcacatgacctagggtgt

SEQ ID NO: 167518 - DNA, 521 bp, Homo Sapiens
cctgtgaagcacacccacagtaggattccttggccaccttataaagtataaatgtatgtgctccctttgtatcctagagctgttgagatgcgaactgtctcataaggtagcagaaagcactgtgatggaagcttctgtttcatcggtgtcctggaatctgctccatccccttctctaggcagcaatatggtcctgcttccttctgggtttaggtcctgggagcctgtcacaattctgtcacacaaaaagagaattccgtaatgaccagcacagctgtatcatttcaaggttctatgctaaaaatgtgcagatcaccaaatagttggccactgagagagcctgtaccacagagggtttcctaatgcgaatgcctgcccacaaacactgcagacagcactttctggacttcatcctccatgttcattaactttccgctgatttaacagttgctaaccagagttactcttgatctgtgatgaagtagatttgtgaacctcgggtgtgctctcacaggggatact

SEQ ID NO: 167519 - DNA, 598 bp, Homo Sapiens
  misc_feature (340)..(356): n is a, c, g, or t
tccctgtgaaagccaccaccccgccaatacgacatacaaagagttatacagcttgtgacacacaacagactaatgacaaaacagtagaatatgaccttcttggaacaaaactgggaagttctttgcaaatcatgtcatgaatttatagccatttctaggactccccagccaacaccacccaagaggctaaaagcacattctactctgatttccattatttttaagtaaaggtggagtagtcactgcataacggaatgcagaaatcaaccccaccaccctccaccctaaagatgaagagacaaaggtgaagtcatttttcaaaggctatacgcacgcgcgnnnnnnnnnnnnnnnnnggaatgtattaagaaacaaaaaaaataatctggaatatggaacagactgacaattctatatttttaaagatttggattggaagaaaaaaaacactacccagcggggaaaagaaaggtatcggcacaaaaacaaaagagctgacaagttgtgctaagtggagaggaaaacctgctttctcttgaaaagtcagaagcattataatttcaccaagacttgaggcattctagaaaagtaataactg

SEQ ID NO: 167520 - DNA, 129 bp, Homo Sapiens
aagggtcaatgtacgttgtacaatctcatctagaatgaaggacaaagaattttattaattaaaaagtcttctttttcatgctacaacaaagggcagcacatctacaatgctacaaaaaacgccaggtga

SEQ ID NO: 167521 - DNA, 240 bp, Homo Sapiens
aaagcacacccttagtggcctatatgtaagcacacaaaaaattgcaaagaaatattaaatcaaacttagtaggtttgtagctggaaatactattggtattacaattttcattatgcacatattgtacaactgaacaaatgagtgcgtttatgttgttaccagagttcttctcactgtagaaaaaaaggatatccaaatatgaactgaaagaagaatgtggtcgggcacggtggctaacac

SEQ ID NO: 167522 - DNA, 655 bp, Homo Sapiens
gtgagcagcagtgcaatgcagaaactacaatgtagagggggccaggagaatgagggttctagggctggctttgtcattgcaacagatctaactaatcagcttccttggctatgcgagctagatttattttctcattcagcaaatagttaatgaatgtcgtcatgtactgggccctgtgcacaggatgaggagaacaggtcccggccaccaaggagcttcctagagggaaagtgacataccacaggtaacaacactacaatgggacatgatagaatacagggctttcaaagcaatggggtaagagcagtagctctgaggagacaatggggtgaggccaaataatttttgaggaagggacatgcaaataaaaatagggaggctatagtcattagaggacctgctgtcctacttactcagcgtaaatcacttggagagcttatgcaaaggttcccaggccccatcccattctgtgatccccagaggttctcctggcaccattcctcggctcactggctaagaaatacggcctgcacattcaacaggccctgctccaagattccttccagcactcaatgtcatgattacttgactgagtgaagaagtcagaaaaatgacggcagaacggcccttttatgttgtcatcttatttctacat

SEQ ID NO: 167523 - DNA, 372 bp, Homo Sapiens
aaatctgcacccttaatcccagggttgaatccatgctaaaccactaaagcagtttaactttaggcaagttatttaaattctgtactccaatattctcacctctaaaacatgaataacagtatctactcctactcaaggttttgatgatgattaagttaacacaaactcacaactttaacagtgttggacatagtcaagtgtttagaatacttccataaattaatgtcctgctacttttttctgccaaatcagaaagccattatatgacccaacaaggtatcagaaataattagtaatttcctggagcctcatcagttctcacctatcttactcagactgatttgctcataacacccagggtaccggctgata

SEQ ID NO: 167524 - DNA, 478 bp, Homo Sapiens
cgtgtaaagcacacccaagtcccacccagacacagactactacttgcatattcgtgtgtttcctttcaggctcatgcccaggtttgttttatgatgtcatcacatacttacaggtttcatttcatgctcaggcctctacacttaacattattccatgaatctttctcgtataattacatagacttcataattagccattaatacccgagaagaacccacagtggggatatactttaatttactcaagcagttctccctttgttgggtatcttactccggtaaataacactgcgttgaacatctccatgctcacagcttggattgggttccttgggagagattcccaaaagtagaattggaggtaaaaagacacgccctcattcatacacgctgctagattgctttgtggatttgatgcaagtgtcgtcaccaagttgtcattctccgaagtcccagcagttgttacatgggcgccaca

SEQ ID NO: 167525 - DNA, 412 bp, Homo Sapiens
cagctctagagtatcccctgctgaaagcacaccctaagcatataatgtaaaaccactaaagcacagttgtgtaaaaacaaacacaatataaatattacattgttaatattccttttggatgatttctttacatgagctgaactggctaaggaatcttaaaataggatttagaatattgaagaatcttgttccagtttgaaaagccaaatggattaacagggattaccaaagacacacaaaacctcacagttcataaacctcaagtataccagttaaaatgaatattgtagaatggcgtaagtctttaactctttgaaatgtaatagcacattaaatcataaaacctttattttgaaatcatcttaagtatacacaaaaatgattaaattgaagtttacttgggtggcttacg

SEQ ID NO: 167526 - DNA, 372 bp, Homo Sapiens
tgaaagcacacccagcacaccctccttctggggtgattcaccatgcagagaacctggatcaaacagaggcatctggcttcaccatcattccccaagaaccctagtcaacttctaggataagcacattctccacatgaaccagagtttcaagagaatcccatgataatacaaactcttgggagacaagtctgacccttcctgacctttccactttctctcaggtcttggtcaccagagtcctaaaactggatggtccccagcctccagctgctgctgtgctccaggccacccaaaatcctactgggaactgcactcccaaagtactatcaggtcgcctttcacctccaatggttcacatttgtttattccatg

SEQ ID NO: 167527 - DNA, 132 bp, Homo Sapiens
aaatatttgcagtgtggagcgttatgatccaagtaaggactcctgggagatggttgcatccatggcagataaaaggattcactttggcgtgggtgtcatgctaggcatattttgtggtggtgtgcttcaccg

SEQ ID NO: 167528 - DNA, 483 bp, Homo Sapiens
  misc_feature (413)..(413): n is a, c, g, or t
  misc_feature (421)..(421): n is a, c, g, or t
  misc_feature (433)..(433): n is a, c, g, or t
  misc_feature (450)..(450): n is a, c, g, or t
  misc_feature (455)..(455): n is a, c, g, or t
  misc_feature (468)..(468): n is a, c, g, or t
aaagcacaccgaatgtgatgagccagccaggagatagaatactacctgcccttagggttgggggctgtccccacaagacttgatacttcagaaacccttttcattgacccacaagcagatatttgaattacttcttactttattgctccaggattctggatgggctgcatttactgtgtgaaggataaaaatcattagcctgggattctgatttctataaattgccattaaaagctttttttcccctaagaactgaaatgtgctcaccagccaaaacactttaacttgtaaattttgagggcagttaaccaaacctgtgacttaatcatatctcctcctaccccccatttccaagggacatttgtttactcagatacttgttatactaatacttgaacttgtaccttatgggnatttggcnatcctttttaancaggtcatggtattctnataantttgggttaccanttttgggggatttga

SEQ ID NO: 167529 - DNA, 1649 bp, Homo Sapiens
gaagagagagaagatgcagatgtcagtgtcactcagcagaacagcattccagatccggcaatttcagaggtccttgttgaatttacttagcagtcaagaggaagattttaatagcaaagaagccctcctgctagtcacggttcttaccagatttgtccaagttactaggagccctcctctcctcagtttgtgcagatgttatcctggacatcaaagatttgcaaggaaaacagccgggaggatgccttgttttgcaagagcttgatgaacttgctcttcagcctgcatgtttcgtataagagtcctgtcattctgctgcgtgacttgtcccaggatatccacgggcatctgggagatatagaccaggatgtagaggtggagaaaacaaaccactttgcaatagtgaatttgagaacggctgcccccactgtctgtttacttgttctgagtcaggccgagaaggttctagaagaagtggactggctaatcaccaagcttaagggacaagtgagccaagaaaccttatcagaagaggcctcttctcaggcaaccctaccaaatcagcctgttgagaaagctatcatcatgcaactgggaactctgcttacatttttccacgagctggtgcagacagctctgccatcaggcagctgtgtggacaccttgttaaaaggactttgtgcaaaatgtacaccacacttacagcccttgtcagatattatctccaggtgtgtcagagctccggaggaattccaaaaaatatggaaaagctggtgaagctgtctggttctcatctgacccccctgtgttattctttcatttcttacgtacagaataagagtaagagcctgaactatacgggagagaaaaaggagaaacctgctgccgttgccacagccatggccagagttcttcgggaaaccaagccaatccctaacctcatctttgccatagaacagtatgaaaaatttctcatccacctttctaagaagtccaaggtgaacctgatgcagcacatgaagctcagcacctcacgagacttcaagatcaaaggaaacatcctagacatggttcttcgagaggatggcgaagatgaaaatgaagagggcactgcatcagagcatgggggacagaacaaagaaccagccaagaagaaaaggaaaaaataaatgaaatgcctgagttaatgtgaactttggggcttctgcttcatttttacccaacaagcaacaatgcccccttgtcctggagtcccacaccgatgttggcatcttggttctgaacccactgaattcaactggcaccttcagttagaaggaatcttcttgggcaggtcctgctactgaaaaatggctggccttaggcaagcccttttgcaaaagcacagctgaaagcctgagtttgggagcctgcacccaccccgatgaagctccacgggaccaaatacagagccctcaggcagtgctatgggccaggctgggcttccttttttcaaggagcctttggggaggtcaattatctgggaaatatccaagcgcttccacctgaaaggatagggccaattgggttaggatgcccaccttcaagaaactggtaactggagaacttccagaagtgggagccaaaggggagctttaattgcttaaagc

SEQ ID NO: 167530 - DNA, 856 bp, Homo Sapiens
tgttctcaacccttgtcactctccgtttgaccttagcatttaagctcctttgctcactttctgagctctcagttacagttcttgaggtggcatcctaaccaatttgcactattctttcaggtgaagcgctggatatttaccagataattgaactcaccaaaggctccttggaaaaacgaagccagcctggaccatagcactgcctggaggctctgtatttgctcccgtggagcttcatcggggtggtgcaggctcccaaactcaggctttcagctgtgctttttgcaaaagggcttgcctaaggccagccatttttcagtagcaggacctgccaagaagattccttctaactgaaggtgcagttgaattcagtgggttcagaaccaagatgccaacatcggtgtggactacaggacaaggggcattgttgcttgttgggtaaaaatgaagcagaagccccaaagttcacattaactcaggcatttcatttattttttccttttcttcttggctggttctttgttctgtcccccatgctctgatgcagtgcccagctaggaagagtggctgggctccagacagaagccagcactgacctcttcattttcatcttcaccatcctctcgaagaaccatgtctaggatgtttcctttgatcttgaagtctcgtgaggtgctgagcttcatgtgctgcatcaggttcaccttggacttcttagaaaggtggatgagaaatttttcatactgttctatggcaaagatgaggttagggattggcttggtttcccgaagaactctggccatggctgtggcaacggcagcaggtttctcctttttctctcccgtatagttcaggc

SEQ ID NO: 167531 - DNA, 604 bp, Homo Sapiens
agcgcggaacactgcgagtttggcagaacacataataaacttcatccttcatgttagttttctttcttgtacttctagctatttgctctgaatttagcacctgcatttgctatagttggctgtactttttgtttctacatgtatcttttaatagctttctcactgctcaaattcagtaaggaaatcagttaggagcaataaaggtaagagacagagaaaagagggagggagaaggaaaagctggagctacaaagtaataagctcccccaactaatggtgttatttgctagaaaagataaagacctaagagaatatagaattaagaaaaccaaaatataaaagataaggattctcaaatatgtgaatacactaatcatcccacgcagcatatgtggaattgattccagaactacttgtaaaactttatgttgttataagcgactattttatctgttagaaatactgaatgctctccttgtgaaaaactccataggcacaaagttaaatttcttatctttaatgaggtaaataaagcaggcaaccaatatttagctcagggtcacagccccttcccttggctaatttcttcatctgttgttcacct

SEQ ID NO: 167532 - DNA, 160 bp, Homo Sapiens
catcataaattaaaacttctgaacaatctagtaacaaatggaaatgctttcccatgatccagcacatctagcagggggtgtctgctgacattctacacaaagagacacactggagttgtgcttctcatcatttcacattaagaacccaactgcacctttt

SEQ ID NO: 167533 - DNA, 374 bp, Homo Sapiens
gaacagatttggggatagtaactacccaagtgggtttagaagtaaacaaaaagaccttcatattataagacagtttcacttgtaagtcaatcacatggcacagacatcccaggagggcttactgtcacagatcacaagctccgttaaggacaagaagtatgccctgtcctctgtgttcgtctacccagcagggcaccaggcacatggtgagggtgcaataagcatctgatgaccaacagctctggacagtgaggctttagggcacaggataaaactgcatataggcagctacattatgcagagggctgctaatttcttattttaaaaaatggaaggggtaacagcacgagactatcagaaacctggtgtgctgt

SEQ ID NO: 167534 - DNA, 1006 bp, Homo Sapiens
cttccttcccctaaaagcaattactcaaaaacggagaaagcgagtcagctgatgcgtgccctactctcccacccctttatatagttccttcagtatttacttgaggcagacaggaagacttctgaagaacaaatcagcctggtcaccagcttttcggaacagcagagacacagagggcagtcatgagtgaggtcaccaagaattccctggagaaaatccttccacagctgaaatgccatttcacctggaacttattcaaggaagacagtgtctcaagggatctagaagatagagtgtgtaaccagattgaatttttaaacactgagttcaaagctacaatgtacaacttgttggcctacataaaacacctagatggtaacaacgaggcagccctggaatgcttacggcaagctgaagagttaatccagcaagaacatgctgaccaagcagaaatcagaagtctagtcacttggggaaactacgcctgggtctactatcacttgggcagactctcagatgctcagatttatgtagataaggtgaaacaaacctgcaagaaattttcaaatccatacagtattgagtattctgaacttgactgtgaggaagggtggacacaactgaagtgtggaagaaatgaaagggcgaaggtgtgttttgagaaggctctggaagaaaagcccaacaacccagaattctcctctggactggcaattgcgatgtaccatctggataatcacccagagaaacagttctctactgatgttttgaagcaggccattgagctgagtcctgataaccaatacgtcaaggttctcttgggcctgaaactgcagaagatgaataaagaagctgaaggagagcagtttgttgaagaagccttggaaaagtctccttgccaaacagatgtcctccgcagtgcagccaaattttacagaaggaaaaggtgacctagacaaagctattgaactggtttcaacgggttgtttggaatccacacccaaaa

SEQ ID NO: 167535 - DNA, 526 bp, Homo Sapiens
  misc_feature (387)..(418): n is a, c, g, or t
atcgaactgaccggtacgatgaggagactttggctacgaagtgcccatcaaagaggagggggactacgtgctggtcttgaaatttgcagaggtctactttgcacagtcccagcaaaaggtatttgatgtacgattgaatggccacgtcgtggtgaaggacttggatatctttgatcgtgttgggcatagcacagctcacgatgaaattatacctatgagcatcagaaaggggaagctgagtgtccagggggaggtgtccaccttcacagggaaactctacattgagtttgtcaaggggtactatgacaatcccaaggtctgtgcactctacatcatggctgggacagtggatgatgtaccaaagcttcagcctcatccgggattggnnnnnnnnnnnnnnnnnnnnnnnnnnnnnnnntatgatgaagggtctaatctcaaaaaacagaccaataagaaccgggtgcagtcaggcccccgcacacccaacccctatgcctcggacaacagcagcctcatgtttccc

SEQ ID NO: 167536 - DNA, 523 bp, Homo Sapiens
  misc_feature (369)..(400): n is a, c, g, or t
gcccggatagacgccacgtctgggacaggtggtgaatgaggctgctctctactcgctctgcctcttttgtctcctttaattgatgtgtgtttttttctctttgtttttgttcattaatcattgtgaaaaatacagaaaccaaaaccaatatggctggtttctttcccacacccctccaccctgttcaggatagtcatttgttctcacaaccggcagaggcagaagagggttggaatgaagactccgaagccaccaggatgggaaacatgaggctgctgttgtccgaggcataggggttgggtgtgcgggggccatgactgcacccggttcttattggtctgttttttgagattagacccttcatcatannnnnnnnnnnnnnnnnnnnnnnnnnnnnnnnccaatcccggatgaggctgaagctttggtacatcatccactgtcccagccatgatgtagagtgcacagaccttgggattgtcatagtaccccttgacaaactcaatgtagagtttccctgtga

SEQ ID NO: 167537 - DNA, 698 bp, Homo Sapiens
ggtttaagcacacccgttgtccgggctgagtcaattggaatgctttcggacgtagggagaggtcttttccctcttatgatacattcttacttgtaacatcccggcggagagccatatcaggatccagtttatcacgaacaaaatagttcctttcattcatctctgatcggagtgtctttcctttaattaagtacacattagccatatatgggacattccatactcctactctattcccttgaacaatatccacataatcttcagatcgtgcatagtatccatcaggactcaatgctccccagaaattggaccacagctttccatgacgagttacaagaggagcaatgatctttctgttttgttcaatcaaaatttttaaagtccttggatttgtcaaaacaacatctgcatccacactaaagtaataatcacacttttcatcctgacggcaaaagtccattcccatgtttctggcttccgcttgacttagattttcttctggtcctactatttttatagttttgatttcatgcttagctttatcaaaaaataccttgatgtccttttcatgataaacctctttgttatgaataaaaagtttaagtgcttctttcgggtaatccagtgggctgtgctgttcaacggggatagctctagagatcgaccatcacggaaacacggggcaccgccgctgctat

SEQ ID NO: 167538 - DNA, 407 bp, Homo Sapiens
agaagcccccacacagacagtacccaggataatactttgtatccctcaatccaatcaagttgacactcagtattaaccatcacacacttctagaagctttctttcatgatactcttcattttaagttactcatattcagcttgtgagaatgatgagaggcaaagaaagttttatgacctactcaaatcacacaggcaatagccaataaaacatatctcacccttacagctaaaaaagctttaaaatcccttcaaaaaacaattcatcttatctacttttcattagattgcaataaaatgattttcttaaattgagataaaggtacatgttctgcattctaactaatagtataggctgagctcttataactttgattgtctcctctgataaactcaagttctccactt

SEQ ID NO: 167539 - DNA, 484 bp, Homo Sapiens
  misc_feature (68)..(68): n is a, c, g, or t
  misc_feature (95)..(95): n is a, c, g, or t
agtctgacataactatttcattttgcattatttatttatgatgcttttttcattgtcttttatacatntgggattataaattatgtaaatgttanaatgagcatctcaaagaagtctgttaaatcatgactgaaaaaaatcaatcagatgtatcttcaaaaagtggagtcccagttttatgaatcagagatataaaccagaaattctataactgatcatagaagaagaatccagtaattgaacaaatcctatttaatgacatccttgtagcatagatggtctataatgctgaccacagatttcttagaaatgctgctctctctatttaactaacattttgttcagttttgcctccagtggaagcagaaagggttttttcagctgttaaatcctaaaaatcaatataatttatttatgtaagaaaaataactcaatcaatatatttttgaaccttttaagtactaattttctttttatcaagtag

SEQ ID NO: 167540 - DNA, 1019 bp, Homo Sapiens
ttcagactcccaagtgctgggattacacgcgtgagccacacacccagcctccatctttaaacttttaaatgtgaaatttctatcatgtaccgttagcctaacaagattttctttcctatttctgactggtgcctttcccctttttaggagcaacgaaagctactctcttagttatgttcttgtgatgtgacaaaatgtcaagaagataggagaagagaatattttatttcgttgatgcttttgttcccaagtgtgaccctaaacttaagctttgtaggagttgacattctttcatgtcccttccctttactcatgccgaaactatcaactgggacattttgtgcttttggtttaaaagttaattgatattatactttggttttatctaaaaagtaaatgtatttgcctttgacaaaagactgacacaagagcaaataagctttaaaatcgggtgttatgtgctttcctccatttttgagcatattatccaaaatggtctgtataatataaatgagaatgatgcagtttaagtaagccttgttataccattgtcatggacccctgtcataaagccatttcttggtttgtttgggaaagaggcatatgggatttatacagattcacttgtaaatgttggattggggatttttgtgtaaattttctcaaataaaggctagcagcaccatccgcgaacccgaccaagaaaaaaagaaacgcctgtccggccgcccccggcccgtcgagcaagcttttcatagaccatttcgttttggcgccccggggcccaataaggcaaagtggaacctgggtcaatagcctggttccctcaagaaaatcccctgggcccatgcactcaagcggctttgggaatttcctccccccaaataaaacaaaaaccgcccccggggtggggccaaaccccggagacccggttttccttggaaacacacaaatttcccagagaaaggtggggagtggtttctgcgtaagggggcccccctttctttcatcgggggcat

SEQ ID NO: 167541 - DNA, 644 bp, Homo Sapiens
acgtgcacgctctgaataccgtcatgaaagagaatgatccaactgctatttatgttcaagtcctgtatttttggccatgtaactgaaaactccttattcattctttaacacacagtgcaatagtgaaatgactctgccactgtgtgttttttaaaaaaagatcagagtaagcatgttcctagtaaaccacaaagtaggatattgaggaagcaaatctagattaaaaggcaggaaaaaaaggcagaagtttaaatttcactaatttttcaatttattagcataccaggaccctttaaaccttgttcccattagcgcctggtattagatgtgaaggatcaaacctacggatctatctcctgactgcttttataaggcgtgtaaaagtcggttttcaactgcacacaggcctcctaaaatgccttgtttctctagtccctcctgctttaagcagcatgagcagtaaagcaggggttggaccaaataaaaagacaagagctaactgaattgtatgggagcagcatttaacatattcctagtcaaggacaggatgggaagtaagtgaagaataggccaggaaaatagtgtcctatagcagagtggctgcactcggggttggcagatgccgagggatcctctagaacagc

SEQ ID NO: 167542 - DNA, 662 bp, Homo Sapiens
actgtgaagcacacccaagaatgtttagtctacaaaaaatagtagaaatatcatattacaacatgggaagaataagattacagtggtctcgaatttgggaagttattggagatcattttaataaggttgggtgtaatcctaatgaagatgtagctatttttgcagtagactccttgaggcagttgtcaatgaagttcttagagaaaggggagcttgctaacttcagattccagaaggatttcttaagaccttttgaacatataatgaaacggaacaggtctccaacaattcgagatatggttgtacggtgtatagcacagatggttaattctcaagctgctaacattcgatctggatggaagaacattttctctgtatttcatctagctgcatctgatcaagatgaaagcatagtggaacttgcattccaaacaaccgggcacattgtcacccttgtatttgaaaaacactttccagcgaccattgattctttccaggatgcagtgaagtgtttgtctgaatttgcgtgcaatgcagctttcccagacacaagtatggaagcaattcggcttattcgccattgtgcaaaatatgtgtctgatagacctcaggctttcaaggaatacacaagcgatgatatgaacgtagcacctgatagacca

SEQ ID NO: 167543 - DNA, 404 bp, Homo Sapiens
ggctgattcctagaggatcacgtgaaagcacaccccgtgctcctgaaatcattataggtaaaagctatgactatggtatagatatgtggtctgtaggttgcaccttatacgaactctatactggaaaaattttattccctggcaaaaccaataaccatatgctgaagcttgcaatggatctcaaaggaaagatgccaaataagatgattcgaaaaggtgtgttcaaagatcagcattttgatcaaaatctcaacttcatgtacatagaagttgataaagtaacagagagggagaaagttactgttatgagcaccattaatccaactaaggacctgttggctgacttgattgggtgccagagacttcctgaagaccaacgtaagaaagtacaccagctaaaggac

SEQ ID NO: 167544 - DNA, 556 bp, Homo Sapiens
gcacacccagcatttgaggggtaaagacaatgttagcacaatgctattagagctattattagcagacctcccttctctctgccttgaaataagagcaccaattctgactgctcctgcaggaactacctgaactcagacttctctggctgtaattctaatagatcaatatttgctgtaaaaaatattagggcctggcctgttaaacctttcctaataaatcagtacacaaactgtcgatctatctaactgatggtttatttcacaggtagctactcattcttctttccaagccattatttacacaaccacacaggaatagtcagcagaagagagactgtgagggtgttaacaatgtctaaattatcaagcaaacccatatctctgtacataattctaaccaccttatagcataaatttatatccatagcccatattccatgaatcaatttgcatgcgttccagagacaggccctgccacattggctcctggactctgtcaaatcgtccatactagattccaggcatgaacagcatggctgaggggtgtgctctcaca

SEQ ID NO: 167545 - DNA, 611 bp, Homo Sapiens
ccactggtgaaagcacccggtggaaatttatttcccaggctctcctaacgtttcagacacaaatattagacggtattatggaccagtacctaagtagacactttttgtctatcttttcgtctgctaaagagagaacattgtgtaggagctctttagagttgctcttagaagcatacttttgtggaagagtgggaagaaataatcataaatttatttcacagttgatgtgtgactactttttcaagtgtatgacttgtaaaagtgggattggtgtatttgagttagtggatgaccattttgtagagttgaatgttggtgtcactggccttcctgtttcagattccaggatcatagcttgtcttgtgcttcagaaagatttttctgtgtaccgcccagcagatggtgacatgcgaatggtgatagtaacagaaaccattcagcctcttttttccacttctggatcagagtttattctaaattcagaagcacagtttcagacatctcaattttggattatggaaaagacaaaagcaataatgaaaatctacatagtcagaatgtaaaattgctcatatctagtgtgaaacaaccagattagtagttatatgcag

SEQ ID NO: 167546 - DNA, 603 bp, Homo Sapiens
tatcccctgtgaagcacacccttaccacctggctttccctgtgcttctcatttgtaattttggattttagtctagttcagcacattccttcaattcacattaagcatccatttcctctctgatattcttgtctctggtcccttttttgtcttatccatttggacatctattcctaagcaaaacattctaaattctattttcattatcttactccttagcccagatcaccagaagctccctactatcaacacaaattggaaaatctctggtgtgattatgaggagaccattcagtattttctttgacactattaaacaacattgagtttgcctaatgtcagtaataaaggccaggttgtaaaatagtaaaacctgcagtggtctctaaggcaactagctgtttattatagtagttggggaaaggaagatataaaaaatcttctaaggaactttattatagatctgtttacttaagtaaagcatatacaggaagatgcgggaatcataataaatgcttaatgaagcaaaactaaatgcacctgtactactacatcaagattcacacacaaacgacaaagagctatatccagacctggcggtgtgt

SEQ ID NO: 167547 - DNA, 330 bp, Homo Sapiens
aaggaggcaacgtgtaggaaaccactttgaagactcctagaggagtattgttgctggggagagggctgctggaccccaaccaacactcggcaccactttctcttcttccctttcctcaattgccacacggagtggagctgccacttctctttcatcctcttcctcaaaagttgtctgaaagctgtgaaagtactttgaaaattagagtcttatgaaagacacttcttttttaagttcagaaatatgaggtttctgatatatctggcttcctgtttccatcccttgggtattctttttacccttatcacatcatagaatccaaaagctttt

SEQ ID NO: 167548 - DNA, 338 bp, Homo Sapiens
ccaacaatgccctattcatggcactaacactgagtgaagggaagaagaaaggtgattatttcccatactgaaaactgaaaagtttgctcttgaaaataacctggcctaaatgacaagacgtgttcattcttagaagtcaggctgtgctctgaacgagtgttacgtgtgggtaagtttttcagtgaaagaaagcctcaacgagtcaataataaacattaaacaattctgctccaagcaggaacttgcaaactcctggtgcaagagcatcaagaagcaatgagatctcgtctcgggcagagtaaatggctgaaatggaacttgctgggtccacaccagtt

SEQ ID NO: 167549 - DNA, 425 bp, Homo Sapiens
tctagagtgatacccctgtgagagcacaccctgggaaccgcatccccagatgaaggtgtccttgtgaatagtccctcagtatttaagacaacagtatttaagaggaactactgcctctactcatgggctttgaaccaatctggatattctgctagggaaatttagtcaaagagaccagtctttaaattcaaacagggaattcaaagtgacaaaagtacaatagcataagcaaagtatacggttatagtcttaagagaggaacgggactttatcaggcgtaaggtcttactgatagagttgtatcgcaagtattaggaattaatgaggatgggctgtgctgcggcagcttgaagtctgataaagcctcacctgcacccactgaacattctattcacccaggaagaaggctgacaaatctctatttt

SEQ ID NO: 167550 - DNA, 577 bp, Homo Sapiens
cgagccggtactgtgaaagccacccaaggcacaatggttggaagaaacgggggtcacatgcaaaggactgaaataaactcttcccttacacaagacacaaaaagcgacacaaaatccactgaacactaaagagcaattgtgaaaccaaaacctccaaggaaaacacatagggtgcatgtctactgtgggaaaacttgaacctgtgaacctaagccacaaacagaaaacgaagacataggaaccaaatacccacagaccatacaaaggcttcgccatctcacttttcttctcaaagggacacagaaatcaccactaacaaaagctaatgtgaccatgtgagactaaggacaacttcagagcttcacacagcttcaacacaggacagaaaatactgaacccaaataaaagcatcttgcagactaggaggaaaataatgaaaaacggtcgatctggaagggcttcttatctaacatactcaagaaactaatggtcctaagtggacaaaaatacaaaaaccaaacacatgctaaaatgcccaagccaagtgcgtgtgaggatcatctagacgacccagccc

SEQ ID NO: 167551 - DNA, 647 bp, Homo Sapiens
ctagaggatcccccgagcccatcacatacctcagtgatgatattttacccaccatccactaatacaacaaatggtttggggcttaaatggaaacaactttgtctcattaacaatgctctgacagtgtacatctttcttgatcctaaaggggcagctattgaagtggattgttggctttgtccttaaggtcatataaaatgacgtgtgtgtagtgccagtacccacatgtgctgaagtgccaaaagactggcattttcaagtgtcaacaggccatgcatcactgcgccacagctaaaccctttataatgcttggccctgaaaaaccgttaaacccagaaagctctttgaacatatgatcattaaaattcattaacttacgttacaaacatccacgtaacatagggagaaaccatgtcacatggagtatccactgggcatgtacttagagctcatccacaagattaaaatacaaagagatcgtaggtgcacacccaggcagagggaaatgtccaatctgggaacttttccttcagagcatccagttgaggggatctcttgtcttccccagacagatagtgggcagcaatggccacggtgaccattccttcaggatgttcttctgaaacctgcacttctatccagactgc

SEQ ID NO: 167552 - DNA, 942 bp, Homo Sapiens
  misc_feature (104)..(218): n is a, c, g, or t
gtatatggtcagagctgttctatgagtatcctcgagccctcaaatacctcagtttctatagtagctgggcccacaggcacacaccaccatgccctgtaaaatgnnnnnnnnnnnnnnnnnnnnnnnnnnnnnnnnnnnnnnnnnnnnnnnnnnnnnnnnnnnnnnnnnnnnnnnnnnnnnnnnnnnnnnnnnnnnnnnnnnnnnnnnnnnnnnnnnnnactgcacctggccaactttctgttaaaccaaccttgcattcctggcataaattccatttggtcatgctgtagagccaaagttacaaacatccacgtaacatagggagaaaccatgtcacatggagtatccactgggcatgtacttagagctcatccacaagattaaaatacaaagagatcgtaggtgcacacccaggcagagggaaatgtccaatctgggaacttttccttcagagcatccagttgaggggatctcttgtcttccccagacagatagtgggcagcaatggccacggtgaccattccttcaggatgttcttctgaaacctgcacttctatccagaactgccatgcagaggcctggagtccatgggagtaaaagacaaagtagtctcctcctttacttgtgactggggtgccattgccaagagaccactgagaaagtgttgaccctttgtgggctcgaacatagaaggacatatggcttggtcctgttgcttcaaaagtcaattttatagaatcccaaggtgtctgttctttggatatgagtcggaaatgaggaggatttcttggagaaacttctggggcaggaagataccagtttttcctgatcagaaagtgcactggaagataccaaggaaaaccacaaagaggtgcattctcctcacagtgagctcggatactatcattgatctcaggtatttgagagctcgggggtctcaag

SEQ ID NO: 167553 - DNA, 527 bp, Homo Sapiens
  misc_feature (317)..(330): n is a, c, g, or t
gcggtcgctgaaagcacacccaaactactcaggcggcagctatgctgcccgaggagctaggctcagaatctcacttctccccgcagttttttgctcctgtccagtttataggtaaggcatctgtgccacattctttaaaatccacttctctgtgaaggttttggagcccctagagatttttccacaggggaatgacgactgctgttgtgacttagaaggcgaagcagattatattttccaaaaatgaccataacaagcagtcccatcccacatgctcctcttgcagcgtgactgtgacactcctcccacttgtggtnnnnnnnnnnnnnnctgtgtcccctccgccttggaaccggaggagcttttgtaactttttatcatcagagcccagcacaaatgatgccctatgacttgtgagcccacaagagacaacgcggcttctccctgcctgctaaacacacaggcctggagcccactcaactgccccgaggccaccctgtgcagaagactccctgagactccatgga

SEQ ID NO: 167554 - DNA, 345 bp, Homo Sapiens
cgtgggttgtacacggtgctgctggcatgccagatcattcctcagttctacctggatattttaccctcacttctgcttagagtagcagcaaaagaaagccttgtagaggaaactgaatgtctataaaaagcatctatgggttaaacttcccctctggtcctgacaccactccccgcagtaagttctctgacttggcaagagcacgtctcaggttgtgtcctactggctcctcgcccctcaaatcctccattggttgttttgcccattttggatttgatcatatgtgtaattctttgaggtagagaaataaaagaggtaaattatacgtaaattgtgaaatgggag

SEQ ID NO: 167555 - DNA, 763 bp, Homo Sapiens
  misc_feature (508)..(600): n is a, c, g, or t
ccagacacacaggtgctgcatagtccatcttagccgggcatggtggcgacaatcacatttaactccaaaaatttgacgtgctattttcttctaaaactatagatgcttttatttttggtcactatttaactttgtgtaaagtggaccaagagaaaaccatattgtggaagacagtttttcacacattttagtatccgtgttgcacactgtgttagagattatgaaaaccattctagttcagtttatcacccaaagctatcacccaacactaactccttagtattctttcaaaggaagcaaatagtaagattacaatatagaatgagctaaaatatcaaggggaaagcttcatttcctctttattctctttatcgtccttcccattttaaccttttaactttgttttgatggtgccaagttgagtctgatgtacccattgttagctttggatagaatttaaagtatatcccagaattagctgggcatgttggtgcatgcctgtaatccnnnnnnnnnnnnnnnnnnnnnnnnnnnnnnnnnnnnnnnnnnnnnnnnnnnnnnnnnnnnnnnnnnnnnnnnnnnnnnnnnnnnnnnnnnnnnagacaagagcgaaactctgcctccaataaaaaagaatttaaagtatatcctttgaggtcattttatgtaacaattagatataacctcctgtgtatctctctgttcctcttcaaagttattaaaattcagcttaggtcatggatttttaatatgagggccagat

SEQ ID NO: 167556 - DNA, 369 bp, Homo Sapiens
ccgcaggtagctgacgagagtgtttacaaaatgcctgagtctcctctatataaagtcagctcaaaatcttagtcttccctatcaagtaacacaatacttttttttcctctttcctctacctgtcttgatactgtaacttttcaaatcaactttgttttacagatttaatctggataaatatactacaacgaggcaaagcggaaggcacactgtgtgatccgcataaggatctcaaccccctgaagtcccccaggaattccctgctaggaagcagctggaacatgtacaactcacctgactggccttgtattagccaacaagcttacttagagactaaggcgatgagccattgaatttcatgacgtcaac

SEQ ID NO: 167557 - DNA, 854 bp, Homo Sapiens
gcccagggcatgaacatctcaagcatctgtcagcaaacagctgcttcagaacacttactctggccctctcttcatctgctgcacataccactgaggcacaaatgttggtcttctgatgacatccttttgagttttggaagctatgtttgtctgaatcatcccttggaaactcagctcatagttccgtgagcccgcctgaaatggcacaactcccctcggacaggattgatagagagactccaggtatgaagagtcgacgtttgaatttttccgtttgtctttctcttctccatactgaatccatgtgccagattcattcttccaataccaaatccatttggtggtgaagacagaattggctggcttggtgacagaagaaggagtggagaggcgtcggatgggaaaggaatcacaactcattacccgaaaattgattgtataacttcctacagaacagaggtggactccggggttacagtagcctttctcgatcgtctccatgtgctcaaagtccgtccaggttttaccaataagcatctgccaccggtaaggcagatggaagtggactttgctgcagctaccattaagcggacaacccttacacagatggtcaagacaaatttcctctgagtcatgatcatccaccctagaagatgtggtacttgtgacatcagataaagaatcgttaacaagtgctactcttgggtcagcatcatctgcgattctgccagtggcctggacatctcgggaagcaggtccagcatcctgaatcctaggtgatgatatttctctgtgaccgctgctagtgcttttgtaattaagatctggtagaagttatatcagtgccataattc

SEQ ID NO: 167558 - DNA, 389 bp, Homo Sapiens
gtgatgggaatccgcacccctaataggtggttctaatgtgcaggttagtaacaatatgcttgaggcaaaggctacctcctatccttccagaatggcccaggtcaagctagaattatcctgtgtcatgttgccagttacaccagtaatggtactgctcagaactggactaaatagaagacattttaaaaaggcaaatgcaaagatggaaatccccaaaacagccattgtccagttctggtgagtatatactccttgggatcttatgtaggccctagctacaaatgacctagtaaagtaaaaataaaattgggctcgtagaaagatgtgaccactctattttatgttggtagcacattgatatacacctattataacctattataacttat

SEQ ID NO: 167559 - DNA, 398 bp, Homo Sapiens
tgctgaaagcacaccaggggatgtttgggcaaaaaggtgatgagggtgccagaggcttccctggacctcctggtccaataggtcttcaggctctgccaggcccacctggtgaaaaaggtgaaaatggggatgttggtcccatggggccacctggtcctccaggcccaagaggccctcaaggtcccaatggagctgatggaccacaaggacccccagggtctgttggttcagttggtggtgttggagaaaagggtgaacctggagaagcagggaacccagggcctcctggggaagcaggtgtaggcggtcccaaaggagaaagaggagagaaaggggaagctggtccacctggagctgctggacctccaggtgccaaggggccaccaggtgatgatggc

SEQ ID NO: 167560 - DNA, 850 bp, Homo Sapiens
gggggactgccgcgggggattctgggccaagatggcagcaatgaggaaggcgcttccgcggcgactggtgggcttggcgtccctccgggctgtcagcacctcatctatgggcactttaccaaagcgggtgaaaattgtggaagttggtccccgagatggactacaaaatgaaaagaatatcgtatctactccagtgaaaatcaagctgatagacatgctttctgaagcaggactctctgttatagaaaccaccagctttgtgtctcctaagtgggttccccagatgggtgaccacactgaagtcttgaagggcattcagaagtttcctggcatcaactacccagtcctgaccccaaatttgaaaggcttcgaggcagcggttgctgctggagccaaggaagtagtcatctttggagctgcctcagagctcttcaccaagaagaacatcaattgttccatagaggagagttttcagaggtttgacgcaatcctgaaggcagcgcagtcagccaatatttctgtgcgggggtacgtctcctgtgctcttggctgcccttatgaagggaagatctccccagctaaagtagctgaggtcaccaagaagttctactcaatgggctgctacgagatctccctgggggacaccattggtgtgggcaccccagggatcatgaaagacatgctgtctgctgtcatgcaggaagtgcctctggctgccctggctgtccactgccatgacacctatggtcaagccctggccaacaccttgatgggccctgcaagattgggagttgagtgtccgggaactcttctgtggcacggaactttgggaggttgtccctacgaaagg

SEQ ID NO: 167561 - DNA, 362 bp, Homo Sapiens
tcatagtgctatgagaattaggaggacctgtcctggttaggagagatggggatagcctccttgaggaagtgaagggtaaattgagatctgaaggcacagtaagaattaactagacaagggcagcaggggagagggaatagtagatgcagaagtctggtgctgaaagggtgcttagaacgtttgaagaagtttaagcatagagaataggctggaaagtgagccaaatgaggctgaagagacaggctggggtcagattggccggactttgtaggccacaataagggattttgtccttactctgtgagcagcaggaggatgcctttgaagtgctataagcagggaaaagagcagccagtatatac

SEQ ID NO: 167562 - DNA, 509 bp, Homo Sapiens
cgtgattgacttactatgtgctcgcccaggaattcttgtgcactcgttgcgccttcatcacacggtcagagctgcaactgagcttgtgactacatggtgcacttaggctgagaggcggcgggagagatgcccatgaactcaagtacccggacacgccctccacttctaccaccacgagtaacaccgcccccacgggaccgctctcgaggtcccccaagccaaggtgaggcaagtcccagttgaatgtcatcccgttcctcttgggcacggcggaccgctctcgcccttaaaggtgcgttgacgtggaaggtgaatgtctctttgcgtgacagtgcctcagcgcacgggcgacgaggggcacacctatccccctggctcgctctctagctggattcaggtggaacggaggaccatgaaccctctggaccttttctgccttggtcctatgcttgtaaggtttcccgcctaagaggcccatcgactccttctgccttctttcagttgattac

SEQ ID NO: 167563 - DNA, 263 bp, Homo Sapiens
attgtataatgcctgaagtgctctgtatgcctgtcttcagctcacaatggagagcaccggtgtgagaacacgtgacctccggctacaactgcatgccctgccccccacgcttcaccggcatcacagaccttcggccagggtgtcgaacatgccacggccaacaaacaggtacagtcaactagacgagtaaaccagaggacaggagagctgtccttgaccaaaataactgggagcgggaggaatgtaatttcatacccttcacc

SEQ ID NO: 167564 - DNA, 605 bp, Homo Sapiens
  misc_feature (60)..(60): n is a, c, g, or t
  misc_feature (94)..(94): n is a, c, g, or t
  misc_feature (264)..(264): n is a, c, g, or t
  misc_feature (388)..(388): n is a, c, g, or t
  misc_feature (450)..(450): n is a, c, g, or t
  misc_feature (491)..(491): n is a, c, g, or t
  misc_feature (566)..(566): n is a, c, g, or t
taacggttccctatacccctaaaataccttacaatgtgttaaagtgccccagcagggcantaagggcaaccttagacccaaccatttaactgtnaactgtctctctctcccttgtcctcagatggatgcctgtccaatcccctgctttgccggcgtgaagtgtactagctaccctgatggcagctggaaatgtggtgcttgtccccctggttacagtggaaatggcatccagtgcacagatgttgatgagtgcaaagaagtgcntgatgcctgcttcaaccacaatggagagcaccggtgtgagaacacggaacccggctaaaactgcctgccctgacccccacgcttcaccggctcatcagccttcggccagggtgtcgaacatccnacggcaaacaaacaggtgtgcaagcccccgtaacccctgcacggatgggacccacgactganaacaagaacgaccaagtgcaactacctgggaccactatagngaaccccatgtaccactgccgagtgcaagccctggctacgctggcaatggcatcatctgacggggaggacacagnacctggatggctggcccaatgaagaacctggtgtgcgtg

SEQ ID NO: 167565 - DNA, 1332 bp, Homo Sapiens
  misc_feature (1146)..(1159): n is a, c, g, or t
ggcaagtgtggagagtgaggcgaatctccattcttcctccagcactttttccaccacatccagcacagtctctgcacctcccccagtggtcagtgtctcctccagtctcaatagtggcagtagcctgggcctcagcctaggcagcaactccactgtcacagcctcgactcgaagctcagttgctacgacttcaggaaaagctcctcccaacctccctcctggggtcccgccgttgttgcctaatccgtatattatggctccagggctgttacatgcctacccgccacaagtatatggttatgatgacttgcagatgcttcagacaagatttccattggattactacagcatcccatttcccacacccactactccgctgactgggagggatggtagcctggccagcaacccttattctggtgacctcacaaagttcggccgtggggatgcctcctccccagccccggccacaaccttggcccaaccccaacagaaccagacgcagactcaccataccacgcagcagacattcctgaacccggcgctgcctcctggctacagttacaccagcctgccatactatacaggggtcccgggcctccccagcaccttccagtatgggcctgctgtgttccctgtggctcctacctcttccaagcagcatggtgtgaatgtcagtgtgaatgcatcggccacccctttccaacagccgagtggatatgggtctcatggatacaacactggaagaaaatatccacccccttacaagcatttctggacggctgagagctaatttggcccaaggctgggggctgtgttttgtgtgtgtgtataaatttgcactgaagtcttgtttcagaaaccagaccactgaggagagcctgctgagctgaggccatggcctgcgtggcttggggaaatgagttggtggataccttctgggcttttgaacttgcccctcccccatttccctctcccccatgtgtctgaccctgtcttacccatttcaagttcaagcggtgcagcaccttcgaagcatcaatgcacacacctgctgttgcttttgatttctggaaggcatgtagtttcaacttgtaacaaaaatatttgtagtcttcaataaactgtggtatttctttagctccnnnnnnnnnnnnnnaccgtaaaccaaaccatgttcggcccgcctcggccctccaagaagctttcctaaaccatttcgtttggcggcgcggggcccagatagggtaaatggaacatggcccatagctggtctccctaggggaatccttgggcctggacctaaagggccttggaatttctcccccaatt

SEQ ID NO: 167566 - DNA, 739 bp, Homo Sapiens
agcaatccatttcccacacccactactccgctgactgggagggatggtagcctggccagcaacccttattctggtgacctcacaaagttcggccgtggggatgcctcctccccagccccggccacaaccttggcccaaccccaacagaaccagacgcagactcaccataccacgcagcagacattcctgaacccggcgctgcctcctggctacagttacaccagcctgccatactatacaggggtcccgggcctccccagcaccttccagtatgggcctgctgtgttccctgtggctcctacctcttccaagcagcatggtgtgaatgtcagtgtgaatgcatcggccacccctttccaacagccgagtggatatgggtctcatggatacaacactggtgtttcagtcacctccagtaacacgggcgtgccagatatctcgggttctgtgtactccaaaacccagcagtcctttgagaaacaaggttttcattccggtactcctgctgcttccttcaacttgccttcagccctaggaagtgggggccccatcaatccggccacagctgctgcctacccacctgccccctttatgcacattctgaccccccatcagcagccgcattctcagatccttcaccatcacctgcagcaggatggccaggacatcctcaatttcgtcgatgaccagcttggtgaataagtattactgtaccaactgggcctcctctagcaggccc

SEQ ID NO: 167567 - DNA, 898 bp, Homo Sapiens
cttcagttctgtgcaggccacgcagttacagaccacacaagtctgttgaaggtgctacaggctctgcagtgaaatctgattcaccttccacttctagcatcccccctctcaatgaaacggtatctgcagcttccttactgacgacaaccaatcagcattcatcctccttgggtggcttgagccacagtgaggagattccaaatactaccaccacacaacacagcagcacgttatctacgcagcagaataccctttcatcatcaacatcttctgggcgcacttcgacatccactcttttgcacacaagtgtggagagtgaggcgaatctccattcttcctccagcactttttccaccacatccagcacagtctctgcacctcccccagtggtcagtgtctcctccagtctcaatagtggcagtagcctgggcctcagcctaggcagcaactccactgtcacagcctcgactcgaagctcagttgctacgacttcaggaaaagctcctcccaacctccctcctggggtcccgccgttgttgcctaatccgtatattatggctccagggctgttacatgcctacccgccacaagtatatggttatgatgacttgcagatgcttcagacaagatttccattggattactacagcatcccatttcccacacccactactccgctgactgggagggatggtagcctggccagcaacccttattctggtgacctcaaaaaagttcggccgtgggggatgcctcctccccagcccggcacaaccttggccaacccaaacagaaccagagcaagattcaccataacacgcagcagacattctgaacccggcgctgcttctggctacacgttacacagctggcatactatacagggtcccggctccca

SEQ ID NO: 167568 - DNA, 318 bp, Homo Sapiens
agccgattctagaggtaacccgtccgtctgccagcggatctccccagactcatcctttcgttttgaagtctgcccctctaagagcagaggcagtgagggtatgtatgtgcctcacaatagtccacataaggagagcactggggactgattcccagcatcaccttctggtcttccctccagagaaaacaggaaaactagcatgagctaccaagaactagcaagtgcttaaacaacagacacctggctcaaattggaaggcttttcatttgtctattgcttcattccggaaactgtgatggcaccatctgactaaggtac

SEQ ID NO: 167569 - DNA, 235 bp, Homo Sapiens
  misc_feature (79)..(88): n is a, c, g, or t
catgtcaagtattgtattttctctgagtttcaagccttctcttgggaaaagggaaccctgacttagagtgccctgtgannnnnnnnnncaaccgtggtgtacatttaaaactatagattatagccatctgtttttaaaatagactgacaggactataaatacatttttctttctgttgtattgcgtgtcttaaaaataacttatacccttccttttctccttcttacccccaacc

SEQ ID NO: 167570 - DNA, 626 bp, Homo Sapiens
atagaaggcatgagcctccatgatgtcaggaatgttgcgttcttatttccccatagataaacccatttgtccacaaagtcaaggaagtcaggcagaggcccttgccatggggctttttaggataaagcaacaagcctggactttgctctacaacagggttttgcatagggagtgtatgaccagatccctcaagaaagaaagcttagagaccaggccagagtccactgcagtagcccagtcaagagaggatggtgacttggacttgtagtagagccagttagaatgaaagaaattgacacattcagaaatggttttagagatagagtcaaactggacctgataaagaactagagaagcggagtgaggataaagagaagagccatgactgactcggaagattttgtcttgaaaaacttgagaactcaagacagagtgaaataaaatcacatgtgggaaaaatctcctgctttgttttggactactttgaagtgaaatgcctgttaagcctaagtggggtaggtcatggcgtacataactgtcgggctcaggatggatacaggcattccaggacttgtgagcatatagtactaaagccatgagagaagaaggatcaccagagagaggta

SEQ ID NO: 167571 - DNA, 667 bp, Homo Sapiens
acgcatgcacagtgcacgtagctgcacacacgtgtacatgcacacacagtcccgtaaatgcacgcttacatccgtaatactgatgaagtctttcaaacaaccaaccactctacagcacgtttttagactctcagcaccaatttatacgtaagcttaaccgccttgtcctccaatcatccattaaaggatggtaagttaagcattgtaaatgttattattcaaagttggtttgatctcccagctcgggggatgctgtgttacctgtgcgccccgggagtaggagcggaatatggtacaaaatcttccctggcctgaagtatccctggaaaagatgttggagaccattaagaagaaaccagtgcttcttcctgacaacaggttctggaacttcagagccacagcaagtgcaccacacacccgccagtcagcagccaccacgccgccagcgtgagaccccaacaaaactttccaatgtccccgaagggatccgggtgttgggatgtcctcccaggctcatgctcttctctgtcatttaaaaagtcaaactagaaaaaatagtgacggttttaacataattctcagatatttaaatacattcaatgtaggctttaaaaaacttgttgaatctgaagatatatctatgcagtaaggagcgtggccagaagga

SEQ ID NO: 167572 - DNA, 1209 bp, Homo Sapiens
  misc_feature (1152)..(1152): n is a, c, g, or t
  misc_feature (1170)..(1170): n is a, c, g, or t
  misc_feature (1195)..(1195): n is a, c, g, or t
aaatacatgtttttaagaaaacattgagcagagaactgcagccaggatgcgctcagcagacattcactctggctgctgggacatcagaaaacaaagtcttcatctctctctccagtttcacccaccccaccctttgctttcatttcaggtgtgttggtctatatgacagggaggagagtaaaggagagcaggagcaattggctgcctgcaaagccagctggaggtgaagtgcaggaaaggaaaggtcaccccattctactccatggcctctctgctcccagctgtggtaggctcacatagccagtgtgatcggtttttaagaggcagtgcttttcagcttttctccctgatatatccattttgcttcccagcactttttaggagtagtgagagcacttcctgcccttgttggaagccccagggtggacactcagcacgaaggtctctcccttaactgctgcccttccaagacttgctcccgagatggagtgggcgtggtcttccaggctggcccttccttctcctcaccgcaccttccctgccccagccccagcagccatgggtacatgggtccccagctcacctatggattcccgccagtctgcccagctgcagtactcacgccccatgggggatcttggtctgtttttcttgtgggagcctagtggagagcagacgtggctttttatgtgtcttgttggggaggtgacttgcatggtggggacaaggctgtcgtggcaaccttgggatcgagtttgagactaaaggatgtcatgagatccctggcttctccccatgttgttcccggacaagggcagaagggaggcatggcaagggacctctgctgtccttactcaacagtggtcctcatccctccccacctcccactgcttcctgcaagggcaccagttgtatgagaaagttggcctttggacttaggatttcttattgtagctaagagccatctgaagcagcaggttgcaggacaaatgcttcagtccaccgagagcagtaccgtgtggccaagaggtggactcagagccttccttgagctaaactcggccaaccaaggcacgcagcatgtcccctcaggtctccagtcagtccaggtttgaccctcagttctgggacgtgtgtatatagctgtatttnaatacctcaaggttcatntgtggctctggggtgatgccggggnagggaggacgaggg

SEQ ID NO: 167573 - DNA, 1018 bp, Homo Sapiens
cctccttctggccacgcgttgcagtatcgaaacacgcccttgatatccacctcccggatggctgcatgcagtaggggtacggtggtcatctcagagcccagccccacaagcacgagggtcccaccagagcgagtggcgtagatgcccgcctggatggaggcctctgcccccgtgcactcgatggtgacttccggcttgcaccccagcagaccttctactttcctggcgatttcctgagggctctccttggagatctggaggactaaatcagccccaatctccttggctttggacaatcgggtagcagacagatcagtcaccactacttgagctgctcccattgctttggccacgagcaaagtgaccatcccgattggcccagctccacacacaaggaccttgtgtcccagggtaactccgcctctcctgcaggcatggatccccacagaaagtggctcgatcagggcgccttcctcaaaggtgacattgtcaggaagcttgtaacaaaaggctgcattgtgcttatagaaccggcagaggttcccgtcatcggggggcgtggcacagaagaagatggaaggtgacagattgtatcggcccatcttgcagaattcatcattttctcggggagcaccaggctcgatggcaacacgatcacctggttttaggtgctttaccgatgatcccactttttcgactgttcccgaagcttcatgtcccagcaccatgggctttttcacaataaaattcccaattcgaccatactcccagtagtggacatctgagccacagattccaacagaatgcatcctcagcaagacctcatttgggcctggttcagggataggatagttctccaggcgcaagtcccccggtccgtgcaccaccagggaaaggttgttgggcttggccgccgccgccatggagctcttttggctctggagtgcggcctggaaggcgcgggacgtttggtcgctctggtggcgctacccagccgagggtccagggcactggatgg

SEQ ID NO: 167574 - DNA, 1582 bp, Homo Sapiens
  misc_feature (1480)..(1533): n is a, c, g, or t
aacctccttctggccacgccctttggactgtgctgttccgccatatttcaatgccaaatgaaccacattgacatgacctggaccatagggcttcctatcctgggctcagctgcccctgtctgaagggtcttggcttgattgcagaaggacaacctccgcacccacctaaagacatgtatatgtcttgggatcccagagattgggtccttgggcctggcttcttaagagttttgatgatgctgggaaaagtgactgcgattctgaagaaccgctgccttgcaaggtcaaggacattcagtggttgctggggtccgcagactactgccacccactcaccatcaactctgttagcccaattgccctgctgaacaactgcctgaatacaggctttaggttcccctggactccagccaaggctgttcaggtgggaccatggtgctctttaagcgtgatcggagggaagacacacagcagggccaccattccatgaatgggaggtgtacagatcactttccctttgtgctcaggtctcttctgtctccagcacctatattggtaagactagtacctgccagggagaggtgcccccaagtgaaagggtaccagtgggcacctgggaaaaagcacctggcaaggtttccatgtggcccagcccaccatggaaacagggtgggaactctgctgtgtcgccagccctcaactctactcaagtggctttttgagagccctgccatgtctgtgtcaggcctgtgctgcttcacaccctacagctgcctgggaaaggccggccacgctccctgtccacacactccctgtccacacactccctgtccacaactgcagccgggccctctgcctatgggcacccaatccaagcagctgctccacctttgtttggcatggtgatttgtgttttttctcttggtgcttatgtgtgtgggcttgggacgagtgctggtatgcacttaggaccttcttgatagctccctgcactttggaacacggagcagatgagagagggtcaggggcttgccctccaccttggacttggaagaagcccacattggagaggtgaggaccccatggtggctctagtggaagatacgttagtctccagctaaggaggatgaggcgcagccccagagggagacctcagtgataggggatcaggctacgaaagtgggggaagggagatgctttgtacatatatggggttataatttctctaaatttacggagaacgcgtattgatttgataaaagggacaggcagtagtgtacaacagtgcatgtgaaggaaagtctgttatccatggaatgacattctttgaactgtactagtgactgctgtctggtcaaatggtacccttttggtaagtaggcttcaaatgcataccaggtatcacatggcgatgcggacgtcagtgaagcgggaaaaaccctggactaaaaaagtgtgaacatgcgaccactaaatgtcnnnnnnnnnnnnnnnnnnnnnnnnnnnnnnnnnnnnnnnnnnnnnnnnnnnnnnaatgaaaaggcaagacgaggaagaaacacaacacaaacaaacagagaca

SEQ ID NO: 167575 - DNA, 323 bp, Homo Sapiens
tccttctggccacgccatggtatgcagtactcattctttttttcccaagctcctgttttccctctgccttgctcctccctagccatttgctttaaggcccggagatgaattctaggcctttgaattctcttaactctcctgtagcatgaactgatacttcttttctctaaattcctagcctatatgatatgtactgcttgttttaatactcaacatcaatacattgccttaaagtgttatccagtacatacattttgttttctttaaagtacaagcttttgaaggcaaatgccttttattattcctttgtattcttgcgtgcc

SEQ ID NO: 167576 - DNA, 207 bp, Homo Sapiens
ggctcggccctccttctggccacgcagaaataacatttccaaggagcagaagtgacttgttgatgcttttagcttcatccagcacagcaccttcaggctccagttttactaacctatacataagatttcaaacagaatgaaacaaaattacaagtttataattttctttacattttctaaaatgttcatatgtcatcaataaccagt

SEQ ID NO: 167577 - DNA, 466 bp, Homo Sapiens
tccttctggccacgcagcagttgttaacaatgaacaacataaatcccaaaagtttgggcatttaactattatttgggcatcattaataaattagttgtttgtttctaaactctcctgatgctaagcaaatccagaccatcagcaatcaatctaaagacaatgagcctacttgatatcacacaatctcattaatcttcatctgtcctaccgcatcctatcactcttacgcaaaatgaacactagaggacgcaacttcaacttctcttcactatctaagcaggaggtagaaaaaagcctcggggatttagggacatcacaagcaattatttcaccagcctagtgtgctacatcacagcaaatgagtctgacatgtaaatgtgacatagcaaggagtaaaataacgcagttcttgagctatgtgtctcactgtctttgctaaaacaccagagcgtgggccagaatggca

SEQ ID NO: 167578 - DNA, 694 bp, Homo Sapiens
  misc_feature (473)..(482): n is a, c, g, or t
gagctcgctacctccttctggccacgctggtgagatcagaggacttgcaaagagactgtttacacttcagcttgtttttcctgagtgtttttgcgttctctgcaagagtgagggagggttttcctcactctgtgccaaagaatgatctgaaaatataattaaactgatgacttcacatattaaataccaagtcctaggaatataattgtttttaaaatttctaatggacttaagtctttgatctccctgaaatctgtgaacaaatttcccacatcataactcttttaacacatctaaatgtgccctcaggaaccagtatcttcttccaatattgactctagccatagaaaatggatggttaaaccgagaagagcagactgttacctctctgagagttatttctacctggtccatcttatcaggttaataagtgttactatgtataaatatagtaacccacaatatcttgattnnnnnnnnnngctgttattcagttgggatactttaaagccttgttttccatttacatgcctccttggaaatctatcttcttccccacatttttcattcccagtccataagggaagagcagaccaatccaagaagcccttcaaggaaaacagcatacttatgtgtagaccccgtgactgacaactccagcattaagaatttgtcctatagaagacgtcacaca

SEQ ID NO: 167579 - DNA, 501 bp, Homo Sapiens
tccttctggccacgcagatgtgtaatcttacatcaccatggcagcaggagagaagctccatggaagcaggagtcccctgtggatgccgaactctagggcccaaagtctagcaagccacgtgatagactcagaagactcaagaaggacccaggatcttctctgtgccatgaaagtcatccatttcttcccattcatcagcccccgacccccttttgggtgtaacttgctgtagctgtgactcacttatctggaagtcacttaaccgataacctcaactatccagaacctagctgctatcctacaagcaacaaccaaacaaaagcacctcgtggccacaattcatgcccccaaattgtgttgtatggggcatgcgcttgacacccacaggaacacctaggccaccacttaggcttggtcaattctggttaagagcagacgccagagtcagcccagctctggcaccacctaaatgtgtggccttggccctcgggggatcctcta

SEQ ID NO: 167580 - DNA, 510 bp, Homo Sapiens
tcgattactggaccacgctgtaaaaatatgtagatttccccatagtagatattctttatgggaaaataactcaaattgatggcttcagagtgactggaattcatcaagcactgtttatgcgcagttagaaaagaaattgcttgcattcaatgatgtgattttgaatattatgtcccactttattgtctataaataccgacaataaagggagataaagtaattttaagaataaatggatgaggagtgtggggcaaaggaaaaatgctagtagaaagaggatatcaaaccaataatgaatataacaaggatgatgcacaaaatgtgtatcataagattctgtgaatttcttgaagtaggccacaacttctggctctaagcttgtaatagccaatgtagaaaggaacactgcattaaccgtgaaatttgcagtgcccattaggcaacagaaaccagttgtaaatgagaagcaccatgatttctggttctagagccagaaagaaaattcaccag

SEQ ID NO: 167581 - DNA, 515 bp, Homo Sapiens
gctcgatctagaggttcccgtccgtctggccagccgagtcttttaatgggaacgcccttgctgattattgatttctaccatcttctactccggcttttttagcagcgaagcgtttgataagcgaaccaatcgagtcagtaccgatgtagccgataaacacgctcgttatataagcgagattgctacttagtccggcgaagtcgagaaggtcacgaatgaactaggcgataatggcgcacatcgttgcgtcgattactgtttttgtaaacgcaccgccattatatctgccgcgaaggtacgccattgcaaacgcaaggattgccccgatgccttgttcctttgccgcgagaatggcggccaacaggacatgtttttctggcatcttcatgtcttacccccaataaggggatttgctctatttaattaggaataaggtcgattactgatagaacaaatccaggctactgtgtttagtaatcagatttgttcgtgaccgatatgcacgggcaaaacgg

SEQ ID NO: 167582 - DNA, 564 bp, Homo Sapiens
cccgtccttctggccacgccttgagaggccgtgttggcactgtgcaaggtgaggttatgagtaagcagggtaaggtggtcaagtgagagcagaagagatacataggaaggggcaagggattccgggaggaaggggatggtggtgggagaaagatttcttgccaccagaagacatcgtggtaatgtgggctttgttgttcttacctctcctagggctgtgacagtctagtgttaactggtgtgcttctccagacagggaattactgcgaaattgtctgcaatgcaattcccggatccacttgccccaggactcagtcctgtcagcattggagaggagtggcaagagcaatatttgttctttctgggaggctcacatgtaatcacttggggcaccagagtacagggtgctgggctggtggattccaatcacgattcctgtgatgggtaggaacttggcattattatccaaaagaaccaagccagagagcaaggatccacagatgaaggaatgtaagttgacgttaaatgaggctgcaagtgttgaaaatgtgcgtgccagaaggta

SEQ ID NO: 167583 - DNA, 598 bp, Homo Sapiens
  misc_feature (533)..(533): n is a, c, g, or t
ggcccactgaacatgaccagtcctctctgcaaacaatacatgccctgttccttttgtgattcccgagaatgctctgctgtccgaaaaggagtattatgttgatcagaatgtgtccatcaaatgtagggaaggttttctgctgcagggccacggcatcattacctgcaaccccgacgagacgtggacacagacaagcgccaaatgtgaaaaaatctcatgtggtccaccagctcacgtagaaaatgcaattgctcgaggcgtacattatcaatatggagacatgatcacctactcatgttacagtggatacatgttggagggtttcctgaggagtgtttgtttagaaaatggaacatggacatcacctcctatttgcagagctgtctgtcgatttccatgtcagaaatgggggcatctgccaacgcccaaatgcttgttcctgtccagaggggctgggatggggggcgcctctgtgaaggaaccaatctggcattctttccctgtcttgaacggaggttcgctgtgtggccccnttaccagtgtgactgcccgcctggctggacggggtctcgctgtcatacagctgtttgccagtctc

SEQ ID NO: 167584 - DNA, 766 bp, Homo Sapiens
  misc_feature (519)..(607): n is a, c, g, or t
  misc_feature (621)..(621): n is a, c, g, or t
  misc_feature (657)..(675): n is a, c, g, or t
ggtggtctataatgagtttcagaagtttgttcaaaggaaagcacattccgtttataattttgaaaaacctgttgtcatgaaggcttttgaacacttacaacaattagaattaataaagcccatggaaagaacttcaggaaattcacagagagagtatccagctgatgaaactgtcttttggataatactcaaattatgaatgctctgcagaaatatcccaactgtcctacagatgtgaggcagtgggcaacatcctcactaagctggttatgaatataaccagtgacttcaactttggcatttcattcatacttctgtagagaacggaaaactattgtccattaacatgatatgctaaacattctataaacattcttgtatttatgtgagacttgcccatctactgtcttggctgtgtcttgccttttaatcatgaacagttacatgatttataatttcactgattgagattactttgtaagtagctgttcagaagaataaaatatgactgttttaggnnnnnnnnnnnnnnnnnnnnnnnnnnnnnnnnnnnnnnnnnnnnnnnnnnnnnnnnnnnnnnnnnnnnnnnnnnnnnnnnnnnnnnnnngagccgacaaaaanaaacccgttttgttgcgggccccctccggccccttnnnnnnnnnnnnnnnnnnncctcttccttttgtggggcgcgggggccccccaaagagaaaagggaaaccgggggccaaaaggtggtttccccaaagaaaaaccggggccc

SEQ ID NO: 167585 - DNA, 447 bp, Homo Sapiens
ttctagaggatacccctgaacatcgagagtccaaaaataatcctataccactccccgatgggcttttgtccccgaacttcagcactaccccgttaggtttgaccatccatttgcctccgccacaggaataggtaatgtggtttacctgtttgcgggagggcggctgctttccaggctgctcctccagtcagcagcagtggtggagtgagaagaaacagctgataggcccgctaacctcagtttttgcccggagaagttatttctctttaaaccctttttttccctgtgacctgctttagagaagagttcataggaaaagttaaagtttgtctcaaagcctggtagatgtctcacctcattgtgaataaaccggaagttcctgtgtgtaacatccctccaaataagatactaaggatctctttcgtctcgagtggtgtcaggggatcc

SEQ ID NO: 167586 - DNA, 598 bp, Homo Sapiens
tgacacccatcggaaggagccagagctaatggccttattaggtgctgagcagggcaagccgtgggacctaacgttagacttacagaatcctggaccatcagagctcaggccctggcaattaatcaactagaatagatacctaacccttccccaatagatgatgggtgaaagctgaggaccagggaaaggagcagagacgttgctcagggctcacatcggggcctttctaactccacctctgaccctgggagaagcttggctcacaattgagacttgacttacaattgcacaattccgcagtggcgtggagcctggtttaacctcccactttaaatcccagggagatcacagtcctggtggctgctgcctgtcactggagccatcatcaaagttgagaagcatttccagagaggtccagtggagagacatatggctgtacgctttggatggaccgggctggaatcccagcgctacagaatactgactgtggttcgttatagaggaatgtagaccgctccctgctcaacccctgatgatgatcgatccgaaccacaggggcgtgtcctcgagtgtttacagggtatcctcaagaatcaga

SEQ ID NO: 167587 - DNA, 391 bp, Homo Sapiens
gaaccatcgagacacgcccctgtggttggtatcattatctcagtgtttgagcagggaaacgtctacttcccaagacgacccacagccagtactacggcagagagactggaatatcaaacccggtccatccaaagctaaagccatatgtctcttcactggacctctctggaaatgcttctcaactttgatgatggctccagtgacaggcagcagccagccaggactgtgatctccctgggatttaaagtgggaggttaaaccaggctccacgccactgcggaattgtgcaattgtaagtcaagtctcaattgtgagccaagcttctcccaggatcagaggtggagttagaaaggccccatgtgaccctgagcaagtctctctccttccctgg

SEQ ID NO: 167588 - DNA, 355 bp, Homo Sapiens
acggcagtgcaccgtgtatagggtgatggtcgttctagagtatccccagcccaaagtgaaaaggcaatactccaacctccaaagcctcacaggtgatacacaagcattggatgcagttatgatcgatctctctccaatttcatcttgggtaaataagcgcattttattaaaaattttctggttatttctcaaatgggctattttataaaagagaaaaatgtcaaaattctgtatgttaaatcccattatatcaagcaagcaacatggctcattgtttttctttcatttatattttccatctcgataaacaaaacaaaccaaaacaaaatacctgatttttcacttggactggagc

SEQ ID NO: 167589 - DNA, 243 bp, Homo Sapiens
cagaggtccagcaacgacaaatagtgggcaatagggaattccgaatacgtgacagaggagaagaagagacaggtgctgaggatgtaagaacacacagcagactgggccatggtggcagcgtcgggatcctagagaccaacactagtgggcactactgaattccgaatacgtgacagaggagaagaagctccagctggtgaggatgtatagaacacacaccagacgggcactgcttccgtcgaa

SEQ ID NO: 167590 - DNA, 578 bp, Homo Sapiens
tgttctgaccggagcatgagtatcatcttcttcctgcccctgaaagtgacccagaatttgaccttgatagaggagagcctcacctccgagttcattcatgacatagaccgagaactgaagaccgtgcaggcggtcctcactgtccccaagctgaagctgagttatgaaggcgaagtcaccaagtccctgcaggagatgaagctgcaatccttgtttgattcaccagactttagcaagatcacaggcaaacccatcaagctgactcaggtggaacaccgggctggctttgagtggaacgaggatggggcgggaaccaccccacatgcccagggctgcagcctgcccacctcaccttcccgctggactatcaccttaaccagcctttcatcttcgtactgagggacacagacacaggggcccttctcttcattggcaagattctggaccccaggggcccctaatatcccagtttaatattccaataccctagaagaaaacccgagggacagcagattccacaggacacgaaggctgcccctgtaaggtttcaatgcatacaataaaagagctttatccct

SEQ ID NO: 167591 - DNA, 610 bp, Homo Sapiens
ggcagtgcccaccggttgttatatggcgtgctagtcctgactcctagaggagtacccccctgcctgacctcccaaagctgctgggattacagagctgccgcactaacaatccagcttatgtaggcacctctggcaacaagtcatatgggaccaggcccagagtcctgacgggcaaccctcggcttggacctgcaagagatcaacaactgggtgcaggcgcagatgaaagggaagctcgccaggtccacaaaggaaattcccgatgagatcagcattctccttctcggtgtggcgcacttcaaggggcagtgggtaacaaagtttgactccagaaagacttccctcgaggatttctacttggatgaacgagaggaccgtgagggtccccatgatgtcggaccctaaggctgcattacgctatggcctgcattcagatctcagctgccaacgattgcccagctgcccttgaccggaagcatgagctactcatcttcttcctgcccctgaaagttgacccagaatttgaccctgacagaggagagcctccacctccgagttcattcatgacatagaccgagactgaacacgtgcaggcggcctcatgtcccaa

SEQ ID NO: 167592 - DNA, 611 bp, Homo Sapiens
ttcgaccggagcaggaacactgcaagctgcgaaagcccctaggcatgaaatggtatttggtaacgggggctgcctctccttcactctcaggcagtcagctcttcctagcccaagttgcttccttttcctcccttgaatttcctgttgccaggggtttgtctcgactggactctctttattcaggagctaagtaggcaatgctcggtttaggtcttcattccatctgttctacaaaaaccaggtttttccaaatccagtacttcataactctgttataatcaagtagccaaatgctcctcttctactgttcactcctagatactagtatatatcacaatcaaaacccccttctcttcaagggcaaagtgttactgcaagattgtcctgtcattttgctacacacagcctcaaggcccatcagccagtaattctgcttcccataattagtgtgtcatcacctctcatgtttctgcacagtctccaggctgaaagatgcagcatgtaataattttaagaaatgtacatccacatcttgatgaccagaaatggggatccacaaggaacatttcgaagttcttatccaaactagtctaccccccatttccctttcg

SEQ ID NO: 167593 - DNA, 801 bp, Homo Sapiens
gacgctgttcatgatggacgacccagtcccggtccatacaggagacgtggtcacgggttcagttgtgttgcagagaaacccagtgtggagaaggcacatgtctgtggctctgagctgggctgtcacttccagacaagaccccacatctcaaaaagatggagaaaaagtcttccccatctggagatgacagttgacgctttatttggaaagcagtgtgcatatcttgaggggtgatgaacacaagcaaaccaagttgcacctggcttctgcacactcctgcgaaagtcggtgaacattcactccacattgacccctccctagcctggcaggtgacgtcagggtccttcacagacaaacacgcttgggctcggcaggagctgccgtggccacccccgctgcccagtgtctgccctctagaagtaggctgtgtttccaggtgttcacccgtggtgcccaaagtgccgacccgtggctgggtcggagctcccatgttcctaagctaggtctaggtctaaactcctaggacgcacgcatatcagcccgtgtaccctgtgacagtgactgtccccacctcctgtgttagtggtgcccttactgccgtcgctcatccactcgtgtgggacgtaggattgcacagggctgtgccagtggcgtgtagggaacactgccctggctcagcgtgcgagctaaggtggcgatgtatgcgatgggactctgcatgggatagtacagttgtgtagacgtcttccaaataaattatgtgttggtgcatcgcacatgctcaataaatatttttaaatg

SEQ ID NO: 167594 - DNA, 902 bp, Homo Sapiens
gactggcccgtcttacggaagcaggagtgtaatccgaccaggaaggggtgctggatgcctgctcaaacacgtgcttctctgtctgtacccagtcaatatcctcgtcatcatgcaccagctctttcttcaccactttcatggcgtaaatttggtcattcttcttcaaccgcaccaggagaaccttggcgtagctcccgcgcccgatgactctgattaggtcaaagtcctgcagcccaagcccctgagagattttgattccatccatcccatcgataactggcttaaggtcctccgagtcgtctttaatgctgtcatgcttccgggatgaggaaatgtaagcaattccatctgtctcctcggaaggaaggtcggcgtcctcgttcttgtcgtctactggaggctcttgggaaggcatgacagaatccatatgcttcctgcaggtcagcgggacgaggccgtggcagcgcttatggaccagcagtttgcagttgatgcacctgtagccttgcctcgcgaggccccatatcctctcgctgcactgaccgcagtacgctctcctgttaaagcgcttggcttggaagaggtggccgttggcacggtacagcttcctccatcttctggctccccggcggtagatagatttgtcttctcccggacatggcaggccaggctgctcaggggtgctcgggaaaacatgaatgatgaggccttcgtccctgcactgacgggccaggcggaaagcctcttccagctccatctgggaggacaccgtgcaagggtcaccttcgctgtccacccacttgagggtgagcgggtgctgctggtgcagacgacacatgtctctcacttcctcacagagctcctcgaaggtcgtggcggcgtccacgctggtgatgaagatg

SEQ ID NO: 167595 - DNA, 527 bp, Homo Sapiens
ctgaacattgttggtcgggtcattcatattttcacatacaacatgcattgctctatattaaaaatacctgatagaagctcataataaatagcttactatattcagacatagcagagaaggcatattccattgttaactgtaaaagcaactcttaaatttaaaattactgctataccacctattaaaataactttagataaaatgccttcttttagcaacctgctggtttatttaaaaaattgttttagaattatagtgatcaatatgcatttttaaaatacaatattaattccatcatagccaatggaaaattaagacggtttccatatttctcagttaaaggtttttcttcactgcaacaatttttaaagtaaacatgtattactggagaaaagtatataaagtatagaaagatgtgccatagtgctgctaatggaacagactttagaatgagatatccacattaaaaatattctttgctggtaagcaaggctcaacataggttatgggtatctgctccggtcaga

SEQ ID NO: 167596 - DNA, 551 bp, Homo Sapiens
  misc_feature (482)..(482): n is a, c, g, or t
gtgtctgaccggagcagctccacctactgtaaccaaatgatgaggcgccggaatatgacacaggagcggcgcaaaccagtgaacacctttgtgcacgagcccctggtagatgtccagaatgtctgtttccaggaaaaggtcacctgcaagaacgggcagggcaactgctacaagagcaactccagcatgcacatcacagactgccgcctgacaaacggctccaggtaccccaactgtgcataccggaccagcccgaagaggagacacatcattgtggcctgtgaagggagcccatatgtgccagtccactttgatgcttctgtggaggactctacctaaggtcagagcagcgagataccccacctccctcaacctcatcctctccacagctgcctcttccctcttccttccctgctgtgaaagaagtaactacagttaggggctcctatttaacacacacatggttccctttcctggaggtnccattccctggcgtgatttttgggggtgaagagttgggttttgaggttggggccccatgtttaacccct

SEQ ID NO: 167597 - DNA, 461 bp, Homo Sapiens
ctggtccggtaatgcaacaattggggtaaccctgaacccgtttgtcaggcgacagtctgtgaatgtgcatgctggagttgctcttgtaagcagttgccctgcccgttcttgcaggtgaccttttcctggaaacagacattctggacatctaccaggggctcgtgcacaaaggtgttcactggtttgcaccgcccctgtgtcatattccggcgcctcatcatttggttacagtaggtggagctgctgctgggggaactgtctgagtccataatctgccgctggaatttcttggcccgggattccttgcccagggaagctggacccagcccagcaccagcagtatcaggacaagcagaaggagccggacaagagacttctccagagccatggtggcctcactttcccagaaaagcctggatctgcagcttagtgtctgagagagatggaaggccagttactgc

SEQ ID NO: 167598 - DNA, 573 bp, Homo Sapiens
  misc_feature (14)..(14): n is a, c, g, or t
  misc_feature (27)..(27): n is a, c, g, or t
  misc_feature (34)..(34): n is a, c, g, or t
  misc_feature (45)..(45): n is a, c, g, or t
  misc_feature (74)..(74): n is a, c, g, or t
  misc_feature (81)..(81): n is a, c, g, or t
  misc_feature (89)..(89): n is a, c, g, or t
  misc_feature (117)..(118): n is a, c, g, or t
  misc_feature (558)..(558): n is a, c, g, or t
tgtgaaccaaatgnatgaggacaccgnaatatgnagcacaggggncggtgcaaaccagtgtaacacctttgtgncacgagncccctggngagatgtccagaatgtctgtttccaggnnaaaggttcacctgacaagaacgggtcagggcaactgctacaaaagtcaactccagcatgcacatcacagactgcccgcctgaaaaaagggctcccgggtacccccaactgtgcataccggaccagcccgaaggagagacacatcattgtggcctgtgaagggagcccatatgtgccagtccactttgatgcttctgtggaggactctacctaaggtcagagcagcgagataccccacctccctcaacctcatcctctccacagctgcctcttccctcttccttccctgctgtgaaagaagtaactacagttagggctcctattcaacacacacatgcttccctttcctgagtcccatccctgcgtgattttgggggtgaagagtgggttgtgaggtgggccccatgttaacccctccactctttctttcaataaaacatnttttgcaaacacctg

SEQ ID NO: 167599 - DNA, 367 bp, Homo Sapiens
  misc_feature (216)..(216): n is a, c, g, or t
tgatgtgccaagctggaattgcctcttggtaacaattgccctgcccgttcttgcaggtgaccttttccctggaaacagacattctggacatctacccagggctcgtgcacaaaggtgttcactggtttgcaccgcccctgtgtcatattccggcgcctcatcatttggttacagtaggtggagctgctgctgggggaactgtctgagtccataatntgccgctggaatttcttggcccgggattccttgcccagggaaagctggacccagcccagcaccagcagtatcaggacaagcagaaggagccggacaagagacttctccagagccatggtggcctcactttcccagaaaagcctggatctgc

SEQ ID NO: 167600 - DNA, 248 bp, Homo Sapiens
tcgaccggaagcatcgaaaatgtggctcacaagtatgcagactatttgaaaacagtaagtaaaaaagagaatgacaatagcctttcatttaaccactggcaatggtgagtgacaagatatcacctttagactcggaaagtctagttttctgctcttcaaaatattgataacagatttttcagaaacagattaaacaacatccttttaaccttaagaaccaacctctgtcaacttaccagtatttgttc

SEQ ID NO: 167601 - DNA, 334 bp, Homo Sapiens
  misc_feature (18)..(18): n is a, c, g, or t
cccccgtgctacggaagncaaaagaaaatattaactgtaaactcctggtggaggagatacagttttcattacagaattctttcaatcctttttgtctgaaaaatttcataataaaatgttgagaaaagcgataagcattcagttttgagtttgggtcgactggcgggatactgggaatacagaaggtgtagctaggtcatgtcaattagtgacataagggtttgaggtacccaaggcattcaagtagaaatatttagcaggcagctggaattgcacaagtagagttcaattatagttattttactctcctgctcggtcgaacggggatcctcta

SEQ ID NO: 167602 - DNA, 356 bp, Homo Sapiens
aaggatccccgttcgacggaagcaatcacagatgtcttgccattgcataggaagaagactgcatggcagatcagcgagaaagaaatgaggtcagaagttagaccctacatgggaaagtcagaaatgatggaatctcaaggaaagcagcaaggagtgggacaagaatttcctggagctgaatagtttcaagtggcttttatgtattctaggcttctacaagcagggagcatatatatgctgggaattatcagtatcactgagagaaatacattagttatatacagatgcatacacatcttactatattgcacaagtacaagaagtctaaatggtattaaataattaaataattattc

SEQ ID NO: 167603 - DNA, 651 bp, Homo Sapiens
gatccagaggattccgattgcattgtcttcctctcttccactcattgatcttagcctgccctccagcatgaaaagaaaacctcttcaaatgactggcttgcttggaaagatctgagagcagccacatacaggaacaactctcctcgtgacaagcagcaaaacaagtggtgagtgggaaaagagcaggccctgaacagcaccagtcaatatgcttggcctctctggtctcttttcactttgtcggtttgggagcctgggcctctgccaggatgcttatctgtaggagttccaagagaatcaggagatggggatgcttttgggaaatgatgcctggggctccctagaagagaagctggaaagctacccacagaaaggccaaatagaatttctgaaagccccaggttagtggaagcctaaagagcatgtcaggccaggttgccatactgcttccaaaagctgcaaaccatcatcacagtggcagatttgtcagctaaaagagcaaatgggggaaacactttgctaagaatccaggcttgctctaaaagggaaatatgcccaggaccataagacaaattttctgtaagtttaacatttgtttagcttgccattttttcttaatgggcaaaacatacatatattcctctttactgt

SEQ ID NO: 167604 - DNA, 634 bp, Homo Sapiens
  misc_feature (284)..(387): n is a, c, g, or t
aaccttaattgctagggacccatctactgatctctccactttaagcaaaattatcagaaccctgctctcggatatcacagaatcttgcttttctctctataaacacagcccatttatgaggtctgctctatgttctagacacgtgggtacacgactgtcctttcctaacaccactcaaaggtaaggttctagagcactactacctaatagatagacctttcttcaatggggccaatgttatataaatatgtgcagcctgttacgaccgcaaccacacgttactnnnnnnnnnnnnnnnnnnnnnnnnnnnnnnnnnnnnnnnnnnnnnnnnnnnnnnnnnnnnnnnnnnnnnnnnnnnnnnnnnnnnnnnnnnnnnnnnnnnnnnnncttctagaaacagtgtggcatgagagaaaagtctctggagtctgacagacctgtgtcagaacctagctctggtcatttaccagctatgcaacctactagctatgttactaaacttctctatgtctcactttataacatctacaaaatgagatgacaccatttaacttacagtatttcaggtctgagtgtttatatccatatgtatacaggtatgtctacctggagactggtctcaaacttgcaaagg

SEQ ID NO: 167605 - DNA, 431 bp, Homo Sapiens
  misc_feature (19)..(19): n is a, c, g, or t
aatgaacgaacatgcagcnttcacttaattatacatacgttttatttaaagaaaagcaaaacacacaaccacagcatttcaattaaggagcttagaaaaatttcaagtgcgttcttggttctccagttaccattccaataaaaaactttttaaaccaaagttaaaattaagtgaaaaagaaagaagtcccagtaagcagaccgaacaatacaaattcaaaatactactctatcttcttgtgttcgttcccaccaaagtgtgctgtttaaagttccacaactattatcttcctcctcttgttctttagtgaggttctacaaaaacctggttccaatgttgcttgaggaaaaggctatattcttcaaggggcaaaggcatgtttaggcttcttcccggctttaaaaaagggttgtggaaggggggctggaaca

SEQ ID NO: 167606 - DNA, 216 bp, Homo Sapiens
aaatggaacgaacactaatctggtggaaaggcttcctttccctcgttttctcgttctactaattccctgcttccaaattctctttctcttgtcccttgaagaaccaacaggatgtgcgatatttcaagaacgtaatgagcaactcctctttcacaaagggaataagcaatctggcatagctggagtctagtattacgggaaatacagttgttcgta

SEQ ID NO: 167607 - DNA, 1090 bp, Homo Sapiens
cgatcatacaaagaaaaggtcagtaggtgaatcaagtaacaatccaaattaacttagcctaagtttccaaagctgtagtttcaagtgctaatgggatctaactttcctgtggtggtgcatactgactagcattaaaattttggcacctcatctaatataaaaaaggcaacaaatacaattcctaattcaccagctgcaggtattgaatcatttctacgaacacacagaatactagcttacactaaaacctatcttgaggaaacattaaaccagtggctctattattctgcaagttagtttggcttctgaagaaaaaagtttatgatcaaagtgttttgtgtttctgtgtatgggaatgatgagacccatacttcaacattattactttggggaataaataccagctacctgccataaacgcatgacatgtgtgtagtctatgcaaacgtgtaaacatatgaagctattctctactctatgcccatttcctccactggcaaatatggagcagtgatttcacagtaggctctagcaggtagtgaaataaaaatttgagactctgtggggtcacaaaaaaatgaaactctttctatagtctgcaaatctgtaattacccatccccctgctccaactcctaagaggctaaatgttattaccataatgttagagatgagtattttccttcttacactgcatcacatatattactctgtaggactgtttcataaaattggcttgacctttgtacaattagtacaatttagtgtcttttagagtacaatttagtgtcttttaaaagcttcctaaatatttaaaacattttcaagggaagcttacaaggactatgtcccatctgtattctacattataatgttatctttaattttttaagacttaaaacaagaccaaggtaaacaaaaaatctgtattttcctcaagtctcttggccacttactaacaatacttttacagaaaacacggtgcagctggtggtctactttatcaagtttcattttagaaaacatcatagaaattaaggttagcaacccaactccaggataccaagtgaaaacagcaagtctgctgttcc

SEQ ID NO: 167608 - DNA, 215 bp, Homo Sapiens
gaacatattgtaatctgacgagacagagtagtaaggcaaaggagaatgaagattcaagaaagaaaagggataactgataaaccaagatcctgatgtggggtgggaggatagaaattaaaaacacaaatagttagctatgttggtttaaaatttccctaaataacctggcagtacttctacttagctatcattagcattaactaaaaatacaaggc

SEQ ID NO: 167609 - DNA, 344 bp, Homo Sapiens
aaatggaacgaacagtcagccagtgaaggcaccagcgtacgaacaatcgggaggaaaattaggcatccaaccttatgccagcattggagctgctctggtactggggcatttttagagggtctgaggtggaaagacaacaaggaagtctgcaggtgaaaaagcccagcaaggaggaaggggaactgggaggtgacagcccacctgataccgaggtttgctgaggagatggcaaaaccagggatttgtccagagaattttaccacacgaagccctctgcgctatatactcacgcggcaaaaagtaccaatgtctcaatgtagggagaaagaaaagttgatgttcgt

SEQ ID NO: 167610 - DNA, 374 bp, Homo Sapiens
gaacgaacagagaaggaaacaatgccttcctgtggcccaaggactggttcgcttggtttatagcagtgacagccgttcatgcacagctgcttcccaacccagtcctctgagagagcagcagagaaagcttatgttccaatccatcatttaccctttttcttctttcttccaagcttttttcatacacacactcacatgctcactcatactcacccagcccagaagggagctgagacagaaagtccaggctttcgtgtctgataaccacactaattcatctgcttccaggttacagctccgtctagcagcaaggttgaaaaggttaaaaaggcaagagctggaaagcatttaccgccctagtgttcgttccattt

SEQ ID NO: 167611 - DNA, 326 bp, Homo Sapiens
  misc_feature (38)..(38): n is a, c, g, or t
  misc_feature (155)..(188): n is a, c, g, or t
ggaaatggaacgaacatttccaacaaaattcacaaaantttcctgaacaaaggtgcaagtagattatgttatgttagaggatgaagacaggcacaggtatgcagtccagagtccagaggtgtatacaagtgtatacaagtggccattacacattnnnnnnnnnnnnnnnnnnnnnnnnnnnnnnnnnnataaatgagttttcagatgtcaaaaatttcattgaaaatttagatgcataatttttattgaaatagaatttggccatgttgatcttaaatttccctgtggacagtacagaaatctcactaaggctgttcgttccattt

SEQ ID NO: 167612 - DNA, 348 bp, Homo Sapiens
  misc_feature (123)..(135): n is a, c, g, or t
acgaacagaaaaaatgatataaactcaaataactatacaaaggcatctaatacatacggacatgtctacacatggactggaagagaatgaaacaagataaaaataattgtcaataaacaagannnnnnnnnnnnnctatatatagtagttgtttaactgtgcaaaagaaattagtttttaaaaggcccaaactacagaattccataaagtatggaaagtatcctgaaagcttcgaacaggggccaaggaactctttagaacttcaggttgatactatatttttataaagaatgaaaagtggccagacagacactcatttaaaaatacagtaaggtgttcgttccattt

SEQ ID NO: 167613 - DNA, 232 bp, Homo Sapiens
caagttaaagcaaaataaaatccccgtgctagggtgcccatttcagcttttgacattgcccctgtacttttatagatgctctttttgtccgtgatggtagtaactaatgactagtgaattttcatgtaaatgaagcaaaataaatatttcagattttattaatctctcataacccagccaaatctgatgacttcattttaattgcttcccagaaagcacttcccctcctacc

SEQ ID NO: 167614 - DNA, 115 bp, Homo Sapiens
tactgaaggacggaaaaagggaaagcaaagaaagagggaagagggagaaaggaaaatataaataataatttacaaacttacaagaaagtaagaccttttgttcgttccatttccc

SEQ ID NO: 167615 - DNA, 342 bp, Homo Sapiens
gaacagttgatgaaggatggatagactaaaacaatgctgcattaatgaggctacgatagtgcgtatttgtataaaaagcattaatttgcatttgttggcattttgaagctctgttgttggatgcatacacatttagtatctatatgtcgttatgatttgtaaatcatgtaatgcgtctctttacataatgatttttaaattattttgtaatgtttctcattacgttatgtaatgcccttattaactttccttggaaatcttttttacccgttatccatacaaccactcttgctttcttaatactgatgtagcatgagtataccttttttctttgttcgttaa

SEQ ID NO: 167616 - DNA, 834 bp, Homo Sapiens
  misc_feature (218)..(233): n is a, c, g, or t
taaaaaattaataagaccaggaagtatgttatggatagaatctgggtgtggtctcattgtattactctcacattctggtgctctacttcagaggcagcacaactaataattatggtatttaatgggtgcccttcttagtgcagacaggtaagaaaaacgggaggaataactcatataccatgctatgttatctggctctcattatccctattgaagcnnnnnnnnnnnnnnnnatgcatcatctatttcaggagaaaatactataataacccattcgagagatgggtgaatgttctcattaatgtataacctggacatagaagctagatttaacactgcatcaagaaaataagtgatttggtaaggcaggttttagcaatggctaatgaggcacgacaactgtaattaaaattaccattacttttacccacccacagaacaaactgtgacaaatctcaaaatgttaaaagtagcaaattaaaaatatcaatactctgtatggcatacctaaatgtcagactgcctgcatttctatgcctgaacataggcaattccctttgaagagagtagtacatcagcaaaaattcacagcccatttttcttcttttgaatatggtgtaccttctgtataaattacttataaaaagccaagctaaaaataaacaaccaatcaaaatgttcctaatatgcgagaacagatttacattttttggaagtgcattaaaaagccaagatgaagtactacactcaaacttgtgaacaacttttttaaaattatgggagatactagaacaaaatttatagtcgctgaggtgtcacaagtttttaacgccg

SEQ ID NO: 167617 - DNA, 198 bp, Homo Sapiens
aaatggaacgaacaagacagccgcttgactacgaaggaagtgcctcaggttaagggagacagaaggatgtcttcaaaaacagacatagcagaatagacttgggaaaggcaaccatggaagagggaaggcccatggaacgggactccaaacaagcaatcagggcccagagacccagattctgtatgaaggttcgttcca

SEQ ID NO: 167618 - DNA, 424 bp, Homo Sapiens
  misc_feature (280)..(289): n is a, c, g, or t
aacggactaaacgccaaaatgatagaaaacttgaacaacaccaaacactttgagaggatcaataaaagccaaagtctatctagccaaactagctcttgaaaacaaaaactacaaattaccaagtttgaaaatgagttaatgtgacattctttaagattctacagatacttaaaaatacatggtaataatataaaatttatgtgaataaacatgacaacttagacaaaattgacaaattcattgaaatgtgaaaattaccatctgatccttgacaaaactnnnnnnnnnngcaatggggaaataattccctatttaataaatggtgttgggaaagctagctggccatatgcagataaactgaaactcgaccccttccttacaccttacacaataaattaactctacatgattaaagacgttgatt

SEQ ID NO: 167619 - DNA, 263 bp, Homo Sapiens
ggtccgaaatgaacgaacaggaggaaatagcttaaggtcttcgaagagagagggcagtagattacctgatgtccaaataggatttaatagcatacgatcatggaagagagagggctgtagatgacatgatgtccaaataggaggtaatatcataaggtgctggaagagagagggcattacattacctgatgtccaagtaggaggtaatagcataaggtcctggaagagagagggttgtagattacatgatgttcgttccattt

SEQ ID NO: 167620 - DNA, 253 bp, Homo Sapiens
cgaacagaaaacaaataattaaatggcagaatcgcttaacacatcaagaattactttaaaggtacgtggtctaagaacatcaatttacctttgatgtaaaggacagagatggcagtttaaataaaataaaacataacccaactacatgccacgtacaagaacctcacttcaaacacagcataggtaagttgacagttaaaataaaataacgaacaaaagatgcaaacatagacaacataaacgacaaaaaaca

SEQ ID NO: 167621 - DNA, 225 bp, Homo Sapiens
aaatggaacgaacatgtcacataatactttaatctatccttccatttaacttttcttgcctcaaattttcttgcagatgtcaagaacaaggtaccatccataaaatgggatgctaactgtttaaggctagggcaaagtcaccttttgccaatgatacaatctatctagtaaagagaaataaagatagagaaaaaagtgtgttcgttccatttcggaccgagctga

SEQ ID NO: 167622 - DNA, 196 bp, Homo Sapiens
aacaaataaaaagtcagcaaaaaaatagaagacatatagaagaaccaaatggaaatgtcagaattgatgtgtacactaactgaagttaaaaacttattggatgggctcaacagcagaatgaagcaaacaggaaaagaatcagtgaatctgaggatagaaaaacataaagtgcccaatctgaaaaacaaagtagacc

SEQ ID NO: 167623 - DNA, 210 bp, Homo Sapiens
ccgaaagttacgaacagacagaaaatagagaaaatcaatgacaacaaaagttggttctttgaaaagataacagaattgaccagccttaagctagattctagactaagaaaaaaagaagaaactcaaattactaaaattataagtgaaagtggcaacattgctactaattctacagaaataaaaaagattataagagtgttcgtccatttg

SEQ ID NO: 167624 - DNA, 1463 bp, Homo Sapiens
  misc_feature (175)..(200): n is a, c, g, or t
ccccttggcagcagctccccttggccagcttggtgggtagtcttgggtgtgatacccatagatgtgtagggaagtggatgagcaaaatcagtaactcttggtgagagacggggtgtggggccccaagggggaccccatgaactggctgctccacagtaactatcacaggctcttnnnnnnnnnnnnnnnnnnnnnnnnnnggaaggaagaaagaagtctcagaatgtcctcaggtgtcccatccccagtccccagtggacggcacagcccaggagctctagcccaggctggtgatgttggcacggccaccggggggcgccacgatacgctgggtggtgcggcggggaatgttgtcatcaatctgagcaccagacaaactgaatccagactggtgcaggttccggacaggtggggactgctgcttggcaggagacgtcttggccgaggaggctggagtgactgtcttgggcgtcacagacacttcacacacgggtccgtcatacaggccacgaggaacccctctcagctcagccagcctgctccttgccttgatacgcttgtaaacaaaatcagggaagggcttccggggaatgtagcgtccagagccttcggtgacgtgcagggtgccgtcctccaggacaatcttcccctggctgaagaccaaccagtgggaacccgcggcactccaaggccttcaaagatgtggtactcgagagagctgttgttgtgtccttggcagagatggtgttaacgctgtcggggtcccagatgaccaggtcggcatcggatcccacagcaatgcggcctttccgggggtaaaggttgaagactttggctgcattggtgctggtcacagccacaaactggttctcgatccatcgttcccagtgaccacagccttgtcccagatgacggacatccgctcctcagtgccattggtgccctccggaatcagggtgaagtggtcctttcctacagccttctgggcagtgttacacgtgcaatgggcactgcccgtgacctggaggtctccacaggacagcaaggagttgagaaagtctggagtggttggatcagggctcaaggttggggaggtgacaaggcagcagccttggcccagttcttgctccagtaatgggagccgtccgttcccaagctggcagtgatgggctcgccatacaccacagttcccttcttccgtgcctgggcgatgacctcagcagagcttttgctcatcaccttggtgatatacagcgggcagttggtctggttggcgatggtgatggcacgattcacggcttcggcctcgacctcctcaggtcggctcagcacatgtccctcggggcccgtgatgcccagatccaggatcctctgctgctcctctgcaatgatgtcgccattttctgcgtggacttgggctatggcgccaatatcccggatcacactcagtacttcattatact

SEQ ID NO: 167625 - DNA, 879 bp, Homo Sapiens
gattaggcagctcatctgtgtcctgtgtccagtcattggggctcaccaggccaccaactctccaccctagacgaagcctttgaagaattaagaagcaaagactcaggtggactgaaggccgctatgatcgaattggtggaaaggttgaagttcaagagctcagaccctaaagtaactcgggaccaaatgaagatgtttatacagcaggaatttaagaaagttcagaaagtgattgctgatgaggagcagaaggcccttcatctagtggacatccaagaggcaatggccacagctcatgtgactgagatactggcagacatccaatcccacatggataggttgatgactcagatggcccaagccaaggaacaacttgatacctctaatgaatcagctgagccaaaggcagagggcgatgaggaaggacccagtggtgccagtgaagaagaggacacatgaaggcttgctgagcccccatgtggaaaatcatcccctccccttgtgtgtatgtgacagcgtgtatgtaacggcttctgatttctgtgaaagctgctcagcaacaaacgtacttccaccagatgtgtccccagagtccacagcaggcacatatctctccaagggatgaccagttttatgcttactgtgtgcttctcatcccctggttgtggtaggtcaaggaaaagagcccctttgatccacccaggagcaacttaagaaaggtccttcaggtaatccctcaattggctgctttgaactttactcaggaaagccgagcccccataaatattgtattaccaaacagtatccgcttggtaaggaaggatccggaataatcgtgaagggaagtccaagggttttccctgcctattaaaaaaagca

SEQ ID NO: 167626 - DNA, 645 bp, Homo Sapiens
  misc_feature (541)..(541): n is a, c, g, or t
cgtgagccaccgcacccagccgacaaacctttattaccaggtgatatcgaatattattagagctgactgtggtagtgacagtttttcatataaatgtgaaattgcatcctcccaaaggaatcctgagtatgtatgcactttaaaagaacccagaatcatctaaatattgtcacatggctctcgcaagtgatgataatagtgatgcttataataatgaggattagctgcactcatcagcctgtagaaagtaaaaagtttccttttcgaaatttcctttcttgttaaagaataaatcataagtgttagaaataatagtttcttttaaagactaacttccttcaagcctcctctgctctgtgctaatgactcttcattaagccctatcctatgtagctgttagatataagggaataagtatattctatgtccttgtactttaaccaagatatttgtgctggacatgctcacaggcacgttccagcttgcagcctatgccccttccttatttgggaaatattattacttttctaaagtctttttngcaagcaactgcttcttttccttgttctctattgccttccctatatagggaaggtttaagttattagccagtcgggttttaatttaaattgtgagggtccagct

SEQ ID NO: 167627 - DNA, 211 bp, Homo Sapiens
ggctgagactcgtcggcaggcaagcgaggcacagcagcgggcccaggcagccctggacaaggctaatgcttccaggggacaggtggaacaggccaaccaggaacttcaagaacttatccagagtgtgaaggacttcctcaaccaggagggggctgatcctgatagcattgaaatggtggccacacgggtgctagagctctgccagggggga

SEQ ID NO: 167628 - DNA, 194 bp, Homo Sapiens
ggcccccccagccagctttacacaggcagaagaagttgcccatgaggtcctggcaggcttgggtccccttcctatcgcaggggttgggcgtgcactggtcaggcaggttttgcacgcaggtggcgaagcctgagtttttggtgtacggagacccatacttgttgatgcagtctaagtatcttggtaaaatgggt

SEQ ID NO: 167629 - DNA, 235 bp, Homo Sapiens
cagaaaaatatgttgttccttgcatcctcagtttataataaagttgtaaagtttaaaataaagtactaaacaaattcccaacacataaggcttaggatttacaaaacaaataaagtggagaaaatgatttaccaaaataacttttagaacgtttcaaaaacatgagggctcctaatatctttattataaaatgatttccaatagactttttagaaactcctaaagatattattgc

SEQ ID NO: 167630 - DNA, 489 bp, Homo Sapiens
tccaccaaagacagagagcaagaaagagcacagcaccaccaaggatcaagcggcagtgggctcagagaaaagataaggctaccaacgttaagtgtcccagaatctgatcacagcgatttaagtttttcgagagcaagaaaagagagggaacattgtccaaggctcgagaggagaaaaggtcccttggtcctcagctaggcctgttccttcccccttgcaggatctcctctgcaaggatggttacagagttcatctgaggaggtggaaccttgctcaagcctaccaaggagaatgctgggcctgaaaaagtcaaatggtgtctccatagtaaccagtagggcctgaggtgtcaaagcaatgctgcggtataatagaaaaccccaggcctcttaactaactattagagtgggaggagatggcattgaataataccttacttgcaaacctttcaaaggtggatgggtactcagattcatgagctctgccaag

SEQ ID NO: 167631 - DNA, 389 bp, Homo Sapiens
ttaactactttatcgaccttcaaatggcctaagcaattaagttccaatttctttaacctcacactcaaagcctttacaatttagttttcaactgccttcctatacttccccatcttccaccctttaagtcctgtatctactcacagttttccacacctaccctgaatttccccactttagtttcattaatagttttgtcactgcaatgacagaactgttaaagcccagcttaaatttatttaaaagtttacaagttgttctgggaatcatatagtatgatcctcagttagtgataaaacaacataaaatatatgaaaaatgttattataacataatggaatttcctctactataaatatttattttgcaccatccctgacctcactacc

SEQ ID NO: 167632 - DNA, 647 bp, Homo Sapiens
aggcaatgagggtgctacaataataaaggtgagtgttggcagtggcttgaccagagcagaagtgggaatgaaacagttggattctgtttgttttcaaagaagagctcatagaacttactgatggattgttatgtaggatgtgaaagaaaaccacagaaatgactccaactaaaacagtaaaatgccattcactaatttcaagatgatgagagaagctgttttgcagagataatgaaagaaattctgtttgaagcctattaaagtttgaagtgcatattaattggactttcaagttgagatgtcaagtaagtagcagggtctctgagtatggaatacaaggctgtgggctagtgacttaacgtctgcaacatcaacatataggcagcatctccatagcaacaaacatcagttcaaaataatcagacagattttcatcctccacgtccatcttctcagatccatcaggagccacagaactgcaaatctacacatgtgcacagtaactacttctcagcaaaaatctggaacaaagcaggataacaagatgtctgctcttttatgacaaaagtgggcgccctgataagggctttggttgaaatgaaataagagtgcgcaagcaggagcctagcaacggagcgaaagagtgt

SEQ ID NO: 167633 - DNA, 1327 bp, Homo Sapiens
  misc_feature (1112)..(1134): n is a, c, g, or t
tggccaattatatgtcataaagcctgaatttagattctaggaattaaatatggaatctgttataatgtcccattttatactacagtattaatctcaatcctgatcattacataattatagcatttaccaatctgtgattttataaattaaccaatttgtttaaattaagaagaaattcatagacaccatttttttcctgttaccaacatatggaaaagccatcaaaaaaacttaacagaaccaaatcaaaaaagaagtatattttatgctaaagttactttctgtccaggtcgaaacattgttccacttttgattttttctcctctttggattttgaaagctttcatatagctcagcaaaattcttccagtcatcttcactaatggatggtcttgtgtgaccaagtgcagtcattaaatgtgactgactaatagccagtctggttttgattggtcctggttggttcatggattcgtcctctccactttggctccggtatctgcctttgataatactgatatctgccctcagttgatctctttgttcttgtgtaagttcttggcaaccctcttgtgaagctgtccttaacactggaggctgtgaaaacaactggtctttcccaggaactccaggcaaatcctgagtcatggagcttggtgcagagagacattgtgagctcaaatcagaagaggttccatttccaagttctgattcataagagcttccaaagtagagccggtacatattgaattttgattcatctggaaggatctcggacatctctaaagaaacaagggactgatctaagccacattctccatctccagctgaatcgtcagagccactgctatggttaagaaagaccattgaagacagacttaggtcactatcagagctggaacttccatcctggagtccactcgagagcagcattccatgtaaggcctccaattgggcattgtaaagtaaagctttcagatcagctccagtaaaggagtcagttactgatgctacatgctgaaggtcaacatcatctgccagaggtagagagtcactgaggacatttaaaatttcaagacgtgacacctgaaaggagaaaaatttatttaacnnnnnnnnnnnnnnnnnnnnnnnattatcttaaattgtgtatcttatgattttcttcataaattaaccttatatatctaaaaagctttataagtaagttgagaaatgtaccaacagcctactatttatcttccttggaattttttccccaacagaaataatatatataggaaaatgaatgaaaatcaaacactcttaaggctgggcatggtggctc

SEQ ID NO: 167634 - DNA, 960 bp, Homo Sapiens
gacccacgcgtccgcccacgcgtccggtgagggagtgggaagggggatggagagctcgaggggacagtgtgtttgagctggagtgctgcgggcagcctttctcatggaatgacatgaatcaacttttttctttgtttcatcttttaagtgtacgtgcttgcctgttcgtgcatgtgttcataaactcaacactttaatcatggtttcatgagcattaaaaagcaaagggaaaaaggatgtgtaatggtgtacacagtctgtatattttaataatgcagagctatagtctcaattgttactttataaggtggttttattaacaaacccaagatcctggattttcctgtctttgctgtattttgaaaaacacgtgttgactccattgttttacatgtagcaaagtctgccatctgtgtctgctgtattataaacagataagcagcctacaagataactgtatttataaaccactcttcaacagctggctccagtgctggttttagaacaagaatgaagtcatttcggagtctttcatgtctaaaagatttaagttaaaaacaaagtgttacttggaaggttagcttctatcattctggatagattacagatataataaccatgttgactatgggggagagacgctgcattccagaaacgtcttaacacttgagtgaatcttcaaaggaccctgacattaaatgctgaggctttaatacacacatattttatcccaagtttataatggtggtctgaacaaggcacctgtaaataaatcagcatttatgaccagaagaaaaataatctggtcttggactttttatttttatatggaaaagttttaaggacttgggccaactaagtctacccacacgaaaaaagaaatttgccttgtccctttgtgtacaaccatgcaaaactgtttgttggctcacagaagttctgacaataaaagatactagc

SEQ ID NO: 167635 - DNA, 128 bp, Homo Sapiens
acagactgaaaatagatttcatggatctagcaagcactgcaggactgtcactcaacgaagaggaaatatggttactacatacactgactgttcaggacagtagttcttattctattctcaccaatata

SEQ ID NO: 167636 - DNA, 222 bp, Homo Sapiens
tgccaaagcgtagtacccaacgaggtggtggtgcagagactcttccaggtcaaagggcggcgtgtggtcctgtgccaccgaggtacctgtgtcctgggagagcttcaacaatggcgactgcttcatcctggacctgggcaacgtgagtcctgctttcctctttcccaggagccactgaggtgctcctggtctgaccagggacttgggtactacgctttggca

SEQ ID NO: 167637 - DNA, 2386 bp, Homo Sapiens
  misc_feature (2094)..(2112): n is a, c, g, or t
agtgcagccaggatgagagcggggcggccgccatctttaccgtgcagctggatgactacctgaacggccgggccgtgcagcaccgtgaggtccagggcttcgagtcggccaccttcctaggctacttcaagtctggcctgaagtacaagaaaggaggtgtggcatcaggattcaagcacgtggtacccaacgaggtggtggtgcagagactcttccaggtcaaagggcggcgtgtggtccgtgccaccgaggtacctgtgtcctgggagagcttcaacaatggcgactgcttcatcctggacctgggcaacaacatccaccagtggtgtggttccaacagcaatcggtatgaaagactgaaggccacacaggtgtccaagggcatccgggacaacgagcggagtggccgggcccgagtgcacgtgtctgaggagggcactgagcccgaggcgatgctccaggtgctgggccccaagccggctctgcctgcaggtaccgaggacaccgccaaggaggatgcggccaaccgcaagctggccaagctctacaaggtctccaatggtgcagggaccatgtccgtctccctcgtggctgatgagaaccccttcgcccagggggccctgaagtcagaggactgcttcatcctggaccacggcaaagatgggaaaatctttgtctggaaaggcaagcaggcaaacacggaggagaggaaggctgccctcaaaacagcctctgacttcatcaccaagatggactaccccaagcagactcaggtctcggtccttcctgagggcggtgagaccccactgttcaagcagttcttcaagaactggcgggacccagaccagacagatggcctgggcttgtcctacctttccagccatatcgccaacgtggagcgggtgcccttcgacgccgccaccctgcacacctccactgccatggccgcccagcacggcatggatgacgatggcacaggccagaaacagatctggagaatcgaaggttccaacaaggtgcccgtggaccctgccacatatggacagttctatggaggcgacagctacatcattctgtacaactaccgccatggtggccgccaggggcacgataatctataactggcagggtgcccagtctacccaggatgaggtcgctgcatctgccatcctgactgctcagctggatgaggagctgggaggtacccctgtccagagccgtgtggtccaaggcaaggagcccgcccacctcatgagcctgtttggtgggaagcccatgatcatctacaagggcggcacctcccgcgagggcgggcagacagcccctgccagcacccgcctcttccaggtccgcgccaacagcgctggagccacccgggctgttgaggtattgcctaaggctggtgcactgaactccaacgatgcctttgttctgaaaaccccctcagccgcctacctgtgggtgggtacaggagccagcgaggcagagaagacgggggcccaggagctgctcagggtgctgcgggcccaacctgtgcaggtggcagaaggcagcgagccagatggcttctgggaggccctgggcgggaaggctgcctaccgcacatccccacggctgaaggacaagaagatggatgcccatcctcctcgcctctttgcctgctccaacaagattggacgttttgtgatcgaagaggttcctggtgagctcatgcaggaagacctggcaacggatgacgtcatgcttctggacacctgggaccaggtctttgtctgggttggaaaggattctcaagaagaagaaaagacagaagccttgacttctgctaagcggtacatcgagacggacccagccaatcgggatcggcggacgcccatcaccgtggtgaagcaaggctttgagcctccctcctttgtgggctggttcccttggctgggatgatgattactggtctgtggaccccttggacagggccatggctgagctggctgcctgaggaggggcagggcccatccatgtcaccggtcagtgcctttgggaactgtccttccctcaaagaggccttagagcgagcagagccagctctgctatgannnnnnnnnnnnnnnnnnnccgcactctacctcgtcacatacaccagcatccaacaagtacccccgcgcacaactccacagctcctggacacaatcgcaccaaacggccacctgtctctggcgcacccttgtcacttcctcaatcacacgacatctcgcacgtgtgcatcagctgcatcaaacttcgtgtctctcccttataatgattcccttctaggtgcccacttatcagcgttccacgctctctctaccactttgcccttttatgtgtgtcttttgtcgtctgctctccc

SEQ ID NO: 167638 - DNA, 653 bp, Homo Sapiens
  misc_feature (533)..(546): n is a, c, g, or t
cggaaaggctcctaccgcacatccccacggctgaaggacaagaagatgatgcccatcctcctcgcctctttgcctgctccaacaagattggacgttttgtgatcgaagaggttcctggtgagctcatgcaggaagacctggcaacggatgacgtcatgcttctggacacctgggaccaggtctttgtctgggttggaaaggattctcaagaagaagaaaagacagaagccttgacttctgctaagcggtacatcgagacggacccagccaatcgggatccgcggacgcccatcaccgtggtgaagcaaggctttgagcctccctcctttgtgggctggttccttggctgggatgatgattactggtctgtggaccccttggacagggccatggctgagctggctgcctgaggaggggcagggcccacccatgtcaccggtcagtgccttttggaactgtccttccctcaaagaggccttagagcgagcagagcagctctgctatgagtgtgtgtgtgtgcgtgtgttgtttcnnnnnnnnnnnnnnacagtatccaaaaatagccctgcaaaaattcagagtccttgcaaaattgtctaaaatgtcagtgtttgggaaattaaatccaataaaaacattttgaagtgtggaag

SEQ ID NO: 167639 - DNA, 416 bp, Homo Sapiens
  misc_feature (292)..(292): n is a, c, g, or t
  misc_feature (384)..(384): n is a, c, g, or t
  misc_feature (394)..(394): n is a, c, g, or t
agccacccgggctgttgaggtattgcctaaggctggtgcactgaactccaacgatgcctttgttctgaaaaccccctcagccgcctacctgtgggtgggtacaggagccagcgaggcagagaagacgggggcccaggagctgctcagggtgctgcgggcccaacctgtgcaggttggcagaaggcagcgagccagattgcttctgggaggccctgggcgggaaggctgcctaccgcacatccccacggctgaaggacaagaagatggatgcccatcctccttcgcctctttngcctgctccaacaagattggacgttttgttgatcgaagaggtttcctgggtgaagctcatgcagggaagacctgggcaacggatgaacgttnatggtttttnggacaactggggaccaggtttt

SEQ ID NO: 167640 - DNA, 232 bp, Homo Sapiens
cctttgatattcctctatgtggtcgatacttgcatggaagatgaagatttacaagccctgaaagaatccatgcagaggtcattatgtcttttaccacctacagctttgggtggacttattacttttgggagaatggttcaggttcatgaacttggatgtgaaggcatttcaaaaagctatgtcttcagaggaacaaaagatttgtctgccaaacaactgcaggaaacgctgg

SEQ ID NO: 167641 - DNA, 359 bp, Homo Sapiens
tatattggtgagccagttccttattacaaatctctctatataaacacatacatcctattggttttatgtctctggagaaccctgacaaatgcatatggattcagattttcatgtattttctcctccacagcaagagggaatggatttgtgcgtctctgaaagatcagagttttaaaatgaaatgagtcttagaaatcatctcatttaattctttatgattttctttaaatctccaagtctagatgtaaaagggcctgtccaggaccacacagctaaaaaagagctgaaactaaagcctagatttttaaagactagagttcaaggttctatgcataaatggaagaattttcttttggaaa

SEQ ID NO: 167642 - DNA, 630 bp, Homo Sapiens
  misc_feature (47)..(47): n is a, c, g, or t
tatggtaacaggcagtagaccaaagatcatggactgtggctctctcncagggcaagctctttagtctccctgatcctgaatttcctcatctataaaatggggatcatcaagcctatctggaagggttgcactagagatgcaggtgaaatcgtggatgtatgatgcctgccactcagtagatgctagttcttctttctcttgctgatttagcaacaggcttccttttaggccccacagagatctctcctttgttctcttaagtctaatatgtttagatctattgctgacacctgatgaaatttgccaagtgtcttgaagtggctacagtgccaaaaggcttgttcttggcagataccatatttcagtttctcagatctcctctggcaagagttctgcagacattctctaatcggagtttgggggctacttaaatgattagtcccactgaaggtagacctctgctttgaaaacagccctctgttgtccaggaagggcttgtgcatgcctttataagaggtcatgtaaagcatggttgggacagaagttgtattgggttcacttgtgtgtcctggctcctaaagcaaagggattatccttgccaaaggagaaatatttggaataaaataccat

SEQ ID NO: 167643 - DNA, 488 bp, Homo Sapiens
aaactgaccatgaaaataaactgatttaaggtctaattctaccgctaaccagctgtatgactttaaggaaatcacaagattctcaagcctcagtttcctcatgaagacagtggcaatactttcttgcataaatttctaactacttataaaaatccaatagtaaaataagagaacttttaaacgttgtgaaatgttcattgttatcacaggagttaatgatttggtagtcaaagtcacagagggaaacacctagtcatgctaagttgttttgaaatctttactctctcaacatcagtttccatcactcttaaaatattttgaatctctagccaaagacagttttaagaacattaattaaaaaagtaattgtgtgaagtcccttaaagacagacacctgggaagttgtggtaggcatgcaaatagacagacccagaaagatgtaaacacgtgaaaccacaaaggaaaagtttactgtggctccccaatat

SEQ ID NO: 167644 - DNA, 382 bp, Homo Sapiens
ctccccataacaaggtactccctatacggtgataaatatggggtgtcgtagccaaggaatttcaagtttttctgatcctcatgataaaagccatctataccaattcatcagtccagtttatgcatttccaacaggggcaaaaactggtccttgacgggttaaaaagaaaacctattatattggtttgtgatccttcaaagggtcgcagtacataaataaaacatactatatttgtggtatgaaatttcatgaaggagagagattgaggggaaaatctccaacggctcctttgggaagtgagaataaaaagattgagaaactctggcctagtctgacattaaatgttcaactcggtcgggcgcagtggctccccaatatacgt

SEQ ID NO: 167645 - DNA, 433 bp, Homo Sapiens
atattggtgagccagtgggcaggaaggaaccccaaattctgtatataaactctgcctaaatccctggatgatccctgatctactcatgtgtagggcagtttccaagtaactaaaagagctgaaccaaaatatgacccactgcctaaaagacagaatttgctgttttgagtccaaccaagttatacagatctgtgggacagtatcattggggctaacatattaatatgtgtaagagtctgggacaactccccactctccgcaaaaaagagcaaagcatattcaatctaaaaacaaccacaagtaggtatatcacagttgaagacgaagatacttgaaatggctagagaaaaatgaaactttacataaagaagaacaataaattggatgaccacagacatcttcatattgtactgcagaaacaaaggcgggtacc

SEQ ID NO: 167646 - DNA, 418 bp, Homo Sapiens
aaatcaggaatgatcttccattcacaatggccacaaaaagaataaaatacctaagaatacagctaaccagagaggtaaaggagcgctacaagaagaactacaaaccactgcccagagaaatcagagatgacacaaacaactggaaaaacattccatgcttatcagaggaacaatcaatattgttaaaatggccatactgcccaaagtaatttacagattcaatgctatgcctattaaactaccactgatattctccacagaactagaaaaaaactattttataattcatatggaaccaaaaaacagcccaaatagctaaggcaatcctaagcaaaaagaacaaggctgagacatcatgctactcaacttcaaactacactacggggctacagtaaccaaaacagggctcaccaatata

SEQ ID NO: 167647 - DNA, 234 bp, Homo Sapiens
ggttcggccaggaggtggggccgagagctgtcgcacatccagattggagacattgtaggtatagctgtgctgagtgggtggctctggggcggggctctcctgtttcaggaggctcaagatgtctagttggctcttcagggtatagccaggcaacactgcatcaaactgcttcagccaatcagggccagtgtctgggctcttgccttccagacccttttccttcccaccattacc

SEQ ID NO: 167648 - DNA, 253 bp, Homo Sapiens
tcttagcagtcacagactcacctgccaggaagggcaaggactctccctctaagcagagccctggggagtccacgaagaagcaggatggcctagtccagattgcaccaaacctgactgtgatccagttcattaaagtcttccccagggtgctgctgcagaccctacgccaccccatcttcctgctggtggtcctgtcccaggtatgcttgtcatccatggctgcgggcatggccaccggggatgctctagagca

SEQ ID NO: 167649 - DNA, 421 bp, Homo Sapiens
tctagagtatccccggcttcggccaaaggaatcataaaaagagctcaggcagctctgtggagcacaaaaacactctacttcccatctgtgagcttgattataggtaagagcagaatggctggacagctgttggggttgtgccagctgtggcagcgtgccacgcagacttcccttccagaaagagcctgctgcaaggaatgcagaacgctgacagcttctagtctggatccaccccagcatccagggtgcagcactttctcccaggcagccctctaccaatgactgagcatggcaggggtactagggcatgaccactgccatgcaacgtgggacttttttgagggcaatccttgtgccagagctccctattaggctgaccaggacatttccagagctgcaccacagtctgagactctattca

SEQ ID NO: 167650 - DNA, 428 bp, Homo Sapiens
atcttcgccagctaacgaccttgggtagtaatcgaacaggactgttctctcgtatgtagcccacagcacgtttacatcgccttccagtatcactcccgacgtgctttcgactagatatctcggcttgccccgcccggaagccttaagacgcgtcactcgcatcacgcgtccgatgtcgtagtccccctctaatggggagcaggtatctgttggaaacaagacttggattctatgaatggatacgcccttctccttaccgcttaatacacggtctagcagcggaaggctcgacgtcatcatgatacggggcgtcgggaaatccgtgagcctcggcccgacgtaacacgccctcgcgtaaaagcagtacatgttcaacggataggagatgtggtcgtaaaaaccgacgccagattcatcagcgcctttgt

SEQ ID NO: 167651 - DNA, 257 bp, Homo Sapiens
  misc_feature (245)..(245): n is a, c, g, or t
caacggcgaagcgctgaccacctacgcggtggtactgggtgttgcgccggaagatcgcgatcacttcgcggccgtgacccacgagcacttccagcagatcttcagcaaggctgacgtgaccgctgacgacgtgcacaacaacaccattgctgtactgaaaagcgatgcccgtctggcgaaatacgcaacccaggctaagctcgacctgcccgcgcctttcgaggcgcgggttttatttttggggntgctctagagta

SEQ ID NO: 167652 - DNA, 115 bp, Homo Sapiens
gcatctgaggaagacagggagagtggctagatggacactttcaagaaatttctggaagttggaaagaagggaggaataggaagatgatatgctaaggaacacaaccctgccgagt

SEQ ID NO: 167653 - DNA, 212 bp, Homo Sapiens
agctcggtacccttcggccaaaggatggtttactccactctattttagtgagaagcaaaaaaataattttttaatcttaatatacctcatattaagtcagtagaaccttctgcagattattccatttactcctgacatgtgggccagtgtggaaagacatctaagcctgggcccctgtgcatcagctctccgtgttcttccgctttgcctcc

SEQ ID NO: 167654 - DNA, 213 bp, Homo Sapiens
agctcggtacccggtgctcgaatcctctttaagggaatccactgtgagaagcatagttggcaaacagcctccagctgctccactttcatgctgaggtcatgacaccccaacactgcttccagccacaggctcagcatagtgaggctattaaagtctggactattacacttgatatggttttcctctagtgggaaagctttggtcagcaactcc

SEQ ID NO: 167655 - DNA, 266 bp, Homo Sapiens
tcgcgccaaaggattacaaaacactcaggcacacatcccacccgtcaccctcgccacacacccgggaccagatttagaaagccaggcgacagctcagcaaacgcgagaccaccggaaacgaaccgggctgagaggctgtttcctcacagttctcatccactcacaagtgaccgcacgttttgtttttgttatttgccgaaatgttcttggctattccactcacctaaacggtcacggtagcaaaacacccagagtccggatcttcg

SEQ ID NO: 167656 - DNA, 431 bp, Homo Sapiens
aatccccctcctgggctgcttcccaggaatagggatacagggaataccacaggcatgaacacggtgccagctatgataggaaaagaagggacagaagcagggtccagacagctaatctttattgagtgatttctatggctaggcactgttctcaatattccacacatctcacaatgttcaacagctcttgtgttgtgagattcaattctcacctcatacacaagcactaacattaccacacatcacaccaataaggtaactaatgcccagaaaggtgacggactcccccataaggccacatagctggtcaagagctggagccgagattcaaccattcaacccaggcagtcggctgcagtgcccaggtctcaccgacttagcagcctcctaagggagaaaggctgtcacaccagaaagccgaacccgggtac

SEQ ID NO: 167657 - DNA, 235 bp, Homo Sapiens
ttcggccaaaggatggtcagtgaaacatccacggctgggaccgcctccaccctggaggccaagcctggacccaagatcataaagtccagcagtaaagtccacagctttgggaagagagaccaggccattcggaggaaccccaatgttcccgtggtggtgaggggctggctgcacaagcaggtgaggaagccgaggagtgagaatcctggaggaaatggctctggctgagttttct

SEQ ID NO: 167658 - DNA, 160 bp, Homo Sapiens
agattaacatttgagtctgtgaactgggacaggcagacccaccctcaacctgggtaggcaccatttaatcagctcccagcacagctagaataaagcagacagaagaaggtggacagagagcagacttgctgagccttcatttttctcccatcggggatcc

SEQ ID NO: 167659 - DNA, 164 bp, Homo Sapiens
atccacggactcgcaaggagtttgtgtgtgtgctgagagcatagagcagggtggctgcagggtggcgattgaggcggttaacagaaatttggagagggagggaggaccagatcatgtggcgccctgtaagccacagtaaggagttggaacattcaaagacactg

SEQ ID NO: 167660 - DNA, 335 bp, Homo Sapiens
tctgctaccttctccagtaaccagtctgacaacggcctggacagtgatgatgaccagcccgtcgagggggtcataaccaatggcagcaaggtagaggtggaagtagacatccactgctgcagggggagggatctggagaactcaccccctctcatagagagttctcctaccctgtgttctgaggaacatgctagagggtcgtgttttgggatccgaagacagaacagtgtgaatagtggcatgctcctgccaatgagcaaggacaggatggagatacagaagtctccctccacctcctgcctctatgggaagaaactctccaatggctctattgt

SEQ ID NO: 167661 - DNA, 259 bp, Homo Sapiens
ctccctaaagtcaaagacctttgcatttccctccagcagaatcagaaagtctggtaaatgggaaccacaccccacagactgcaacacggggaccctctgcctgtgccagccacagttccctggtgagctctattgagaaggacctgcaagagatcatggactcactggtgctagaggagcctggagctgctggcaagaagcctgccgcaacctctccactgtcaccgatggttaatggtgggcgctacctgctgtctcc

SEQ ID NO: 167662 - DNA, 170 bp, Homo Sapiens
gcagctcgactctaggggtttcctaagttttatttgaccccttcaaagtagaggcttatatttttctcatgctatatagactatgaagtaggagagaggcaaaacagaagcatagtatacagttggaagggtccctaaacacccatttgagaaaaggttgttctcttgct

SEQ ID NO: 167663 - DNA, 465 bp, Homo Sapiens
aaattgcctccccaggaaggaaggttggcactttctctgcattcttctttccagagcagattgcctggataagaatctcttgttgtcccctttgtatattgttatatgtaaagtgccaaatgccaggatacagccagaaaaattgcttattattattaaaaaaatttttttaagagagacatctggattgtagggtggactcgataacctggtcattatttttttgaagccaaaatatccatttatactatgtacctggggaccagagtctctcattttaactgagggtggtgggtctgtggatagaacactgactcttgctattttaatatcaaagatattctagagtggaactcttaagaccagtatctttgtgtgggctttaccagcattcacttttagaaaaactacctaaattttataatcctttaatttcttcatctggagcacctgcccctagaggtg

SEQ ID NO: 167664 - DNA, 532 bp, Homo Sapiens
  misc_feature (482)..(482): n is a, c, g, or t
tcagcatatctgaagttatcaacctcagatacgatacttattatcttttatatggtttgttttccaattctgtcagttaacccaataccaccttttatggcttctgttcacctcagtgcagaaccaagtgtagaatcatgcattacatttacttgtcatatctttttagtctcctttaatttggcatagttcttcagccttcttctatatttatgaattgacattctaaaatataggtctttttaaaaatggaatgtccctcatgttatgtttatgtaatgtttcctcttgtttagttttaggttatgtgttcccagtgggaatgttatgtaactgatattgtgccctcagggtttcacatctggaggcacatggcgtccgtctgcttctcagttttgatgctaattttgatcacctagtcaaggtgttagtcgatttctttatgctattttttccccttgctactgtgggcaatctgtggngagacattttaattccatacagatgccttgctcctcaataaaatattgcc

SEQ ID NO: 167665 - DNA, 158 bp, Homo Sapiens
caattgaattcactgagcctgaatccaaatcagggaaactggtggttcacggactacatttcatttgtgcattggaaaccaggcaatacaacacaaacatccggattgctgatttttcttgagagttggtagttctaccaacactgggacctgatctt

SEQ ID NO: 167666 - DNA, 309 bp, Homo Sapiens
ccagcatgatctctaagaaatgtacatctgtcatctgtcatatctgctgaaaattgttcagggcttcctgctgccttgagaatgagggtctgaatcccaaacaagggttcaaatctcaacctctcaggcctaccctgaccttacgtatctttcctcagggcctgtgcacatgctgttccttcttcctggaatgcttgtccccatagttttcagctggcgaatgtgagtcaggtctccccttaaatgtcatctaagagagccctttctaattcctccccttcatctactgtcacggggggatcgctctta

SEQ ID NO: 167667 - DNA, 140 bp, Homo Sapiens
agatgtcattatccccatagcagatctgggtctcctgcgtccctcctcaaaataagacccattcaaaagacacctcctacaacacgggtctgaactacaggtctcccgaggccactatggaaggatactggcactcattc

SEQ ID NO: 167668 - DNA, 151 bp, Homo Sapiens
tagaggatccccccgtgtaaccgtagatgcagggtagtggctacagctggtgcacagaaatactgcccagttgaaaactctcttggagtttgttgcaggggtggggggacatatccatggtcctgaatcaccagtgctgccggtgaaatct

SEQ ID NO: 167669 - DNA, 370 bp, Homo Sapiens
gcaaagcagctgtgcatccagcagcagctggcaaagcttagtaagcaacctcatccccagatgcatccgctcagccagtgttgtgattgctagatactatctgtaagtgaaccaaactaaaattcatttatgaaccaagaaaggaagccaagttgaaaaggtctcgagttaaatcgagaatgattcaggcgggccggctctctgagcacctttggatgcacttcagcttctgtcttgtggacaacgcagtggaattttagggctttggtttacacggtgtggaaaattgtcagcaggctaaattttgccttctagaggtccttcctgcccataatcatggggcatttagtagagagttagcagtgaggca

SEQ ID NO: 167670 - DNA, 127 bp, Homo Sapiens
ctccacaagattagacagacatctgcagagtgccttgatgactgaggccctcctggtgacaagacaggtctgctggtttccagggcaaattgccaagtgaaggaggccaaaaacacatcggggtgct

SEQ ID NO: 167671 - DNA, 295 bp, Homo Sapiens
tttgtggacgctaggcccgagaccatccatagtatggacatcacgcagtccataaagacaagagggaggcaggtgggtggttacggacctccctttaaaaaagaaagcgagggacacatcagtgtgtaaaagacagtgatgcccaggtgtgcaccaagtcacagggaggagacctgagtgatttttgcatcagtgcctttgcctgtcaggagggaaaatagctggagaagaggcaggaagatgactgactttaagttgtatccttttatcttttttttctaaaccaggtacactc

SEQ ID NO: 167672 - DNA, 807 bp, Homo Sapiens
aactatcacagcataaagtaggaatatttcgttactgtctagttaaactggttaatgcagaaaggaagtctggtaattccagttttaaagtaaaattttggacattgtaggattgattatttggcatagttgtgatgtttgttcctgcgttatggttttgttggcagggcagcctttaaggacctgtatattttcttctagactctatatattccctgtgagtattagttgtatggtcaaactggcaaattttaccataggtataaataatagagaatgtggaagaatagtgaatagtgtcagagatagttaaaagtccatacaatagtagagaaggtagtaagtaatagtggcttggactaaatatttgttgaataaatgttttaaaaaacaggctacctacaatttgtgttgaagatatgaatgaatgaagtttccacacctttatgtggagacctgataagtaagcaacaataaggaagggtccccaggttggggagagccccaagttgagaacaataatgaacaattattgtatgaacaattgttagagacagctaatcacaaacaacctgcgggcacaatgacctcattccacacgtagcacccttcagcaggaccctataaaactttcctccagcccttgcctctttgcaggtagccccttctctgctgagctgcccactgcaacatattttcacaatttctctaataaatctgcccttctttacctacaactatcttggtaaatggctttaccacctgcaaaactgaccctaggttgtgcaatacacagggccgagctga

SEQ ID NO: 167673 - DNA, 809 bp, Homo Sapiens
  misc_feature (691)..(699): n is a, c, g, or t
ggggcagtctagagaactaggactgctcagccttatcctggagtggagcatttagcccaggtcttaattctccaagaggaggaatacatagtatggtaaggcaaggaactgggtggaatgtcaggttgcctgcccaatgggagaggtagggtttttctagcttgtgtgacagaagtagcaaaatctggtcctcccccctcccagtgtagctgtggctcagagttttttctttttgttgtcacttactcccttgtgattgaattttttctcctgcatccatggcaggatccccagccagtatagagacttggttggcatcttctgctgcagggactaaaagtatttgactggggcacatgtggctgttgtcattctttctgcatcccactgttcccctccaatttatgttattttctaccctgtttttcagttccatctctgctctgtcctatagctttataaaaccagagtgtgtggggctgaggtcaggagtataagtacctgccttaggcactattccttatataacaaaaatattaaatatttttttcctcagtaaaaggatgaaaattggtttccgttgtcttactctattccagtctttgcccactttcacacaaatgacaagggccatatgtttttgtttggttttttaatcattaaggagttttttgtaccaaaaggtgacggnnnnnnnnnccttcactttttaaaaccccacggttgttgggggaagggattgccaacccaatttacccacaaaagcatgcctttttggtaacacttaattttccccctggctttaagaa

SEQ ID NO: 167674 - DNA, 339 bp, Homo Sapiens
gagtggacacgcttgtggatacacaggtatgtgcacaccactgacacactcacacctgctcatcctgcatgttcattgtagaatataagcctcagggctgcaccttttcatgcctgcatgttattccagaactgtgtaggctcctgtgccttgattgtgcagtgcacggtgtgacctgaatgacagaagccacctcaccaaagtgaggcagaactttattacaaaccctcaagtccactctcccgcatgtctatagaaaagttgaggtggaaacaactgcttccagccataccattcatttttcctaaagaaaccctaagtaagtattctaagtccaca

SEQ ID NO: 167675 - DNA, 369 bp, Homo Sapiens
  misc_feature (133)..(144): n is a, c, g, or t
tatacgtgtggaaagaaacaagcctgtttctgaggtagtaggggcagccagagggatttgagctttgcccttaatattgtatactgcaactgatttagagaagcctgtgtcccttgtaagatttaagagtaannnnnnnnnnnnagacagagtctcactctgtcgcccaggctggagattttccaaacttttagactccgctttcctttttaagtcccaatttttaagtcattcctttgctcccacatctatctgatcataggctgttagaagcagccacagcacatcttggatgtttggttgcttaatgattacttccactagataccctaagtcatcactcttaagttccaacttccacacttcata

SEQ ID NO: 167676 - DNA, 453 bp, Homo Sapiens
tactgacgtatttaatactgagggtagagaagctatcttttccagcttgtgtggaaataaagggcacacccactgacactttccctctgttgggtttgggaacattgctaggctgagactagcatgtaaatggaagggtttactgttaaagctggatgactggttgacggtgtatccactggggagtggagaggtctgccaagagaatgagagctcagtttgggtctaggttacattgttgtattgtcctcttctgctgctcagtctccttgcttcctttagatactttctctttagttaacctgtgccttgaggtccaatcacccttcacagtgtgcccagggctgtggctcaagtctgctcataaactacctctacttttgctttccatttcttctcaagggatgtagctctcagttatggcatctgtgcagacgtagcccctgtggttcc

SEQ ID NO: 167677 - DNA, 300 bp, Homo Sapiens
tatgactgggaagagaagtgaggatgcagtgcatctgacagtgaaaaaacaccagagtctgtgggttgcatatctcagcaagaactgtgagggagacctaaccaaggaagagccacaataggacagcacaggcatgctcagagttgagacttcaggcatggtgcagtgaacagcattaacatcgtcacagatgtgaacacaggaacgggggtgtgcggcctacgagccaaacaggacttcaagaggatgaaagtccacttgaagcacgagttatcatctaaccactgcaactgttctttc

SEQ ID NO: 167678 - DNA, 391 bp, Homo Sapiens
gtctcacttataagtgggagctaagctatgaggactcaaagacatacgaagtgataaagtggaccttggggactcgggttgggggtagttaggaggtgggatgaggaataaaagacaacatattgggtgcagcgcacgctgctcagatgatgggtgcaccaaaatctcagatttcaccaccgcagaattcatccatgtaaccacaaaccacttgtactccaaaggctactgaaatttgaaaaagagagagagtcattgatctatgactagaagaatctcagacaaagaattgaatcaagtcctgtctctgtctcctggaagctaagtgagtgtaagatatttaggcctcaccagcatttagttaaagttactttctctctgagtccactac

SEQ ID NO: 167679 - DNA, 568 bp, Homo Sapiens
tataaaggaataatatctaatgttatataaaatgtaaaagttatttcacacaatgccattcacatagtaaatgttcaataaaagcaaaaacctcaggacatatataagtggcaatgtgaaattaatacagcagaagctcagttcacacagatgttaatccttaaacaagccttgcatggtatgagtatcccacaaaaggagtaagggaagaagatcatacatcactggagtgagcgactaccatggaccagccaccgttactcaccttacttcagataacccgcacaaaagcctcatgagggagatataatcaccacatggcagatgagaaagctgaagctaagcaaagttgacctgaccaaaatcacatagcaagtaagataggagtaccagcttcgtctcattccaatatgagtgcgttttcctcttttccattggctctcaaagtatggtcataaaggagctgtatcagcatcacctgcggaacttattagaactgcaccttctcagccctaccgccaaacccactgggtcagaaactgctggggttggggcctagcagtctgtg

SEQ ID NO: 167680 - DNA, 126 bp, Homo Sapiens
agccctgacaaaagactgtgccataagtgggtccagtgcatagagtcagcagcgagcagtgcctcactgagctgacggggactgtctggaaggtgagtcatcaagccaaagaggatgcttcttgaa

SEQ ID NO: 167681 - DNA, 356 bp, Homo Sapiens
tatgacgtgtggattaattcccagtgaagactgcaatatgtgttgaggcacgacacatggttcctgatcctcacgcatgctctcttctaacatggtatccaaaacctggctcctgggtgatatctaccatgtcactgtccagttccacaaccctccctaactgctccacctctgggctctggctctgtagacagcagaaagatcaggtaagcagcattaaattataccaaacagaaatagattcccaaatcagatttactttattcagaatatgatacaacaattattagattcagcccattctatggtgaggtaaggtagcagatgtgctagagtgatttacgatcaattatccc

SEQ ID NO: 167682 - DNA, 665 bp, Homo Sapiens
catccccggttagtggactcagattgcgtgggggagagaggcagaagtatcatgccaagaaatccattcctggaagaggaggaacagttcccaggaaaatggggctgaggcagtgagaccgccagctgggatacagaggagccgcctatagggacagagaaatcctaggcaccccggagtgccagaaaggcggtgggttacttcgtggggcactgagattggctgaagctgtattcccagatcccaaaggtgaacaaaccatgagccccggctctgcagccctgctggcctcacagagaggcagcttgcattacatggatgcctggactcaggcaagaccagcagaagatcccaaatgctcacttttcccaagtccacacgataaacagtgtgtgcttctgactgtgtcccaagctacttgacacctccactaaacccaaagagttaaacagaattcgtttctgggaagaattccactttgcattctgctacattagttcaaagctcttcttcgaaacaagtttggaaacgacacaaaactccagaaaattcaggagtggcatttggaaaacctgaggctgagggtggagaatggcccacagagatgctgtttgtcttgtctttcttcacacagaggccacccacctaggaagaggcagaaaagg

SEQ ID NO: 167683 - DNA, 468 bp, Homo Sapiens
atgacgtgtggaaatctcacgtggattatccgtaagattagcctttccctgcaggggctgtgtggaaggattatatgcccaactactacataaaggcagaacactgctgatgtgactagaaggatccttaagtgtgacttttgttttttaatctgttgaggctgtatttctttttccctccaggagcacacatctctgaaataatcttagaaacaaaagggggaaatggcttgatggcaaattcttcctttacacacaacctttcaggaacgcgccaaatgcatcaagggaggctgggctgtactcagaggctctctctctggcatggattctgtgatgcagagtgagggtggagctgcgggtgaaggccttgccacacttagtgcacttgtagggcttttctcgagtgtgaattctccgatgcaaaatcaggtatgagtttcggttgaaagcttttccacacgtata

SEQ ID NO: 167684 - DNA, 152 bp, Homo Sapiens
aggagagaaaagtcaaggctggaggaattatggtcccattaacttcccattaaccaaccctgaccaagttatttaacctttcttagcctgtttccacaacataaaatgaattaatcaaaatatccacctaatagagtgttccacacgtaata

SEQ ID NO: 167685 - DNA, 619 bp, Homo Sapiens
catctcactattacctgatgtgctgcttgtaatctcaacactcgaggtgctatacatgctcacggaaatgggagatgttgcttgcacaaaaattgcaaaagtagaaaagagcatagacatgtaagtgtgtctggtttctatggatattcagatgtttggccctgatgcactagctgcggtaaaactcattgaacacccaagttccagtcatcaaatgttatctgaaattaggccacaagctatagagcaagtccaaacccagactcatgtagcatctgccccagcttccagagcagttgtagcgcagcatgttgctccacctccaggaatagtggaaatagatagtgagaattttgcttgtcagtggctaaatgctctttttgaagtaaatccagattgttctgtttctcgagcagaaatgtattctgaatacctctcgacttgcagtacattagctcgtggtggaatcctaacatcaactggattttataaatgtcttagaacggtctttccaactcatacagtgaagagagtggaggattccagtagcaatgggcaggctacatattcatgtggtaggagtaaaacggagggctataccacttcccatttaattact

SEQ ID NO: 167686 - DNA, 368 bp, Homo Sapiens
gatcccgtatgcgtgtggaagagggaagggcactggcatgattgcaatacattcctgggcaagacatctggacctcgtcccatttgcggttccttcatctataaaatgttaacacagtgtgtctaaaatgtcgatgtactacgagtgactttacctgagatcattgccaaatctcaaatcaacatccttatggtcattgttgccagaatctcatttattgtgtacagtaaacccaagaggaggcatttagttctatgcttgatcacatgaaaaaatcacacacatgccaacagagcacataattcccccttacaccataaatacaatcacagcacacctaaaaatctcagtaatttcttccttattga

SEQ ID NO: 167687 - DNA, 276 bp, Homo Sapiens
cctcgaggagggggggatccgcgcatacttcacgctcggtgctgagtgtcccggctgggattctaccatcgagtcggggtatggggaggcgcccccgcccacggagagcctggaagcactccccactccctgaggcctcgggggggagcctggaaatcgatatttcaggggtacagaccggagcagttttggtggagagggggcgcatagaaacctgtagcgcagtaggggtgggcagccgccagaggttaggcccgcagacgtgaggggatcctg

SEQ ID NO: 167688 - DNA, 856 bp, Homo Sapiens
  misc_feature (715)..(715): n is a, c, g, or t
  misc_feature (752)..(752): n is a, c, g, or t
gacagacgcaagatggcggacagtgcggaactaaagcaaatggttatgagccttagagtttctgaactccaagtactgttgggctacgccgggagaaacaagcacggacgcaaacacgaacttctcacaaaagccctgcatttgctaaaggctggctgtagtcctgctgtgcaaatgaaaattaaggaactctataggcggcggttcccacagaaaatcatgacgcctgcagacttgtccatccccaacgtacattcaagtcctatgccagcaactttgtctccatctaccattccacaactcacttacgatggtcaccctgcatcatcgccattactccctgtttctcttctgggacctaaacatgaactggaactcccacatcttacatcagctcttcacccagtccatccggatataaaacttcaaaaattaccattttatgatttactggatgaactgataaaacccaccagtctagcatcagacaacagtcagcgctttcgagaaacctgttttgcatttgccttgacaccacaacaagtgcagcaaatcagtagttccatggatatttctgggaccaaatgtgacttcacagtacaggtccagttaaggttttgtttatcagaaaccagttgtccacaagaagatcacttcccacccaatctttgtgtgaaagtgaatacaaaaccttgcagcctttcaggttaccttncacctacaaaaaatggcgtggaaccaaagcgacccancccgaccaattaatatcacctcacttgtccgactgtccacaacagtccaaacacgaatggtggttcttggactgcagaaattggaagaacttttccatgggcag

SEQ ID NO: 167689 - DNA, 302 bp, Homo Sapiens
tatacgtgtggaaagggcctgaggtgttgctgtgcacaggtaggacattgctgatagatgagtactatatctttatatcatagtggtagtcctcaattttcactatgtcccaaaaggtatgtggtccccaatgtcctgtctttttatgtagccagtaagccacatcttttgtgggcacttccttgaggaggagaatgtaggctaggcttgtctacctgttgatttccaggtggtgtagatgcaatgtgggcatccacatggtagactgttacatgcatcctctggatgcatggagaacgtca

SEQ ID NO: 167690 - DNA, 504 bp, Homo Sapiens
  misc_feature (432)..(449): n is a, c, g, or t
  misc_feature (473)..(473): n is a, c, g, or t
tgcctccctgacaacgatacctttttacgacctgggcttgatgggctatgccagtggcttcggggtcatggaggagaagattgctcatgacctcaggtttgtccgtctgcccgtagctaatccacaggcctgtgagaactggctccggggaaagaataggatggatgtgttctctcaaaacatgttctgtgctggacacccatctctaaagcaggacgcctgccagggggatagtgggggcgtttttgcagtaagggacccgaacactgatcgctgggtggccacgggcatcgtgtcctggggcatcgggtgcagcaggggctatggcttctacaccaaagtgctcaactacgtggactggatcaagaaagagatggaggaggaggactgagcccagaattcactaggttcgaatccagagagcagtgtggnnnnnnnnnnnnnnnnnncaactgaccagttgttgataaccnctaagagtctctattaaaattactgatgcag

SEQ ID NO: 167691 - DNA, 556 bp, Homo Sapiens
  misc_feature (276)..(294): n is a, c, g, or t
ataggatggatgtgttctctcaaaacatgttctgtgctggacacccatctctaaagcaggacgcctgccagggggatagtgggggcgtttttgcagtaagggacccgaacactgatcgctgggtgccacgggcatcgtgtcctggggcatcgggtgcagcaggggctatggcttctacaccaaagtgctcaactacgtggactggatcaagaaagagatggaggaggaggactgagcccagaattcactaggttcgaatccagagagcagtgtggnnnnnnnnnnnnnnnnnnncaactgaccagttgttgataaccactaagagtctctattaaaattactgatgcagaaagaccgtgtgtgaaattctctttcctgtagtcaccattgatgtactttacctgaaacaacccaaagggcccctttctttcttctgaggattgcagaggatatagttatcaatctctagttgtcactttcctcttccactttgataccattgggtcattgaatataactttttccaaataaagttttatgagaaatgccagtgtgc

SEQ ID NO: 167692 - DNA, 662 bp, Homo Sapiens
ccgctggctcactccccgcgtctctcctggggcttcctggagccacttcccacaggagctgcttgtccccaaatcttgcctcaggacttgctgccaggggaacgcagactcagagcgtcctctttggagaagtaaggctgcctctggacggaggagtgaggggggcgaggaaacgcagtcttctgagagcacaccccaggactgggattttgccaggaagatgtggaatggtgtggaaagacaagaagcgccagccttcaggctgccatgaaaaagctgggggtgtgttctgtggcccatcaagagggggtgtgtaatgaattgttaatgaatttctcagatgagccaaagtggtgaacttgtctcagtacccagggagactcagactcatccccagctcttggcctccaatctcccagctgctgtgattggactgggtccctggaattcatatgctggaaatcttggtccaggtatgggtgtattgggaggtggggtttaaggtgtggttaggccattaagagattaacgctgctctgtagggactgggctaattcttgagggagtgagtggcttcccgctctctcctggacagcattaaatagccacaggttgggttattataacatgaggccacccctcatgtgttgtcccactccccc

SEQ ID NO: 167693 - DNA, 381 bp, Homo Sapiens
ctagatcgtgtagtatgagaacgaattccgatataaatgaaggacagactacatgcacaccacagatcccgatcgacgctctgtactgcagtagctagcaaaacagagcatctcattccccgagggattgaggactcctgcctccccatcttcagcgaatgccttttactcgctctctccctccacgtctggtcccctctggcctgtccagagtttaaggacagcagcagctccctcacagatccccaggtttcctacgtcaagagtccagctgcagagaggcgcatgtggagcagtggctggaggccccgacacaccatcgtgccagcccctcgggcccccccgcactccagcctgttccaggcctttccatacgtcata

SEQ ID NO: 167694 - DNA, 477 bp, Homo Sapiens
  misc_feature (413)..(413): n is a, c, g, or t
gatctcgatgtgtgtttgagctgtagatctggacatccgtgccacagagccaggtaggtaccactctggtcaaagatcagtgactttacctcaaagttgttatccagctgcaaagtcttaaagttcttaagcttgcgcagaccccagagcttgatagaggagtcatcagccttcatgccactggcgactatctcctgagctcctccgatgatcagtactgggctttctctgacatccagacagggcgtgtgctcaccaaggtgacagatgagacttccggctgctctctcacctgtgcacagttccaccctgacggactcatctttggaacaggaaccataggactctcagatcaagatctgggacttgaaggaacgtactaatgtggccaacttccctggccactcgggccncatcactagcatcgccttctctgagaatggttactacctggctacagcggctgatgactcctct

SEQ ID NO: 167695 - DNA, 1190 bp, Homo Sapiens
  misc_feature (19)..(19): n is a, c, g, or t
  misc_feature (75)..(75): n is a, c, g, or t
  misc_feature (82)..(82): n is a, c, g, or t
  misc_feature (112)..(113): n is a, c, g, or t
  misc_feature (119)..(120): n is a, c, g, or t
  misc_feature (138)..(424): n is a, c, g, or t
cgccggaccgcggcggaanagagggagccggggaccggggggacagagcggggagagagagcgagcgaagagggnctgcgcngcaacaacacgcgccaacaaaaacaacgcnnaaacannacacacacaacaaggaannnnnnnnnnnnnnnnnnnnnnnnnnnnnnnnnnnnnnnnnnnnnnnnnnnnnnnnnnnnnnnnnnnnnnnnnnnnnnnnnnnnnnnnnnnnnnnnnnnnnnnnnnnnnnnnnnnnnnnnnnnnnnnnnnnnnnnnnnnnnnnnnnnnnnnnnnnnnnnnnnnnnnnnnnnnnnnnnnnnnnnnnnnnnnnnnnnnnnnnnnnnnnnnnnnnnnnnnnnnnnnnnnnnnnnnnnnnnnnnnnnnnnnnnnnnnnnnnnnnnnnnnnnnnnnnnnnnnnnnnnnnnnnaaaccctaattctacccctctactgagatgaggcccagcttccatcagaagggccagggcctacaggctgtagaacttgaggcttctgtccatgcctgttgaagcgatgaacttggcgtgatgcccgaaggccacccctgtggtcaggccgctatgctctgtaaagtgaagaatctccgtccattgtttgcagatgtagatctggacatccgtgcccccaagagccaggtaggtaccactctggtcaaagatcagtgactttacctcaaagttgttatccagctgcaaagtcttaaagttcttaagcttgcgcagatcccagagcttgacagaggagtcatcagccgctgtagccaggtagtaaccattctcagagaaggcgatgctagtgatggggcccgagtggccagggaagttggccacattagtacgttccttcaagtcccagatcttgatctgagagtccatggttcctgttccaaagatgagtccgtcagggtggaactgtgcacaggtgagagagcagccggaggtctcatctgtcaccttggtgagcacacgccctgtctggatgtcagagaaagcccagtactgatcatcggaggagctcaggagatagtcgccagtggcatgaaggctgaggcctgtcacagcactctcatgggcccgaaccacctgtacacaagaggcattggggaccgacccaatcctgatagtggcatcgggggaagcagaaaaccggacgcgtggtcgacccacgcgtccg

SEQ ID NO: 167696 - DNA, 768 bp, Homo Sapiens
  misc_feature (670)..(670): n is a, c, g, or t
  misc_feature (676)..(677): n is a, c, g, or t
  misc_feature (720)..(720): n is a, c, g, or t
gggccctcgggttgtggttggtgtgcgggtttcggttggaggactcgttggggaggtggcctgcgcttgtagagactgcatccccgagacgatggcggagggagataatcgcagcaccaacctgctggctgcagagactgcaagtctggaagaacagctgcaaggatggggagaagtgatgctgatggctgataaagtcctccgatgggaaagagcctggtttccacctgccatcatgggtgtggtttctttggtgtttctgattatctactatctagatccatctgttctgtccggcgtttcctgttttgttatgtttttgtgcttggctgactaccttgttcccattctagcgcctagaatttttggctccaataaatggaccactgaacaacagcaaagattccatgaaatttgcagcaatctagtaaaaactcgacgcagagctgtgggttggtggaaacgcctcttcacactaaaggaagaaaaacctaagatgtacttcatgaccatgatcgtttcccttgctgcggttgcttgggtgggacaacaagtccacaacctgcttctcacctacctgatagtgacttccttactattgcttcctggactaaaccaacatggaatcattttgaagtacattggaatggccaagagggagataaaacanacttcnntcaacaaaagaaaagaaaaacgaatgattcatctgcttttaantcagtgtgattaatgcagcacccatttgcccccgggaaccgttttctg

SEQ ID NO: 167697 - DNA, 914 bp, Homo Sapiens
gcggggctggcggcagaatgctggctgtgcggcgtgcggcggcgtggagccgaggaggaggttccggactgctgcttaggaacctggggactcaggagtgcccgcgccctgtagcgctcagctccagaggcgtcatggctgagtacgggaccctcctgcaagacctgaccaacaacatcacccttgaagatctagaacagctcaagtcggcctgcaaggaagacatccccagcgaaaagagtgaggagatcactactggcagtgcctggtttagcttcctggagagccacaacaagctggacaaagacaacctctcctacattgagcacatctttgagatctcccgccgtcctgacctactcactatggtggttgactacagaacccgtgtgctgaagatctctgaggaggatgagctggacaccaagctaacccgtatccccagtgccaagaagtacaaagacattatccggcagccctctgaggaagagatcatcaaattggctcccccaccgaagaaggcctgagcaagggggaggaagaggaggaaggttggaccttcatcagaccactcccttcccccatcctccaggagagggggcaagggcaaaccagcatctacccacttactaggctggtcctaacccccttactgatgcgcgaatagaggagcgtgtgcgcaacgctcagagctgtactgacaatatgtactagctcatcgtaggtaccgtacttcctacaagggggcatgggagggatcagggcgcctagtgggaagggtgagctagaagttattcgccccgaggtacaagggaggaagggtggggagaactaatagcatatgtgcaaatacggaagctgcatggcaagtaacatccgacattcccctaatacgctggcagattgagccaaat

SEQ ID NO: 167698 - DNA, 569 bp, Homo Sapiens
  misc_feature (20)..(20): n is a, c, g, or t
  misc_feature (56)..(56): n is a, c, g, or t
ccccacggtggcctggctcnacacaacacttgctgctgcccaagaagttttcgttnacagaactgaaccgtaagatgaagaccacgggagccattccttcagactgttgtgcaggaccgtttgctgagagggccacggcaggggaagtggcagttgtgataacccctcctgctactctcagcattgtggttccaggcttcgagagctgtgaggtggctggcacagtcttcaaggtgctatcggatattttcattagagatgcctgtcctccatgggctgcctgtgtaaacaatgtggttttctgtccagagatgacttttagcgtttgttgtccttgtgcagaagatgtgctgactcccagtgttccttggaccactgacccagtggtgagttgttttccagaagtctggggtgatggctggccaactaaaaatgtgccctggggagtttgcttgaggatgtaagatctgtaagatcaggtgatgagatatcgctgccagggccagcagtaactatgagttactcctcctgctgttcatactcacttctcctgtgctgccggtgaatct

SEQ ID NO: 167699 - DNA, 782 bp, Homo Sapiens
gggatcttgagactcgctaagcgtcccagccgcatccctcccgcagcgacggcggcccgggacccgcgggctgtgaaccatgaacacccgcaatagagtggtgaactccgggctcggcgcctcccctgcctcccgcccgacccgggatccccaggacccttctgggcggcaaggggagctgagccccgtggaagaccagagagagggtttggaggcagcccctaagggcccttcgcgggagagcgtcgtgcacgcgggccagaggcgcacaagtgcatacaccttgatagcaccaaatataaaccggagaaatgagatacaaagaattgcggagcaggagctggccaacctggagaagtggaaggagcagaacagagctaaaccggttcacctggtgcccagacggctaggtggaagccagtcagaaactgaagtcagacagaaacaacaactccagctgatgcaatctaaaatacaagcaaaagctaaaaagagaagaatctgtaagaatcaagaaggaagctgaagaagctgaactccaaaaaatgaaggcaattcagagagagaagagcaataaactggaggagaaaaaaagacttcaagaaaaccttagaagagaagcatttagagagcatcagcaatacaaaaccgctcgagtccttgagcaaacggaacacagaatcgccagacagaagtgcctgtcaaagtgctgtttgtggcccacaatcctcaacatgggccagaagctgggcttacagagattctctaaaggcagaagaaaa

SEQ ID NO: 167700 - DNA, 796 bp, Homo Sapiens
ggggctgaaggcggggaaagatgataaaggaaaaaggaaacgaaaaagttctacatctggctcagattttgatactaaaaagggcaaatcagctaagagctctataatttctaaaaagaaacgacaaacccagtctgagtcttctaattatgactcagaattagaaaaagagataaagagcatgagtaaaattggtgctgccagaaccaccaaaaaaagaattccaaatacaaaagattttgactcttctgaagatgagaaacacagcaaaaaaggaatggataatcaagggcacaaaaatttgaagacctcacaagaaggatcatctgatgatgctgaaagaaaacaagagagagagactttctcttcagacagaacgcacagttgataaagacacgaccatcatggaattaagagatcgacttcctaagaagcagacaagcaagcgctaccactgatggtgtcgataaacttactgggaaagagcagagctttacttctttggacagttagaaacagttgctgaaactaaagaaaagcagcaagcactctcaaaaccaaaacatgtaaaaaagtacaggatggcctctatctggaattcgcagagaaatttcctcaagaaacgaccttcagccgaacgaaacttcccggaccacgatacaaaagtccagccataaccgggaatctggccgaataatacgaaaccctcccccaactttcaccaaccaatgttctttacacatgggacccatccggtatgcaatccttccctcctgagggcccctggaaaaattca

SEQ ID NO: 167701 - DNA, 228 bp, Homo Sapiens
gaaataaagctttcatgatggttacatatctagaattctatccagactggttttaaaatgttacattgttctgggtgctatcctttatggcaaatgtgtattaagcatcatctatgcgagtgtactgtgctaggctttacctagcaggaatcactctgtgtgactggtctgcaaaagtatcaactctgcatctgtatccttggacctgcctttcatcgatccggggat

SEQ ID NO: 167702 - DNA, 475 bp, Homo Sapiens
tacgatctttgcctcctactatgcctcatttaaaaatatatataaatcatgtaatgtagttattgggatagtttcagaagtgataaagacatgtatgatttggttcctaaagccacaccaagaagataagacagatatattcagaaggctaatatataaaggagttggaaattgtggacaaagaaaggtggtgaataagtaaagtcgtaaattcaagaccacaacagaaagcttcactgcagacactggacttgaaccaccattgaaaacagtcaggatttggagatgataattaggaggatgtgtattctagctgtggaatttattgtgggcaagcataggaatgagaaagtacaatgaaaaaatgtaagtagacccaccaagttagagaagaaggtcctggttaagaaaaatgaaagatttttttgaacaacggattaatgtgatgaaatagatgttcagagcaaagatcgtg

SEQ ID NO: 167703 - DNA, 268 bp, Homo Sapiens
tgtatatataacattacaataaaccgttaaattgttttactgtatcatttaacatttctagttttagttgctgtaaatcctcatcagcactaagtccttgcaatttttctttacatggttgccattctcataattgtgtgctctcattgagacatatgctttgtcttttcctttttctgctggaaagcccaatttatataatccatgtagaaagaaatgtataaaatattgtagaaaatattgggttctggccaggcatggtagctca

SEQ ID NO: 167704 - DNA, 284 bp, Homo Sapiens
cgtatcgatgaaaggtggtaagtgattcttcaaagttctcaaggaaggagaaacaacgggatcaaaggctcaagggaagggaaagcacgagccgcgtacagaaagaaggacttctcttcggtgtagtcagaaggaattagagaagtatgtgtctttacatacactagtgcagttttctgaaatggctgtggggagcagggcctgggaaaagctatttccagttgcagagatgcctttggtgtatggagtctctgtcaacagtggttctcaaacttgactcagcc

SEQ ID NO: 167705 - DNA, 377 bp, Homo Sapiens
caacagtgagatgccacaacacgcctattagaatcaccaaaactctaaacactggcaacatcaggtgctggggaggaagtagaataacagggactctcattcactgctggttggaatgaaaatggtacagctgttttgaaagacggtttggcagtttcttacaaaactacacactcttgccatacgatgcagtaatctctttagcatgtacttgaatgagttgaaaacttatgtccatacaaaaacctgcacatggatgattacagcagctttttaaagaatcgccaagtcttagaagcgactgagatatccttcaggaggtgaggggataaacacattgtggtacatccagagatggaatatatgcacgtgatgag

SEQ ID NO: 167706 - DNA, 417 bp, Homo Sapiens
ccagaaggttctattacctttaaaaaagagtagttttgcccctcccagcaacctggtatgggtgccctaagaccagtctgaactcacactgtctgaaaggccacccaggatccaaatcgggccatcttcattgccatgagtgttcggacaggctctgcgtgccaggcaacagtgggcagacaaagggctccctggctactgggaagatacagaaccatcctgtgaaaatcatttcagcactggagaccttctttgctattacttctttcattaacaatgacctctaatttaaattgggccctgctggtttgttgatgaattgagcaactgagaacgtggcgggcactaaactgacagttccttccttcatggagcctgcttcatgtggaggaaacaggaaataaagcaaaagaagag

SEQ ID NO: 167707 - DNA, 339 bp, Homo Sapiens
agcacgatctttgcccaaaagacaatgttattgaaattaaattacagtagaaatgtttggttttcatttcagtgtatgctggaaaaagttggaaattggaattttgatatctttctatttgatagactaacaaatggtaagtgaagaatttgacttgctcaagttaatgtagtctagattactgcattgatggtgcagccgctggtgcgttgctttcatttactgtactaaggttgttagccctctgctggaagagagtgtattagtccattttcacactgctgataaagacatacccgagactgggtaattgagaaaaagaggtttaatggactcata

SEQ ID NO: 167708 - DNA, 366 bp, Homo Sapiens
  misc_feature (35)..(35): n is a, c, g, or t
aagagggtaaagaaactctaattaaacatcaagcntgtaaatatgatcaattaatgttacatgaatcatgcaatgtatttctacctatacagagattaagaaagcgtgcaagcgtggtttaccatggcataacgtggggtctcactagccgagtacacataggtactatatggcatcgtaaaccaggttgagcagtctgtacatttctcaggccattaatttcacctgtgtgacatataaggaagaatgttatgattttgcagctaaactttgcacttgatggaaatgaatcatttttagtttatgttttatctcataaataatcatttacagggaaaatcaaatgtgatctgcaaagaatctgaa

SEQ ID NO: 167709 - DNA, 348 bp, Homo Sapiens
tagagcatccccgcgtagattctttgcctacaaggtctccccgattctcatctgcccataaccatggacacagccccaggatgtgcagggtcgagctcccacccatcttggaaatgcctctgaagactgcatagtcctcccctgatgcttgtgctcccttaggggatctccaggcctttgggtgtggtctggcccctggagaagtgtggtcgagtggaggatggggtcctgcagtggccatgatctggacgcccacatcacggggagttaagagggattgagcccactttagcttgggtcttaaaaccaccatggtaagaagtgtcaacctttgggggaaaaataaaa

SEQ ID NO: 167710 - DNA, 262 bp, Homo Sapiens
cgaatcgataaaggaaatgggctcccacagaatgtggatcctccaagtgcgaagaaaagtattccatcttcagaatgcagtggctgctcaaattcagaaacatttatggaaatcgatacagctcaacagtccctagttactttgcttaattcaacaggcaggcagaatgccaatgtcaagaacattggtgcattggatctcactttagataatcccttgatggaagtagaaacatcaaaatgtaacccttcatcgaacgcgg

SEQ ID NO: 167711 - DNA, 728 bp, Homo Sapiens
ggactctgaactatggcggctagtgatacagagcgagatggactagccccagaaaagacatcaccagatagagataagaaaaaagagcagtcagaagtatctgtttctcctagagcttcaaaacatcattattcaagatcacgatcaaggtcaagagaaagaaaacgaaagtcagataatgaaggaagaaaacacaggagccggagcagaagcaaagagggaagaagacatgaatccaaagataaatcctctaagaaacataagtctgaggaacataatgacaaagaacattcttctgataaaggaagagagcgactaaattcatctgaaaatggtgaggacaggcacaaacgcaaagaaagaaagtcatcaagaggcagaagtcactcaagatctaggtctcgtgaaagacgccatcgtagtagaagcagggagcggaagaagtctcgatccaggagtagggagcggaagaaatcgagatccagaagcagagagaggaagaaatcgagatccagaagcagggaaagaaaaacggcggatcaagtctcgttcccgctcaagatcaagacacaggcataggactagaagcaggagtaggacaaggagtaggagtcgagatagaaagaagagaattgaaaagccgagaagatttagcagaagtttaagcgggactccaagtccaccctccttcagaggcagaaacacagcaatggatgcacaggaagctt

SEQ ID NO: 167712 - DNA, 810 bp, Homo Sapiens
gtcgatctcgaggattatcacacgcacttggatccactgcccattacgaagaggcaagcaatatctgtcttatgaaacgctctatgccaatggcagccgcacagagacgcaggtgggcatctacatcctcagcagtagtggagatggggccaacaccgagactcagggtcttcaggaaagtctcgaaggaagcggcagatttatggctatgacagcaggttcagcatttttgggaaggacttcctgctcaactaccctttctcaacatcagtgaagttatccacgggctgcaccggcaccctggtggcagagaagcatgtcctcacagctgcccactgcatacacgatggaaaaacctatgtgaaaggaacccagaagcttcgagtgggcttcctaaagcccaagtttaaagatggtggtcgaggggccaacgactccacttcagccatgcccgagcagatgaaatttcagtggatccgggtgaaacgcacccatgtgcccaagggttggatcaagggcaatgccaatgacatcggcatggattatgattatgccctcctggaactcaaaaagccccacaagagaaaatttatgaagattggggtgagccctcctgctaagcagctgccaggcgggcacaattcacttctctggttatgacaatgaccgaccaggcaatctgctgtatcgcttctgtgacgtcaaagacgagacctatgacttgctctaccagcaatgcgattgccagccagggcagcgggtcggggtctatgtgaggtgtggagagacagcgcagaagtggagcgaaat

SEQ ID NO: 167713 - DNA, 845 bp, Homo Sapiens
actggtaccggtccggaatttccgggatatcgtcgacccacgcgtgcgggcaggcatgggagccgcgcgctctctcccggcgcccacacctgtctgagcggcgcagcgagccgcggcccgggcgggctgctcggcgcggaacagtgctcggcatggcagggattccaggctcctcttccttctcttctttctgctctgtgctgttgggcaagtgagcccttacagtgccccctggaaacccacttggcctgcataccgcctccctgtcgtcttgccccagtctaccctcaatttagccaagccagactttggagccgaagccaaattagaagtatcttcttcatgtggaccccagtgtcataagggaactccactgcccacttacgaagaggccaagcaatatctgtcttatgaaacgctctatgccaatggcagccgcacagagacgcaggtgggcatctacatcctcagcagctcagtggcagatggggcccaacaccgagactcagggtcttcaggaaagtctcgaaggaagcggcagatttatggctatgacagcaggttcagcatatcgggaaggacttcctgctcaactaccctttctcaacatcagtgaagttatccacgggctgcaccggcaccctggtggcagagaagcatgtcctcacagctgcccactgcatacacgatggaaaaacctatgctgaaaggaacccagaagacttcggagtgggcttcctaagagccaaagtttcaacgatggtggtcgagggggcccacgacatccattcagccatgcccgagccagatgacaatttcacgtggaatcgggtgaaacggcacca

SEQ ID NO: 167714 - DNA, 1100 bp, Homo Sapiens
gggaagtgtgttttgagagcaagggaacagggcggatacctgaccaactcgtgatcctagacatgaagcatggagtggaggcgaaaaattacgaagagattgcaaaagttgagaagctcaaaccattagaggtagagctgcgacgcctagaagacctttcggaatctattgttaatgattttgcctacatgaagaagagaggagaggagatgcgtgataccaacgagtcaacaaacactcgggtcctatacttcagcatcttttcaatgttctgtctcattggactagctacctggcaggtcttctacctgcgacgcttcttcaaggccaagaaattgattgagtaatgaatgaggcatattctcctcccaccttgtacttcagccagcagaacatcgctgggacatgcctgggctaaggcatcctaccaacagcaccatcaaggcacgttggagcttttcttgccagaactgatctcttttggtgtgggaggacatggggtaccacctacacccaacaagtcaatgagggacttctttttaatttggtaggattttgactggttttgcaacaataggtctattattagagtcacctatgacaaaaaataggggttacctagataatgccaaagtcagcatttgtcctgggttcccttgtgtgatctgtttggactatgttttcttttcttctcccacttgctcagcagcttgggcttccattctagttcttttaccaagatttttgtgtgaccatgttgacttcatttggattgccctctttcaatttccttgtgaaaacacccttaactttctctttacccttagctgaaatgtttacatagcttctggtgatatcttttcatgattttatatctcttaaaatggtgatggatgtgacacctcataaaagtgagctttgaactgtagataactcttaaagaaaatgtcattttagacaattaaaatatttgtgctcaactgcttgaacttttttcgtgtatgtgtatttaattctatgcaatattatcacatgtgtagattcatgtgaccaccatcacaagagacagaacagttctgtcacatttatcccttgcacag

SEQ ID NO: 167715 - DNA, 909 bp, Homo Sapiens
aattcccatgggaaaaaagagggtttttccccccccggaaacggcttatgggtaaaaccatttttacaggtttaaagggttaaaaggaagaaaagtttaaggggggtttttcccccaagggaaaatgggaaaggaggggcaatccccaaagggaagtccaaaccttggtcaacaccaaaaattcttgggtaaaaggaactagaatgggaagcccaagctgctgagcaagtgggagaagaaaagaaaacatagtccaaacagatcacacaagggaacccaggacaaatgctgactttggcattacctaggtaacccctattttttgtcataggtgactctaataatagacctattgttgcaaaaccagtcaaaatcctaccaaattaaaaagaagtccctcattgacttgttgggtgtaggtggtaccccatgtcctcccacaccaaaagagatcagttctggcaagaaagctccaacgtgccttgatggtgctgttggtaggatgccttaggccaggcacgtcccagcgatgttctgctggctgaggtacaaggtgggaggagaatatgcctcattcattactcaatcaatttcttggccttgaagaagcgtcgcaggtagaagacctgccaggtagctagtccaatgagacagaacattgaaaagatgctgaagtataggacccgagtgtttgttgactcgttggtatcacgcatctcctcttctctcttcttcatgtaggcaaaatcattaacaatagattctgaaaggtcttctaggcgtcgcagctctacctctaatggtttgagcttctcaacttttgcaatctcttcgtaatttttcgcctccactccatgcttcatgtctaggatcacgagttggtcaggtatctccccatttccctttcgt

SEQ ID NO: 167716 - DNA, 996 bp, Homo Sapiens
  misc_feature (852)..(852): n is a, c, g, or t
  misc_feature (924)..(924): n is a, c, g, or t
  misc_feature (926)..(926): n is a, c, g, or t
gggggttccggcgcggttgaggccttcggtggtgaacgagtctccagcaccatgtctggtttgtctggcccaccagcccggcgcggcccttttccgttagcgttgctgcttttgttcctgctcggccccagattggtccttgccatctccttccatctgcccattaactctcgcaagtgcctccgtgaggagattcacaaggacctgctagtgactggcgcgtacgagatctccgaccagtctgggggcgctggcggcctgcgcagccacctcaagatcacagattctgctggccatattctctactccaaagaggatgcaaccaaggggaaatttgcctttaccactgaagattatgacatgtttgaagtgtgttttgagagcaagggaacagggcggatacctgaccaactcgtgatcctagacatgaagcatggagtggaggcgaaaaattacgaagagattgcaaaagttgagaagctcaaaccattagaggtagagctgcgacgcctagaagacctttcagaatctattgttaatgattttgcctacatgaagaagagagaagaggagatgcgtgataccaacgagtcaacaaacactcgggtcctatacttcagcatcttttcaatgttctgtctcattggactagctacctggcaggtcttctacctgcgacgcttcttcaagcgcaagaaattgattgagtaatgaatgaggcatattctcctcccaccttgtacctcagccagcaaaacatcgctgggacgtgcctgggcctaaagcatcctaccaacagcaccatcaagggcacgttgggagctttcttgccagaactgatctccttttggngtggggagaacatgggggtaccacctacaccccaacaagttcaaatgaggggaacttcttttttaattttgngnaaggatttttgtgactgggtttttggcaaacaataagggtcttatattatttaaaaagtcccccttaatg

SEQ ID NO: 167717 - DNA, 975 bp, Homo Sapiens
  misc_feature (225)..(284): n is a, c, g, or t
tagacagggtcccattagctgacaggaattatgctggtggaaggagggttttagctgtgttgaggctgagatgcttctaatactcccaggggcagagtcaagtaggcccctggctatccagagtgtgcaggagaggtttacactgaagacaaaactttgggagtcataagcataacagctttcaaaatgatgggaatgggtgagaacacttaagaagagggtagnnnnnnnnnnnnnnnnnnnnnnnnnnnnnnnnnnnnnnnnnnnnnnnnnnnnnnnnnnnnggcctaagatggggccatggagaagctagaagcagaaagccaggagagggcagtcctgtggaagataacaaggaagagtgtttcaggaaggcaggaatggccagcaaggccaggtgccactgaacaggataaggatgaaaagtgacctttgagttttgggtctatgtttagtattcggtaggcaccaagctagattaaaggaatttcagtatactcatagaacttataatcagactggagtgagttaactaggaattggagaaatgaaacagaaacagacctgtaagcattacagaaattaaatcagtagtttaaaatctacactctccccagctacaaacataaaacagtagtttttttctaggttctaccatacctttaagatagagatacttcctgcctatcttatatgaactgttctggagtatagaaaagaaggtaaagatcctgcaatttattttatgaagctcttatgaacctcatcatgtgtgctcaatgtctgaacctaaatcacaccaggattttatgtgaaagagaaactgtaggccagtctcatttcagtttgcagatggagacattctaaaatattagccaaggaatccaataatgtaggaaaaaataatacacatgatcagggggcaaatatggtttaacattagaaaaatgtagtggtacctcaacagattcatat

SEQ ID NO: 167718 - DNA, 727 bp, Homo Sapiens
gggatcatgcagaatttgtgaagaatctgctaccaaaatcactagtaaatggagttccttggcctcaagaggcaacacgacgaaatagccatacctttaactgcaggatgctaattcaccctccagatgagccagggaccgagaaccaagaagccttgccagcgttatgaagtaatgcagtgtttcactgtgtcacagccaaaatcaattcaagaggatggagaagatttccactcatgtctgagttgtattgcacggcgagtaactcggcctccagctattacgggtgtagaatcctttatgaccaagccagatactacaggtaaaatcatctctattgatactagttccctgagagctgctgtcagaactgcttgggaagatttagtgaggaagtgcatttatgctttgttccaacctcagggcagagaaccatcttatgccagacagctgttccaagaagtgatgactcgtggcactgcctccaccccctcctatagattcatagtgaactagatgggaccaatgcttagcgcccacaccaacgggtaaactttgctaccctcacagtccagacatccaacctttcatcatgggaattcatatcatcgacagggagcacagtgggctttctcctcacgatgaccctaattctggaatgtcaatgccccgagtaatccctcgctctatcctagtatctcatccaactcatgtgtggctcgatcat

SEQ ID NO: 167719 - DNA, 756 bp, Homo Sapiens
  misc_feature (637)..(637): n is a, c, g, or t
ggggcgtttggcgggtctttgtctctcgctggcgctggcacaggaacttgggatccgtctcctctttcgcctcctccgctttgggagccccgggctactctttcacagcccctgttgccctgtgatctgtaggtccttggggacgcacagttaagatgacaggacatcctggaagctgggaaatggtaacttcttagaccaagtctagaaacaatctgaggacaataacaattccattctaaaaagaatctcccaacatttcttctgtctcaacctcaactgcatctgcctgtgaacttccagcttaccaaggctctatatcttctggcagtgacaaaggctccttccatggttggtatatgtattcatttcctaccaccgtagtggaagagatactatccctatctttacaactgatagcatttccaacagtaagctgtgagattctgcttgaaatcacctcttcaaacaaataaaaaacagacctgggagacatgctacactcattctgctcaagaaatagggcaagaaagctttctaagaccccgaactccagatatgcgatggggcaaatcctgaagcgtacatggctatctctcacagctaaaggcacccctcacccctatccagcgcttcnttaccccctggcgcaagagaatcacctgcgggggaggaaaactttcaaattccccttacaccccaggttgtaacccgccaccactataacccgaatcccttgggagcctggggatctgg

SEQ ID NO: 167720 - DNA, 514 bp, Homo Sapiens
cagccctcaaatacctgtccttcacctggtcactcccccaggggaagtgtgacagaagatacgtggctcaatgcttctgtccatggtgggtcaggccttggccctgcagtttttccatttcagtactgtgtagagactgacatccctctcaaaacaaggaaaacttctgaagatcaagctgccatactaccaggaaaattagagctgtgttcagatgaccaagggagtttatcaccagcccgggagacttcaatagatgatggccttggatctcagtatcctttaaagaaagattcatgtggtgatcagtttctttcagttccttcaccctttacctggagcaaaccaaagcctggccacacccctatatttcgcacatcttcattacctccactagactggcctttaccagctcattttggacaatgtgaactgaaaatagaagtgcaacctaaaactcatcatcgagcccattatgaaactgaaggtattgatggctcgggggatcctctag

SEQ ID NO: 167721 - DNA, 758 bp, Homo Sapiens
  misc_feature (617)..(644): n is a, c, g, or t
ggggctcgccgagagacttcctcttcgttaagtcggccttcccaacatggcgcagtctattaacatcacggagctgaatctgccgcagctagaaatgctcaagaaccagctggaccaggaagtggagttcttgtccacgtccattgctcagctcaaagtggtacagaccaagtatgtggaagccaaggactgtctgaacgtgctgaacaagagcaacgaggggaaagaattactcgtcccactgacgagttctatgtatgtccctgggaagctgcatgatgtggaacacgtgctcatcgatgtgggaactgggtactatgtagagaagacagctgaggatgccaaggacttcttcaagaggaagatagattttctaaccaagcagatggagaaaatccaaccagctcttcaggagaagcacgccatgaaacaggccgtcatggaaatgatgagtcagaagattcagcagctcacagccctgggggcagctcaggctactgctaaggcctgagagtttttgcagaaatggggcagagggacaccctttgggcgtggcttcctggtgatgggaagggtcttgtgttttaatgccaataaatgtgccagctgggcagaannnnnnnnnnnnnnnnnnnnnnnnnnnnggggagggacggagccaaaagatctccccagagggggcccaaactatagacgagacccagaggatccgcggcacaacaggtgggccccaaaaagaagcacgcaccaaaaacgca

SEQ ID NO: 167722 - DNA, 467 bp, Homo Sapiens
gggctctttgttaagtcggccttcccaacatggcgcagtctattaacatcacggagctgaatctgccgcagctagaaatgctcaagaaccagctggaccagatgtatgtccctgggaagctgcatgatgtggaacacgtgctcatcgatgtgggaactgggtactatgtagagaagacagctgaggatgccaaggacttcttcaagaggaagatagattttctaaccaagcagatggagaaaatccaaccagctcttcaggagaagcacgccatgaaacaggccgtcatggaaatgatgagtcagaagattcagcagctcacagccctgggggcagctcaggctactgctaagacctgagagtttttgcagaaatggggcagagggacaccctttgggcgtggcttcctggtgatgggaagggtcttgtgttttaatgccaataaatgtgccagctgggcagaaaaa

SEQ ID NO: 167723 - DNA, 609 bp, Homo Sapiens
cccaacatggcgcagtctattaacatcacggagctgaatctgccgcagctagaaatgctcaagaaccagctggaccaggaagtggagttcttgtccacgtccattgctcagctcaaagtggtacagaccaagtatgtggaagccaaggactgtctgaacgtgctgaacaagagcaacgaggggaaagaattactcgtcccactgacgagttctatgtatgtccctgggaagctgcatgatgtggaacacgtgctcatcgatgtgggaactgggtactatgtagagaagacagctgaggatgccaaggacttcttcaagaggaagatagattttctaaccaagcagatggagaaaatccaaccagctcttcaggagaagcacgccatgaaacaggccgtcatggaaatgatgagtcagaagattcagcagctcacagccctgggggcagctcaggctactgctaaggcctgagagtttttgcagaaatggggcagagggacaccctttgggcgtggcttcctggtgatgggaagggtcttgtgttttaatgccaataaatgtgccagctgggcagaacaacacacaacaaaccacacatagaacaacaac

SEQ ID NO: 167724 - DNA, 453 bp, Homo Sapiens
  misc_feature (355)..(363): n is a, c, g, or t
  misc_feature (442)..(442): n is a, c, g, or t
aacctcacacgcaactggtcaggcggtacacgaggcacggtttccttacagttcttctgggcctgcaagaactcgagcacctccttcatgcactggtgagcaagctttcggctattggtgagacacaggttacgagcgtgaagctttctgcttatatgcctctggtagttcctttttcacaatgctgagccatacttttccttgcgacgagcatccagctgctcaatggataagtgctttttcttagtgccaggggcaggtgcatcgtgagaaaaccttggcaaagactttggtctggtggttgatggcgaacgagggggattcttcagaaggaaagttcttcatctcttcgccnnnnnnnnnatcacttatttcgacttagctttaagttacttttcctccttaaatttctattttctcgggtcccagttgcgtggggtancgagcttcgaa

SEQ ID NO: 167725 - DNA, 1170 bp, Homo Sapiens
caactgctgcaactgctgcacagaaattaatgcgaacagacagacttgaggtatgtcgagagtaccaacgtgcgaattgcaaccgaggagaaaatgattgtcggtttgctcatcctgctgacagcacaatgattgacaccaatgacaacacagtcactgtgtgtatggattacatcaaagggagatgctctcgtggaaaagtgcaaatactttcatccccctgcacatttgcaatgccaagatcaaggctgaccaataacagtgtcaaccaggctgcagctgcacaggctgcagccaccgcagctgccatgactcagtcggctgtcaaatcactgaaagcgacccctcgaggaaacctttgaactgggaattcctcaagcttgtacttccccccattaccaaagaggcctgctcttgaaaaaaccaacggggccaccgcagtctttaacactggtattttccaataccaacaggctctagccaacatgcagttacaacaccatacagcatttctcccaccagttcacatggtgcacgctgctacgccagccactgtgtccgcagcaacaacatctgcccacaagtgttccccttcgctgcaacaaccacagccaaccagatacccataatatctgccgaacatctgactagccacaagtatgttacccagatgtagaattttcatcactaaacaatcatgctaaagaggaaaggacagtgtgcttggttagagtaaaggacgaggtcattagccatattgtatatatcgtcaagcaacacacacaaaagttcctcagccacaagacatccacatattgcatgttaaccagaagaaaagacaacattttccggaaatccactgcacactgttgcctatacactttgtacatttaattgatatttgtgctgaggtgatattcctgtctaaaagaacaacattgtctttctgttctagcacagagttatgcattcaaagatgcatacctagttagtttcctatatattcatgccatcttgaaaagacagactatggtgtaaccatgattctattatgtattggtacgtctgtagaccaagatataattttttaaaaataggttatttctttcaagtttacaaataacaaggtgcaccttgtattttaaaatgccattatagatgagagcgtgc

SEQ ID NO: 167726 - DNA, 338 bp, Homo Sapiens
aagctccaacaagatacttacccaactgaccttccaaagtagctaggacttcttttcccagtttaagtttccctgatatttgattaacacagtcactactccctaggaatggcttttaaacgagaaaatgttaaacattttacttttcacttatatttacatataatgtaaagaccaaaacaaaaaacccaacaaaaattgcttgtatagttacagtactacttgaatgcacaagccaggtaaaaaaatactgactcaatttttagttacgaaatgtttaataagaaatctgaattgctgctatgaaaaaaataggatacacacaacgcaacttcttg

SEQ ID NO: 167727 - DNA, 579 bp, Homo Sapiens
  misc_feature (446)..(446): n is a, c, g, or t
  misc_feature (526)..(526): n is a, c, g, or t
aagctcccaacaagagcgaaactctgtctcaaaaataaaaagttccctttaacaccttcaaggtcaaatgcctgcctttgtgaacagttaataaactttgacgttttcagacatttgccattcagaagggagcattgtagcctgctgtagaccattccagcaaatgtcagaatgcagggcaagatgtgtgtcgactatgttttttatgtttaagttacttacttatttcttcaggtaagtgtgtaccaaataacaatactgaaaagccctccccttgccaggccgaggaaataaagcttaagtgaaacagctcttgggggaaaaatgccactttacaaatacttttctaacaaaatagcattataatgaagtttttacttaattccattatttatatgttgacgtgaatgtaagtggttaaaaagtattcatgtgggacatctcantactttgtagctgtggctttattaaccagtgaatgctgtggcccttagcgaaatgcgttgtcttctgcgtgatgtggaantcgcgcctgtattttaaaagatggtgtggtttctcccttgtttgtattttaat

SEQ ID NO: 167728 - DNA, 944 bp, Homo Sapiens
  misc_feature (481)..(481): n is a, c, g, or t
  misc_feature (483)..(483): n is a, c, g, or t
  misc_feature (492)..(492): n is a, c, g, or t
  misc_feature (494)..(494): n is a, c, g, or t
  misc_feature (496)..(497): n is a, c, g, or t
ggggaacccgccctccgaatccagagaggcgctgctgacaccgccgccacaccgccgccacaccgccgctgcctcagtcatgccgaagcacgagttctctgtggacatgacctgtggaggctgtgctgaagctgtctctcgggtcctcaataagcttggaggagttaagtatgacattgacctgcccaacaagaaggtctgcattgaatctgagcacagcatggacactctgcttgcaaccctgaagaaaacaggaaagactgtttcctaccttggccttgagtagcaggggcctggtccccacagcccacaggatggaccaaagggggcaggatgctgatcctcccgctggcttccagacagacctgggacttggcagtcatgccgggtgatggtgttcctgcggagaccctcagttgtcctattccttcctagcttccctgcaataaaatcaagctgcttttgttggaaaaaaaaaaantnacaaaaaananannccttgtcggcgcgccctcggccttcgaaaaagctttctaagaccgttcgtttgggcgcgcggggcccagaaggtgaagtgaaacatgtccatagcctggtttccctaaggaaaaccctgggccaaggactaaagggcttggaattccccccccaaataaaaaaccgcccgggggggcaaacccaagccgtttctgaaacacaaccccgaatgggaagttcctggagggccatttactggggaatcctaaccaaacagggaagctcccaagcggcagagctccgaaataccacaattttacggcccccgggcccttgggcccactttattttcgccaggaacccggtgtgggtagaaatccaattaaaaaggcaattttctggccccgaaaaattgggagagacccccacttccaccacaaaaccggggccattgggattaaaaccct

SEQ ID NO: 167729 - DNA, 341 bp, Homo Sapiens
gactcatagaggatcctaagctcccaacaagatgaaccaatacctcaaaaacctcagtcagcattttattattgcagattgcttcttagtatattgggaatgaattcctgggacaaacggaggagctttcatctcctgaagaaaaatgaaaagctacttagagaacttaggaacttggattcaaggcagtgccgagagacacacaagatttgcagtattttatgttgctgaaggacaagaagacaaacactccattctcaccaatacaggaggaagtcaagcatatgaagattttgtagctgtcttgttgggagcttaagatcctgtagagtcaccccaca

SEQ ID NO: 167730 - DNA, 367 bp, Homo Sapiens
tgctgaggtgactctaaggatcccaagctcccaacaagatacattaatttataaattataacagagataccactgcactcatatcttatgtaaatttaaaacttacacagccttaaaactttaaataattcgatcaaagaaacaacataaataaactattttacttaggaacaatgcagttcacatttttgctttcactagaaaaatgttatgaataagagagtattttaagtgagatcaatgaaactgaatatttcatttgtatttgtattgttactaaattgttttatccttgtaacatgactgacaaagaactcccaggagcagaaatctgagctctttcattatcctactatgtagggagctt

SEQ ID NO: 167731 - DNA, 1062 bp, Homo Sapiens
  misc_feature (709)..(723): n is a, c, g, or t
ctgactcatagaggatcccaagctccaacaagagacaaaggtaggaggaaagacaagaaaggaagatacaaaaggagcaggaagaaacttacttagggacaagattagcatcatacatacctaagagtggggggtgagggggaagaacaagatgagagagcatttaaaagcatttacccacacagccctggtgataattggattggaatcaaaacaaacacagcatgagattattaagaggttttaaaaggcaacagtggtgtggactggttattgccagtgttaagagagaaataaacttgggtttttaggcaccagagattggagcaccacccatcccttccagaggatgacagacttaggaaggggaagcaggccctggggcagctgccactggtgtgtgtagatgtctcctcaggtcaatctcagtgtatcttccccgaagtctttgtgccctagactctaggtaagggctatgggatttcactgggagaaagggatgatcaaaaatatgaagacctgcccttgtccacaatgttcaagagcagttaccgggaaactggagcactgggtagacagagcccatatccctggggaaaaggcacagtgtaattcctgaaggcaagatatgggaaagcacacatcccagcagaggtatcaacaaaatcctcactacttgcagccctagtctaatcccatttgttaggcnnnnnnnnnnnnnnnccccctgaatattaacttaggatttagggcgtttgaaaggcagacattcttgcttcaattttctaagcaaaaacagggaagactggggctgtgggataatgaggagggcgaaattgggacaaaatactcttctttcaaaattgacactgtggagaaactcttcctgggtggggggaggtccagagtaaagcctcgggggagtaataaggccagagaccccccttcttttccttcccctgcctgggaagtcgggccccagttgggggttcctctaaagtcgccctgcggcttgcaccttggcctggccgccgtacccctctatgacccccgtgggggggg

SEQ ID NO: 167732 - DNA, 182 bp, Homo Sapiens
ggacaatgaaatgcacatttgaataaatggaaatgacagttctcaaagttatctttaaaacttattttatatttgttgagatcaatatttaattactaaatattaatatttatcaggctttgtgatatacaatatgcaaaataaattactctagcctgctaatgttatcttgttgggagctt

SEQ ID NO: 167733 - DNA, 384 bp, Homo Sapiens
acccaagctcccaacaagagcgaaactccgcctcaaaaaccaaacctaacaaaaaaagaaatttagctaaatattgctaaaatggcaaatgatagcacttgtcattttgatgtttgtgcgttaagtgtactttcattccctttagaaaatactagctgcatatacataggatttaatcaggaaaatatgctttttccctgattaaatatctttaatactatttcatctgcattccattaatattcaatcgtggcctcagctatttacgtgaattttacccatcaatccatgagcttttttgagtgcctactgtgtgttaaatctatctgtatgtgtgtgttttcttgttgggagcttaaaatcctggagagtcgaccgcagcat

SEQ ID NO: 167734 - DNA, 537 bp, Homo Sapiens
  misc_feature (13)..(13): n is a, c, g, or t
  misc_feature (101)..(101): n is a, c, g, or t
tgatgctgaggtnactctagaggatcccaagctccaacaagacaaagtaagaggaaaatattaagagacggctgagctcgcacacaatagaaaactctctnggcaatataaataatctcagaaagaaggaaaatagaagcaacaagcaaaagattactgagttggaaccaaggaataggcaaagacaaaaaaggtgacggaggagaaagttgtaagggagaggtccaggaaggagagctttcatctcagtcctcagatagaccttgccatcccagcacctctgcatcactcaggttgcagagaaatctggagggaagaacgcaatctcatcctacaagctgagcacatcaggaggggctggggctggcagtgctctcggaagcacactttgagacagtaaaggaagtcacagatcaacagtggaaaacacaggagatgctcttgctggttgtcagcgcaggacactgagaaccccagagtccacagaagattattttaagctcaagatagttgagattcgacagatacagcaagaag

SEQ ID NO: 167735 - DNA, 338 bp, Homo Sapiens
aagctcccaacaagatctaatctgatggaatattcagttgcagaagaagtgaacagagtggataccctctctactctcctgtcactgtaaaatcagttctatggagagaagacttcttcgtcctcatttaccacctccctgatggttgcaaaggcttgggaaggcatgttggagtctttgacggcagcatgatctatttggctggggcatcttacctaccttttcagtccctgcattaatcccctctaggaactctgcgtggatcgtatggaaatgtgaatctcttaagtatttaattttttttggtatgtctaatttatgaagtcttgtagggagct

SEQ ID NO: 167736 - DNA, 328 bp, Homo Sapiens
gataaaagctccaacaagaaggttgctgtacttgagaagtcccccgcctctgatttcttctgggttcttggtggcgatcagtctgttctgcagatggtcaaaagcttcctcaaagtccccgtacatgctctccccaatcacggtggggtggaagtgctcagagatgggattattggaacagtcatagaagaaaagcaaagaatccaggatgatttggaaagagtccacactgaactcaaactgacgccgaatggagtcgacaaacttcagtacacgttctgcccgttcttgttgggagcttaagtcctggagagtcacctcagcatcc

SEQ ID NO: 167737 - DNA, 1055 bp, Homo Sapiens
gggctggtccggtccggaattccgggatatcgtcgaccacgcgtcgaaaggaagaaaaagaagaagaggaaagagagtggggtagcaggagacccttggaaggaggaaacagacacggacttagaggtggtgttggaaaaaaaaggcaacatggatgaggcgcacatagaccaggtgaggcgaaaggccttgcaagaagagatcgatcgcgagtcaggcaaaacggaagcttctgaaaccaggaagtggacgggaacccagtttggccagtgggatactgctggttttgagaacgaggaccaaaaactgaaatttctcagacttatgggtggcttcaaaaacctgtccccttcgttcagccgccccgccagcacgattgcaaggcccaacatggccctcggcaagaaggcggctgacagcctgcagcagaatctgcagcgggactacgaccgggccatgagctggaagtacagccggggagccggcctcggcttctccaccgcccccaacaagatcttttacattgacaggaacgcttccaagtcagtcaagctggaagattaaactctagagttttgtccccccaaaactgccacaattgctttgattattccatttatgctggagattacaaattttcttggtgaaaaaatcagatcttggtgaggacctcgagcagtaagatataaataactcccataagcttagcgttccagtaatggaacactaggcataaatggtttattcagttgtgcaaatgaaagccatctgacagttggctcacattgaacacctgtggagattaaggacgaggacaactatattgatgggcttggatgaactggggcagggcagctcatatttcgggagccaggagaacgagtgagtgctaaaacctcctgttttctgtgttaaacattccgtccctgtttgagacatcagtatgtacagttaacttatgttgagtgtttagcaggtactagggacatactagtggttttccttaatgtatttaatcttcataattatgaaatgggtgctattattaagcccca

SEQ ID NO: 167738 - DNA, 277 bp, Homo Sapiens
tagaggatcccgagagcaggtagaaagggaatatagtgatttaacacccaagggtccagccatagcaggttggaaaatcctccaaatttggccacagaagctggctaggaaaaaactgccactcattgcgccacacgctgggtccccatcagttctcaatgaatggtccattgatttactttagcagagagaagtcacccagccgacaaaacccaatcctttggaggttttgggggttaccccggagcttccgggaaatttctgttacatccatggg

SEQ ID NO: 167739 - DNA, 732 bp, Homo Sapiens
  misc_feature (515)..(528): n is a, c, g, or t
gggttattggtaatcttttctgtgaatattaggtttcctccagaaatagtccgttatttgggaaagttaactgtgtgcacttttagatattaactacatttacaggcaaatcactgtaatgagaatggtactggaaaaatactgaatagacttgctaaatggcacatgcactacaagaggaaccttttgggttatttaatatgtacagaaaacattagaaaaaatttattacagaattctaattccagtatgaatagtggaaacccatctgtaaattagatggatgttggatggaaaatgacattgctaaatttgagaatttctttttacctactaatgtagattgctttgtataataaaacacagggtttggaaggttttgttacagggagcatggtctgttgaagatttttaaaatgtatttttctagattaacttctgtacatgaaatgtctaataaaactataagaggtttagagatttttccattggaaatgtgcattttggtttctaannnnnnnnnnnnnncatttactggcatactgttatacctcattttttaaaatcaactgaatccaatattttccggtggcaaataacactttccctcatttcatacccttttctcctctcttccatgccaaacatttcctccaccccacaacgttacacttttttatttcctcccatcaaatattttgaaaagcgaagtgaatttgtggacccagggaa

SEQ ID NO: 167740 - DNA, 508 bp, Homo Sapiens
ctctagaggatcccccaacgcatgtgccgctcccacattcctagatgtctgaggaaccctcagaaggaaatcatcgaggtctttcaccatgtggccatgccaattgtctcatcctgttcttcagcatctcccaacaagatctccagtggcctcacaaattacaaccagtctctaaaagctgaatgtcaacctgcccttaaaaggccctgtgtcccagtgccaaaagccagtagtttaaagaaacagggaacagtcttgctggggcctacttctcgttggaaggagtgtacaaaatctgaccttgccagtgggtggcctctatccagccctaaaggcatcctccaggcagttctcttgtggagcactagtcagtggctctggaggcaggattcccagtggtgcacccacaaagcttcacctgggcctggcccctgaggacaatattaaaggatctgtgttgggagcggcacatgcgttgggagcggcacatgcgttgagagcggcacat

SEQ ID NO: 167741 - DNA, 298 bp, Homo Sapiens
gggtgacctagaggaccccaagctcccaacaagagaggtctccggataactgtgctcctgacatccttccttatggttttgggaactggtctaagatgcatacctatatcagacttaatccttaaaagaagattaattcatggaggacagatgttaaatggattggcaggtccaactgtaatgaatgcagcaccatttctctctacgacgtggttttctgcagatgaaagggccacagccacagctattgcatcaatgctcagttatcttgttgggagcttgggatcctctatagtca

SEQ ID NO: 167742 - DNA, 620 bp, Homo Sapiens
cccacacaagtcctgaaccacatcttatgcccagccccataaataatattgaaaggttgctcatagacacttggtgctttctcatacaccatgaaaatcgaacctccccctcgacgcaattacaccatcaatccccattacaacctctgacaactgccgccctagctggatccctaggagtctaagtacaagacaccactttcagcactctttctcatcttttcactttgcatctccagttttgcctcgcacaaggggtctcttatccctctgtggatcctctacctacatgtgtctacctgctaaatggacaggcacatgcacactagttttccttactcccaaaatgcaatttgcaaataagaccaaacagctccctgttcccctcatgacaccgacacgacaaaaagagttattccactaattcccttgtcagtttaagactttctgcctccactattgctctcggtactggaatagcaggcatttcaacctctgtcaggtccttccatagtctctctaatgaattctctgctagcatcacagtcatatcacaaacttcatcagtcctccaggccaagttgatctagctgcagatgtcctccaaaaccgccgaggcc

SEQ ID NO: 167743 - DNA, 555 bp, Homo Sapiens
  misc_feature (355)..(355): n is a, c, g, or t
ttagaggatcctaagctccaacaagaactctagcagttcacaaaactttacacatgcagacatcaagccctacagctgcgagcagtgcggcagagtgttcaggcgaaactgtgatctgcggcggacagccttgactcacaccccgcggcaggacttctagagaagcccaggatctgtcccgtgccgccgctgctcccctccccagacacctctccacgtctcctacccagggggtcgcatccctagcccttcactgaccccagctcttcccttgctgcagccgcacctgcagctccagggagttaactcttcttctgggggactgagaactgtagaaagccacacactactacancccttcacaaagagtatatgcctagtttcttgtagatattcacagctcattttagagctctgtacataatgttgtgggtctttgttttgttgttttgtttgctttgggatcttgttggatgcacttagatatggaaaatggaagccaaattttatctttaaagactgtattttcaaaataaaactttttcttgtttgttt

SEQ ID NO: 167744 - DNA, 202 bp, Homo Sapiens
ttaagctcccaacaagacaccagaataaacttgactttccagtcaagggcagagagaggctcttccatgtcctggagttgaatgagttcaaagattggcataaagggaaaaagaaagccttacgggtatgacggggaacaagctttggagtttatccgaacagtcacacctagtttctcttagcaacacggacacccctttt

SEQ ID NO: 167745 - DNA, 1107 bp, Homo Sapiens
cccattgcaggtggctcttacagctctctggtgctagcacgggatccctgaagtgactcagccaggcagacatgagacatggcggagtgtccaaatggatcctttattggtggtagagcaaaaaaacccaaacacgataaacctttcaaaagactttctaaggatgatattggaatgcaccagccctcacatgtgtatgcacatttgccagaatataagagttttgttttaaatacagtcttgttaggattttacgttattgttattatggaaagtgattgtgatgctatttatcttcagggtcactctgggcaaagagaaggtcctcagccatgcccccagcaccttgcacataggtgtctgataaaagtttaagaaattaaacactttttgagcaccaaatatatatagggcattgttctggtgggtgtgtcacgctcccagaagactgaattcatggtaggatcactcgcaaggccttgtgaaggagtcttacctaaaacaaaagaaatatcagggacttttgttgactatttacaactcagttttacatttaaattcaggcagtgttaatatgccaaggtagggaatgtgcctttttcagagttggccaggagctcctggctgggacacggagaggcaggtgtggcgtaaggcctcactcccggctgtgaaggtctctgatcacacagaagcagccctgcccagcctggtcatttgctgtccgcttttctctgtgaccacagcagccctgaacaaccagtatgtgtcttcttctccagatagtgaaaaaggtgtccagataaacccacctaagtgaaatggccatcctctaaactgggtacctcactgcacagcttctaggtagccttccaacttaatctaacttgagcctcacagtaaccctgtaaagttagtagagcttgttcttgtattgtgaccttttttaaaaaaaggaactgaggttcaaaatgattaagggcctggccccccaggggtgtccagctccataaggtggagctgggccaagattttggggtttgctggctccctgaagctggattcttttcctacgatactcctttctcaagaagggggcctccctgg

SEQ ID NO: 167746 - DNA, 313 bp, Homo Sapiens
aagctcccaacaagagctagagaaataagcaaacaagatgtaaattaatcatctgttggcaaaagaggaaagaaataggagctgagggtgtatgagagcaaaaatccaggtattttaaatagttggttaaaggaggtgaccacaaataagaaagggagtaaaatcaaatttaaaaaatatatgcaagctcacttcaagctcatgtatttgcaaaatcccaagaaattaccagtagcacacaaaccagtcctgtggttcagcaatcaggaatgtggtgatcttgttggagcttgggtcctcaaggtcagccaca

SEQ ID NO: 167747 - DNA, 570 bp, Homo Sapiens
cagggcaacgtgagctcaggatctcatgttgtcaccataacattgcaggagtggtgtatggaaggggtggtcatgttctttcagatggtgatacatcctacagtgaaaactgtgacctgggggaattatatggctttcctgtcaccttggtggctgtggttagccaagttcaggatgctttctgtgaggacaggaggtggatgtagttcagagagaggaagattgggcagaggtcagagggatgtcttcccaggacctctagagggaagcctgggcagccgggctcaagttgggcacttggcttccccagctcctccccagttgccttggccgattcattcctttgtcttgtgtttctcccgccatcccaacgaggctgccactgctagggtctgagaaatacctgaccacgcagtttcagtttataccatccccttaggaaatgccttctcttcctttcctgagtctcttcaggccccatcgcttccgtgttattaatcccttacagcggcatcaggaatgatgggttgtctaggtcattgttggagcttaagatcctgctagagtcac

SEQ ID NO: 167748 - DNA, 508 bp, Homo Sapiens
  misc_feature (138)..(187): n is a, c, g, or t
tgtgaaagcacaccttatagactgatttagtcagacctttgaaatgtaccaaagacgttgccacatagcctgaaatttcaaatctctcagacttgtggttgtccaatttcaaatatccatgactagaactgatgaccnnnnnnnnnnnnnnnnnnnnnnnnnnnnnnnnnnnnnnnnnnnnnnnnnnggcttaatactgaatcttgttcaacaactggtcccagattcctagcaagctagacctatgataaaaacaaaattctgtgcaatttaagcacaacttattttcctttgaggtctcagcactcttaaagttaggataataagacagaaattttaagagaaaagaacatacaactatactgctgaaagctggattaccagtcgctgttaccagttatgttcctccatgtgtgtttattatgtagtgtgtggtgtgcatttgtgcctgtgttcctgtgcctgtgagaagcggaaatagaaaagggatgtagcgttcagtgacctt

SEQ ID NO: 167749 - DNA, 617 bp, Homo Sapiens
ccaggattcaggccgtgtcagtggttcaggctttgtgtggtggtcaccggcttcgtcgtagtcaccggcttcgttgtcgtcactgggttggatgtaggacttgaagtaacgttattcggaacatttacttgtttgtgaccaaacttcacaaggttctttgtgggttggtccccttggaaccaatcacactgtttcctgatatctggggacaagtaaaaagcattttcactgctgacgaaggatggcaacagcctcccgaagcgcatcaaaggctcctcgttgagctcggtggacttgtccactaatttgaagaagacgtcgtttggctcactggcgaaggtgtatacctccttgatgttcaccttcctgccaatgcccaggaccacgaagaagtagcccttgcatttggcctgcaggatgactctctgaggcctcctccagctgctgctccggcacctcgcccgtcagcatcaggaccacaattttcaggtcccgtgggtttggggcactttcaaagacattctctatggtgtattcaatggcactgcctaaggccctggttccctgcaactgtgtcattcccctgctgaggaagtccaccagcttctccttggagc

SEQ ID NO: 167750 - DNA, 247 bp, Homo Sapiens
ctccctggggtctggtcgatgtggtccaccaggcggccgggggtggctaccacgatgtcagccaagcagcggtacccatcagctgttttctggacgaggctctcctgctccttggccagagacttctggtcccgtaaccagggagactctcagaggtgtggcatctgtgtagatgttgaaaactttgctcacctgccgggccagctccttggtgggcagcacaaccagggcgcacttatcgaggagc

SEQ ID NO: 167751 - DNA, 444 bp, Homo Sapiens
caccacccgcggcagccaggactgatgcatgctgtcaatcatccggtcagcctcgtcgataatcaggaagcggagctgctggaggctgaatcctggggtctggtcgatgtggtccaccaggcggccgggggtggctaccacgatgtcagccaagcagcggtacccatcagctctacagaccagagagcagctcgagagaaggaagctttctcaagggcttccggatagcaagacgctgcctcaccccacagccccgactccaccccacatgggaagggggccggtgggagctcctcctcttcacgggaacaggtggttaaagatggtggcccctcctctgctcccacggtgcctcaggccacctgcagggctgagcagggaccccctgaaaaacccgcaccctgacacaacctacgttttctggacgaggctctcctgctcctt

SEQ ID NO: 167752 - DNA, 490 bp, Homo Sapiens
tgtcgtggtgcactatagcatcatgagtggcaatgctcggggacagtttttatctggatgcacagactggagctctggatgtggtgagccctcttgacctatgagacgaccaaggagtacaccctacgggtgcgagcacaggatggtgcccgtcccccactctctaatgtctctggcttggtgacagtacaggtcctggatatcaacgacaatgcccccatcttcgtcagcacccctttccaggctactgtcctggagagcgtccccttaggctacctggttctccatgtccaggcttatcgacgctgatgctggtgacaatgcccgcctggaataccgccttgctggggtgggacatgacttccccttcaccatcaacaatggcacaggctggatctctgtggctgctgaactggaccgggaggaagtaaaattctacagctttgggatagaagcgtcgagaccacgacacagtgcgtaatcctctggc

SEQ ID NO: 167753 - DNA, 495 bp, Homo Sapiens
tgattataaatgaacacattgcaagttctaagcataaggatgacacagcatactgcactgatgtatcagcagactcgaacagtgtggtgaacggtggaaggctattgtccttatccaggtctgaggctctgttcaggaacctgaaggggaagaggagtggagtaggagaaggtggtagtagaaatggaaagggcaaaactattaaacacaatatcctacccacaggcagcacaagcccatctgcaccctggagggaccagagaaggagctttttccttggatcaagttagaagaaatccaaacaacagagaaaggtgagatgattcttggaaagataggagagttggaccacccctggctggagatacaacttaatcacagaaccattgctagaaaagcctccacactcaaaggtgtctctgtcagtgtgtaggagaaaccctaccacagtacctgggcttccaagactcatggggcacccaccatgcccagctt

SEQ ID NO: 167754 - DNA, 1402 bp, Homo Sapiens
gcactgtgtcgtggtccattaaagacggctctgaagcttacggcctgggagtacaaccagagagtgctgcggcttccccatctgctcacagtattagtactgcgactccagcacggatccgtgttccccgagggagctcaagtcgaagcacttgccatggtgaacagctccgggagcgacgcagcgttgtttataatgggccgcctgattcaccatcccatgacacgggtgcattcggcgatgccagagggtgaacgtaaactggtataataagcaaaatcacatccaaatttgttcgcagggatccaaagtgaaggcgaagccagtggcagaaccgacacctcaagaagtacatcaggggaaccaaaagaaagagacaaggaagagggtaaagattctaagccgcgttctttgcggttcacatggagtatgaagaccactagttcaatggaccctaatgacatgatgagagaaatccgaaaagtgttagatgcaaataactgtgattatgagcaaaaagagagattttggcttttctgtgtccatggagacgctagacaggatagcctcgtgcagtgggagatggaagtctgcaagttgccacgactgtcacttaatggggttcgcttcaagcgaatatctgggacatctatggcctttaagaacattgcatcaaaaatagcaaatgagcttaagctgtaaaggaagtccaaatttacaggttcagggaagatacatacatatatgaggtacagtttttgaatgtactggtaatgcctaatgtggtctgcctgtgaatctccccatgtagaatttgcccttaatgcaataaggttatacatagttatgaactgtaaaattaaagtcagtatgaactataataaatatctgtagcttaaaaagtagggtcacatgtacaggtaagtatattgtgtatttctgtccattttctggtcatagagttgtataataaaacatgattgcttaaaaacttgtatagttgtctagatttctgcacctgaatgtatgtttgatgctttgatttgaaaatgttcttccctgttatttacattctggtggctttttcaaattctcacctccatcatgcaattttgcaaattgtgtccagaattaaaagtgcatacgaaatagcctttacaattgctagcatggacctttacaaattgttttaaaatcttgtctaaatttaaaccagaagctgaaaaatagatcagctttattatacacaaaattattactgcttatctttgctcttttccttgttatcccgcaaggtttacttgagaagatacaaaatgtttacagtgttggcacttagagtttttacaattcaagtacatgatattcagtcatagcattgccttgagctaatctaggatgg

SEQ ID NO: 167755 - DNA, 1064 bp, Homo Sapiens
  misc_feature (138)..(153): n is a, c, g, or t
  misc_feature (169)..(170): n is a, c, g, or t
  misc_feature (183)..(183): n is a, c, g, or t
  misc_feature (210)..(211): n is a, c, g, or t
  misc_feature (214)..(214): n is a, c, g, or t
  misc_feature (219)..(219): n is a, c, g, or t
  misc_feature (222)..(227): n is a, c, g, or t
  misc_feature (230)..(233): n is a, c, g, or t
  misc_feature (236)..(246): n is a, c, g, or t
  misc_feature (248)..(272): n is a, c, g, or t
  misc_feature (274)..(285): n is a, c, g, or t
  misc_feature (287)..(293): n is a, c, g, or t
gggggtgaaaacccaaacccctttttgtcctttccccggggtttttcttggggaaaacccctttttgcccccggggtccccttcccctccggggggccgcccggcccccaaacaaaaaggtcttaagaaaattttccnnnnnnnnnnnnnnnncccaccaaattttttnnttttgggtgaatngtgtgaagaaaaaccaaaaagaaatgnnatnagaanctnnnnnnggnnnnaannnnnnnnnnnannnnnnnnnnnnnnnnnnnnnnnnntnnnnnnnnnnnntnnnnnnnacattccaaacgagcaggagttattttattttgcgtgcctgcagtcccccacgcagggtggcttcctgtccgaggacggagcaggcttggccgtggtccactccaatcagtctatcttcacagcagcatagatcttgcgaacaaacatgtaggctgcatagaagccgatggtacccgttagcagccagaaggacaagaccatgagggccgtgtagccaaagtagaggagagaggggatgaactccacgatgtccagcttgttaacgaaataaaagatggcataaaccaggacgtagaatgcagagcccccggagactaggaaatttctccaccaccagcggtaatcctctgcacacagctggaagtacaccatgacgatgctgatttgtgaacaggataccaccaggatgatgaaaacaaggaacaggaaaccaaagaggtaatagaactgattctcccagatagcactgaagatgaagaagagctcgatgaacatggcgccgaagggcaagatcccagccatgaggatgcccacaaatcggttcatgtaccaccgctgctcggggatctgccggggaatctggttggtgcgcacagggttgtcatatggctgctttcggaagccgaagtagtagcccaagtagacgaggggcagggagatcccgaaccacatgcacagcagagccaccatggtgggaaagggcaccgctcctgatgagtgctttccccaaatgaagcaattcaatacgaagcagatgccaaaaaccacac

SEQ ID NO: 167756 - DNA, 243 bp, Homo Sapiens
ccaggacttagctcatttcagttcagagaccggggactactgtgtgcgaaagggagacttggtagccatctttcctccagtcctacatggtgaccctgaaatctttgaagctccagaggagtttagatatgatcgttttatagaagatggtaagaagaaaaccacctttttcaaaagagggaaaaagctgaagtgttacctaatgccgtttggaactgaaatgagctaagatcctgtagagtc

SEQ ID NO: 167757 - DNA, 264 bp, Homo Sapiens
tccagatgctccagctcacccaggatctcacaggtagtctcctgagtagttgacggctagcggggagctagttccgccgcatagttatagtgttgatgtgtgaacgctgacctgtcctgtgtgctaagagctatgcagcttagctgaggcgcctagattactagatgtgctgtatcacggggaatgaggtgggggtgcttattttttaatgaactaatcagagcctcttgagaaattgttactcagtgagctggagcatctgga

SEQ ID NO: 167758 - DNA, 521 bp, Homo Sapiens
ctaggtatggaaacttaaaatgtgcaggagtcaaagcttaaaaatcaggtgtgtcctctttaaaggcatgtgcgataagcctgcagtcttaaccagacctggtaccagtttaacagttcattatacttctgtgatgagtggatctgttagtctggtagagattaatgttgaaatttacttgaattacagttatttgacaagcccactttttttggagtttggtgaggaagataattaaaaatgcccaactagtacaatgtggagaaagttttctgtttgcttgactaagggaaattgctcagaaaaagaatgctccaacatgggaataaggaccttcagtctcaggaactcatttttgggtgcagtttctacatttaaaaaattgacttgtgttcagtttgataaccagttcatttgctttagtctcagtgttttaaagaagtctcataatgttctacaaagacacaaagcttcaggcttatacaaaactgaaatgagaactgaaagtgagccggggctcc

SEQ ID NO: 167759 - DNA, 419 bp, Homo Sapiens
tatcccagtctatctcgggtctgcatgtcgcgccagcccaaaatccagaatcttcagttcacagtcctcattcacagccaggttgcctggcttcaggtccctgtgcacgaccccagcagagtgaatgtacttaaggcctttgagcatctgatacaccaggtactggatcttctcctcactgaactccatccccataatcttctgcagatccgtctgcataaagggcatcaccaggtagaagtcatagaagttagcgcagggagaaggctggggtgaagacacatccaggagcccaatgacgttctcatgctgcatgtgcttccagccaagaagaagctcccgggtaggcgcgcttggcgaaaatctcggactgaacaagggtcggctcagataccttgatggccaccttttcccctaac

SEQ ID NO: 167760 - DNA, 238 bp, Homo Sapiens
ctggtatctgtacttttgggtactctttacccacataaacttgggtttagccatgtgattttctttgctcaatgagacaaaagcaaacactagaggaagagattttaaccatgtctgctcttggggtccccctttctttctgtgattataatccttagtgaccactaagggaacaagactgtgctaatctgagggagaactgaggggccatgtggagaactgaaatgagaaagggtcc

SEQ ID NO: 167761 - DNA, 431 bp, Homo Sapiens
cagagactttaacttgactttgcttcattcacaaagaacagagttcaagaagcagtgcatcctgtgagaagtgtgaagtgtttgtacatcactttaaatatattacttaatatattctaagttgctgtgtggagcagtatactgttgttttaaaaatgcaagattcagacaaattttaatattgtctcattaaaataatttaaataatggtataaaatatctatatcattaaaataattttccatagtgtttagaaaccatgaaaaagaaaacatagcaggagaaaatatgacaggaaaagaaaacctaacaaagcccagaacccacagttaaccaaactagactgactttgttattacccattctttgttagtattggatagggaattaggataatgagccattaggcagaactgaaatgagccggggct

SEQ ID NO: 167762 - DNA, 313 bp, Homo Sapiens
acatttcagttcatcagacttgtaatacataatgttatgtcatcctcatacttactcgtgaaaggtgtgcttaagtgctaaagaataaaaagtgaagcaagacaggcccatgtacttaagaaatttaagcttacatggagaaatacccagctaggtgtaattattttagtgggaagaataatatttgcccttcagcttgtttagaatatattatcccatagatttcagttgtgtaattacctatgtctcatataaactatgtcttattattataggaaatgctgattgtacttggagaactgaaatgagcggg

SEQ ID NO: 167763 - DNA, 273 bp, Homo Sapiens
actttagcaggatcttagctcatttcagttccctgaaatgtgaggtatccctttgtccagtgtatccgtgctgtacagtatgtgtgtgtaggaaaaatcatagcatatacagggttagtggcagcatctgcaggttcaagcatctactggtcttggcgcgtaccctcagcagataaggggagagtactgcacatagataaggaggattttggacatactttctctttgacatacttagaagtatggagaaaaacctcatcaaactgaaatgag

SEQ ID NO: 167764 - DNA, 423 bp, Homo Sapiens
atgatgggattccttctcgtggagcaaagtacttgcagagctggcaccggaacacagtgtgggagaccaggtgggaggtagagaagtgagaagtggacacgggctcctctcccacctcctcctcagtgatggagacttgggaagggctcacttcagtgtgtcatctcgggctcgagggggactggcagcttcgggggcgactgggaaaagacatcaaattcaggctgattgtgatacttctcgtagtggatttttagtttctccaaagtgccgtgtgtgtacggacacagtttgcaccggtaggcgccatacccttgcttgaagatcctgctcgtctcctccacgtcattctgggatatgtcagcagactgctctacgtcgtgcacaaagtcctcagcgtaaccttgaggggaactgaaatga

SEQ ID NO: 167765 - DNA, 144 bp, Homo Sapiens
ggagaggtcagacgtcttcaaatatctgaagggccagtgtatacaggagacagcagactgcttctgtcttgctctaagtacagtggttccacttgattgaatcagctattgaagcttgtgtatccttcatgaagaatctagaga

SEQ ID NO: 167766 - DNA, 265 bp, Homo Sapiens
gttcagttccctccagggattaaaatcgggtctgatgctggccttcggtgcgcagccagtctttgatcgacgccttgatctgtgctgaaaccctcgccttagtcgggctatcaagcccatcgagcacgccattccagtgggagatgcggatgtcatcgatcgggccttcgagtgattgggtcaagctgattctggggttcaccgggtcctgcagaatcggcagcgtgttgtcgatctgatgagcgaggcaatgtcgggaaatcgc

SEQ ID NO: 167767 - DNA, 447 bp, Homo Sapiens
ctgccaacctggtatctacagtaaagttttctaaaaagttgtggacttgatatggggagacaaaaacgttgccttacaataataacttaacaaagtttcccacaatattaagtcaatatgaagcctgaacccgcaaagtcattttaagagcaggttctggtttggaagagtgatcataatgggagaaaaaaaggaaacaaaacattaagtctcccactaagaagcatataatacagaattccaaaaaacaaggcaaattctaattctcagaatggtaattaataaaatcaacaattacaacatgaatttattccagatgaaattgattttgtataatagacatacaaaaagtttaaaagaagtttaggatgctgaaagagataagtgaaggaatatgatccatttataaagaagatattataacacaaaaagtaggtggaactgaat

SEQ ID NO: 167768 - DNA, 626 bp, Homo Sapiens
ctcacttcagttccatgagtaggaattagagaagtggaaaggagaagggatagttttgttcgttgaggtaaaaccatatccagagatctttatcttctgaactttggcatgactaccttgagtggttgttgtacaaatgtttccggggctgatgggagagaaggagatggcacacacactcacaaaaatgagtagatggcacagaaatggtacaggttctatatttaaccatgcagtatattggggccccatactgttgtagaaaatgtgacttgctaggaattatcagaaggtttgttcttatattactcaactttcttcttgggtactcccaagatatggtagtggcaaaataaattgagtttaattaaaaaatctcaatagcttggaataacaacgttttagagcatggcacctttcctaaactcagttgtctaatctgctctagaggatgaatcactggctttcagagggaaaaaaacaatagagggtctggggcatacccagggttctagtgacttccaagggtgtattagtccattctcacactgctatgaagaaatgcctgagactgggttatttataaaggacaggtgtttaccggactctccgttctgcattgctga

SEQ ID NO: 167769 - DNA, 236 bp, Homo Sapiens
tagaggactaggcattcagtcctgaaaggtgggcagatacttagcacttaggtttaaaggattcagctggttaatgtgaaaacattcagctccagtattatgtctcaaagtcactgtgtcagtgaaccggcatccctcatcgtggaaagactgtcttaaacgagtgctttattctgtccgtacgtcttccacttgtgaattacaactgcaaaaatgtatctttatatagctaaggt

SEQ ID NO: 167770 - DNA, 339 bp, Homo Sapiens
tcagttcatgaagaaacccaatattgtgctgctatcctttggaaacttcttactatgattggttctgggtggcataggaatcagtttgaaatgatgccattaatgaccacatgtttggatttcttgactatgggtaaatgtgattagaacagaaatcccttaataatagggattctttatctttgtgtccctagtgcctcatagtatctggccctaattaggagctttagaagtgcttattgactgattgcttttttatctgaatcggccctttctatcccatcattatgataacatccatcttggtagtagtaaaactgttgcaaactgaaatgagcc

SEQ ID NO: 167771 - DNA, 285 bp, Homo Sapiens
caggatcctgactcatttcagttctgtgtaaaacagcagaggacgggacagaaaccgcagctgcagtggcttaaattgatatgttggagtcaagagtggcttttaggttcccttagtttaaaaaatcctattttaagtttaatcaagcaatgaatttccttctttgtggcaagcataaaatgtaaagacacatgagaattttataaagtgccgtttaaatgggaataggaacagtcagcttttggaatggggaacaaagtaactcatccagtggaactgaaatga

SEQ ID NO: 167772 - DNA, 306 bp, Homo Sapiens
atctacaggactaggctcattcagttctggaaaacaatcagttccggttccacagccagttagaggagtaagctgaacaccgctgaaccaggagtcaacggtctttacttgcccttggtatttccccagtgactcagaatgttgtgggatgtcagtattccaggaaaagcaaaaagtgaggggttgagaggatgttttgagaataaataagtttggagaatggtgactctctgttcctatcttggtgactcataatgcacatgaacttggtagaattttgagaaataacagagtagaaagatagga

SEQ ID NO: 167773 - DNA, 776 bp, Homo Sapiens
tatgaaagaagctgaggctcagcttgctattttcagttagcttcttcctaattaacctaatccaactgagtctactcaacatgctctgctgtgtgctctattccaaccatgggctggatgtgactttcataactgaaggtcaaaggcccctctttccagtataggagagaataccccatgaatgagaaagactgaaaaatatgaaagagaaagaatagtaacacaactggaaagaattaagctgtgtcttacaatgttggaatgtagattatgttgggaaaaaatggaaaatttccagccttctacactggaacccaaccccccctacagtgtcaggaaattagaaacttaaactgtcacaagaaatacaatgggctgtaaagaacgtctacaccacttatcagggagaaagccctgctgactgccaattctttacaagggctgtggctttagtctcaaaattaagatgcccagaactttggcatgagactttggaatggaacactcccagtgggtcaaaaatgccattctctcatgaattaaaaccaaaatgtgcccactgtgcctaggggaacagccttacgacccagagtggattagctggaacactggatagacaggaagatcataaagtcattagcaaagaaacagacttactggagtggataaattcgatgtctttaccattagggttgggtgctagaacacaaaatcggagctgaggtgagagactctgcagagtaagccaagaagagactccaatgtcactctgcttg

SEQ ID NO: 167774 - DNA, 462 bp, Homo Sapiens
gctacttcagttcctaattattaaaaataatgtttttttcaaatggcttttcttatcaaattttaaaaatagaatttgaggattaatggtggatttttgtcacccatgtgatctgtgcctccatgagcacgcatcattgcaagtttactggatatcagcactactctcttcttaaagttttctttgtcccctagtacaaccatgacacatggccacaagcacttgagcaaagatgtggcatcacccaaatagatattgccaagattttctatgtcttgtgagcaaacgacaaacacaaatcacgttggtaaaggagggttcattcaacattcttatatttagcacatggagcaagggtatgtcactgcgcatagcagatctcagaacaacacacatcaaatggtgacgcatgaggcttggacacaggacctctaattttgcaacaacaaataaaggccactt

SEQ ID NO: 167775 - DNA, 152 bp, Homo Sapiens
cgattatgctcatttcagtttcaaactatgtgattatccaaggttccttagccactaagaaaagaagcaaatacagtttctgagtatgtggcaattagcagaacctctaaattattcaaaagtagtaatggggagggatgtttctataaacc

SEQ ID NO: 167776 - DNA, 321 bp, Homo Sapiens
ccacaacttcaaatatatatgctgacaactactgtatattttcaggccagacctctctctgaactccagatactaacctactatgtcttttggatgtcaaacaggcatctcaaaattaatatgaccaaagccagactcttgaatttccctgcccctcaaaacctgctacttctacattcttccacatctcaattcacagcaattctgttcttcctaatattcaatcacaaaccttgggagtcctctttttttcacacacataccgcatccagtccattcatagctattcaatgttctagaaacatctggatgaactgaaat

SEQ ID NO: 167777 - DNA, 1167 bp, Homo Sapiens
tttcagttcacaactcaggcgctatgacggctgcagagacaggcgttcgaggagatcatcctgcagtataacaaatagctggaaaagtcagatcttcattcagtgttggcccagaaactacaggctgaaaagcatgacgtaccaaacaggcacgagataagtcccggacatgatggcacatggaatgacaatcagctacaagaaatggcccaactgaggattaagcaccaagaggaactgactgaattacacaagaaacgtggggagttagctcaactggtgattgacctgaataaccaaatgcagcggaaggacagggagatgcagatgaatgaagcaaaaattgcagaatgtttgcagactatctctgacctggagacggagtgcctagacctgcgcactaagctttgtgaccttgaaagagccaaccagaccctgaaggatgaatatgatgccctgcagatcacttttactgccttggagggaaaactgaggaaaactacggaagagaaccaggagctggtcaccagatggatggctgagaaagcccaggaagccaatcggcttaatgcagagaatgaaaaagactccaggaggcggcaagcccggctgcagaaagagcttgcagaagcagcaaaggaacctctaccagtcgaacaggatgatgacattgaggtcattgtggatgaaacttctgatcacacagaagagacctctcctgtgcgagccatcagcagagcagccacgagacgctctgtctcttccttcccagtcccccaggacaatgtggatactcatcctggttctggtaaagaagtgagggtaccagctactgccttgtgtgtcttcgatgcacatgatggggaagtcaacgctgtgcagttcagtccaggttcccggttactggccactggaggcatggaccgcagggttaagctttgggaagtatttggagaaaaatgtgagttcaagggttccctatctggcagtaatgcaggaattacaagcattgaatttgatagtgctggatcttacctcttagcagcttcaaatgattttgcgcagccggaaatctggactgtgggatgatttatccgattacgggcacacactcacggggacacagtggggaaaagtgctggtctggctaagttccctggctggaaa

SEQ ID NO: 167778 - DNA, 449 bp, Homo Sapiens
tagcaggatgccttatcatttcagttccctggaacatgacagcgatgacgcggcatcgtctcggcatcgtggccctcggcaggcctgggcctgcgaattgtcgctgaaggggtggagaccgatatgcagcagcggttcctcacccggctagggtgtgactccttgcaaggttacttattggggcatccattgccggccgatagcttcatggcgaatatccggggcgccgaacagccggcgcctgacaaaagcagtcagtgacgggtattcttggatccaaccctaaacatccggttgaatcgggaggccgcagccatggacaaagtcgtcatcatcacggggggcagtcgtggcattggcgcccaaacggcattgctcgccgctcgccaaggctatcgcatctgcatcaactaccagtctgatgaagacgctgcccgaactgaaatgag

SEQ ID NO: 167779 - DNA, 629 bp, Homo Sapiens
  misc_feature (396)..(396): n is a, c, g, or t
attcagttcatccatagtagtaaggcatatggacataaatgcagataaagggggctctgttagggggtttgaggaagttctaatctggcagcttttgttttctccatgaacaagtagcaaattcatcacaggagagggagattgaaaggaggaagtcaagtagtgggcgagtgccagatgaatagactggacaagtagcatgtgatttctgaaaagcattaaggacctcctggcagttagggatcgcgaacttgaagtgaaatcagtaagcattgttgtacaattttctctagccatgctcagttgcatgtttgctggtgtggagcagaacagagggttggatttaaccaggattgagttttagccaatcatgtgtgatcaaagagggcaaagganctcacttttttaaatggaatttttgaccatggaatttaagctgtgtaggaagggaagtaagaatatgaggaaagtgaggaacagtgacaggtggaaggattaaccacagaagcttgttggagttggggtactagttggaataggctgcatatagacaggagtggtaattggagatgggatgctgaactcaagattatgaaggattgttgggaataacaagatcagagtacaat

SEQ ID NO: 167780 - DNA, 271 bp, Homo Sapiens
caaaaggaaaacagcaaaaaagtttggaaaatttgcagcctgacaatgcaatagaaaagaaaatcccattttctgaggagaaattcaagcccactgcagaaatttccataagtaacaaggagccaaatgttaatcaccaagacaatgaagaaaatgtctccagggcatgtcagagacttttgtggaagttcctcccattgcaagcctggaatcccaggaggaaaaagtggttctgtgtgccgagcccagaactgaaatgagaagggatccg

SEQ ID NO: 167781 - DNA, 510 bp, Homo Sapiens
  misc_feature (150)..(170): n is a, c, g, or t
tatacagtccatgggaattataaatgatcacaaaatactttgtcacaggaaatctggagaaataatgactttggcatatgtataagagaagtatctctaactgttaagtctaaactaaaagcttgttacttttcggtttggtataacccnnnnnnnnnnnnnnnnnnnnntagaagtaatgatttgttttctcaggtgtagttgtatttgactgactctattgtaggaggacacgtttaagactgaatggttggataacggtaaagacgtcctttcaatggagagttgaatccgataggttgaagttttggatattgaatgaaaagagaaaagagagccgggacaagctgaaaattcctgtggttccaactactggggaggctgaggtgggaggatcacctgagcccaggagtttgagactacagtgagctatgatcatgccacctgcgttccggtctggatgacagagtgagaccctgtgtcaaaaaataagtaaataaaaagaggaaa

SEQ ID NO: 167782 - DNA, 362 bp, Homo Sapiens
gcctagaggaccggtcattcagtcatctttcatactatgaaggtgcaaacagctatataattgctacgagaatattactgacaacaaccctacataatataaaacacacgcgtagaagtggttggagctgcatgtacaggatcataaatagttctgctagtgtttttgtccaacggctgaagtttttacttcttcaagttttttgtagcacattttccttcgtttaaaatttaagacggtaaaattttttgaagaatttactgtcaagttgagctgcattagtatcataacttcagaatctactttgccagtacaggaaagctctacccgaaacactgataaagtgcgtggaacttccccct

SEQ ID NO: 167783 - DNA, 403 bp, Homo Sapiens
taagaagataagaattatgtgggttctgtttacatgttatatgttctgaacaacccaagataaactacagtattcgaatataataactggttagcaataactcctgaaataacattctcaatcacaaagcaaggtgcaaacagcaaagccctcaagctctcaacacttggttctgtggcaagcaaacactgtcatcacttcatctgtatcaaatctaacagtgcataaaagtatccagcccctccccaaaacctccagtctaacctcatctccaaaacttcttgcccgggtctcttcgtatttcttcttccattcatttgcttcaatctctttagtaattatctagagtacaataaagcttagttttacccaatctattacaaattgcatttaagactgggaa

SEQ ID NO: 167784 - DNA, 285 bp, Homo Sapiens
cacctacaggacttagctcatttcagttcactgaaaactgaggtggcagacagacttgatgggtgctcaggagaagtgaagaggtattttagagtcttattactaagacactcattgacttagaaaggctataaatcagtactgtggctgaccttgtaaattacaaaaatatatgtacctgaccccatatttcaatggcagagacaatatatcaggttttttcccctctgctgttaaccttgttcagacatatggaaatcctgaaaactgaaagtgagccggggc

SEQ ID NO: 167785 - DNA, 733 bp, Homo Sapiens
actgatagctccattccagggtactgatttgaattcagacttggcagtgctacagaatttaaatatatatatgtatcgtccaacaccaatatgacatcctacacttcactttccggtttgaattactcacaaacgatgtttagttctttacaattgaatgaagcacaaactaagcatttggtggtttactttatttcaaattcagctgcagtttctatatacaaatccccttgacctcatctcatttcctgacactaaaatcccttcatgagtgccttgtttttgccattataggtgtcttctctgctctcacacagggtcaagaaactgccccatacaatgtgatgatgggtgtgggcttgcagtgttagcttcacatggtggtagagctctgggtgtgaggaaccctgccagggccattagctctgttttttccccgagggccccactgctccctgtccactgctactcgcttgttgctctgcatagggttttcttcccttggtccactctagtatgtctcatacacaggaaatctgactttcctgagtatgtgcctgctactaagggtgacaagacaataacaagaagtttccttttgccctgttccttttttatccaatttaatcaaaaagttgaataaggggcctgcagggcctatagtgaggaggtttataaacagtgtaaaagacattctgtatggacatggatgatcctgagagtaagcacataa

SEQ ID NO: 167786 - DNA, 507 bp, Homo Sapiens
ggtctcatttcagttctcttcagagctacttgcctggatagactgcagaggggtcagtgcctgtcctccccagagagcagaggcctgtcctgcctcccagttcaaacaaaatgattattcagagttcatggagttgggtaaggggaaggcactaactctccactgaggtacttcatatccatttgtttctgtatgtggacatacataaacatctcctttatttcaaaacaacccagagtgaagaatcagtggccccatttagacattagaaacttgaggctcgataaggctcacaacttcttcaaggctacacctgtgtagccaggctttaacttaagtgggcactctttccaatcatgccattactcagcagaatacaacaggggaagaaacacataatcaagaatagaaaaattaaaattaagtgaatgatctaggttgggaggttttcaaagaaaagtaatataattatcaataggaaacattttttaaacagtgtagtttgag

SEQ ID NO: 167787 - DNA, 243 bp, Homo Sapiens
  misc_feature (77)..(77): n is a, c, g, or t
gagcctggagctgggagcgtggcaggctgtgaggcgagaaggcgggaccagctcgtagacttcgcaagtgttacctngatgtctgcattcttttagaaataactaaggcttggaaatttgaggaattagttaaaattagatttaagctctctttggatgccagtggggcatattggttttgttagtttttgttcattctttcccttccctttgtttatataaacataactatagaagttacaa

SEQ ID NO: 167788 - DNA, 352 bp, Homo Sapiens
taggctttggtggatttctagtggatttctactgctgtttgttttcgttttcaggtgttaacagaatggggaaaggcagcaatggagcagtaagatcaaaaatgattttttattgaagatgagggttctattgatacatgatgggcggaaaatagatagcaggaaggcacttccccatccccctcctcttagcaagctactgcgatttgtacagtatttctgttcttcatgtcattgtgacaaaggacttgagatggccactcagcttactattgaccttcccctgtactgactactttgatgacgggctggcccatcaatgaccaactaattggaactgaaatgatccgag

SEQ ID NO: 167789 - DNA, 526 bp, Homo Sapiens
  misc_feature (46)..(46): n is a, c, g, or t
gattcccaccataccctacccagcgccaataacagagggaccctgnagttgtgtacacaagatagcagttcagtgcttgcacacatactagttgagaagggaaatcagggctaatgaaacagctcaactgtctggcagagccaggctccttctgccatgatacagtttggatgtttgtccctttctaatcttatatggaaatttgatccccagtgttgaaggtggggcctggtgggagatgttcctgttatcgggatggatccttcatgaatagcctggtgccatctttgtggtaacaagtgagttctcacttgattagtttctgtgagaactgtttgttaaaaagagcctggtggcacctccctcccttcttcctccttctcttgctatgtgatgctgctgccctttgccttccgtcatgagtggaagctccctgaagcccccaccagaagcaaatgctggcaccattgctgcttgtacagcctgcagaactgtgagccaaataaacctcttttctttataaatt

SEQ ID NO: 167790 - DNA, 571 bp, Homo Sapiens
agcccgctcacttcagttcttactaaatatgtgaatatttactggattgtatggatcctatgaataattactgaataattattgtgagggcttttattggcagtgctgaaaactcatccctttgtgacctcaagtaacccatgacactttgtgaacctgcagttttttcatttagaaacttgacagattttcattctgacacagaatgtcaggtctcccagaccctagaaaatacattgacttaaagcctttgatacatctcaaagcagtatccttacagtgtcactggaagatggtgcgggctgcagagagggatgctttcaaatgggattaaccagtcctccttccttcacttccacatgaatgctgggcagcccagggtcaacccactgcaccctcaactcaggcaagtccagcagccaatcttaggagacctgggctacagaacagtctctcaagttccaggctcacaaaacctaggtggggatgaaagctgagaaagcgaagaggtggttcaggggatcactctttcctacttgttcctctcacctcaaactcaccttctactgca

SEQ ID NO: 167791 - DNA, 604 bp, Homo Sapiens
aatttcagttcttgctcctgtgtagtatcatcgcggtgggtgtttgcccactgtccaaaggactcctggatgtgcaagtggctctgtgtgttggccaggcgcttcttatctcgggagaagaagctaaacctttggaagggaaagcaaacacagaaatgagagctgaccctttgctgtgacaagtcacgttttttgcaatgccggagacatatagcagcaaacttagaagggagcaaatcaattcaaggtgtgaaagacaaagttgggggtgcaggtcaaagttattccaagaaagcagcagggtattctgcgtgtcatttggacacggtaccttggaggtcacgcggtatgggcaaggcatgcatgctgatgtgatgtgtgaggtgtcttccacgttagccgctatggaggatttatcccgttaccagtggaaatcaaaagctgctgaaacaaatcttgggtttctttaattaccctaatgacgcagagaaaggaatacttgaaaaccgtgtggaatataagaggattctgttgtaaacggatgagtatctctaatttaaatagttctgtatctgtttaatgtcagtcaggaaactgtggccag

SEQ ID NO: 167792 - DNA, 499 bp, Homo Sapiens
  misc_feature (472)..(472): n is a, c, g, or t
  misc_feature (480)..(480): n is a, c, g, or t
ctccatgacaagtttattttcctttacaagtccagctgtgaagagacttcttgggtggaaacagggcgatgaagaagaaaaatgggcagagaaagctgttgatgctttggtgaaaaaactgaagaaaaagaaaggtgccatggaggaactggaaaaggccttgagctgcccagggcaaccgagtaactgtgtcaccattccccgctctctggatggcaggctgcaagtctcccaccggaagggactgcctcatgtcatttactgccgtgtgtggcgctggcccgatcttcagagccaccatgaactaaaaccactggaatgctgtgagtttccttttggttccaagcagaagggaggtctgcatcaatccctaccactattaagagaataggaaagccctgtaacttcctcctgtgcttgttccaagacacagcgaatatgaatcctcagcacagcctttttagctcagttnccgtgaantttaggacaaaatgaaggc

SEQ ID NO: 167793 - DNA, 483 bp, Homo Sapiens
  misc_feature (446)..(446): n is a, c, g, or t
  misc_feature (468)..(468): n is a, c, g, or t
gcgatgaagaagaaaaatgggcagagaaagctgttgatgctttggtgaaaaaactgaagaaaaagaaaggtgccatggaggaacttgaaaaggccttgagctgcccagggcaaccgagtaactgtgtcaccattccccgctctctggatggcaggctgcaagtctcccaccggaagggactgcctcatgtcatttactgccgtgtgtggcgctggcccgatcttcagagccaccatgaactaaaaccactggaatgctgtgagtttccttttggttccaagcagaaggaggtctgcatcaatccctaccactataagagagtagaaagccctgtacttcctcctgtgctggttccaagacacagcgaatataatccttcagcacagcctgtttagcttcagttccgttaactttagggacaaaattgagccttcacatggccattntaacgggcattttttcccaggnttctttttccaggaa

SEQ ID NO: 167794 - DNA, 739 bp, Homo Sapiens
accagctggccagaccacggggtgcctgaggatcctcacttgctccctcaaactgagaaggagagtgaatgccttcagcaatttcttcagtggtcccattgtggtgcactgcagtgctggtgttgggcgcacaggaacctatatcggaattgatgccatgctagaaggcctggaagccgagaacaaagtggatgtttatggttatgttgtcaagctaaggcgacagagatgcctgatggttcaagtagaggcccagtacatcttgatccatcaggctttggtggaatacaatcagtttggagaaacagaagtgaatttgtctgaattacatccatatctacataacatgaagaaaagggatccacccagtgagccgtctccactagaggctgaattccagagacttccttcatataggagctggaggacacagcacattggaaatcaagaagaaaataaaagtaaaaacaggaattctaatgtcatcccatatgactataacagagtgccacttaaacatgagctggaaatgagtaaagagagtgagcatgattcagatgaatcctctgatgatgacagtgattcagaggaaccaagcaaatacatcaatacatcttttataatgagctactggaaacctgaagtgatgattgctgctcagagaccactgaaggagaccattggtgacttttggcagatgatcttccaaagaaaagtcaaagttattgttatgctgaca

SEQ ID NO: 167795 - DNA, 472 bp, Homo Sapiens
tttcagttccttctgcagcctgttactctccacaaagtgttaccagtttacaaaaataagtctttccgccttaaatcattttggaaataagtaatactgcatctgactctggtggctgtattagctaggaaaggtttgtaaatggtgtcagtgaggtggggaaaggaagtcttccctgtcacatatgcaggttcgttttcattctagggcagtgcccaggaagtatattgatagcttggtaggtacaggaaaaacaatcatcattatttcctctgttcacattttactggtcttaattaacaggtaataataatacatgtacttttagcctgaaaccctcttccacgccatgcgtaacttgcgggcgagagaagaatcctccaaacgatggagtagccagtggtaatacaaagcagcggagaaccagaaaggctacgagttactaaaggccttcagtgcaacctgaaatgag

SEQ ID NO: 167796 - DNA, 164 bp, Homo Sapiens
caggtagaatattgccatcttcacagatatttctattgggccgtgctgttctatagaattatttacaaagtgagtcaggtctaccacagtggagaaaagataatatttaggcagtacgtcatgtacctttaacacgccccacccaaggatcattacctggccat

SEQ ID NO: 167797 - DNA, 580 bp, Homo Sapiens
tagagcgatccccgtgtcatttcagtttcccaacagaccactaccaaaccaccataacagacagtctgctagaagagaactgatcaggccattatgtcaccggacaacaggacaatcatctgagttgggatgctgaatcacggcaactccaagacatctgggatttgtttttttaccctcacattggatacaatctatggaatattactacatttagttcatttgtaatttacaatttttgatgactaaaattggaaaaggattagtacattcctactggctttacatattagtattgggctgtcaccattacccagattatttaaaatgtaaattttctttactcactagattggaagctccttaagagcaagggctacttctgtattattcatcttcatgccacgtcacttagaacctagtagatactcaataaatacctattgagctgaactgaccttgtctgagtaaaagtgagtccaatacacaagttactagattgtaggttggtttgacacaaagcttaattatctgaaactgaaaatgaactgaaatgaggccgaatcctggagagtcgcct

SEQ ID NO: 167798 - DNA, 215 bp, Homo Sapiens
ttcataagatgtattagtagtttgcagttcaatattagatgcagattctagtgaacttgtcttctctatacttgaattttcattaccatttgtggtgaaatgaggacagacaggagaatccttcgtatctggttgctgggatcctactgaaactattaatatcccttctaaacgcagaggctgcttgaactgaaatgagcaaagatcctgtagat

SEQ ID NO: 167799 - DNA, 440 bp, Homo Sapiens
tctaagaagaagccctagacacagctcacaccatggactggacctggaggatcctcttcttggtggcagcagcaacaggtgcccactcccaggtgcagctggtgcagtctgggtctgagttgaagaagcctggggactcagtgaaggtttcctgcaaggcttctggatacaccttcactaactatgctataaattgggtgcgacaggcccctggacaagggcttgagtggatgggatggatcaacaccaacactgggaacccaaattatgcccagggctccacaggacggtttgtcttctccttggacacctctgtcagcacggcatatctgcagatcaccagcctaaagtctgaggacactgccagtatagtactgtgcgagagaccggtgtatagcactgcctggatcccatctttgcccactggggccagggaacct

SEQ ID NO: 167800 - DNA, 836 bp, Homo Sapiens
  misc_feature (702)..(702): n is a, c, g, or t
  misc_feature (704)..(706): n is a, c, g, or t
gggagcatcacataacaaccagattcctcctctaaagaagcccctgggagcacagctcatcaccatggactggacctggaggttcctctttgtggtggcagcagctacaggtgtccagtcccaggtccagctggtgcagtctggggctgaggtgaagaagcctgggtcctcagtgaaggtctcctgcaaggcttctggaggcaccttcagcagctatgctatcagctgggtgcgacaggcccctggacaagggcttgagtggatgggagggatcatccctatctttggtacagcaaactacacacagaagttccagggcagagtcacgattacgacggacgaatccacgagcacagcctacatgaagctgagcagcctgagatctgaggacacggccgtgtattactgtgcgagagacacagtgtgaaaacccacatcctgagagtgtcagaaaccctgaggcagaaggcagctgtgccgggctgaggagatgacaggggttattaggtttaaggctgtttacaaaatgggttatatatttgagaaaaaaagaacaggagaaacaagtacatactctaattttaagataaatattccatttcaagagtcgtaatataagccaaattcacagagtgggaaaaggccacactcaataaagttggatacaaacatttccatggaaggtgcgtactggtcaaaccncnnnccacacacaacaaccccaccaaacatggtcgggccgccctccggcccctcgaagaaagcttttcttagaaccatttcctttttgggcggcccgggggcccccagtaagggtaaaagtgggaccattgggt

SEQ ID NO: 167801 - DNA, 969 bp, Homo Sapiens
tatgagcagaagacacgtgagctgcaggagctggcccgcaagctgcaggagctggccgatgcctcagaaaacctccttaccgagaacacgtggctcaagatcctggtggcgaccatggagaggaaactggagggcagggatggagctgaaagcctggcggcccagagagaggtccaccccaagcagcctgagccctcagccaccccccagctccctggcagctcccctccacctgccaatgtcagcgccacactggtgtctgaaaggaataaggagaacaggacagactaactttttaaatgatatgaagaaatcagaggtgaaaattgtacattgggaatatatttatgcaaattttattgaaatttattgtaaataaagattttctcagtggtctagaaaatcagcttgaatgtcattcagcatttattgaagaaggatgacatcccttccacttattgcacaaacttggtagctttgagacaaatacagtagcacagtccgtttgaagatttgtccaaaaaattagtccatattttagtggctcagtgtcaagagttccctccctgtgcccccactgttgcttctgcagtgatacgaaggatgaatgcttaatttcttattagtcagaaaacttgaatgcaacagttgggcattcaaaaataatccagagaggtcataacctacttagccatttgagtgtggctctggtgtctgctaaaaaaagtagctattgaaaaaacagtgagagctatgatgtggttcactcattctagaagcattttcattttcctcccgaaaacccccccagtgcctcaccgagccccggaccttcacccaacacggctgccacgctcaaatgggcctgattcaaactcccaggtacgtccctggcaccagggagtaggataagaaaacctccagaagtgaaactgatgaggaagtgacatttaatcacttcaaaaccga

SEQ ID NO: 167802 - DNA, 491 bp, Homo Sapiens
aattcagttcccagaacgagcagtatttccgaacaggtgaggccaaacaggagaaagtttcaactacactgaatgtggctcaggcttattatgcccgtgatgctctggctaaaaacctctacagcaggttgttttcatggttggtaaatcgaatcaatgaaagcattaaggcacaaacaaaagtgagaaagaaggtcatgggtgttctggacatttatggctttgagattttcgaggacaacagctttgagcagttcattattaattattggaacgaaaagctgcaacaaatcttcattgaacttactcttaaagaagagcaggaggagtatatacgggaggatatagaatggactcacattgactacttcaataatgctatcatttgtgacctaatagaaaataacacaaatggaatcctggccatgctggatgaagagtgcctcagacctggcacagtcactgatgagaccttcttagaaaagctgaac

SEQ ID NO: 167803 - DNA, 661 bp, Homo Sapiens
gaccccgctcacttagttcccctcagactcgccaaactcagattcagtttctcagtccagcacaggaactctgagttccacctccttgcctcagaactctaggtcgtcattgccatcagacttacggactatcagtctgcccagtgctgggcagtcagctgtctaccaggcctccagggtatctgcggtttccaattcacagcactacccacaccgtgggagtgggggtgtgcaccagtaccgactccagccactgcaagggtcaggagtcaagactcagacgggactttcctagggcttctggatttgggcaaacagaactgaatgagcccatagctgcttcctgccagctgcctctggaacctaggccgagcatattgctgaggaacggggggtacaaggtgccagaggattgggtctggtggacaagaaacaagacttgtggtcacaatgtgctctggccttggagaaagctgtaaatcttgtctgaagcagagactataaagaagtttctccctgctgtcaagggtacattgttgacaagcaaatggtgtttcggttagtaacggttctaagtgcaatgagttgtgttgaagcctccgtctcccatccttgcctgtagcccgtagtcacttgtgcagtgaggacatctttttaaatt

SEQ ID NO: 167804 - DNA, 479 bp, Homo Sapiens
tgactctagtggaccccgctcatttagttctaaacgctgcaaaatcctgtttgtataataatttgcagccttcactacagaaaggtctcttaacgccagagaaatttactgtttcatgaagagtcttctcctcttgacagtattcgcaatatgtaactatgcaatgcaacttcttatagtcatctgaacaagttttgctgcagaactgatgcactttgttctcccattccaggatttctggttttgaacaaaaggaatttttgcagtagttgcatttcaactgaatatcacttggcgctacaaactggccatttggagatgactgcatacttagagcctgaaatttagcctacacaactggaattgcaaaagttgtacagttttccatcaggcattgtggcttggtattgaggtaaagagtttcgcttacaaaaatggcaaataattcccaaactgaaatgaagccggtaccgagctcg

SEQ ID NO: 167805 - DNA, 590 bp, Homo Sapiens
acttctcagcttaagcaggtctgggcatgtttggcaacctggcctgcataatgaagatttccataatttggtgttcatctatttattcagtttttgcccgaatgatgaaggaggaagtttacatcttgctccctggggacaggcagagacagtgtgtgcacttccatcctacagggaccagatctgaacagtctggagagaggagctgtggtggcagcagacagatctctgcttcaggggccaggtgtctaggtgagacgccacagcgcggcagagagaacagaggcttctctgcatgcctgccagggaattggcaccatgtcaacagaaatcttaggttacaggaacaggaaccagccctgactgacgtgtgcaagcccggagctttcctttctccttgcacttcccacatgttccccacataaccagcaaccacagagccaccccccgccacccaacaactccctcctgagctagaaacttgtaagactcagctaggagtctgaatggttggatatctaaagcaaagaataatctagtttgtaacatgggaccaaaggaagaactgaaatggccgagtcctctagccc

SEQ ID NO: 167806 - DNA, 234 bp, Homo Sapiens
tagaagttgctagtatccatttgatcagcagggaaaagagaagcaggactttgaagaaagagaaggcaaacataatgaaaacttgttatactgttcataatttacattaaattacattaacgtgggtatatgatatgtatgtacatgttaattagttcttacctaagccccaatgagatacaattattatgattagatagagccctctaaaggtgaactgaagtgagccggggc

SEQ ID NO: 167807 - DNA, 376 bp, Homo Sapiens
tgagccccgctcacttcagttcatatacagagaaaccaggaaggtgcatgtacatgtgaatagagccaggtgtaaggcatggcattagggagtgctaggattggagattgaggtgtccatgttctgtcttaatgtattcagattcagttaaaaagaccaccacaatttgtggcaaacaaatcaggaatgccgttgagtcactagtttgcaacctcaggtataaaaactagtgtatgaaaaattatggcatagctccatatttatagtgaaatttatagtgaaatggacaaaaatgctaaaagtccatcatgcttctatatgtgaactgggatatagctggtcaatcattggaaaatattttactataatgtttaag

SEQ ID NO: 167808 - DNA, 296 bp, Homo Sapiens
gagccccggctcactttcagttcacacaagtgtaggccacactttctggcagattagatagaatctcatacatctcatctaagaaaacaaaaacctaccatgatgaggtcctctgaagaatgggagagaggaagaagaggaaactattccactgaacttactataaagccatatgttgggaaccacattaagattttaatgtcctcatggatatgacacatattgatctcaaaaagtggcattattaattaacactaatcctgaatttggttattgagaatcagggaactgaaatg

SEQ ID NO: 167809 - DNA, 384 bp, Homo Sapiens
tggaccccgctcacttcagttccatcaggtcttagcaagttccatcaccacgcacagagtgtggcagatcacgtcttccaggatttctgatagacacaatccatttttaatgccttgtgtcaggcatccctgctgtcctctaaccatttttaataataagacaaaagtgatattttagggtaacagttaataaataatgtgacttatccaatcacacctttcactaaaatattattatcttttggcagattcattactgtagaggcatcaggatctgatgaaacattctctaattctaccactagtacattttccagagttgtctttcttttaatttaattctcccactctgaaagcatactgtccattgcaaactgaaatgag

SEQ ID NO: 167810 - DNA, 320 bp, Homo Sapiens
cccggctcatttcagttcttagagttaccatttcaatctccacctacctgacttgcatctatgcctcaatcggttccaaactctagcagcaaagagggttgcttctactgggccaacaaacaatgccagcaagactaacagaccaactaatagagaaagttagagagaccaagaaatagcaaaatcaaaaatccatttaatcctcttctgcatgtttatgtctctacttcctgacaaagaacaaatataggactaaagaaagaagcatcttacctgtcactctgcttggaactgaaatgagtcggggctccactagagtc

SEQ ID NO: 167811 - DNA, 745 bp, Homo Sapiens
  misc_feature (286)..(286): n is a, c, g, or t
gctcacttcagttcctaagtgaaagtttgcctcaggattcttttctctctttatatgggaaagggaaagaggtgctttctggctgtagatactgtaagctaaacaatgatgcgaaagagatgaacatctaggttacttaagaaatcaattatgaagtaaccaatcaaagattggtagaaggtccaggatcctttcagagaagaatggagaaaatgtgaaatatgagctgaggaaagtgcgatgctcgtgctagaagttcttaacttgtttcagacaataccgagcntgtgtgatacagttcaatcaccctaaactttgggaaatagaggattctgaagttttctgaactcagagaggtacattttctgggtggaaatcaaaagaggagcattaagtattcaaaagacaaatttgagaagcaataagtaagactgttggaaacagtataggaccccagtgtggcacagaaggatgcttcagcgggagaagcacagtgcagaggaggaaatacgggtctttgccctagacacttcactctcaagtctctgacttgtatgcagccacaggacatacttttggatttgtgctattttcttaattaaaatagtctggaggcatatattcatgtgtggaaagaaaaggcagagaaaattgtgaggaggcagaaagcaaggaataaagaaaagaaaacaaacatcaaaggaaagtctgtaaatgaagaatagtagcaaaactgaaagtgagt

SEQ ID NO: 167812 - DNA, 274 bp, Homo Sapiens
tgggactgaaaagtttgcttcatgccttttctctgtcctgtcccacagcctttacaagtcacaacatgtgtgcaatagcctcagttaggtcagatttgactggaatattgtgaagcatatattgtgaacaaaattaattttaaaaaggacacttctatatgaagaatatatagtaccttactaaagagtttttctacactttcctcataaatgacctatttagcactagtctaaacactgcagaaagacaaatcttagataggggtccactaga

SEQ ID NO: 167813 - DNA, 391 bp, Homo Sapiens
gagccccgactcatttcagttccctttttactcgcctaaattttttgaggcaaaatacagagaaggaaaaataaacttggagacagctcagagagattgagaacagccataagaaaaagttgccaggctgctgtccagccctgaagtcataaagtagagaagtctttggcttttgtcattctgccagctgtgtaggctgctttatttataagaacataaactactctttaaatacatttcacttattttaagaaatttacattctgattttaggaaatgagaattcacagtttaattctaaaatttggtatgtaaaaaaatgttactttacaaattttactgactcctatttttatatattttttaggagctagacaaaatagtggcatat

SEQ ID NO: 167814 - DNA, 322 bp, Homo Sapiens
gccccgctcacgcagttccttgaatatacaagcattcattcagtagatatatgaatgaatggattaatgggtgatttcttatattcagatgattcttaaccagtaagggtcctgaacagcagtgcatattaatgttaactcaaaacttaatggcaaatttataaataaacctgaaacctcttacatagccaaatacaaatgtatcagtctacctaggaaagatggttaggtacttgctcataaacagttatatgtttatgattaaacaaaatgattttactgttcataaattgtgcttttgaactgaatgacccagtcctct

SEQ ID NO: 167815 - DNA, 449 bp, Homo Sapiens
agccccgactcacttcagtttggaaacaactcacagacagttatataggtgcttcttctctctggcatccaatcttggaaggattttgccgtgaaaaaaaggcctgctatctctctggcacttaacgaatctgaagtttataaaacaaccatctacccttttgagagtcattaaaataaggtgggaaaatctttggtggcctgtttatacacattttaaaaacaaagagatctgtctagaatatattctcaacacaaagcctttcttcctaatatgtgcttttaactctgatctcactgaaactacatgatttctacagtcttgcatatctggtaagaataaagttcacacagaataatattcttatactcattatttttactgcagtatgcagctcttactatgaattggtggttattacttgaaaaaggaaaacaaaacatcactgg

SEQ ID NO: 167816 - DNA, 1743 bp, Homo Sapiens
cggacgcgtgggcccgtcggtcgtgcgtgagaggaaagggaaggaggaggtcccgaatagcggtcgccgaaatgttccggtgtggaggcctggcggcgggtgctttgaagcagaagctggtgcccttggtgcggaccgtgtgcgtccgaagcccgaggcagaggaaccggctcccaggcaacttgttccagcgatggcatgttcctctagaactccagatgacaagacaaatggctagctctggtgcatcagggggcaaaatcgataattctgtgttagtccttattgtgggcttatcaacagtaggagctggtgcctatgcctacaagactatgaaagaggacgaaaaaagatacaatgaaagaatttcagggttagggctgacaccagaacagaaacagaaaaaggccgcgttatctgcttcagaaggagaggaagttcctcaagacaaggcgccaagtcatgttcctttcctgctaattggtggaggcacagctgcttttgctgcagccagatccatccgggctcgggatcctggggccagggtactgattgtatctgaagatcctgagctgccgtacatgcgacctcctctttcaaaagaactgtggttttcagatgacccaaatgtcacaaagacactgcgattcaaacagtggaatggaaaagagagaagcatatatttccagccaccttctttctatgtctctgctcaggacctgcctcatattgagaatggtggtgtggctgtcctcactgggaagaaggtagtacagctggatgtgagagacaacatggtgaaacttaatgatggctctcaaataacctatgaaaagtgcttgattgcaacaggaggtactccaaagaagtctgtctgccattgatagggctggagcagaggtgaagagtagaacaacgcttttcagaaagattggagactttagaagcttggagaagatttcacgggaagtcaaatcaattacgattatcggtgggggcttccttggtagcgaactggcctgtgctcttggcagaaaggctcgagccttgggcacagaagtgattcaactcttccccgagaaaggaaatatgggaaagatcctccccgaatacctcagcaactggaccatggaaaaagtcagacgagagggggttaaggtgatgcccaatgctattgtgcaatccgttggagtcagcagtggcaagttacttatcaaactgaaagacggcaggaaggtagaaactgaccacatagtggcagctgtgggcctggagcccaatgttgagttggccaagactggtggcctggaaatagactcagattttggtggcttccgggtaaatgcagagctacaagcacgctctaacatctgggtggcaggagatgctgcatgcttctacgatataaagttgggaaggaggcgggtagagcaccatgatcacgctgtaagtgagtggaagattggctggacgaaacatatgactggagctgctaagccgtactggcatcaggtcaatgttctggagtgatttgggccccgatgtttggctatgaagctattggtcttgtggacagtagtttggccaacaggttggagtcatggcaaaaagcaatgcacaaggacaaccccaaatctgaccacagagcagtcaggaactgggtttccgatcaaagagtggagacagagtccgaggcctcaaaaattactattcctcccaggacccgggcgttccacaggtccc

SEQ ID NO: 167817 - DNA, 339 bp, Homo Sapiens
ggctcacttcagttcaataattatttaaggatccaccttgtaaaagcagtgctaggtctgtaaaggcaaaatgtcagttcacaagctctaccccaccaggaatttcatacttacttgaagtaacatggcacagaggtacatcaaataactataatacaaggtaacaaataataattgccatgagtagaaaagccagtaaggtgctttctcttaagcttcacttttgggctcacctggtctcaatttttctgattctctatgaaaacacacctttagtatttattactttgcttgttagggtggctttttaaatttgagaatcagaaaaactgaaatgag

SEQ ID NO: 167818 - DNA, 434 bp, Homo Sapiens
  misc_feature (307)..(307): n is a, c, g, or t
tctacaggagtctgagctcatttcagttctgtatagaaagctgatgatcttattgaaattttcatctccaatgctccaggatccatccaccataaataccaggtcagccttggccgccttacatacttcttttgctggtggaatggttggaggaaaagttggtggtcgtgtaggaagtgattgtgttttttccattatgctcacactaggtccttcaatctcctggagctttgtataaacactgattttatattcagaatcaggctgaagtccatagaagcaatgcctggttgtccctccacccacnagtggattcttgcttctgcctatcctggagggattctataacaaccctataggctgtggcatggcgatgtacctgccagtgggcacacaagctggtcatttcaacatgtttagcttggagattgaag

SEQ ID NO: 167819 - DNA, 744 bp, Homo Sapiens
gggattagtttaacagtgcactggtgaagaggacatgttagagcaacataagtaaactacttgaaaatagttgtatatattacctaacttctagtgtagtactggttctaacaagtaacaagcaagttttaaaattttaatgttttggctttcattacttcatcttaattatagctttgtatgttactcttatttaatataatctctattgtattgatttcttctgtatttaccttttggattttgtaaaacagaagtttaagaccacaagttagaagaaaggtcacatatttcaaacacaactagatggggctctgaaagatttgtatctctgtgcttgaacttgaatggccttaaacctgtttcagctttaacagtagaattttacttgggcaatatttgcccattctggtgtaacttatgtgactctagtgcttaacagctgccgttgaagctaatattcagttctgtagagttagaataccttttgttgttgaagatgtgaatgaagtatgcatgtgcattaactgttgaattcacttttgtgccatttttgtaaatacagtagttttgcacaacctctcacaaatgtctgtattaatttcacatacttaaaaagtagataatgtgccaaccagaagcacaagagttcctacacaaaactctgtaaatcattatagcttttgtataataagagtagtttacatctctagcttatagataccaactgaatgactcagtcct

SEQ ID NO: 167820 - DNA, 217 bp, Homo Sapiens
agagcagatgtggaaggcaagtattcccattaaacatttactcttcagaggactctgccaagccaagcctaaattctgccttcagaacaaaggtaagcactctttcagactggtgggcatatccacagggagccagctgatgccaggaggagaaattgggagaacagcaggctttctaagcaatttggaactaaaggaaggaaaacccgccaacaag

SEQ ID NO: 167821 - DNA, 432 bp, Homo Sapiens
actctagagcgatcccgtctcatttcagtttagggaataaccagtatgaaaagtgtaacaataattctggcattacttctgtcaggataaaactaggtttgtttgttttgaatcatagatctaggcttcatcccagtaatattcacgttgccaggacaggagagatactgcggaaattcaagagcaggtttctgagcagaactcaatgtctcagctcccctaaatgaacaccatttctcatcactgagaaaagatttccaaagtgcccatctcatctgcatcgacccaaccatctacccatctttttctcccatgtggagttggcaggcatcacatctatttccccagcttcttactggcttttgtccagtggaaaccaagaaatatttttctttattcaaagtcctgtgacaaaagtattgaaactctttt

SEQ ID NO: 167822 - DNA, 280 bp, Homo Sapiens
cgatctagaggatccggtcatttcagttctggttggacgttctggcgcgtgcgcggccgtgactttaccgcgatccagatcgcgctcttgcaagcttgtgggttaaattagaggaaatggggattgaaccttatgagctgcagtcgaatgttgaatgtacttcgataaatgaagagattacgcacgaagcccagagtcagcctattcttcatcaagttgtgcccgacaatcaaaaagtacattctgctaatgaacaaaggattgtgaactgaaatgagct

SEQ ID NO: 167823 - DNA, 497 bp, Homo Sapiens
ccagttccatactaatttaaagtaaaaactttcatctgcagaactacaaaagttggatgcatatttgtaatcttgatgtctaggcaatgattaactttagaaatcaagtggttaatattaaattccagggagcacttattttatctgattagagtgtgattatcagttttattcttctttcacatattctctgaaagtacatatgtacttgatttttatggaagaatcctaagtgacaaatggctgatacggctttcgacgattataacttttttacgcattagcaaatacaagttagggtctgttgctttgaatcttagtagaagtacagaattaccagtgacgtagtataaaaaaatttgatatcagctagtcctagcacaggtactggtcttgcagtcatacctattagtttatagctttggacaagtcactttatcttcataataaaggtaaagatacccatcttagggttttgcagagatcaaatgaaatgc

SEQ ID NO: 167824 - DNA, 274 bp, Homo Sapiens
ctctaacgatccttatcatttcagttcacaacaagaatacaaagagggagggatcaacactgtcaaatgctcatgacaggctcattaaaacaaggacctagcattgattactggatttagtaaccatggatatatgatgaccttagcaagagcaattttgctgacgtggtgagacagaaattgtgattgaagcatgagaggagaggacgtagacacaaagtactgacagctcttttgaattttgctgtgaagaatggaatagcacataactaga

SEQ ID NO: 167825 - DNA, 276 bp, Homo Sapiens
  misc_feature (26)..(26): n is a, c, g, or t
  misc_feature (45)..(46): n is a, c, g, or t
  misc_feature (72)..(73): n is a, c, g, or t
  misc_feature (89)..(89): n is a, c, g, or t
  misc_feature (113)..(113): n is a, c, g, or t
  misc_feature (132)..(132): n is a, c, g, or t
cgggctcatttcacgttcctggcacntgaactaaatgtcagtgcnntccacgtgtcccctgatcttgcatcnntcaggacatttatttnttttcaacattgggggagaaaaanggaataatgaaacagtagnggatcgcaattcttaaaataccatgggtcagactgatcaataggaactctctatgcagaagaaaccacatggggagaagggagaataaaaaatcagtcttggtatgtacaggggcatctagtaaagacaagggatcgtctagag

SEQ ID NO: 167826 - DNA, 617 bp, Homo Sapiens
agcgtatgtgaaaaggcatctttctcactttgtggattggatggctgagtccttaactttgagccaaggctggctggttcctgagcacacacacaaacccgcctttgactgtccaggaggacagctgccctagaggcagattgctaacataccactagaacaatccttcttctctgttcttgtgctggctagcacaatctttactgcctctagttccttctgtttcccaccccatctctgatctttgcttttggcttagtgagatgtcacattaaaaatgagagtagggattggattttttttcttgtggtagggttgagggggtgatcagagaatgtgacatgtagccagctttctagagcaggcttgccagtggtaaggtaggtaatttttacagagtagtgcctcttttgttcttagcacctttcctcctgagtactaggttcttataaaagggaaggtaaatctgaagtaggctgcaagctactcttcccaaattgaataaggttttgttctttaaagtgaagataagacccaaaagtctagctggctccattacaccttctcttgcctccttcccctctccgtaaaaaaatgtcaactttggtaccttctgt

SEQ ID NO: 167827 - DNA, 1151 bp, Homo Sapiens
cagatccttatcatttcagttcattagttactgatctgtaaaaacaagtcaggactattttctaatgtgcttctttcaagttagtgtggaaagagctgatgcatctgttgtagctgacggaatttaaggaactgaataattgacaagatttccagaaaagcagggtcgccagataatgctacctgtttgcgaatgattgttaccgtaatgctctagagagctaatcctttctcggcctagtcagatgattttaaatcatttgattttacagagctttagtttcagttttttaaatgaaaatggggatgggattaggtcatcttctaacacccacgacagccataaattgataatctatggatccatatttaaagttgctgataaaaataaccacaattgaccagcctcccttccctgttaggaaatgctttatattttaatttagcaacccatgtgaccaacccttttagaattgaactggctctccctaggaaaggttagaaatctaatcagttatagtaagtttctgttaacaaatggggagtggtcgacttggagcctggaaaaggggagcgtaaagtctaaaagtttgtaaatttatctagccgttgctccaggaggacctgtgtcatagtatggaaacatttactaaggctatttttgtggggcagaaaacagttagcagtccttaatgtaatttggttgaaataaccgttcaaaccagactcctcctgttgctttgattcctttttcgcaaactttcttatgttctacgtattcaggtgctcctgatggccagcaatagacttgagacattggaagaatgtatagccttagcgtctatttagtgttaagattttgtaagtctaattactgtgaaatagtcctggtaactttatcgattctggatacaaagaaaaatgcaaagtgaaagacctttggaaattgctattcacaccagagtactctatgagacattacataggtgatcaagaagagtgatcacctggctgcactttagggtatgtttgtccaggtttttctaataagttaattctaatcaataacttttgttctaattagtaacttttgtataaatgttaatgttaatcgcgaaacatgtgggatgggatatatcagttctctccagg

SEQ ID NO: 167828 - DNA, 329 bp, Homo Sapiens
  misc_feature (132)..(144): n is a, c, g, or t
caaaacaaatgatatagtcatttcaaggcaaaattaaaacagatgactaattgtaaattccaacagtcatttactcttgacttgaagatctggaaaatatttaaagtctgctgaagaaaggcatagaggccnnnnnnnnnnnnnaaaggtttggatattttccctttcgttccctttgggttctcccagaatgaccagttataaatagaataaaagggcatctaactggtatatttggtaataaagtatatggtgggaaccaaatgtcctgggtactaaaagacaaatgtacttttacccctcaaattattctacaagtctttggatac

SEQ ID NO: 167829 - DNA, 363 bp, Homo Sapiens
  misc_feature (202)..(216): n is a, c, g, or t
ggtcccggcgtccatttcaggtcatgagagtatcaaagacttgagaatatttgagggtaaatgtactttgtcttaagtacccggacatttgttcccacatatactaataaccaatatacagttaaatgcctttaattctatttataactggtcattctggaagaacccaaagggaacgaaagggaaaatatccaaacttttnnnnnnnnnnnnnnngcctctatgcctttcttcagcagactttaaatattttccagatcttcaagtcaagagtaaatgactgttggaatttacaatgagtcatctgttttaattttgccttgaaatgactacatcatttattttgaactgaaatgagcaggg

SEQ ID NO: 167830 - DNA, 306 bp, Homo Sapiens
catgactaacagatactgatgactgaatgactttcacaagaaacacgtggagtccagtgagcaccagcaatgaactttcgcaactgcagaaattagtgattgtagctgagttgacacaacagtagctgaacttattaattttactggaactttgaacccagtttgtgattatctcttgccgtgtcactgaatacattgagtacattgggaattagattgacatataaaagttacttgaaaactcctgaacctacctgaacaatgaatgaatgaaaataatgaatgagatgagaactgaatggtcag

SEQ ID NO: 167831 - DNA, 307 bp, Homo Sapiens
agtaagaaggactcggatttacaaccacttttctttgtattacagagtctcaatatatttatttatatgttttattaaagtgaatgataaccatctagattttatgctccaatcaaaaatagccaataaagatctggtaacagacactacaaattttttatccccaaactctcctgaagtaacttgagtacttctaccatcatactttagaaaccaaaaataatgaaatatggcagccactaaagaaaaatactatactgatatagtctgcaacctagatgtggctacaactaagatgcaagagaag

SEQ ID NO: 167832 - DNA, 387 bp, Homo Sapiens
aggatcagctcatttcagttcctaggccaggatgttataatttttgccccctgcgtctcccagcttgctgactcatgcatctctatcagcacatgctcatccacctcctgagccgctatccattgtctgctcacaatgcgccctcagtggctgctttctcagtgggacagaccactacactctggggatgcctgcaatggtttttgacgtgtctgagccactgctggggtttcctctagttttgttaagttgcaggcagagattgtgcatgagcagtggtttctccaagctccatgaagaccgggaaacctgaacagggtgggtgaacttttcatggcgtgcatgcagtatccttggctggacagtccattgtgtgacagcagaatc

SEQ ID NO: 167833 - DNA, 384 bp, Homo Sapiens
  misc_feature (47)..(67): n is a, c, g, or t
gtttgtgaaatgtgggcgcagcccattaatatgcgcttccccccccnnnnnnnnnnnnnnnnnnnnngcccaggaccagacggcttcacagctgaattctaccaaatgtacaaagaagagctggtaccattcctactggaaacttatttccaaccaaattgaagaggaggaaacttcctccctaactcattcttatgaggctacatcatcctgacaccaaaactttgcagagatacaaaaaccaaaaggaaaacttcagggccaatatccttgatgaatactgatggcaaaaatcctctgcaaaattctagcaaactgaatccagctatccaaaaagatagatcgagcttatctcaaagaactgaatgagccgagtcctctagt

SEQ ID NO: 167834 - DNA, 599 bp, Homo Sapiens
ccagtgggggtttaaaactatacacatccacagagcacccagctcatcccagagctgcctgtatttgtcagtcattgcagtgccttgttgccgccaaagtgacaggcgagggtcagccatgaattgctctgttatcaaggtcaacatgcgggccccattggagtccctcatctttaacatctcccgcacctttgcaaagagcaaattaagctgcttccctgatccgtggtacccgccctgggaaaggaacagtttaacctgttcttgaacctgctcttcatctaagtgccagcagttttcatcatctatactagcacctgctgttggatcaggagcaccatgaacttggttgatttctgaattttgggaaagaatttcatctgctaatttttgagcagttggcaaaacttctgtgtggtgcactgtgatcaaatactgtacaaacttttgcagttggtctctattcatttgaaagagagtctctgaaataggaagatgcagtttgacctgatctggcttgcggatgcggtatataagacagtgccacaacatgggcacaataaaatatgtccttgtttccacagctgcaggtcactgag

SEQ ID NO: 167835 - DNA, 1429 bp, Homo Sapiens
ccttccgggtgagtgggttagtgtttaaaaaaacagaaaactctgaaaacctcagtgtagatctcacctatgatattcagtctttcacagatacagtttataggcaagcaataaacagcaagatgtttgaggtggatatgaaaattgctgcaatgcattgtaaaaagaaagcaactccatcaactactacctaatcatgtgcttcagaaaaagaaaaagcattcaacactattggtgtgaaaatctactcatttggtcttgggggacgtttccttttggcctctgtgatggctgataaggatacaacaagaaggatccacgtttcgacagatcaaggggacacatggagcatggcccagctcccctccgtgggacaggaacagttctattctattctggcagcaaatgatgacatggtattcatgcatgtagatgaacctggagacactgggtttggcacaatctttacctcagatgatcgaggcattgtctattccaaggtctttggaccgacatctctacactaccacaggcggagagacggactttaacaacgtgaactccctccgcggcgtctacataacaagcgtgctctccgaagataattctatccagaccatgatcacttttgaccaaggaggaaggtggacgcacctgaggaagcctgaaaacagtgaatgtgatgctacagcaaaaaacaagaatgagtgcagccttcatattcatgcttcctacagcatctcccagaaactgaatgttccaatggccccactctcagagccgaatgccgtaggcattgtcattgctcatggtagcgtgggggatgccatctcagtgatggttcagatgtgtacatctcagatgatgggggttactcctggacaaagatgctggaaggaccccactattacaccatcctggattctggaggcatcattgtggccattgagcacagcagccgtcctatcaatgtgattaagttctccacagacgaaggtcaatgctggcaaacctacacgttcaccagggaccccatctatttcactggcctagcttcagaacctggagctaggtccatgaatatcagcatttggggcttcacagaatctttcctgaccagccagtgggtctcctacaccattgattttaaagatatccttgaaaggaactgtgaagagaaggactataccatatggctggcacactccacagaccctgaagattatgaagatggctgcattttgggctacaaagaacagtttctgcggctacgcaagtcatccgtgtgtcagaatggtcgagactatgttgtgaccaagcagccctccatctgcctctgttccctggaggactttctctgtgattttggctactaccgtccagaaaatgactccaagtgtgtggacagccagaagtgcactgaaccgga

SEQ ID NO: 167836 - DNA, 682 bp, Homo Sapiens
agttggatagatagtactggtatcgaagacaggaacaggctccaggaatacaatacttaattcatggcaatagaggtaaagcagaagacgttcacatatcctttggtccacggggcttaacccctgcgcagttttccccttcttactatgttgcaaattatcacaatcatattcaacttctggctttccaatatctctacaaaatgtgcatatccagtccccacttggaaagctaagtagtgttggaacatgacaagttagatgaaagacctttggacatttttcgcagcacaagagatctcctccgttttggcagacagcacaccagtcttcatttgggtcatcatcttaatagttgccatctcctccaatccttgccgacctgtgcatgaggcttcgaattggggactttccattaacaaggctgctgagccctgactgtttgcagctttcattcatatctgcaggttcagttttcacatggttttccaggcttgccaatgcatccaattcactttctagatgcaggttggttgagagaggtggtgtcaagctactctcaggactgctcaacatgcaagcactcctcctgccatcctctgttttttcttgttttacacctcctgaaaagctacatatttcatcttcagtcccaggttcttgcttgaccttcccctgatcc

SEQ ID NO: 167837 - DNA, 1356 bp, Homo Sapiens
  misc_feature (535)..(535): n is a, c, g, or t
gtccctgctgctaagtgacctatacgtgtccagttgtgatcccaccttcgggtcaaagaatgtagtcaattgaggtaatctagtaatagagagtaaaccagctcctggtttatactcctaatgttgtatttgggcaagttcctccagggacaaaccacattagtataacccctggacagatttaacttagcacagcttcgactccagctacatgcaacaacaagtatatgcacagaaaaatcagcagttgcaacaagattgaggatcaagcaaccaccagcacactgtaccaacttacaacaacaacaacacaacagcatcctagacaagcagcccctcagatgttacaacaacagcctcctcgattgatcagtgtgcaaacaatgcaaagaggcaacatgaactgtggagccttttcaagcccatcagatgagactggctcagaatgctgccagaataccagggatacccaggcacagtggccctcaatattccatgatgcagccacacctccaaagacaacactcaatcccanggcatgctggaccctttcccgtagtatcggtacacaacaccacaatcaacccaacgagccctactacagcaactatggcaaatgcaaaccgaggtcccaccagcccatctgttacagcaatagagctaatcccctcagttaccaatccagaaaaccttccatcgctgccagatagataatctactaagtagatacatctcaggcagtcacctacccccacagcctacaagcaccatgaatccttctccaggtccctctgccctttctccgggatcatcaggtttatccaattctcacacacctgtgagacccccaagtacttctagtactggcagtcgaggcagctgtgggtcatcaggaagaactgctgagaagacaagtcttagtttcaaatctgatcaggtgaaggtcaagcaagaacctgggactgaagatgaaatatgtagcttttcaggaggtgtaaaactagaaaaaacagaggatggcaggaggagtgcttgcatgttgagcagtcctgagagtagcttgacaccacctctctcagccaacctgcatctagaaagtgaattggatgcattggcaagcctggaaaaccatgtgaaaactgaacctgcagatatgaatgaaagctgcaaacagtcagggctcagcagccttgttaatggaaagtccccaattccaagccctcatgcacaggtgccggcaaaggattgggaaggaaatggcaaccaattaaagaatggatgaccccaaatggaaaaactggggtgggcctgtccggcccaaaaacggaagggaaaaaccttcttttggggcctgcc

SEQ ID NO: 167838 - DNA, 661 bp, Homo Sapiens
gaaacttcttgagaagaaaaattatgttcatttgcagctactcaggtgcagaataggataaaagaagtaaatgagactaacaaacgagtagaacaggaaattaaagtggccattttcacccttatcaatgaaattaataagaaaggaaaatctctcttacagcagctagagaatgttacaaaggaaagacagatgaagttactacagcagcagaatgacatcacaggcctttcccggcaggtgaagcatgttatgaacttcacaaattggccaattgcaagtgccagcagcacagcactactatacagcaagcgacttgattactttccagttgcgtcatattttgaaagcccggtgtgatcctgtccctgctgctaatggagcaatacgtttcccattgtgatcccaccttctgggcaaagaatgtagtcaatctaggtaatctagtaatagagagtaaaccagctcctggttaatactcctaatgtcgtagttgggcaagttcctccagggacaaaccacattagtaaaaaccctggacagattaacttagcacagcttcgactccagccacatgcaacaacaagtatatgcacagaaacatcagcagttgcaacagatgaggatgcagcaaccaccagcacctgtacctactacaaca

SEQ ID NO: 167839 - DNA, 938 bp, Homo Sapiens
  misc_feature (791)..(791): n is a, c, g, or t
tctacagggctgagtcattcagtccccatgctgctcgcagtaacaccaattccaaataaatacttctgattctcatccatttaatccaagagttaattcatattctcgcccaccctccatccctgtctctactttagaaatgaggaaactgaggtcataaatctaggaagcgacagtgcgaggacataaacccaagtccacctgatcacaaggctcagctcttaagtgctctgcgaatactgcttttctaacaatgcctggtgcctccctgagtgaattcccaataggagtctttccacttcagtccaacatgaggcaagtagttgcaggtgccaggtaacataatgagctccaccttggtaatcactctgagtagacaatgctcaaaaaaacagagcaccacataatgtatcaaccctaacagtcacccttctgacatctctattggaaagaggggataagaaagaagaaaaaaaatgctctggactccctaaaaagaatctctgctttcccagagctgtccagcctccatgctaagcaggatgtgcccttagtgccaataattcagaaagtgtccataatcatgaactccacagcccaaagacaacacaacattcttgcccttttctgccttctccggtttcctggaggggccaggagatgagtcatgcactccagcctgggagcactgcaatgtctttccaatgtcttgccataactttactcattgactttagaaagaaagaagtatcaataaaaactaccttcagaacaatatcaaagaagcaaanaactgacaatagcatgaatcattagccttggtgtgtggatgtggagtggaaaactgggaacccaaattctgatgggaaaccatgagtgggtctctatgcctgagccacgggatataaacatttatgttaggagaccgtcccatgaac

SEQ ID NO: 167840 - DNA, 260 bp, Homo Sapiens
tcatttggtcaaagcattctacatcattagtttgaactaacttttactgaaacagctacagcatcaaaagaggtaaggtcaaatgggaattcatagaaaagcataagacacttcacactacgttgaaagaaagacagaaagctaagaaaagagacactgacggcaacactgaattacagcaacactcgcactgcaagcacagaacaccatgggtgaagtcggactatttaaacttcagaaagcccacctcatacagctgg

SEQ ID NO: 167841 - DNA, 2091 bp, Homo Sapiens
  misc_feature (2009)..(2009): n is a, c, g, or t
ggtcccctcacggatactcgaacagcacagggtgataataaggcatggtagaggtttcccatttttcagtgactagactgtgaatatttacagatgaattttctattattaatgttattgtggttgttttaaaataaaagttctgaatgtatatatgaccaaaacaaacaaacaaaaagagcacagtgaactcaaatcatattccattacaatagtcccaggacttcattagacagactcccagtaattaagcctccaatcttaaaatgttaaacatttcaacatgtattgactaattcctgtaaaatatagaaagtgcaacatcaccaaacgtgcattttcccaggattcattttaagaatttctcatgaaaatttaataatagtatttcagttaattatggcatttgagaaaaagatactaatggggaaagatcacatacatgctttgggtgatacgtaaaaaaaacctacaataattagtagtattgccttaacatttctaaaatcacataaaaatgatcatctttgattgccatttcagtaattttgaatacagggtatgttattttctgctcactagtaatcaaaacacataaaacagacttgtaacaaatattcagagtcgattattttcataagctaaacagttccgatactttaagatttgtgtttgagcatacagtactgcaatgttggctacataaaataaaaaaatctttttaagaggaagctcaataatcagaggctgtattgcatttaaggatttaacactggctatatacaaaagggaaagcatttcaatgagaaatacttcacgttaccaagttctctcctttaatatggcaacattcagcagcttatgctactcttttatcctttggttcccagtgacaaacaatgcagtaataatgcctctggttttagttcctcttggatgacatttattagcagagagagagacctgatgctttagctgaaatttggcagcccaagaagtgcaccaactgctccaaagtaaccctcatgttctagaaacaatgcttttagttgaccttttgaccagtaatccagtgcatatgccaaaagtttcattgagagggtattgacacgtaaaaagtttccaacaaagacaactctgtttattttctcattaacagcacacattcgtgccacagaaccaatgttattggtgatagtaactaaagtagctcttgccagatcttcgttactaacagattctcgcttctccttataaatcatattcccaaaactagatgctacagcccaacctggcaaaccaaatctttcataatctcctccataaatatcacggaccagcttgtcagcttgtgtgctatcacctttggatgccatttcaagagcctcttcaaaactttcacagccagtcaataaactgcataaacccagaaaggtaccccctccaaggcttgtcccagtcactcgtttatagttgtctttggaatggactgctaaaatactgactcctgagccaatgttcactacaagcagtggatagggatcatccaggttaaaaggcatcttttggcatcgctcaggttctgaggcattagcaaaataatagcactcggcttgtccattgaaactgacagagtctatatacagcaagccctttacaaggcagtcaagttcatccagtttgtgcaggtggaggtttccaattgtgcgaaaatctttttcaaacttgtaagcaccacctcctgtagcacatagcaccgtctgcaatgttgacgaagtttttatctcttcccatttggataaaagtaggcaggtcctgggttggaaacctgataaagtgcaagttccctcttcggccaaaaagtgttaaatctttcagttcaaggtgtacatcccgaatgccggtggatccatatgccacgttagaagtcaaatatttccgaatactttttaaactctcaacttcttcttgctcttcctctgctgtgatatcaataggttcaaagtacngagagctttactagagttcccccaatgtccatgccaaaccatgggaaagagggtttcttggcatctttgatcttcatggcgt

SEQ ID NO: 167842 - DNA, 376 bp, Homo Sapiens
acagacctgatcatttcagttctcagggtgttacaatgtagtctgaatgctacatctggcatggttacatcatttgaactctctgacaacactaacgaccaatctggagaacaggaatctgagtatgaacaagaacaaggagtggatgaactggtttatcacaaatctgatggatcagaattgtatactcaagagtacccagaagaaggacagtatgaaggccacgaagctgagttgacagaagaccaaatagaatatgtggaagagccagaggaggagcagctttacactgatgaagtgttagacgtcgagatcaatgaacctttagatgaatttacaggaggtatggaaacattggaacttcaaaaggacatca

SEQ ID NO: 167843 - DNA, 1022 bp, Homo Sapiens
  misc_feature (636)..(652): n is a, c, g, or t
  misc_feature (712)..(712): n is a, c, g, or t
  misc_feature (726)..(727): n is a, c, g, or t
  misc_feature (750)..(750): n is a, c, g, or t
gggaaagagaaagaaaatgccgaaaccaatcaacgtaagagtaactacaatggatgctgagctggaatttgccattcagcccaatacaactggcaaacaactttttgaccaggtggtgaaaacagttggtttgcgtgaggtctggttttttgggctgcagtatgtagacagcaaaggttattctacatggcttaaactaaataaaaaggtaacacagcaggatgttaaaaaagagaatcctttacagttcaagtttagagctaaattctttcctgaagatgtttctgaggaattaattcaagaaataacccagagactcttcttcttgcaagttaaagaagccatcttaaatgatgagatatattgcccgccagaaactgcagttcttttggcttcctatgctgtccaagccaagtatggagattacaataaagagattcataagccaggctacctggctaatgatagactcctaccccagcgtgtattggaacaacacaaactaacaaaagaacagtgggaagaaagaatacagaactggcatgaagaacatagaggaatgttaagggaggattctatgatggaatacctgaagattgcacaagatctagaaatgtatggagtcaactattttgnnnnnnnnnnnnnnnnnggaactgaattgtggctaggtgttgatgctttgggtctgaatatttatgagcatgacgancagttaacacctannatttgtttttccctggagtgaantcagaaatatttcatttaatgacaaaaaatttgttataaagccaatcgacaaaaagggcacctgatatttgtgttttatgcaccctcccctgagaatcaataaagcggattttgggccttaatgtatggggaaacccatgaactatatcctggcgaagaagggaagcctgggtactatttgaaggtacacccgatggaaggctccaaggctaggggaggggaaaaactcccaaaaccccttggggaaaggggccccccttttggggtttgtg

SEQ ID NO: 167844 - DNA, 477 bp, Homo Sapiens
tagaggatccggtctcatatcagtccataatctcttcttatagattgttagcccttaagtgtatattcccccaaagggtggaagttacccagctaataacgggcaaagacatttcgggacctcagaaataactgaaacaggaactagaaaatccagaaaccactcttcttccttctcatctatctatgcttttcaccatgtgtcagtgttattctcacagattaactctacaaagttggacaatagctgccaacatcttccagtctcatatcttcttaactttgccattcaaagaataaggttctcttcttcccttaattccaatttggaaaacctcagagaaggtctctgattggcccaggtctcattgtaaaactgtatgtgtggctgggaggagttggtcctatgataggcaatccttattttaatcacgtggttggagtaagcagaaaataggttcctcaaataaggcacgta

SEQ ID NO: 167845 - DNA, 445 bp, Homo Sapiens
acctgctaaactatatacatacttcagaaaattaagtcatttttatagtatatcttcttttatgttgagaaaattttttatcatcagcattagataaaacaacagctatttagagttcaagttatatttcttaccatgtacattcaaagaaaatttcaatgaagtttgtccactgagttactgatgaacacccagatcttcaggattaaaacccttctttatagatcagaaaacattgtgattagaaagctttcaacagacatttatgggatccctgtaaaatccaaagcaccaagttagggactagaagttacagcaatctcattcaaatgctgagaactggatcagaattctggctttgagaacacagaacaagatgtttcagccacttctcttggaaatcatttcacaaatattttcttaaataaaactgaaatgaagctga

SEQ ID NO: 167846 - DNA, 659 bp, Homo Sapiens
ccgtaataaacagtgaattgatggatccaaatgcaacagatgataaccaagcgccagatcacccagaacacagattaccgcttaaaccccatgttaagaaaagcctgtaaagctgacattcctaaattctgtcacggtatcctgactaaggccaaggatgattcagaattagaaggacaagtcatctcttgcctgaagctgagatatgctgaccagcgcctgtcttcagactgtgaagaccagatccgaatcattatccaggagtccgccctggactaccgcctggatcctcagctccagctgcactgctcagacgagatctccagtctatgtgctgaagaagcagcagcccaagagcagacaggtcaggtggaggagtgcctcaaggtcaacctgctcaagatcaaaacagaattgtgtaaaaaggaagtgctaaacatgctgaaggaaagcaaagcagacatctttgttgacccggtacttcatactgcttgtgccctgggacattaaacaccattgcgcagcattcaccctgggccgcgggcgttcaaattgttcctgttttcatgggaaggcattggagggttaagccgggttgaggtttacagcccgagttgcaaaaagcgcttcattgacccggtttgaggtgttggattttt

SEQ ID NO: 167847 - DNA, 798 bp, Homo Sapiens
cgttgtcagtgagtgaaagattgtcttgctgcctgagatgggacgcgcctggccaacacccacttctctggttgtataagacagggacctaaaaagggaaaggatgggaggaggatcatcctgcagtgatcatgtagggcttcatgctataaaatggttttgcatttccggagatgaaacaagtctcttcaccacagaactactgcagatcatagccctatggtctggctggttttgtcaatctggcagttcagggtcagtgcaaaggacatccccaacacctgtgaaaagagttgggaaaatttgaagtcttcataagaaaagccatttctttcacaatgcctgggattggcctctgagaaaaagaactgtatccattacactgaaaccacccttccaaccattactttcaagtctctctcaggagctctttcctttggttaaagaatagcagtgaggagagaaacggggtcaatgatgacaagataacaggctgtaaagtactggagcatgttttatcttctgaggaagtcacagaagccctgctgctaggatggtcatattctgctcactgaacactgtgcaatgagttatctctatccatgctctgtgcctcctttgtttccaaacagagaaaaatcattttctctgagcttcctgattgagttttaactaatctatgatatacccaacacttgggtagaaaaatgttagaaatatcacattatttttgtccttttttattaaaaaggacaaaaaactgccctcaattcacccatcacttgtcaaactaagcac

SEQ ID NO: 167848 - DNA, 640 bp, Homo Sapiens
  misc_feature (567)..(567): n is a, c, g, or t
acagcccgttgtcagtgtactgtggtaggaacaggctttgtactttcgcgttgtgtccgtcaggcgagatctccgttggtctccactgttactgtggtgaagaagctgtatttggaggtgttgagctcatccgtgctcacattgaggtagcccgaggcgttggacttgcctgcaactttggtcaccatgcatgtgtacaccccagtgtctgaaagcagcacgtgggaaaggttcaagtccccgtcgttgaggacagagatccttgggtggcggtaggcgtgtctgagcactgtcccattggcagcaaccacttcacgcgaggacataggggaagtccgacacttaagttctgccatccgaccctcagaaatgttgaggtctcgaggtgcgtccatgatgaagggggcagagcactggaaggaggcctggtccacctccacgaggtagcggcctcgcatgtgcatgggagcatgacagcggccacagcaggtggaattggtgggtatatactctcgaagccaccaggctagccacagaatgtcacaatcacagttccaagggttgtgntgtagatgcaactccaccaggtacctcagcggggtaaagaggtcatggggcaaagatgagaggttattgtggc

SEQ ID NO: 167849 - DNA, 939 bp, Homo Sapiens
  misc_feature (691)..(691): n is a, c, g, or t
  misc_feature (732)..(732): n is a, c, g, or t
  misc_feature (762)..(791): n is a, c, g, or t
ggcttcagcataaaagctgatccacaaacaagaggagcaccagacctcctcttggcttcgagatggcttcgccacaccaagagcccaaacctggagacctgattgagattttccgccttggctatgagcactgggccctgtatataggagatggctacgtgatccatctggctcctccaagtgagtaccccggggctggctcctccagtgtcttctcagtcctgagcaacagtgcagaggtgaaacgggagcgcctggaagaagtggtgggaggctgttgctatcgggtcaacaacagcttggaccaagagtaccaaacacggcccgtggaaggtgatcaacagttctgcgaaggagaatggttggtcagaagaatgaagtacagtaattgtgagcaggaactgtgagcactttgtcacccagctgagatatggcaagtcccgctgtaaacaggtggaaaaggccaaggttgaagtcggtgtggccacggcgcttggaatcctggttgttgctggatgctcttttgcgaataggagataccaaaaaaaagcgacagcctgaagcagccacaaaatcctgtgttagaagcagctgtgggggtcccagtggagatgagcctcccccatgcctccagcagcctgaccctcgtggcctgtctcaggcgttctctagatcctttccctctgttccntctctcgctggcaaagtatgatctaatttgaacagactgangggatcataaacagccatctgccccctacnnnnnnnnnnnnnnnnnnnnnnnnnnnnnncctgtcgggcgccctcggccctcaaaaacctttctaaaacattccgtttggcccgcggggccacataagggaaagggaactgggcccaaacctgtttccccaggaaaaactcggggcctgaaaaaagggttggagatttccccccaat

SEQ ID NO: 167850 - DNA, 476 bp, Homo Sapiens
cgtggccaacaccgaacttcaaccttggcccttttccaacctgtttaacagcgggaacttgcccatacctcaagctgggtgaacaaagtgctcaacagttcctgctcacaaatactgtacttcatcttctgacaaaaccatctccttcgcagaactgatgatcacctccacgggccgtggttggtactcatggtccaagctgttgttgacccgatagcaacagcctcccaccacatcttcccaggcgctcccgtttcacctctgcactgttgctcaggactgagaagacactggaggagccagccccggggtactcacttggaggagccagatggatcacgtagccatctcctatatacagggcccagtgctcatagccaaggcggaaaatctcaatcaggtctccaggtttgggctcttggtgtgcgaagccatctcgaagccaagaggaggtctggtgctcctcttgtttgtgg

SEQ ID NO: 167851 - DNA, 468 bp, Homo Sapiens
  misc_feature (122)..(122): n is a, c, g, or t
  misc_feature (244)..(244): n is a, c, g, or t
  misc_feature (276)..(276): n is a, c, g, or t
  misc_feature (299)..(299): n is a, c, g, or t
  misc_feature (335)..(335): n is a, c, g, or t
  misc_feature (372)..(372): n is a, c, g, or t
  misc_feature (433)..(433): n is a, c, g, or t
ctagtggtaggagacaggctgtatgggggtccttcatgtgcagatggaacagcatcgcctcacagctgtgcagacgaacagatgtggtctactgcccaacgaacaatgcggcataaaactgnaccaatattataataaacatttgtcttcttcatctccatatctacaaaagtgattctacatttccttggacaacactggagggcccgctcagtcttggcactgaacgctggaggccatctcnagctccctggcccctgtggcgagctggcggcntcaggtgtcacaggccggctgcnccaggccttcgagggggagctggctcctgtgggggnagttggggctcggtgggccgctggggttggagctatncgatgcagttgagtgtttggtggagtccgaatcaggctctttgtcaaagtcctggtctggntcagacatacttctcagaggcacagtcacgctagg

SEQ ID NO: 167852 - DNA, 776 bp, Homo Sapiens
  misc_feature (179)..(179): n is a, c, g, or t
  misc_feature (203)..(203): n is a, c, g, or t
atcaatgcggtggcgtggtcgccctctggctcgcacgttgtcagtgtggacaaaggatgcaaagctgtgctgtgggcacagtactgacggggctctcagggctgggaggaccccagtgccctcctcagaagaagcacatgggctcctgcagccctgtcctggcaggtgatgtgctgggntatagcatggacctcccagagaangctcaagctatgtggcacatgtagctttgccgtgaatgggatttctgaagatttgactgaggtctctcttggcctggaagaataacactgaaaaaacctgacgctgcggtcacttagcagaggctcaggttcttgccttgggaaacactactagcactgaccttccatacctcacttgggggagcacagggccccgctgggcctcctcaccaacggcagtgccaaaatcagcccccacatcaaggtggtgttctctgtgctttctctcgtccttccaaagtcggttctggcctaacgcatgtcccaacaccttgggttcatttgcccggtgaactcactttaagcattggattaacggaaactcccgaactacagacccctccctggtgggttgcatgaatgtgtctcattactgctgaaatgtcctcacatctcttccactgttcttcagagctttctggctctctttccccacaaaattcgacacatttaaaaatctccgtgtggctttaaaaaatggtttcgtcagtttgaggtgggagaggatgtgtgaaaatcttttccaggcaaatg

SEQ ID NO: 167853 - DNA, 213 bp, Homo Sapiens
aggccgttgtcagtggccttgtcagtgttacactcacataaattgggttgatccttgtccaggatttcttttagactctgataaaaacacatttgctcattacaacaacctttgaatgcactctattaccttctgccttttactatcacagtgaagctaaaggctctttctgtataccttccccactgacaacgcactgggatcctcagagtc

SEQ ID NO: 167854 - DNA, 395 bp, Homo Sapiens
tacaggatccttaggctgttgtcagtgggagtctacaaacttgaccatatgtacagcgcttagcagagactgtcttcaacttccaagataaggtggatgatctgctgatcattgaagaaaaattagacctagaagtccgttccttggaaacttgtatgtatgaccataagacattctcggaaatcttgaacagagtccagaagagcaatggatgacttaaagtctgcactccttattcccaattttggcccatctggggtcaacaaggcttgacatggagattggagagaatattggggcgtccggtctgcaaggctggtcctgaaaaacgggggggtaccgaggctccgaaattccgtaaatccatgggtcattaagctgttttcctgtgttga

SEQ ID NO: 167855 - DNA, 403 bp, Homo Sapiens
acaggacccgaggcgtgtcaggccagtagctgtggctctcagcctccctttgcggccccacccaggtacctcagatctgcatattcatctacccctgctgcaacaactcttcctgtatgatcaaaactgagcccacaagttaccctcggcttcaaaggtccatctcatctgggaatccctctcatggcatttaggtttgtcagggacattgggccgtgcatatacttcaacatccgtgcccatcagtttatctgcttgccttaatcctgcattgtcaggtctctccagcttgagtactcctttaaatggttcaaatcctctttcctctatttcccttccaccacatggttcctccactcccattgcaccagtattcactgctcttccttcttttacttctgag

SEQ ID NO: 167856 - DNA, 517 bp, Homo Sapiens
  misc_feature (249)..(308): n is a, c, g, or t
  misc_feature (493)..(493): n is a, c, g, or t
caaggaccatcagtcatcctttaaaattcatttcaagctctgaaaagatattttttgtcacatggccacggtattgagtggccatgtgacgtcacgaagagatatagcgatggcgtcgtgcagatgcagcacgtcgcacacagacatggggaacttggcatgacgtcacaccgatgatgcagcaacgacgtcacgggccatgtcgacgtcacacatattaatgtcacacagacgcggcgatggcatcannnnnnnnnnnnnnnnnnnnnnnnnnnnnnnnnnnnnnnnnnnnnnnnnnnnnnnnnnnnctatagatatggcaccaacatcacatgcacgcatgccctttcacacacactttctacccaattctcacctagtgtcacgttcccccgaccctgggcacacgggccaaggtacccacaggatcccatcccctcccgcacagccctggggccccagcacctcccctcctccagcttcctggggcttnccaggccatttccttcacccccag

SEQ ID NO: 167857 - DNA, 904 bp, Homo Sapiens
  misc_feature (427)..(474): n is a, c, g, or t
  misc_feature (885)..(885): n is a, c, g, or t
ctgaggaccaagggatggcccgactcggcggtttgcggaggatgcagggatatgctcacagcgcccgacacaaccccctcccgccgcccccaaccacccagggccaccatcagacaactccctgcatgcaaacccctagtaccctctcacacccgcacccgcgcctcacgatccctcacccagagcacacggccgcggagatgacgtcacgcaagcaacggcgctgacgtcacatatcaccgtggtgatggcgtcacgtggccatgtagacgtcacgaagagatatagcgatggcgtcgtgcagatgcagcacgtcgcacacagacatggggaacttggcatgacgtcacaccgagatgcagcaatgacgtcacgggccatgtcgacgtcacacatattaatgtcacacagacgcggcgatggcatnnnnnnnnnnnnnnnnnnnnnnnnnnnnnnnnnnnnnnnnnnnnnnnncatgacaacgacacctatagatatggcaccaacatcacatgcacgcatgccctttcacacacactttctacccaattctcacctagtgtcacgttcccccgaccctggcacacgggccaaggtacccacaggatcccatcccctcccgcaaagccctgggccccagcacctcccctcctccagcttcctggcctcccagccacttcctcacccccagtgcctggacccggaggtgagaacaggaagccattcaccttcgctccttgagcgtgagtgtttcccaggaccccctcggggccctgagccgggggtgagggtcacctgttgtcgggaggggagccactccttctcccccaactcccagccctcctgtggcccgttgaaatgttggtggcacttaataaatattanattaatccttcaaagaaat

SEQ ID NO: 167858 - DNA, 404 bp, Homo Sapiens
  misc_feature (285)..(285): n is a, c, g, or t
  misc_feature (317)..(317): n is a, c, g, or t
  misc_feature (342)..(342): n is a, c, g, or t
  misc_feature (359)..(359): n is a, c, g, or t
  misc_feature (364)..(364): n is a, c, g, or t
  misc_feature (389)..(389): n is a, c, g, or t
caacggcgctgacgtcacatatcaccgtggtgcatggcgtcacgtggccatgtagacgtcacgaagagatatagcgatggcgtcgtgcagatgcagcacgtcgcacacagacatggggaacttggcatgacgtcacaccgagatgcagcaacgacgtcacgggccatgtcgacgtcacacatattaatgtcacacagacgcggcgatggcatcacacagacggtgatgatgtcacacacagacacagtgacagcacacaccatgacaacgacacctatagatatnggcaccaacatcacatgcacgcatgccctttnacacacactttctacccaatttctnacctagtgttcacgttnccccnaccctggggacatgggtcaaggttncccacaggtttccct

SEQ ID NO: 167859 - DNA, 365 bp, Homo Sapiens
cacaggccgttgtccagtgcatgtgggatgtatttgaagcacctgaataggcaagtcgaggcaatggaaaagctcattaacttaactgacattctcaaacaggagaagaaggatgaaacacaaaagggtacagatgaagtttttagttgagcaaatgaggcgaccagatttcatggatgctctacagggctttctgtctcctctaaaccctgctcatcaactaggaaacctcaggcttgaagagtgtcgaattatgtcctctgcaaaaaggccactgtggttgaattgggagaacccagacatcatgtcagagttactgtttcagaacaatgagatcatctttaaaaatggggatgatttacggc

SEQ ID NO: 167860 - DNA, 957 bp, Homo Sapiens
  misc_feature (925)..(925): n is a, c, g, or t
ctgactcaaggactcaggcgtgtagtggcatcatcaagatcagcagtcagcttgacctcagtggaccaacatctctaaaaagcaactgacatggctcgtcaataggctgccaggactgaaagacctcctcctagcaggctgctcctggtctgcagtctctgccctcagcacctccagctgcccccttctcaggacccttgatcttcggtgggcagtaggaatcaaggaccctcaaattcgggactagcttactccaccggctgataaaccaggtcaggacaatcgcagcaagctccggaacatgaccgacttccggctggcaggccttgacatcacagatgccacgcttcgcctcataattcgccacatgcccctcctgtctcgactcgacctcagtcactgcagccaccttacagatcagtcctccaatctactcactgctgtcgggtcttccactcgctactctctcacagagctcaatatggcaggttgcaataaattgacagaccagaccctgatctacctacggcgcattgccaacgtcaccttgatcgaccttcgaggatgcaagcagatcactcgaaaagcctgcgagcacttcatctcagacttgtccatcaacagcctctactgcctgtctgacgagaagctgatacagaagatcagctaagacacacccagcccagattcaacaggaaaccgatcttcccctgactccccaccgaggagagcctctcctcgaccctgcacgggctctgaggccagcgtcacactccctctctgctctcctgtcccttgagcccttcctctacaggtggggcagagagggtggtggacaccaggcttatctgcctgctcctctccctcctaaggaaagggagtagcagattgatctgaggggaagcacagggctgtgctgccgaancgccctgctcccttactcgcctgccaagaagc

SEQ ID NO: 167861 - DNA, 607 bp, Homo Sapiens
tgtcacaaaaaagcaacagtagcacttggggtgtcagggtcctctcacttggccacaatttcataaaatggctggccgaggctcttatggaactgatgaatccccagaaccactgccaatccccacatttttgttgggttatgattatgattatctggtgctttctccatttgctcttccttattgggagagacttatgctggaaccctatggatctcaaagagatattgcctatgttgtactgtgtccagaaaatgaagccttgtgcaatggagcaaaaaggcttattagagatcttactgcaatatatgcagtcctgtcgattaggtcaacatagacctgttactcgactgttaacagatgggatcatgagagttggatctactgcatcaaatgaaacttatccagaaaaagtttggtacgccagaactggttattctacaggcagctgcatggtaaccaatgaagcatatttcttaaaactccaagcctttattaggcaccaagtcttgcaagataattgaccctaagggtccccctttcatactttgctttcccatggccatttgggacaagcttcctacttaactttttccccagaccaaaa

SEQ ID NO: 167862 - DNA, 503 bp, Homo Sapiens
aggattccaggcgttgtcagtgtagaacagctcacattatgcggtgatgttatcaaagagcactgagctgtctgaagccagaagcctgaggacagaaagaccctgatgcaggtcagcccatggaggcagatgcccttgctgggctgggggttttccaagccctcagctggtcctgaccaggatggagcaagctcttcccttgctcatgagctcctgatcagaggcatttgagcagctgaataacctgcacaggcttgctgtatgacccctggccacagccttccctctgcattgacctggaggggagaggtcagccttgacctaatgaggtagctatagttgcagcccaaggacagttcagagatcaggatcagctttgaaggctggattctatctacataagtcctttcaattccaccagggccagagcagctccaccactgtggcactttagccatgatggcaacagaaaccaagagacacatttacgtaggtattttaga

SEQ ID NO: 167863 - DNA, 520 bp, Homo Sapiens
  misc_feature (43)..(43): n is a, c, g, or t
  misc_feature (45)..(45): n is a, c, g, or t
  misc_feature (57)..(57): n is a, c, g, or t
  misc_feature (74)..(74): n is a, c, g, or t
  misc_feature (79)..(79): n is a, c, g, or t
  misc_feature (185)..(215): n is a, c, g, or t
cctttcaattccaccaggccaagagcagtccaccactgtgcantnaccccatgatgncaccagaacccaagagncccanttacgcaggtatttagaagcagagggacacccagaaggcctttaactatcaccagtgcatcacatctgcacactctcttctccattccctagcaggaacttctagnnnnnnnnnnnnnnnnnnnnnnnnnnnnnnncggtttcagctagacaatgatttggccaggcctagtaaccaaggccctgtctctggctactccctggaccacgaggctgattcctctcatttccagcttctcagtttctgcctgggcaatggccaggggcctggagtggggagagttgtgatggaggggagaggggtcacacccaccccctgcctggttctaggctgctgcacaccaaggccctgcatctgtctgctctgcatatatgtctctttggagttggaatttcattatatgttaagaaaataaaggaaaatgacttgtaaggtcaaaaa

SEQ ID NO: 167864 - DNA, 713 bp, Homo Sapiens
  misc_feature (565)..(565): n is a, c, g, or t
  misc_feature (580)..(580): n is a, c, g, or t
  misc_feature (633)..(633): n is a, c, g, or t
  misc_feature (677)..(677): n is a, c, g, or t
  misc_feature (690)..(690): n is a, c, g, or t
  misc_feature (697)..(697): n is a, c, g, or t
ggtcgactactactactaaattcgcggccgcgtcgacgggggtttccaagccctcagctggtcctgaccaggatggagcaagctcttcccttgctcatgagctcctgatcagaggcatttgagcagctgaataacctgcacaggcttgctgtatgacccctggccacagccttccctctgcattgacctggaggggagaggtcagccttgacctaatgaggtagctatagttgcagcccaaggacagttcagagatcaggatcagctttgaaggctggattctatctacataagtcctttcaattccaccagggccagagcagctccaccactgtgcacttagccatgatggcaacagaaaccaagagacacaattacgcaggtatttagaagcagagggacaaccagaaggcccttaactatcaccagtgcatcacatctgcacactctcttctccattccctagcaggaacttctagctcatttaacagataaagaaactgaggcccacggtttcagctagacaatgatttggccagggctagtaaccaaggccctgtctctnggctacttcctgggnccacgagggctggattcctcttcattttcccagcttcttcagttttctgcctnggggcaatgggccaggggccggggttgttgggggagagtttgtngattgggaggggntttaggnggtcaaaacccacccc

SEQ ID NO: 167865 - DNA, 494 bp, Homo Sapiens
  misc_feature (295)..(295): n is a, c, g, or t
  misc_feature (480)..(480): n is a, c, g, or t
gtcattcttcagttctctactccctcttgtcagttgtagacacaggtcaccattatgctggtgtatgtttatcaaagagcacttgagctgtctgaagcccaaagcctgaggacagaaagaccctgatgcaggtcagcccatggaggcagatgcccttgctgggcctgggggttttccaagccctcagctggtcctgaccagggatggagcaagctcttcccttgctcatgagctcctgatcagaggcatttgagcagctgaataacctgcacaggcttgctgtatgacccctggnccacagccttccctctgcattgacctgggaggggagaggtcagccttgacctaatgaggtagctattagttgcagcccaaggacagttcagagatcagggtccagcttttgaaggctgggattctatcttacattaagtccttttcaatttccaccagggggccaggaggcaggttccaccattnttggcatttaggcc

SEQ ID NO: 167866 - DNA, 427 bp, Homo Sapiens
atagaggatcccattgcaactggagctgtagggcggcgtcgttggcaagtcagcagactttgtggtggaggctatctggggacgacgtgggcacgctgggcttctcggtggaagggccatcgcagggctaagatcgaatgtgacgacaagggcgacggctcctgtgatgtgcgctactggccgcaggaggctggcgagtatgcctgttcacgtgctgtgcaagagagaagacatccgactcagccccttcatggctgacatccgtgacgcgccccaggacttccacccagacagtgtgaaggcaccgtgggccttggatttggagaaaccaaggtgtggccgtcaacaagccaagaagagttcacaggtggatgccaaagcaagggtggcaaggccccgattcgaggtccaagtccaggcccatgaa

SEQ ID NO: 167867 - DNA, 361 bp, Homo Sapiens
  misc_feature (34)..(34): n is a, c, g, or t
  misc_feature (62)..(62): n is a, c, g, or t
  misc_feature (146)..(146): n is a, c, g, or t
  misc_feature (350)..(350): n is a, c, g, or t
cccttgctcgtcacattcgatcttagcctgcgantggcccttccaccgagaagcccagcgtngcccacgtcgtccccgatagcctccaccacaaagtctgctgacttgccaacgacgccgccctccagcccagggccccaggcgtnaaccttctgattgccacactcggtgcccaccttcacttcgaagggactgcgcccgatgttctgaccaccccacgtgatgggtgacgatataggttcacaggggaccatggggtaatactcgaagccatacacgccatcccccagggtccttctgcttcacgcgctcctctcccttgggggccctttcacggtgaccttcagctncccacttgcca

SEQ ID NO: 167868 - DNA, 908 bp, Homo Sapiens
  misc_feature (757)..(758): n is a, c, g, or t
  misc_feature (804)..(804): n is a, c, g, or t
  misc_feature (858)..(867): n is a, c, g, or t
  misc_feature (884)..(884): n is a, c, g, or t
gactttgagggccagagtcccaaatgcacccagggtgtgcgggaagcgttccgacagatcaaggacttgttcctacagggagcctacgacacggtccgctgggagttcggcacctgccagccgctgtcagacgagaaggacctgacccagctcttcatgttcgcccggaatgccttcaccgtgctggccatgatggactacccctaccccactgacttcctgggtcccctccctgccaaccccgtcaaggtgggctgtgatcggctgctgagtgaggcccagaggatcacggggctgcgagcactggcagggctggtctacaacgcctcgggctccgagcactgctacgacatctaccggctctaccacagctgtgctgaccccactggctgcggcaccggccccgacgccagggcctgggactaccaggcctgcaccgagatcaacctgaccttcgccagcaacaatgtgaccgatatgttccccgacctgcccttcactgacgagctccgccagcggtactgcctggacacctggggcgtgtggccccggcccgactggctgctgaccagcttctgggggggtgatcttagagccgccagcaacatcatcttctccaacgggaacctggacccctgggcagggggcgggattcggaggaacctgagtgcctcagtcatcgccgtcaccatccaggggggagcgcaccacctcgacctcagagcctcccacccagaagatcctgcttcccgtgggnntgaggcgcggaaagctgggaagccacccatcatcgggcgaagtggngtaaaagggcagccccagggcgtggagccaagcaggcccagctttctgtcggtnnnnnnnnnnccccagaaactctcagnccctcttgaaggcaacagggggac

SEQ ID NO: 167869 - DNA, 591 bp, Homo Sapiens
gctgtgctgaccccactggctgcggcaccggccccgacgccagggcctgggactaccaggcctgcaccgagatcaacctgaccttcgccagcaacaatgtgaccgatatgttccccgacctgcccttcactgacgagctccgccagcggtactgcctggacacctggggcgtgtggccccggcccgactggctgctgaccagcttctgggggggtgatcttagagccgccagcaacatcatcttctccaacgggaacctggacccctgggcagggggcgggattcggaggaacctgagtgcctcagtcatcgccgtcaccatccaggggggagcgcaccacctcgacctcagagcctcccacccagaagatcctgcttccgtggttgaggcgcggaagctggaggccaccatcatcggcgagtgggtaaaggcagccaggcgtgagcagcagccagctctgcgtggggggcccagactcagcctctgagcacaggactggaggggtctcaaggctcctcatggagtgagggcttcactcaagcagctggcggcagagggaaagggctgaataaacgcctggaggcctggcc

SEQ ID NO: 167870 - DNA, 950 bp, Homo Sapiens
  misc_feature (782)..(815): n is a, c, g, or t
aattcggcccgaggtctccttctacctgggctgtgacaagttccctcatgagagtgagctgccccgcgagtgggagaacaacaaggaggcgctgctcaccttcatggagcaggtgcaccgcggcattaagggggtggtgacggacgagcaaggcatccccattgccaacgccaccatctctgtgagtggcattaatcacggcgtgaagacagccagtggtggtgattactggcgaatcttgaacccgggtgagtaccgcgtgacagcccacgcggagggctacaccccgagcgccaagacctgcaatgttgactatgacatcggggccactcagtgcaacttcatcctggctcgctccaactggaagcgcatccgggagatcatggccatgaacgggaaccggcctatcccacacatagacccatcgcgccctatgaccccccaacagcgacgcctgcagcagcgacgcctacaacaccgcctgcggcttcgggcacagatgcggctgcggcgcctcaacgccaccaccaccctagggcccccacactgtgcctcccacgctgccccctgcccctgccaccaccctgagcactaccatagagccctggggcctcaataccgccaaccaccgctgcctgggaggagtcggagactgagacctacacagaggtggtcacagagtttgggaccgaggtggagccccgagtttgggaccaaggtggagcccgagtttgagacccagttggagcctgagtttgagacccagctggaacccgagtttnnnnnnnnnnnnnnnnnnnnnnnnnnnnnnnnnntagccactggccaggcattccccttcacaacagtagagacctacacagtgaactttggggacttctgagatcagcgtcctatcaagaccccagcccgactcaagctacaacagcagcacggtgccaagctctgca

SEQ ID NO: 167871 - DNA, 417 bp, Homo Sapiens
tcacagcccacggagggcacggcgtaagacagccagtggtggtgattactggcgaatcttgaacccgggtgagtaccgcgtgacagcccacgcggagggctacaccccgagcgccaagacctgcaatgttgactatgacatcggggccacccagtgcaacttcatcctggctcgctccaactggaagcgcatccgggagatcatggccatgaacgggaaccgggctatcccacacacagacccatcgcgccctatgaccccccaaaagcgacgcttgcagcagcgacgccttacaaacaccgcctgcggtttcggggcacagatgcggctgcgggcgccccaaatgcaaacaacaacctaggcccccacactgtgcctcccatgcttgcccccttgcccctgcggtggggctgtgag

SEQ ID NO: 167872 - DNA, 779 bp, Homo Sapiens
  misc_feature (78)..(107): n is a, c, g, or t
  misc_feature (373)..(405): n is a, c, g, or t
ctatcccacacaagacccttcggccctaattaccccccacaagggaggcctgcagaagggaggcttccacaccggctnnnnnnnnnnnnnnnnnnnnnnnnnnnnnncctcaaaaccacaaccaccctaggcccccacattgtgcttccaacgttgcccctggcccctcccaccaccttgagcactaccatagagccctggggcctcataccgccaaccaccgctggctgggaggagtcggagactgagacctacacagaggtggtgacagagtttgggaccgaggtggagcccgagtttgggaccaaggtggagcccgagtttgagacccagttggagcctgagtttgagacccagctggaacccgagtttnnnnnnnnnnnnnnnnnnnnnnnnnnnnnnnnnatagccactggccaggcattccccttcacaacagtagagacctacacagtgaactttggggacttttgagatcagcgtcctaccaagaccccagcccaactcaagctacagcagcagcacttcccaagcctgctgaccacagtcacatcacccatcagcacatggaaggcccctggtatggacactgaaaggaagggctggtcctgcccctttgagggggtgcaaacatgactgggacctaagagccagaggctgtgtagaggctcctgctccacctgccagtctcgtaagagatggggttgctgcagtgttggagtaggggcagagggagggagccaaggtcactccaataaaacaagctcatggcacggaaa

SEQ ID NO: 167873 - DNA, 1032 bp, Homo Sapiens
tggtgctggggtgactctccggatcttaggcgttgtagtgaagggccttgcagtagaagaagagtaagttcttagcagaaacagagctgatgatgaggaactgaccaatgatagcctgaccctatctcaaagcaagagtaatgaggactcgctgatccttgagaagagtcaaaactggagctctcaaaaaatggaccatattctgatttgctgtgtttgtctgggagataatagtgaggacgctgatgaaataattcagtgtgacaattgtggcattacagtccatgaaggttgttatggagttgatggagagagtgactctattatgagttcagcttctgaaaactccactgaaccttggtttagtgatgcctgtaaatgtggtgtttctcctagctgtgaactgtgtcctaatcaggatggaattttcaaggagacagatgctggaagatgggttcatatagtatgtgccctgtatgttcctggagtagactttggagatattgacaaattacgaccagtaacactaacggaaatgaactattccaaatatggtgccaaggagtgtagcttttgtgaagaccctcgctttgctagaactggggtttgcattagctgtgatgcagggatgtgcagagcctatttccatgtgacctgtgctcaaaaggaaggtctgctttcagaggcagcggcggaagaggatatagcagatccattctttgcttattgtaagcaacatgcagataggttagacagaaagtggaagagaaaaactacttggctctacagtcctattggtaaatgtctttgcaagagagagagaaagcactatcaccagaagcacaggcaaaggatcatgcccgggcttcgcagtatcggggccaagcagaactagctcgatctaccagacccccgggcctggggttccaagggaaaaaatggccccgaaccactcacccagccgggctttccgctatttcgtaaaacctaatgccggaaagcaaaaccctctggggggatcgcgtcccgagc

SEQ ID NO: 167874 - DNA, 581 bp, Homo Sapiens
  misc_feature (457)..(457): n is a, c, g, or t
  misc_feature (512)..(512): n is a, c, g, or t
  misc_feature (519)..(519): n is a, c, g, or t
  misc_feature (526)..(526): n is a, c, g, or t
  misc_feature (560)..(560): n is a, c, g, or t
aggccgttgtcaccgttgtcagtggctctttgacctggtcatcgttcaggtagttgggtaagcccccgatgaacagcttgtgggcagagtcggggaccacagtggacacaaccccaggcacatagacggaggggttctctgacatgccaggaagcggctggtagtcgtgaggcctgcggatctttagtgactggccctggaagatgatgccatcaaaggccatagcctggggtagtctcgtccactgagcggaactccaaaaaggcaaaattcttgtcctggttaatctgcacagccaacactgggttgccaggggcctgggtcagcccccccaggcgcatctgggcgttgaagaaatccatcatggcctcctcagtgatgccaaaggggatgttgcccacgtagaggcgccgggcttgtctggtcatctggctcccgaccacgggcacccgcgttnggggtcacagccagaccgtcagggttcatgggtgggggagaagagcagttgcttngaatttnaccccgnagctttttttggccttgtacttgcattgggggtnatgttgttcaaatacttgggg

SEQ ID NO: 167875 - DNA, 380 bp, Homo Sapiens
cgaactgatgctgaggtgactctcacaggattataggcgttgtcagtggcagacgggagtttctcctcggggtcggagcaggaggcacgcggagtgtgaggcacgcatgagcggacgctaaccccctccccagccacaaagagtctacatgtctagggtctagacatgttcagctttgtggacctccggctcctgctcctcttagcggccaccgccctcctgacgcacggccaagaggaaggccaagtcgagggccaagacgaagacatcccaccaatcacctgcgtacagaacggcctcaggtaccatgaccgagacgtgtggaaacccgagccctgccggatctgcgtctgcgacaacggcaaggtgttgtgcgatga

SEQ ID NO: 167876 - DNA, 501 bp, Homo Sapiens
gttgctcatagttattttttatttgaaagaaaataaactgattagagataaaggggatatcgtaggcaaggtaagtagttggatgaaatcacaggaagcatgaatagttgtgaccaattgcagaagactcaagctgattccatctcagggacacactctaccattcgggagatccccaacccatttgggtaaaactggaatgtctttacgagcagtggtagaagcagcggtggttgcagtggtaggagcagcagtggtcgcagtggttgcagcagcagtggtttcagcatcaggggcttcatcatcagcaggaccagtagctggatacgtgtcagctggagcagctgttgtcggattctgggcagagaccagaaagatggaaactcccaagagtaccaggactgctaagaacttcatggtggtgacctgaagatcagggagcacagacaaaaatgcttcaaagcctaagagaaggcaaggcgctcatgtgattgacacttg

SEQ ID NO: 167877 - DNA, 525 bp, Homo Sapiens
  misc_feature (495)..(495): n is a, c, g, or t
taatggtggggggaggaaaatcactttcgatgccgtagcctccagggcaatagtccgtatcgatggcgtttggatctgctgagtacaggggtgtctgctcatcaatcacctcatagctggggaactcttgtatgtccggcagaggaacgcttggcatccaatctgatgtatcccagtgatacccattgtcatcgcacgattcggactggaaggagctcagggactgcacttcagacaggctttcccggacactgtatggctgggaaggcttttcctctagaggcttcttggaaagacagggatcaagatccaccacttttgtggttgggcgcagcatcctcgcagtgacgtcccctgtactcgtggctgcagttgcagtgataggagccgtgcgtgttctcacagagggccccgtgcaggcaagggtttccagagcactcgtcgatatcactctgacacctttgctcccactaaaaccccgaatcacactgacanacggcgccatccaaactgtcaaagcatgtt

SEQ ID NO: 167878 - DNA, 346 bp, Homo Sapiens
tctgtgcgcgggcaccgaacagcagtggcggtccgcagcgtggcgccaaacctggcctcccccacccccttcaaactccccttctgacagcgactccatccagaagcctagctgggactttgactatgacacaaaagtggtggatcttgatccctgtctttccaagaagcctctagaggaaaagccttcccagccatacagtgcccgggaaagcctgtctgaagtgcagtccctgagctccttccagtccgaatcgtgcgatgacaatgggtatcactgggatacatcagattggatgccaagcgttcctctgccggacatacaagagttccccaacccgtacgag

SEQ ID NO: 167879 - DNA, 899 bp, Homo Sapiens
  misc_feature (714)..(740): n is a, c, g, or t
aggtgactctcgaggatccccaggcgtgtcagtgatgtatctgataaacaaggaaacatattcttaattcgagctgtttacgtttgacgtcttctgaggccaggcttcttgggcgtctgctccacagaaccggcatttggggaaccgcctgaaacattttcttctgttctgttggctcttttgttttgagtagaagaatcgtcggttgcaggtcgcttccttattcctgcgcattgctccgctaaccccgtctggctgtccgacggatcagtctttgggtccaccaaatgcgtgtcctcagagttagccggagccccaattaaaggcgccgccgggaggctcccgctgacatcctggctctcctgcgccggcaccttgcaggcacctttggggggccgcgggggtctgtagtagaactcgggcaagctgcccttctccacctcttgccactcgtacttgccctctaggggtttgtgattctgaaaatcgaaattccacttgcgctggctcgcctcttccatgtctctgcagtgcttctccaagtcccgggttaactcttcgtggtccaccgggccgaagaggctcctgcaggccgagggcttggggtgctccgcctgcctggcgtccatccgctccaggctagggctcccgttagacactcgcacgtttgacatctttctcccgggtctgcacgaccgcctatctcgcactctnnnnnnnnnnnnnnnnnnnnnnnnnnngcgcccctacgcaggcccgaatccctctcggaagcccagcgactgccctcggagccaaaagacacagaccccgacgagccacggcccgagctctaggagcgcgcagggctgcgggtaagccgccagacccgccaacgagtcgcgctgatcaaatgacgt

SEQ ID NO: 167880 - DNA, 209 bp, Homo Sapiens
cgttgtcagtgtctggcaacggctgcatacgtgatggactcggccatgggctttgtggactgtggggacacagcccgggctgtcctctgtgtgagggcccagtggtccagctgagcatacgtcacctcctgggaactcctgcagcaaggccgaggtgtccgtctctctgtccttctagaagtccactaacaggatccttagagtcacct

SEQ ID NO: 167881 - DNA, 360 bp, Homo Sapiens
gacgatgctcaggtggtgtgtcaacaacttggctgtggtccagctttgaaagcattcaaagaagcagagtttggtcaggggactggaccgatatggctcaatgaagtgaagtgcaaagggaatgagtcttccttgtgggattgtcctgccagacgctggggccatagtgagtgtgggcacaaggaagacgctgcagtgaattgcacagatatttcagtgcagaaaaccccacaaaaagccacaacaggtcgctcatcccgtcagtcatcctttattgcagtcgggatccttggggttgttctgttggccattttcgtcgcattattcttcttgactaaaaagcgaagacactgacaacgg

SEQ ID NO: 167882 - DNA, 586 bp, Homo Sapiens
gtctagaggatcccggcatgtggtcataccagggaatccgtacagagtaccagatggctttcagacagaggtgggaaaccatcccactttggaggatatgcaggttctcgtgtctagggaaaaacagagacccaagttcccagaagccgggaaagaaaatagccgggcagtgaggtcactcaaggagacaatcgaagacggtggggaccaggatgcagaggctcggcttactgcacagtgtgctgaggaaaggatggctgaacttatgatgattggggaaagaaacaaatctgtgagcccaacagtcaatccaatgtctacttgctatgcagaatgaacgcaacctgtcacataataggcgtgtgccaaaaatgggtccttatccagattattcttcctcctcatacattgaagactctatccatcacactgacaacatcgtgaagaatatttcctctgagcattctatgtccagcacacctttgactataggggaaaaaaaccgaaattcaattaactatgaacgacagcaagcacaagctcgaatccccagccctgaaacaagtgtcaccagcctctccaccaa

SEQ ID NO: 167883 - DNA, 882 bp, Homo Sapiens
acttgagtagggccagctgtcagcccaattacctatggatcgggaatcacgggaaacttgaggccttcctaatggacggctagttcaggttcaaatgaaattcgggtttttgcaggagaccttgtacatgactgtctccattattgatcgtttcatgcagattaattgtgtgcccaagaagatgctgcagctggttggtgtcactgccatgtttattgcaagcaaatatgaagaaatgtaccctccagaaaattggtgactttgcttttgtgactgacaacactttatactaagcaccaaatcagacagatggaaatgaagattctaagagctttaaactttggtctgggtcggcctctacctttgcacttccttcggagagcatctaagattggagaggttgatgtcgagcaacatactttggccaaatacctgatggaactaactatgttggactatgacatggtgcactttcctccttctcaaattgcagcaggagctttttgcttagcactgaaaattctggataatggtgaatggacaccaactctacaacattacctgtcatatactgaagaatctcttcttccagttatgcagcacctggctaagaatgtagtcatggtaaatcaaggacttacaaagcacatgactgtcaagaacaagtatgccacatcgaagcatgctaagatcagcactctaccacagctgaattctgcactagttcaagatttagccaaggctgtggcaaaggtgtaacttgtaaacttgagttggagtactatatttacaaataaaattggcaccatgtgccatctgtacatattactgttgcatttacttttaataaagcttgtggccccttttacttttttatagctt

SEQ ID NO: 167884 - DNA, 952 bp, Homo Sapiens
gggtcggcgtgctgcggcggaacggctgttggtttctgctggttgtaggtccttggctggtcgggcctccggtgttctgcttctccccgctgagctgctgcctggtgaagaggaagccatggcgctccgagtcaccaggaactcgaaaattaatgctgaaaataaggcgaagatcaacatggcaggcgcaaagcgcgttcctacggcccctgctgcaacctccaagcccggactgaggccaagaacagctcttggggacattggtaacaaagtcagtgaacaactgcaggccaaaatgcctatgaagaaggaagcaaaaccttcagctactggaaaagtcattgataaaaaactaccaaaacctcttgaaaaggtacctatgctggtgccagtgccagtgtctgagccagtgccagagccagaacctgagccagaacctgagcctgttaaagaagaaaaactttcgcctgagcctattttggttgatactgcctctccaagcccaatggaaacatctggatgtgcccctgcagaagaagacctgtgtcaggctttctctgatgtaattcttgcagtaaatgatgtggatgcagaagatggagctgatccaaacctttgtagtgaatatgtgaaagatatttatgcttatctgagacaacttgaggaagagcaagcagtcagaccaaaatacctactggggtcgggaagtcactggaaacatgagagccatcctaattgactgggctagtacagggttcaaatgaaaattcagggttgttgcaggagaccatgtacatgactgtctccattattgatcggttcatgcagaaataattgtggggccccaagaaaaatgctgcaacctgggttggtggtcactgcccatgttttaattgcaaggcaaaatatgaaagaaaatggtaccccttcccagaaaaattggttgaacctt

SEQ ID NO: 167885 - DNA, 1275 bp, Homo Sapiens
taggtagcgaggcctgggtggcgcttggctggtcgggcctccggtgttctgcttctccccgctgagctgctgcctggtgaagaggaagccatggcgctccgagtcaccaggaactcgaaaattaatgctgaaaataaggcgaagatcaacatggcaggcgcaaagcgcgttcctacggcccctgctgcaacctccaagcccggactgaggccaagaacagctcttggggacattggtaacaaagtcagtgaacaactgcaggccaaaatgcctatgaagaaggaagcaaaaccttcagctactggaaaagtcattgataaaaaactaccaaaacctcttgaaaaggtacctatgctggtgccagtgccagtgtctgagccagtgccagagccagaacctgagccagaacctgagcctgttaaagaagaaaaactttcgcctgagcctattttggttgatactgcctctccaagcccaatggaaacatctggatgtgcccctgcagaagaagacctgtgtcaggctttctctgatgtaattcttgcagtaaatgatgtggatgcagaagatggagctgatccaaacctttgtagtgaatatgtgaaagatatttatgcttatctgagacaacttgaggaagagcaagcagtcagaccaaaatacctactgggtcgggaagtcactggaaacatgagagccatcctaattgactggctagtacaggttcaaatgaaattcaggttgttgcaggagaccatgtacatgactgtctccattattgatcggttcatgcagaataattgtgtgcccaagaagatgctgcagctggttggtgtcactgccatgtttattgcaagcaaatatgaagaaatgtaccctccagaaattggtgactttgcttttgtgactgacaacacttatacctagcaccaaatcagacagatggaaatgaagattctaagagctttaaacttttggtctgggtccggcctcctacctttgcacttccttcggagagcatctaagattggagaggttgatgtccagcaacatactttgggcaaatacctgatggaactaactatgttggactatgacatggtgcactttccctccttctcaaattgcagcaggagctttttttgcttagcactgaaaaattctggaataatggtggaatggacaccaaactctccaacatttacctggtcatattactggaagaaatcttccttctttccagtttaatggcaacaccctggggctaaaaaaaga

SEQ ID NO: 167886 - DNA, 289 bp, Homo Sapiens
tgcggtgactctagaggtccccaggcgttgtcagtgatggtggctcgagaagcaatccagtgcacagtaaaagagttggcagtaatatcagaaaagtcaatgccagttggggaatcaagacctgttttctgtcttcctctaagaggtgtgctctcatgttgttcgtagacactggagacactcactacatattctgtaccaggcaggagatttgttaagaacactgcattgtctgaaggagaaaatgtcggctccgcaacgtatcactcatttatcgtaggtcagtaac

SEQ ID NO: 167887 - DNA, 363 bp, Homo Sapiens
  misc_feature (249)..(249): n is a, c, g, or t
gtggtggaggaagcaccgctgccagaattagcctgtgcttctgacaccttgttttctgggagagcaattgagatgagagaaaggagtctgaggagtttctcagttaagagagagctccggcggatgactgggtgtgacaacatgttcatgagctgccccagtggagaggcctcgaggctgtatggagaggtttccccctcaccgccagcgctcactggcaccgacttcacggagttcttccctttccgngctgacattcatgttgtccagttttaccaataagtcccagaagtctgtgcaaatgccactgctggaggactgtgaggagcatgggctacagccttattgcccctttccctttct

SEQ ID NO: 167888 - DNA, 381 bp, Homo Sapiens
tttccaaagcggagatgctgcggacagtgaaggaggaagctgagaagccagagagagaggccaaagagcagcaccagaagctgtgggaagagcagctggctgctgccaaggcccaacaggagcaggagctggcggctgatgccttcaaggagctggatgatgacatggacgggacggtctcggtgactgagctgcagactcacccggagctggacacagatggggatggggcgttgtcagaagcggaagctcaggccctcctcagtggggacacacagacagacgccacctctttctacgaccgcgtctgggccgccatcaggaacaagtaccggtccgaggcactgcccaccagaccttccagcatctccgctttggaaa

SEQ ID NO: 167889 - DNA, 778 bp, Homo Sapiens
catagctgcggacagtgaatgaagaagctgagaagccagaaatgatgaggccaaatagcagccccagaagctgtgaggaatgagcatctggctgctgccaaggcccaaacaggagcaggagctggcggctgatgccttcaaggagctggatgatgacctatgcgccaacgacgaactgatttccttcaaagacgagggcgaacaggaggagaagagctccgaaaactcctcggcagagagggatttagctgatgtcaaatcgtctctagtcaatgaatcagaaacgaatcaaaacagctcctccgattccgaggcggaaagacggcctccgcctcgctccgaaagtttccgagacaaatcccgggaaagtttggaagaagcggccaagaggcaagatggagggctctttaaggggccaccgtatcccggctaccccttcatcatgatccccgacctgacgagcccctacctccccaacggatcgctctcgcccaccgcccgaaccctccattttcagtccggcagcacacattactctgcgtacaaaacgattgaacaccagattgcagttcagtatctccagatgaaatggccactgcttgatgtccaggcagggagcctccagagtagacaagccctcaaggatgcccggtccccatcaccggcacacattgtctctaacaaagtgccagtggtgcagcaccctcaccatgtccaccccctcacgcctcttatcacgtacagcaatgaacacttcacgccgggaaacccacctcca

SEQ ID NO: 167890 - DNA, 1313 bp, Homo Sapiens
  misc_feature (1091)..(1156): n is a, c, g, or t
ctttctgcagcaggaaccgcggctgctggacaagaggggtgcggtggatactgacctttgctccggcctcgtcgtgaagacacagcgcatctccccgctgtaggcttcctcccacagaacccgtttcgggcctcagagcgtctggtgagatgctgttgccgctgctgctgctgctacccatgtgctgggccgtggaggtcaagaggccccggggcgtctccctcaccaatcatcacttctacgatgagtccaagcctttcacctgcctggacggttcggccaccatcccatttgatcaggtcaacgatgactattgcgactgcaaagatggctctgacgagccaggcacggctgcctgtcctaatggcagcttccactgcaccaacactggctataagcccctgtatatcccctccaaccgggtcaacgatggtgtttgtgactgctgcgatggaacagacgagtacaacagcggcgtcatctgtgagaacacctgcaaagagaagggccgtaaggagagagagtccctgcagcagatggccgaggtcacccgcgaagggttccgtctgaagaagatccttattgaggactggaagaaggcacgggaggagaagcagaaaaagctcattgagctacaggctgggaagaagtctctggaagaccaggtggagatgctgcggacagtgaaggaggaagctgagaagccagagagagaggccaaagagcagcaccagaagctgtgggaagagcaactggctgcttgccaaggcccaacaggagcaggaacttggcggcttgatgccttcaaggagctggatgatgacatggaccggacggtctcggtgactgagctgcagactcacccggagctggacacagatggggatggggcgttgtcagaagcggaagctcacgccctcctcagtggggacacacagacagacgccacctctttctaccaccgcgtctgggccgccatcaggtacaagtaccggtccgagggcactgccccaccgaccttccagcaccttctgcccctgacttgacggagcccaaggaggagcagccggcagtggcctcgtcgcccccannnnnnnnnnnnnnnnnnnnnnnnnnnnnnnnnnnnnnnnnnnnnnnnnnnnnnnnnnnnnnnnnntcccgaggtgcaggggggaccacccccagggaggcccaccggccctggcaccccccgagaccggccagccctggttgagaaaaacaaatgcccccctccgagaaacaaaccgcggcccttcttccatgctggcccaggaaggcccccaacaagttcc

SEQ ID NO: 167891 - DNA, 506 bp, Homo Sapiens
  misc_feature (405)..(405): n is a, c, g, or t
  misc_feature (410)..(410): n is a, c, g, or t
  misc_feature (458)..(458): n is a, c, g, or t
gggattccgaggcggaaagacggcctccgcctcgctccgaaagtttccgagacaaatcccgggaaagtttggaagaagcggccaagaggcaagatggagggctctttaaggggccaccgtatcccggctaccccttcatcatgatccccgacctgacgagcccctacctccccaacggatcgctctcgcccaccgcccgaacctatctccagatgaaatggccactgcttgatgtccaggcagggagcctccagagcacacaagccctcaaggatgcccgacccccatcaccggcaaacattgtctctaacaaagtgccagtggtgcagcaccctcaccatgtccaccccctcacgcctctcctcacgtacagcaatgaacacttcacgccgggaaacccacctncacanttaccagccgacgtaggaccccaaaacagggattcccacggctttcgnacctttcagatatattccccgtatttacccattttggctgggggacct

SEQ ID NO: 167892 - DNA, 851 bp, Homo Sapiens
  misc_feature (625)..(625): n is a, c, g, or t
tagaggatcccggtgtaaacggatcaggttcgagctgtgttgactaccactacttttcccttcgtctcaattatgtcttggaagaaggctttgcggatccccggagaccttcgggtagcaactgtcaccttgatgctggcgatcctgagctccccactggctgagggcagagactctcccgaggatttcgtgtaccagtttaagggcatgtgctacttcaccaacgggacggagcgcgtgcggcgtgtaaccagacacatctataaccgagaggagtacgcgcgcttcgacagcgacgtgggggtgtaccgcgcagtgacgccgcaggggcggcctgatgccgagtactggaacagccagaaggaagtcctggaggggacccgggcggaggtggacacggtgtgcagacacaactacgaggtggcgtaccgcgggatcctgcagaggagaggaacggtgactggaccttccaaaatccggtggaggtggaaaaggcctccccacgcggagatatgtctacacctgccagcgggagcaccccagcctccagagcccatcagcgtggagtggggggctcagtctgtatctgcccagagcaagatgctgaggggcgttggaggcttcntggtgggggctgatcttccctgggggtgggccttatcctccgccaaaggagtcggaagaggggctcctgccactgacctcctgggaattgttttaaacaaagaatggggtatcacctttttcgggggagtgcctggtttggcccctggcccaaaattccccgcctggcctggggtcaactttggccccccccgtgaaatcaaaagccctaacaggggggcgtgcct

SEQ ID NO: 167893 - DNA, 1085 bp, Homo Sapiens
catgttgggttttgattatttgtggtgctaagaagaagggaacatggttggaggcccagtgagagaaacagtgctttgaatcaaagagcagaatgatagaaactgacttcagagcaacttcttggcagcagtatccaatttggaagttgaaggtctgtcctggagccagatgctaacgaaacacagcaaatgcttttcctaaggcacaatagtcttttcagtgagctcaggaaccctgtttatgcagatcctcgttgaactttcttgctcctcctgtgcatgaagatgcccactccacagatgatgagccccagcacgaagcccccagctcccgtcaatgtcttactccgggcagaatcagactgtgccttccactccacggtgacaggactatccaggctggtgtgctccacttggcaggtgtagacgtctccctgctggggggtcatttccagcatcaccaggatctggaaggtccagtctccattacggatcaggttggtggacacgaccccagctgtttcctcctgtccattcaggaaccatcggacttgaatgctgcctgggtagaaatctgtcacgtggcagacaagcaggttgtggtgctgcaggggccccttcttggagggggaaacgttcaccttaggctggactcggcgctgcagggtcacggcctcgtccagctcgtagttgtgtctgcataccctgtccggcactgcccgcttctcctccaggatgtccttctggctgttccagtactccgcagcaggccgccccagctccgtcaccgcccggaactcccccacgtcgctgtcgaagcgcgcgtactcctcccggttgtagatgtatctctccaggaagcgctgtgtcccattaaacgcgtagcattcctgccgtccctggtacacgtaattctctggagtggccctgccctggaccacagatgtgagcagcaccatcagtaacgccgtcagagccactgtccggggggccgcagaaacctgcagaaccatcatggagctggaaaaggatggcaaaatgaaaagagctgcagtcaggaaaagaaggactcgctaaaggggccc

SEQ ID NO: 167894 - DNA, 1417 bp, Homo Sapiens
  misc_feature (1188)..(1189): n is a, c, g, or t
  misc_feature (1191)..(1191): n is a, c, g, or t
  misc_feature (1193)..(1194): n is a, c, g, or t
gggatagttctccctgagtgagacttgcctgctgctctggcccctggtcctgtcctgttctccagcatggtgtgtctgaggctccctggaggctcctgcatggcagttctgacagtgacactgatggtgctgagctccccactggctttggctggggacaccagaccacgtttcttggaggaggttaagtttgagtgtcatttcttcaacgggacggagcgggtgcggttgctggaaagatgcttccataaccaagaggagtacgtgcgcttcgacagcgacgtgggggagtaccgggcggtgacggagctggggcggcctgatgccgagtactggaacagccagaaggacctcctggagcagaagcgggccgcggtggacacctactgcagacacaactacggggttgtggagagcttcacagtgcagcggcgagtccatcctaaggtgactgtgtatccttcaaagacccagcccctgcagcaccacaacctcctggtctgttctgtgagtggtttctatccaggcagcattgaagtcaggtggttccggaacggccaggaagagaagactggggtggtgtccacaggcctgatccagaatggagactggaccttccagaccctggtgatgctggaaacagttcctcggagtggagaggtttacacctgccaagtggagcacccaagcgtgacgagccctctcacagtggaatggagagcacggtctgaatctgcacagagcaagatgctgagtggagtcgggggctttgtgctgggcctgctcttccttggggccgggctgttcatctacttcaggaatcagaaaggacactctggacttcagccaacaggattcctgagctgaagtgcagatgaccacattcaaggaagaaccttctgccccagctttgcaggatgaaaagctttcccgcttggctgttattcttccacaagagagggctttctcaggacctggttgctactggttcagcaactgcagaaaatgtcctcccttgtggcttcctcagctcctgcccttggcctgaagtcccagcattgatggcagcgcctcatcttcaacttttgtgctcccctttgcctaaaccttatggcctcccgtgcatctgtactcaccctgtaccacaaacacattacattattaaatgtttctcaaagatggagtttnnancnnccaccacaacccacaacagcaaaaagcatactgtgcgtgctacacaagagaagaaaaatacactttgttggcccgcttcggcccctcgaaaaactttctaaaaccatttcgttggggggcgcgggccccacgtagggaaaagggaacccggggccatagctggtttcccaaaggaaaatcccggggccatggacacaagggctttgggatttctcccccaaat

SEQ ID NO: 167895 - DNA, 189 bp, Homo Sapiens
caggatctcaggccgttgtagtgttatctagccagtcaaacatagcctgaagagtgtcctgatactgcacagcagcttgcatagcatcctcaagtttttctagcctctctttccatgtttagtttaagttctcccaagcattattcatctcatcaatgctcttcctcacttcaggcttctcagtttctc

SEQ ID NO: 167896 - DNA, 290 bp, Homo Sapiens
aggcctttgtcagtggctaagtctgtcttccctccaggaatggggaagcaggagccgtcagaacagccgtctcctatctgaggcaccaggaacaaacatgacgtcaggaaaagacctgaaggtgccaagcacctaacgctgaaggaaccagcatgtgcctggcagcactgcagagagcacaccccaggcaccagaggccagggtgtcattcacaggtcaaagcaaaataagaaaatcataatttttccccttgttccaaagaaacatccacgtgggggacctctagagtc

SEQ ID NO: 167897 - DNA, 331 bp, Homo Sapiens
cgaggatacaggccgtgtcagtgaatcgctcatttagtgaggaggctttcaaatgcattgagctagagtcatcgaattcaggttgatctcaccatttccttgctattctaaccatacataactcttttggctcctgtaaccagcattcactcttacttagcagcatacctaaatatttcctgttatctaaaatctactaactatcacgattctacagacaactattactctttagatataggcttaaagttagttatctgagaagacttctttagtgcctatattggtcagggagctagctccaaaagagaaatctactcctacaatttta

SEQ ID NO: 167898 - DNA, 209 bp, Homo Sapiens
atccaggccgttgtagtgccttcccctttgggtttgggccagtgacctggcttgtcctcagcgagatctaccctgtggagatacgaggaagagccttcgccttctgcaacagcttcaactgggcggccaacctcttcatcagcctctccttcctcgatctcattggcaccatcggcttgtcctggaccttcctgctctacggactgaca

SEQ ID NO: 167899 - DNA, 324 bp, Homo Sapiens
cccgatggttactggctgttgcagtgactggactacataacatgtttcattctatgacaggaaggccccctcatagatctttgtttggttctttgtaataaaggagtcatcctctgcattgtacatgctgaggtgataactattcccaactccattgtggcatgggggactggggcaataatggcacttgttcttatagaccattaatgaacagcaagctgaaaatttggattctgagatacagcatttggaatactgcaatagcagtttaggttaatgtagcatagaaacaagacaagaggagatggggacaatagaagagta

SEQ ID NO: 167900 - DNA, 244 bp, Homo Sapiens
agaggacccaggcgttgtagtgaggcccgttgtcagtgcgctcacaggagggattagcctgggcatctcttcctatacctgctctcttccccatcggacatcagtggctctagcatcataaggtcaggagcaaagtgacacccctatttcagatgaaaagaggacttctccacatcagtgctgcgttatcatggtcctcttcccttccccttctgagctgggccccttctcttcccactgacaa

SEQ ID NO: 167901 - DNA, 524 bp, Homo Sapiens
tgcttgggtcggtactggagtcggtgagtgtggaaaggatgaaggagggtggaaaaggcattgatgtgctgctcagttttttgttcctccagctccctctctggtttcaagataaatacctgtcaaggtcttaaagtcggaggtcagctctgaaaggtagaaaatcctcccttagactgaaaatggtttcaatgtaactggagtcagtgaagtgacaggcagtgggtgggagagagggttgaacaggtgcctggagcagagttcaggatcctggatgagagcagagtctgagcccccaatggagaaggggtagtttcatgtgaacagagccttcgttacggtgatgtctagtaatgcttgaatggtaatgcccacttggaccaggcctttttcttcaaggatgtggtgggggagacatagcttttcctcgggtactcctaattttcggcacgcttccaaaaagttttccacatttcttctgcattgggccatgctaagttcgggaaccgcagttgaaagacgca

SEQ ID NO: 167902 - DNA, 798 bp, Homo Sapiens
ctccaaatgagattagagagaactcccctgcagtctctcctaccacaaacagcacagctccatttggcctgaagcctcgatcagtgtttctaagacctcagagaaatttggaatctatagacccgcagtttacaatccggaggaaaatggagcagatgagagaagagaaagagctggtggaacaacttcgtgagagcattgagatgagattgaaggtcagtctacacgaagacctgggggcagccctcatggatggtgtcgtcctctgccatctggtcaaccacatccgcccacggtcggttgcaagcatccatgtcccatcaccagcggttcccaaacttagcatggccaaatgcagaagaaatgtggaaaactttttggaagcgtgccgaaaattaggagtaccagaggaaaagctatgtctccgcccaccacatccttgaagaaaaaggcctggtcaaagtgggcattaccattcaagcattactagacatcaccgtaacgaaggctctgttcacatgaaactaccccttctccattgggggctcagactctgctctcatccaggatcctgaactctgctccaggcacctgttcaaccctctctcccacccactgcctgtcacttcactgactccagttacattgaaacaattttcagtctaagggaggattttctacctttcagagctgacctccgactttaagactggacaggtatttatcttgaaaccagagagggagctggaggacaaacaaaaactgagcaagcacatcaaggacttttccaacctcctg

SEQ ID NO: 167903 - DNA, 861 bp, Homo Sapiens
ctgcatcccgggggcctagactcagcccctctaagtctgttcggtaggcatcatattccagcctggcagcctcatactgtttcacagtcatgagcgtgtcttccatggtcttggtgaccaatgtgttgatgctagagacaaagaagttcacggctcctagcagcgtttccccattcttgcatagtagtttctgtgtctctgcattgtagccaaattcctcctgaagctctggggacttctggctgaggtcagcaaaggcatcacccagtgcatgctgggtctgcagcaggctgtagaggtgggctgtcagtgcccggcccagctgcaggacactctcatacttgcgcttcgtctcacgcagcaactcaatctgcagctctagctccaggtccacagtccgtgagcctcgaccaaatcgttctgataacagttgctttgtgcacttataggtgttgatgccccatttcttgacgatgtcaaacttctctccagcaatgccccgagccacctcatctccagggccagaaggagtggtgctgtgagatggatggcggccagaccctgtggggatgagtccatcaccagagcccccatagccaccagacacaatgctggtttcattgaggttgggtcctgacaccatcacctgctggaggtcctgctccagcccatcatcttcaggaagctgcctggcttcgccgttcccgtggatagggatctccattgtggctgccttccctaggatcccgtccgtcatggctcgggccgggccgctcttcccctcagggcgccaggcccgggccgcgcggggacctcgggctccagttcccgtcgcgatcctagcagcaggtcagggactcg

SEQ ID NO: 167904 - DNA, 292 bp, Homo Sapiens
  misc_feature (218)..(252): n is a, c, g, or t
tgcctgctgtcgctagacactttacatgctgatcacatttactcctcacaaccatcttgtaacgggagacatcatcagtgccatttgaacaaatgaaaaactgagactcagagagattcaataccttatccaaagctctccagacaataagtgcaaaaacaaggatttgaattcaggactgtttgatatccaaatctggaactttctggaacctctgnnnnnnnnnnnnnnnnnnnnnnnnnnnnnnnnnnngcaccatgtcctgagctgctgcctcctagcgacagaggca

SEQ ID NO: 167905 - DNA, 913 bp, Homo Sapiens
  misc_feature (856)..(857): n is a, c, g, or t
  misc_feature (861)..(861): n is a, c, g, or t
  misc_feature (866)..(867): n is a, c, g, or t
  misc_feature (869)..(870): n is a, c, g, or t
tggcgaaagagccggcggagccggagacccgctcccggagacgccgcctcgcgatccccgcgcgggcgggaccgggcggccggcatcatgaccctgtttcacttcgggaactgcttcgctcttgcctacttcccctacttcatcacctacaagtgcagcggcctgtccgagtacaacgccttctggaaatgcgtccaggctggagtcacctacctctttgtccaactctgcaagatgctgttcttggccactttctttcccacctgggaaggcggcatctatgacttcattggggagttcatgaaggccagcgtggatgtggcagacctgataggtctaaaccttgtcatgtcccggaatgccggcaagggagagtacaagatcatggttgctgccctgggctgggccactgctgagcttattatgtcccgctgcattcccctatgggtcggagcccggggcattgagtttgactggaagtacatccagatgagcatagactccaacatcagtctggtccattacatcgtcgcgtctgctcaggtctggatgataacacgctatgatctgtaccacaccttccggccagctgtcctcctgctgatgttcctcagtgtctacaaggcctttgttatggagaccttcgtccacctctgctcgctgggcagttgggcagctctactggcccgagcagtggtaacggggccgctggccctcagcactttggcccggtatgtcgcccttggccatgtgcactcctaggctgggggtctccaaacatgatggaactttttccctggcctccctccaggtttttagggaagtaaaacaagaattttgggaaaggttaaaaaannaaanaaacnnannaaaaaccccgaggggcctttttgggtccgggggggcggaaaaa

SEQ ID NO: 167906 - DNA, 1066 bp, Homo Sapiens
  misc_feature (40)..(40): n is a, c, g, or t
  misc_feature (111)..(111): n is a, c, g, or t
aatgaaaggctgcccgggcctggaaaggcccaaaaccccngccaccaaggccttccttttaaaatccccctctgcctccccaaactccaacaaaaatgaggaccctccccntttaaaaaacgaaaaaggccactgttcctccaaaaggtaatacatttggaacttccaataatgaaaagcatcctcttgccttggcaggtggaatataggcaattttggatttttaaatgcatggcatggggcgggagtgaaatatcttgcccagggcttgtttgccctataatgggagagaaccaggcctctggatgatacggtatcaaacactgctgctcctttctgttttcttttgtgggaaagggaggaggatagaatggagaggaattagtgggagcctgggggaagttcaaaataaagaaactgtgaaatcctccacctcaaagttgggtctgcaccaggattctgcctgatgcccaccgcatggagtgattatgtagccaataaagtgcctccagtaaggtcttgaaaactgttggttaaggagggaacgtttcctgtccctcctgatgtttctttccatgttggggcactcagtgtgcgtaactccaggcctgtctctgccctccactcattcagtaaataaggaaagtgtaaaccgagcatgtttggctcctctctccccgttttcaggagtgtgctgtccggagggagcaggcggtattctctgctattccatgcaagcagctgttgtggggcctgatgcaattttgtggaggctacagtgtgtggtggtgatgatgacagaactggagataaaagagaggccatcgttcatgctgacctggagtgcagctttcatgccaacttcttttaagataggcgctggacacagtaaataagtatcttccacagaaaagggcttctcattgagtgtgaccgagtcattgatcttgaagctgcagaggaccctgtccacgttgcgggcatgtcggaagccgtttcctctcacgacaacttgaaatcggacgcgtgggtcgacgatatcccggaattccgaccgtaccagccc

SEQ ID NO: 167907 - DNA, 872 bp, Homo Sapiens
aggccctggccgtggcgaaagagccggcggagccggagacccgctcccggagacgccgcctcgcgatccccgcgcgggcgggaccgggcggccggcatcatgaccctgtttcacttcgggaactgcttcgctcttgcctacttcccctacttcatcacctacaagtgcagcggcctgtccgagtacaacgccttctggaaatgcgtccaggctggagtcacctacctctttgtccaactctgcaagatgctgttcttggccactttctttcccacctgggaaggcggcatctatgacttcattggggagttcatgaaggccagcgtggatgtggcagacctgataggtctaaaccttgtcatgtcccggaatgccggcaagggagagtacaagatcatggttgctgccctgggctgggccactgctgagcttattatgtcccgctgcattcccctatgggtcggagcccggggcattgagtttgactggaagtacatccagatgagcatagactccaacatcagtctggtccattacatcgtcgcgtctgctcaggtctggatgataacacgctatgatctgtaccacaccttccggccagctgtcctcctgctgatgttcctcagtgtctacaaggccttttgttatggaagaccttcgtccacctctgctcgctgggcagttgggcagctctactggaccgagcagtggtaacggggctgcttggccctcagccactttgggccctgtatgtcgccgttgtccatgtgcaactccttacggcttggtggtactaaggacattggatgtacccttttcccctgcctcgctccaggtataagtgaagtaaaccagcaattttgcgaacggtt

SEQ ID NO: 167908 - DNA, 446 bp, Homo Sapiens
  misc_feature (99)..(120): n is a, c, g, or t
  misc_feature (148)..(221): n is a, c, g, or t
tgacacgccgaggcaccatacctggccgagtcctctaatgcttagtagagagaaaagatgaaatgagtacctggggtatcagccaataggctgagctgnnnnnnnnnnnnnnnnnnnnnnagacaggattttgctgtcgcccagtcannnnnnnnnnnnnnnnnnnnnnnnnnnnnnnnnnnnnnnnnnnnnnnnnnnnnnnnnnnnnnnnnnnnnnnnnnataaagctacatgaaagattgatagaatattttagattatttattggccaaaagtttttaaaactcatatttggaagcaaaatgaaaagcaagtaaaatgttttaaatggttcatggaaaacgtatttgggtagaaggcaactcgtgcttccggaaggggttccctgtcctccatgtgtccacatggcggtcaggtagggacgacctgttctgtaaagtccttgg

SEQ ID NO: 167909 - DNA, 959 bp, Homo Sapiens
aaagggaacttgggcccaattccttacagccgggtactgccaaaagggggcccgcccccccaagacggaaggttgccaggcccagctctttttcaaacccttggagaaacaaacgccccacgggacccagtgtttgaaggttccctcctgactccaaaataggatctttaaccaggttggtattggtccatctcctgccggaaaagaatccaacgggaaggggcagagttcctctactcggatggatggcaaagtccatgtttcttggccccccagagattctctttgtttcaccagggagtagaaatgtttgccggagcagaacacgagggtcttaaccttttttggatccacagatgaatcaccaatgaccgggttaaatgttgttcctggtgccatttcttgaagagttgacacggctgccgggagcctgagtaacatcttaggggaagcaacaatgagtggttttctgaagttccggaccatctgtctcctaagcaagtggaaatactgtgcaggagttgttgggtgaaccacaaacatgttcacagtgtctccgtcaaccccctcttccgcactgtcacacatctgcaggaaacgctctattcgacaggatgagtggtctggcccagccccatcgtagccatgtggaaggaggatgacaatgccgctttgtaggagccacttggcctctcctccagagatgaatgtgtcaaagatgatctgggcaccattgaagaaatcgccaaactgtgcctcccacaggggcagtaactttgggctctcaatgctcatcccatattcgaatcccaggacggcctcttctgacagggggctgttgctgacctctagaaaccccttctgatttgggtccatatggttcagggggatgtaggtgtcatccgtctcctggcaaaccacgattgcatgcctctgactgaaagttccacgaccaacat

SEQ ID NO: 167910 - DNA, 938 bp, Homo Sapiens
  misc_feature (595)..(595): n is a, c, g, or t
  misc_feature (869)..(879): n is a, c, g, or t
ccagagctgatgttccgtaaaatgcgaggcttaagtgaatttccagagaatttctcagccactggagacgtcctgtctcacctgacctcctctgtggacctgtactttggggcgcaccatcccctccatgtgacaatgttgcccaatccctcgcacctggaggccgtcaaccccgtggccgtgggcaaaactcgcggcaggcagcagtctcgccaagacggcgattactctccagacaactcagcccagccgggggacagggtcatttgcttacagggaagcttgtgggctgtgccatcatccatgtcaatgggagacagcccagaggaagtggtccgtgccacacgactggcttttgaataccaacgccagttccgcaaggatgtgattattgatctgttgtgctacaggcagtggggccacaatgagctggatgagccattctacaccaaccccatcatgtacaaaatcatcagagctcgaaagagcattccagacacatacgcagagcacctcattgctggcggactcatgacgcaggaggaggtgtctgaaataaaatcctcctactatgccaagttgaatgatcacttanataacatggcccactacaggcccccctgccctgaaactgcaaggccactggcagggccttggctcatcccagaaacgcaaatcaccaccctgggagtacagggggtgccccctcaaacctcctgcgggtttggttggcattgaagtcttgtagaaggtgcccaaaagaagctgcagaatgcacaagtcaccctgccttaaaaaacacatgtttcagttcccagaaatgggaaaaaaatgaatggaacgggaattcaaagctttaaacatggggnnnnnnnnnnnggagaaacctcctttgcccctttgggggttctcttttaccttggcccccagagggtttc

SEQ ID NO: 167911 - DNA, 975 bp, Homo Sapiens
ggcctgggtggcgaattcggcacgagggggaagtccgagggcacctgaagaaaaagcgcccagaagaatgtgactgtcacaaaatcagctaccacacccagcacaaaggccgcctcaagcacagaggctccagtctgcatcctttcaggaagggcctgcaagagaaggacaaggtgtggctgttgcgggagcagaagcgcaagaagaaactccgcaagctgctcaagcgcctgcagaacaacgacacgtgcagcatgccaggcctcacgtgcttcacccacgacaaccagcactggcagacggcgcctttctggacactggggcctttctgtgcctgcaccagcgccaacaataacacgtactggtgcatgaggaccatcaatgagactcacaatttcctcttctgtgaatttgcaactggcttcctagagtactttgatctcaacacagacccctaccagctgatgaatgcagtgaacacactggacagggatgtcctcaaccagctacacgtacagctcatggagctgaggagctgcaagggttacaagcagtgtaacccccggactcgaaacatggacctgggacttaaagatggaggaagctatgagcaatacaggggacaactgtgggaaggctgggaaggttaagaaacaacagaggtggacctccaaaaacatagaggcatcacctgactgcacaggcaatggaaaaccatgtgggtgatttccagcagacctgtgctattggccaggaagcctgagaaagcaagcacgcactctcagtcaacatgaacgattctgggagataacccgcaggagcagagaataacttcaggaaatcccatttttgcccctgcttttgccttgggattatacctcaccagctggacaaaatggcatttttttcgaatcaaaaagtcacccctaaccctcccccaaaaagcttcccaaaggaaaaccgaaaaaaccaacc

SEQ ID NO: 167912 - DNA, 948 bp, Homo Sapiens
  misc_feature (547)..(547): n is a, c, g, or t
  misc_feature (553)..(553): n is a, c, g, or t
  misc_feature (650)..(650): n is a, c, g, or t
  misc_feature (786)..(786): n is a, c, g, or t
  misc_feature (796)..(796): n is a, c, g, or t
gaggagctgcaagggttacaagcagtgtaacccccggactcgaaacatggacctgggacttaaagatggaggaagctatgagcaatacaggcagtttcagcgtcgaaagtggccagaaatgaagagaccttcttccaaatcactgggacaactgtgggaaggctgggaaggttaagaaacaacagaggtggacctccaaaaacatagaggcatcacctgactgcacaggcaatgaaaaaccatgtgggtgatttccagcagacctgtgctattggccaggaggcctgagaaagcaagcacgcactctcagtcaacatgacagattctggaggataaccagcaggagcagagataacttcaggaagtccatttttgcccctgcttttgctttggattatacctcaccagctgcacaaaatgcattttttcgtatcaaaaagtcaccactaaccctcccccagaagctcacaaaggaaaacggagagagcgagcgagagagatttccttggaaatttctcccaagggcgaaagtcattggaatttttanatcatnaggggaaaagcagtcctgttctaaatcctcttattcttttggtttgtcacaaagaaggaactaagaagcaggacagaggcaacgtggagaggctganaacagtgcagagacgtttgacaatgagtcagtagcacaaaagagatgacatttacctagcactataaaccctggttgcctctgaagaaactgccttcattgtatatatgtgactatttacatgtaatcaacatggngaacttttanggggacccctatagaaatcccattttcagggaagtggtggtgtcaataaacgctctgtggccagtgtaaagaaaatcccctcgcagtggtgggacatttctgtttcctgttcagatacatttcttcctaaaaattcctttggttatgtccca

SEQ ID NO: 167913 - DNA, 885 bp, Homo Sapiens
  misc_feature (785)..(785): n is a, c, g, or t
gaggagctgcaagggttacaagcagtgtaacccccggactcgaaacatggacctgggacttaaagatggaggaagctatgagcaatacaggcagtttcagcgtcgaaagtggccagaaatgaagagaccttcttccaaatcactgggacaactgtgggaaggctgggaaggttaagaaacaacagaggtggacctccaaaaacatagaggcatcacctgactgcacaggcaatgaaaaaccatgtgggtgatttccagcagacctgtgctattggccaggaggcctgagaaagcaagcacgcactctcagtcaacatgacagattctggaggataaccagcaggagcagagataacttcaggaagtccatttttgcccctgcttttgctttggattatacctcaccagctgcacaaaatgcattttttcgtatcaaaaagtcaccactaaccctcccccagaagctcacaaaggaaaacggagagagcgagcgagagagatttccttggaaatttctcccaagggcgaaagtcattggaatttttaaatcataggggaaaagcagtcctgttctaaatcctcttattcttttggtttgtcacaaagaaggaactaagaagcaggacagaggcaacgtggagaggctgaaaacagtgcagagacgtttgacaatgagtcagtagcacaaaagagatgacatttacctagcactataaaccctggttgcctctgaagaaactgccttcattgtatatatgtgactatttacatgtaatcaacatggngaacttttaggggaaccctaataagaaatccccaattttcagggagtgggtggtggtcaaataaaacgcctcctggtgggccagatggtaaaaagaaaaa

SEQ ID NO: 167914 - DNA, 1225 bp, Homo Sapiens
agttccgctggctagtgtgtacgctggcgagcttctccccgcgccgcccgctcggctcccatagcgcccgcgacagcggtccggacgccgcccgaacatggactccgccggccaagatatcaacctgaattctcctaacaaaggtctgctgtctgactccatgacggatgttcctgtcgacacaggtgtggctgcccggactcctgctgttgagggtctgacagaggctgaggaggaggagctcagggctgagcttaccaaggtggaagaggaaattgtcactctgcgccaggtcctggcagccaaggagaggcactgtggagagctcaagaggaggctgggcctctccaccctgggggagctgaaacagaacctgtccaggagctggcatgacgtgcaggtctctagcgcctatgtgaaaacttctgagaaacttggagagtggaatgagaaagtgacccagtcagacctctacaagaagactcaggaaactctttcacaggcaggacagaagacttcagctgccctgtccacagtgggctctgccatcagcaggaagcttggagacatgaggaactctgcgaccttcaagtcgtttgaggaccgagttgggaccataaagtctaaggttgtgggtgacagagagaacggcagtgacaacctcccttcctcagcggggagtggtgacaagccccttgtcggatcccgcacctttctaaagcctgtggttgcttcacccgctgaaaagcacacgcaacccagcctcagcatcacagccgcagctctgttcagcggagcagccagccaggcggatgagcagagccggccctgaggacagtcctgcccatccacgcggagatgtggctgccgcgtttgcatgaatttgaagaacacaggcttgtacacagatgttttacactcacgtttgtagatgaaacagatcactgtgctgtccttcctaggggtgcaggaagtggacagggcggagggtttgaaagaatattgagccaaagcccaggctccctttgggaatcatgttagcccatcagaatgttgaaggattgaagagttctaagcataaaataagtggcattttctgacttcttcctcctcctccttccctgactcacagaaggaatgcaatcacccagcaagtcctacctgttacgcaattttttatctcaaaatgccgaacgagaaaactgtccattttctgagaccccca

SEQ ID NO: 167915 - DNA, 882 bp, Homo Sapiens
atgatctagaggatcccgcccatggcagcgaagcagaacactggtttggtggagagatctgataacaaaaagttgggaaataggtaaaataataacttggggtagaggttatgcttgtgtttctcccaggaccgaatcaacagctgatttggataccattaagacacctgaaaccttattatgagctagatgcccaggaagagattctgggagaatcctgaggaccccccagttgcagccatgtcaagactgatgctgaggaggaccccaactgtcacgagcaacacccatcgaacacagccacctacttggggaaagatcaagaagctgtcacagatggtggaagaaaacctgaggaaagcgggacaaccagtcacaatgagtaatttaatgatagctatgagagcggtgatcaccattgctgtgagtattccttcagcaagcactgacacagagaacaattatacttattgggcatatctatcaatcttggctggcaataatgcctggatgtaatcactctatgacccagttacacatgctttctgatctcagtatttgccataatgaatctgctcctataattaaggcataccaccctcaaaaacctatttgtaaacagaattgaacctggccagaaaaaatgaatgtacttgtttgggaagattgcattgcagaacaggcagaggtgctgcgcatatgattcctatggaatcattattgatcggtctcctaaggggatgtttagcttgaattgtacctctgagtatgtgtgccatggccacactatgtacagctggtcagaagaaaacagtcagatggtagacatggtaagaagtatggccagagttctataatctggatcagataggaggggtccga

SEQ ID NO: 167916 - DNA, 1051 bp, Homo Sapiens
ggggatgccctaaaggagaaagtcatcaaagcagttgtgcctgcgaaataccttgatgaggatacaatctaccacctacagccaagcggcagatttgttattggtgggcctcagggtgatgctggtttgactggacggaaaatcattgtggacacttatggcggttggggtgctcatggaggaggtgccttttcaggaaaggattataccaaggtcgaccgttcagctgcttatgctgctcgttgggtggcaaaatcccttgttaaaggaggtctgtgccggagggttcttgttcaggtctcttatgctattggagtttctcatccattatctatctccattttccattatggtacctctcagaagagtgagagagagctattagagattgtgaagaagaatttcgatctccgccctggggtcattgccagggatctggatctgaagaagccaatttatcagagaactgcaacctatggccaatttggtaggaacagcttcccatgggaagtgcccacaaagcttaaatattgaaagtgttagccttttttccccagacttgttggcgtaggctacagagaagccttcaagctctgagggaaagggccctccttcctaaattttcctgtcctctttcagctcctgaccagttgcagtcactctagtcaatgacatgaattttagcttttgtgggggactgtaagttgggcttgctattctgtccctaggtgttttgttcaccattataatgaatttagtgagcataggtgatccatgtaactgcctagaaacaacactgtagtaaataatgctttgaaattgaacctttgtgccctatcacccaacgctccaaagtcataattgcattgactttccccaccagatgctgaaaatgcccttgtgatgtgcacgtaaagtacttgtagttccacttatagcctctgtctggcaatgccacagccctgtcagcaggaatttgtaatgtcttgagctctattatgaatgtgaagccttccccctatcctcagtctgagagaggggatcctctagt

SEQ ID NO: 167917 - DNA, 310 bp, Homo Sapiens
gcagggccccctccccaggagcttattgaagaagagccctctgctcccccaaccctgttggaagaggagactgaggatgggagtgacaaggtgcaggcccccaccagagtacacctgcagaagaagagatggagacagagacagagcgccgaagctctccaggaaaaggagcaggatgacacagccgccatgctggccgatcttcatcgattgtccccctgatgatcagaagccaccacctcccacagagcctgactcatagccatcttctgcaccccaactctttgtttccaataaagttatgtcctca

SEQ ID NO: 167918 - DNA, 295 bp, Homo Sapiens
ctttactactaagggtgaattaacaatgggaagcagatactaagttgtgatagtctacttacaccataaatatatgctcactagaagagtaactatatttaccaaaatacagatttccttcctctgcttcagaataaaagtgaatattcctactaccatgcattgctacattttctgttaacatttgttaaaacgttttattaaaacccaagaaattaatgactgaatacacactactgactttctcaagctatatttttccataatttatattaatagcaactacctctcctca

SEQ ID NO: 167919 - DNA, 230 bp, Homo Sapiens
tttgtaaagggatcccgcatgtctcctgctactgaagttacagggagctctccggaggggccctgggtcccaggtcttgtttgccaacacctggagacctggaatacgtggactggagtcaccgtacagaatcaggctgcaatggccacatttctatcaccttcgagaaggctaccaagtggcacattgatgaacttcttggcatgaaaaccaggggctatttctcctca

SEQ ID NO: 167920 - DNA, 590 bp, Homo Sapiens
cgtactatgtctgcctcgagcttattggtgataacccatggacacatgaacaagttggtacagtgcaaattgggaatcgtgacattcatagaagctgaacaggtgcctgaacttgaagctgttctccatgtggtgattgcctctagtgatacacgccacagtgtggcaccggaagcagacctagaattgaaaagcaaacagagcttaattgactggaataatcctgccatcattaataagatgtacaaggtgtaccttggagatataccactgaagacaaaagagggtgcagttctgaagccagagttgaaaagggatcctgtcagtacaagagtcaagttaaagattgtcccccatctcctccgctctagacaagctgctgaaacgttcccagccaacattcaggtggtgtatgatggactttttggtacaaatacaaattcaaagttaagaacattatccctgcaatttgtgcatcatatttgtataacctgtccagaaatcaagattaggccattaggtccaatgcttttgaatggcctcaccaagaccaagctgcatggtacagagctcgattgtatcatgtaact

SEQ ID NO: 167921 - DNA, 982 bp, Homo Sapiens
gttgacgtccagatgcgttcctctccatgagatcgaaaaagagacaaatatgtttgaatacattttagtaggtctgtttccttatgagttccttgtggtggcagaattccattaacaaggcccagttgctgcaatgttggaatagctgatatgtcagtttggggcaggctacatggaactccaggactggtattaaatgaattccgtagaacatcagtacaggttgcagaaactgttttaccttgtgatgcaaactgactgtcgccatcagtttgaacttcagaatgaacctttggagggcagggtggccgctgaagtgaccagactggggtggaggtacataagccataactagaatgaggagttgcctgagattcagaatgagagggagcatggcatggtacagcaggaattccattagggatgttctttgaagtcaagtcattcatcagtgacatctgagtctgcacgtgctcacagagggcttggtatattatgggtgaatacattctataatgatcttgcaatgaccagttttgctctaggtctgatgtgtctctttcacttctagcagaagcttcattaggtatctgtttcttattatctgaagatgatgtttctttctggactaccaaaggaatagtatgtttttcatgtcttttcttttttgatccgtatcttttgctttctaaaggtctagaattagatctgttttctaaatatgctgtttctgcaacctgaatcttcatttctcaaaatgtccctcagcaaagaagcacaccatcaagcccgtgtacagtttcagcctgactttctgaatcagaatggatggaatagccagaatctgcattaaaacgtggtatttttcttaaatagctcgctttctttccatttgttaatttagcaggtccagtgtgccttcctgaagataacacctggcccggttgagctccagacctgaccatctctcgccgcctcagac

SEQ ID NO: 167922 - DNA, 717 bp, Homo Sapiens
gcggtgatagctccagatggcccccaacgcttgagcttctttccgtctcatccgggatctgcaccagcatctgagagaaagggattccaaactatacctccatgagctcctagaaggcagtgaaatctatctcccagaggttgtgaagcctccacggaacccagaactagttgcccggctggagaagattaagatacagctggccaatgaggaatataaacggatcacccgcaacgtcacttgtcaggatacaagacatggtgggactctcagcgacctgggaaagcaagtgagatcattgaaggctctggtcatcaccatcttcaatttcattgtcacggtggttgctgccttcgtctgcacttaccttggaagccaatatatcttcacagaaatggcctcgcgggtgctagctgcattgatcgtcgcctctgtggtgggtctggccgagctgtatgtcatggtgcgggcaatggaaggcgagctgggagaactgtaactggtgcttcatcatcaagtctagagaagactttgggggcttcaggctccaattggcagtcaccgactcagtcaacccatcagactttttgtattcagctccagttagtcagaagaacagccccaggcccacctgctgtttctgtggggagccctaatcttctgtgaatttccaaagggagcattggaggagattgagataacacatctttaaaacag

SEQ ID NO: 167923 - DNA, 488 bp, Homo Sapiens
acagtggactattcagcaacaaaaaacccaagacgaaatgaaagaaaatatcatattactgaaatgtcctgtgcctccaactcaagagcttctagatcaaaagaaacagtttgaaaaatgtggtttgcaggttctaaaggtggagaagatagacaatgaggtccttatggctgcctttcaaagaaagaagaaaatgatggaagaaaaactgcacaggcaacctgtgagccataggctgtttcagcaagtcccataccagttctgcaatgtggtatgcagagttggctttcaaagaatgtactcgacaccttgcgatccaaaatacggagctggcatatacttcaccaagaacctcaaaaacctggcagagaaggccaagaaaatctctgctgcagataagctgatctatgtgtttgaggctgaagtactcacaggcttcttctgccagggacatccgttaaatattgttccccccccattaccctacg

SEQ ID NO: 167924 - DNA, 723 bp, Homo Sapiens
ataatccaagtaagccccactcaacagccgctcccaggctcgcttctccgatgggtccttacactcagctattctggtgacgacaattgctgtagggctttatgccatgtgaatgcaggcatgctggatcccaggccatgaactttgtccggtggaaggccttctttctagagagggaattctcttggctggcttccttaccgtgggcactgaaggctttcagggcctccagccctctcactgtgtccctctctctggaaaggaggaaggagcctatggcatcttccccaacgaaaagcacatccaggcaatggcctaaacttcagagggggcgaagggatcagccctgcccttcagcatcctcagttcctgcagcagagcctggaagacaccctaatgtggcagctgtctcaaacctccaaaagccctgagtttcaagtatccttgttgacacggccatgaccactttccccgtgggccatggcaatttttacacaaacctgaaaagatgttgtgtcttgtgtttttgtcttatttttgttggagcccactctgttcctggctcagcctcaaatgcagtatttttgttgtgttctgttgtttttatagcagggttggggtggtttttgagccatgcgtgggtggggagggaggtgtttaacggcactgtggccttggtctaacttttgtgtgaaataataaacaacattgtctgatagcaaa

SEQ ID NO: 167925 - DNA, 378 bp, Homo Sapiens
  misc_feature (49)..(131): n is a, c, g, or t
tcagcactctgtatctagctaatctggtggggacttggagaactttaannnnnnnnnnnnnnnnnnnnnnnnnnnnnnnnnnnnnnnnnnnnnnnnnnnnnnnnnnnnnnnnnnnnnnnnnnnnnnnnnnncaaaacagaccaatcagctctctgtaaaatggatcagttggcgctctgtaaaatggaacaatcaactctctataaaatggaccaatcaggaggacgtgggtggggtcagataagggaataaaagcaggctgctggagccagcagcagcaacccactcaggtccccttccatactgtggaagcttgttattttgctcgtttgcaatacatactgctgcggagatatagaagagtgcactttaagatcc

SEQ ID NO: 167926 - DNA, 283 bp, Homo Sapiens
cataaaatggtctaataagcagataattatatgttaaggagaaggaggcagaaaaaatatttacataagtaatggctgagagctttctaaactgatgaattctgtaagcacacagatccaagaagttcaaccaatctcaagcacacgaaacataaagaaaaccacaccaatgcacatcataaactgttcaaagccaacaagagaaaatcttaaaagcagccagagaaaaaagaaatattacacacaggaagcaaagaaggctatcagatttattgtgcataac

SEQ ID NO: 167927 - DNA, 624 bp, Homo Sapiens
ggagagatgtgtgtccgatcatggatctacatatgctagaactctacctgtgtgtcattagtattatctaatgtacttttacatatttgtaaaactattttttggttaaatgtgatgaagatggagttcacgaatagaccgaaaagaagaatactaccttctgatcttgtattttgaaagattgatgttggcattttacttcagtaaacaattggctaaagacatcacactagaaacatatgcaatgtttttattacatacttctactggacatcacagaattctttgggttctttgtaatttaatgaataggtctgaaaacttatgaccaatacttgttataacttagagcaaattgttttattccaaataaggaatgaatttgcatttaaaatcttaatgaatgttttcaaaactgaatagataacatagtactctaaactaaagtctccaagttatgtattataatattacatagtagtatgcttaggctttactatgtattagccttttgttggactgtgtatgtattttaccatatgggttttaatgataatggtgtatgactgctttacatgagtccttatgcatccagatgttataataaagtggaatggtctcttt

SEQ ID NO: 167928 - DNA, 327 bp, Homo Sapiens
cattatgccccaacagaagttgttcctgaaaagaaagtgccagtgcctcctcctaaacaagcctgaagtgccaccctacaagaagtcccagaggtgccaaaggctagctgtcccaggaaaagaaggtgcctgaagctattcctcccaaaccggaaagtcctccccctgcaagtgcctcaagtgctgccaccgaaggaagtggtcccagaaaagaaagtaccggtgcctcctgccaaaaagccagaagctccacctcctaaagttcctgaagctcctaaagaagttgtacttgaaaagaaagtatctgtggctgtgcccgacaaaccg

SEQ ID NO: 167929 - DNA, 434 bp, Homo Sapiens
  misc_feature (312)..(312): n is a, c, g, or t
  misc_feature (382)..(382): n is a, c, g, or t
  misc_feature (414)..(414): n is a, c, g, or t
  misc_feature (420)..(420): n is a, c, g, or t
gcacagatggcgcactcaggacaatctccagcatggcctggtctcctctcctcctcactctcctcgctcactgcacagggtcctgggcccagtctgtgctgacgcagccgccctcagtgtctggggccccagggcagagggtcaccatctcctgcactgggagcagctccaacatcggggcaggttatgatgtacactggtaccagcaacttccaggaacagcccccaaactcctcatctatggtaacaacaatcggccctcaggggtccctgaccgattctctggctccaagtctggcacctcagcctccngggccatcactggaattccagggttgacgattgaggctgattattaattgccagtcgtattgacagcggnctgggatgttgatatttcggccggaagggganccaagntgaaccttcctagg

SEQ ID NO: 167930 - DNA, 1730 bp, Homo Sapiens
  misc_feature (12)..(12): n is a, c, g, or t
  misc_feature (37)..(37): n is a, c, g, or t
  misc_feature (47)..(47): n is a, c, g, or t
gcgttgattttnagtcgcttagaggatccccgaatcnagcaaacatnccatgcgggaggagaatggtctgaagtacatcgaggaggccattgagaaactaagcaagcggcaccagtaccacatccgtgcctatgatcccaagggaggcctggacaatgcccgacgtctaactggattccatgaaacctccaacatcaacgacttttctgctggtgtagccaatcgtagcgccagcatacgcattccccggactgttggccaggagaagaagggttactttgaagatcgtcgcccctctgccaactgcgaccccttttcggtgacagaagccctcatccgcacgtgtcttctcaatgaaaccggcgatgagcccttccagtacaaaaattaagtggactagacctccagctgttgagcccctcctagttcttcatcccactccaactcttccccctctcccagttgtcccgattgtaactcaaagggtggaatatcaaggtcgtttttttcattccatgtgcccagttaatcttgctttctttgtttggctgggatagaggggtcaagttattaatttcttcacacctaccctcctttttttccctatcactgaagctttttagtgcattagtggggaggagggtggggagacataaccactgcttccatttaatggggtgcacctgtccaataggcgtagctatccggacagagcacgtttgcagaagggggtctcttcttccaggtagctgaaaggggaagacctgacgtactctggcttaggttaggacttgccctcgtggtggaaacttttcttaaaaagttataaccaacttttctattaaaagtgggaattaggagagaaggtaggggtcgggaatcagagagaatggctttggtctcttgcttgtgggactagcctggcttgggactaaatgccctgctctgaacacgaagcttagtataaactgatggatatccctaccttgaaagaagaaaaggttcttactgcttggtccttgatttatcacacaaagcagaatagtatttttatatttaaatgtaaagacaaaaaactatatgtatggttttgtggattatgtgtgttttgctaaaggaaaaaaccatccaggtcacggggcaccaaatttgagacaaatagtcggattagaaataaagcatctcattttgagtagagagcaagggaagtggttcttagatggtgatctgggattaggccctcaagacccttttgggtttctgccctgcccaccctctggagaaggtgggcactggattagttaacagacgacacgttactagcagtcacttgatctccgtggctttggtttaaaagacacacttgtccacataggtttagagataagagttggctggtcaacttgagcatgttactgacagagggggtattggggttattttctgggaggaatagcatgtcactaaagcaggcctttttgatataaaattttttaaaaagcaaaattatagaaggttagatttctaatcaaattttgtaggggtttccaggtaatttttaccggaattgcttggttgggtttcaactggtctccctaccctctggctccttgggaaggaaaatgggggaccaggggccttgggagttccaaaaacccctttgcgaaaattttttggggaaccctttggaaggggcccctagtggggtttaaaagaaaactgggcctggg

SEQ ID NO: 167931 - DNA, 366 bp, Homo Sapiens
ggtcgctactactactaaattcgcggacgcgttgactccacgatgtccctgccataggctctgtctgctcccacaccacagtaatatggaccctggggccctgggaagccgttggaaggccaaccaaaggggtgcccatctgtccccatgagggtatactcctgctccatgccaaaccaggggtgctggttgctcaccatgtccattatccgtttacaggtgtgcctcaaattggtctctgcaggccttcgattgtacttgaaaacttcacataacaccagcttgttagggtccttacggaaggggtcccgaaacatggcagcaggcacgagatacatgtcactgttggaacccgtcgacgcggcc

SEQ ID NO: 167932 - DNA, 814 bp, Homo Sapiens
atctcccccctagcgggattccccttcccccagggttcccattctggaaaattccccccctgggccaggccaagacccttgggccaataagtcccccgccaatcttggaactcccaggcataccaagccaggccccgggtaatggggccctcccacgatgtcccctgcccataggctctgtctgctccccccaccaccagtaatatggaccctggggccctgggaagccgttggaaggccacccaaagggggtgcccatctgtccccatgagggtatactcctgctccatgccaaaccaggggtgctggttgctcaccatgtccattatccgtttacaggtgtgcctcaaattggtctctgcaggccttcgattgtacttgaaaacttcacataacaccagcttgttagggtccttacggaaggggtcccgaaacatggcagcaggcacgagatacatgtcactgttggaaccctcagactgtaaagtactggagccatcgaaattccactcaggcaactcttccacacacttgggctcactgtccagggtccgggtcttgcagcgcagtccttctccagtaccatcgatccagatatacatggcctggactttctcaccctgaggcagggacatgtacacctgcttgatgcctttatttaagtgggaacttgctgaggtggtcatggtggaaggtgttctggtcgccgagcaggcgggcgggtaaaggtaggccgcgagagcgaggttaggagaggagaggaggccgcagtactgctcacacgctccgctcttctcccactctcgactctccc

SEQ ID NO: 167933 - DNA, 1822 bp, Homo Sapiens
ccacgtggcggtgggggcggagaatagaaatatgtggcgcacactggaccggggggcgctcactaacactttattaaatatgtgcggatattcgcgcgcgcattggaggctcgccctgggtgtgataagcgcttcccccattgaatgtggggcctcccaagaacgcccccccatactcgggatttttttctccagaaagcgggttcctgttgtggcccgccccgggggggttttttgttagttggggggagaaagtcccaaaggcacattgggtcaatggtgcccaggattcttctttgggggaacccagcttaaagggcccaaggggtcatctttgccttacggggggccccggcgcgcccaaagcgaaatggtttgagaaaggctttttggggggcccgaggcggtcccgacaggattgtttttgtgttgagtgtgttgttttttagaatgaaaaggaacggccttgatattccaccctttgagttacaatcgggacaactgggagagggggaagagttggagtgggatgaagaactaggaggggctcaacagctggaggtctagtccacttaatttttgtactggaagggctcatcgccggtttcattgagaagacacgtgcggatgagggcttctgtcaccgaaaaggggtcgcagttggcagaggggcgacgatcttcaaagtaacccttcttctcctggccaacagtccggggaatgcgtatgctggcgctacgattggctacaccagcagaaaagtcgttgatgttggaggtttcatggaatccagttagacgtcgggcattgtccaggcctcccttgggatcataggcacggatgtggtactggtgccgcttgcttagtttctcaatggcctcctcgatgtacttcagaccattctcctcccgcatggccttggtgctgaagttggtatggcagcctgcaccattccagttcccaggaatgggcttaggatcaaaggttgctatcactccaaagtcttcacacacacgatgcaagatgaaacgggccacccagagatgatctcccatgctgattccttcacaaggtccaatctgaaattcccactgggcaggcatgacctcggcattagtccccgcaatcttgactccagcatacaagcaggcccggtaatgggcctccacgatgtccctgccataggctctgtctgctcccacaccacagtaatatggaccctggggccctgggaagccgttggaaggccaaccaaaggggtgcccatctgtccccatgagggtatactcctgctccatgccaaaccaggggtgctggttgctcaccatgtccattatccgtttacaggtgtgcctcaaattggtctctgcaggccttcgattgtacttgaaaacttcacataacaccagcttgttagggtccttacggaaggggtcccgaaacatggcagcaggcacgagatacatgtcactgttggaaccctcagactgtaaagtactagagccatcgaaattccactcaggcaactcttccacacacttgggctcactgtccagggtccgggtcttgcagcgcagtccttctccagtaccatcgatccagatatacatggcctggactttctcaccctgaggcagggacatgtacacctgcttgatgcctttatttaagtgggaacttgctgaggtggtcatggtggaaggtgttctggtcgccgagcaggcgggcgggtaaagctaggccgcgagagcgaggttaggagaggagaggaggccgcagtactgctcacacgctccgctcttctcccactctcgactctccc

SEQ ID NO: 167934 - DNA, 659 bp, Homo Sapiens
ggacgactaaagaagacagacattccgctactgcagaggctcctacagggaccttctgaaaagaatgctcgcattttcctcatggataaagatgcagaagaaattagcagtgatgtggctcagtacattaactttcacttttctctcttggaatccattcttcaaagattaaatgaagaagagaaaagagagattcaaagaatagtaacaaaattcaataaagaaaaggcgattatactgaaatgtcttcaaaataaactagtaataaaaacagagacaacagtttagcagtacaagcttctattgctaaaacatttcaaaaaactcagagatattactctttgatgaatgcataagttctgtacttgcatttatacgaacatatatgagacttgaatcgtagaaaattgaatgtcaaaaaaagctcatttctttttgaagtgatgaggttaactagggttcacagttggacaaaatgagtttgagtttagtttcagtaactgaaataagcttgaatactgcatatgccaaatagcttttatagtaaaccatgtaatgaactcaaatttaaatggtgtcttcagataagcagttttaacttcatttagcttggactctcaagagaactgaaacataatcaatggattcagaaatgactc

SEQ ID NO: 167935 - DNA, 252 bp, Homo Sapiens
cctgaggaatactaaaaaagtaaatagtgggccaggctgagaacaatttagttagaaaagtgctctgcatcccttggaagaataagggcttcagcattcactaacccgtatcttccaaggcacacatgcttacgtgactacttagcagacagtagacagttaactctcggcctatttgaagtacagacatacactgaatatattgtgggtttggtcccaaaccactgcagaaaagttagtatctgtcacggg

SEQ ID NO: 167936 - DNA, 780 bp, Homo Sapiens
  misc_feature (520)..(520): n is a, c, g, or t
agtgtaacctttaagctaaatgaaggcaagtgtagtttgaaaaatgctgagctgtttcccgagggtctgcgaccagcactaccagagaagcacagctcagtaaaagagagcttccgctacgtaaaccttacatgcagctctggcaagcaagtcccaggagcccctggccgaccaagcacccctaaggaaatgtttatcactgttgagtttgagcttgaaactaaccaaaaggaggtgacagcttcttgtgacctgagctgcatcgtaaagcgaaccgagaagcggctccgtaaagccatccgcacgctcagaaaggccgtccacagggagcagtttcacctccagctctcaggcatgaacctcgacgtggctaaaaagcctcccagaacatctgaacgccaggcagagtcctgtggagtgggccagggtcatgcagaaaaccaatgtgtcagttgcagggctgggacctattatgatggagcacgagaacgctgcattttatgtccaaatggaaccttcncaaaatgaggaaggacaaatgacttgtgaaccatgcccaagatcgttcatccgattgctacgttccaaagtgtccaggtttttgagaccttacaaatgactcagcccacgtgccactcaatacaaatgttctgctatagggttggtgggacagagctgtcttccttctgcatgtcagcacagtcgggtattgctgcctcccgtatcagtgactcattagagttcaatttttatagataatacagatattttggtaaattg

SEQ ID NO: 167937 - DNA, 772 bp, Homo Sapiens
agagcaacaagacctggagagaaatgctgacaccctccctggatcaagaggaactcattcagagtgctacagaaacaataggctcatttttggacagtacatcacccctcctggcaattgctgcctgcacagccctgggtgaaattggcagaaatggtccacttccaatccccagtgagggatctggctttaccaaatttgcatcttgtagaaagcttactaagtagaataccttccagtaaagaaacaaataagatgaaagaacgagcaatccaaacactgggatattttccagttggggatggagattttcctcaccagaaactcctcttgcaaggtctgatggattctgtggaggccaagcagatagaacttcagttcactattggcgaagccattaccagtgctgcaataggaactagttctgtggctgcccgagatgcctggcaaatgactgaagaggaatatactccaactgctggagccaaagtgaatgatgtggttccatgggtgtcggatgtgattccaaataacacatatcatcagccccaaaccacacgtgaggcaagcacgcccctgcctctggctcctatccctgctcaggcacagctacgtacccacaaagaactgaagcctcatcttacagcaacatctcaaacgcgccacccgccacagccccatcagaacacacgatgaaccaagccaagaacgtcgcatcccagggccaagcccacgcgcacatgacccaccgccccgcaccaagcatcaccag

SEQ ID NO: 167938 - DNA, 1000 bp, Homo Sapiens
ctccgaggcgatcgctgtctgggtcctagagagccaggactggaagtcgtccaagtcccgtaggaactgctgcagcttgctggcctctcccagggaggcctctcggtttttcagggtggtcttcatctcctcccacacgtcgctgatctcggccagccgagacaggatggcctgggcctggtcggggtgctcggactccagcttctccgcctccttctgcaggtcactcagctttgcctcaatggccaccaagtcccgctccatgccggtcagcttgcgctgcagggccatgacgccagccaggtcattgcccaggtcctgggtggactcgatgaccttggtcttttcccgaatccaggatttggtttcattgcactcgaggtggtagttctggatgctcagggcagacaggagggcatccttcttcctgtcaaccagttctctgaactggctccacctgtgagtgcaggggcagacagcgagtgtgaaaaagggaagactgaccatggctggattgcaaaaggaacagtgatgggttaatgctgcttatctgttttctccatctgtgctttgactacatgcttttttggaaaatcatctcactcaaactgtgaacaccaaatataatggaaatagctcagggatgcgatgtaatctggaaaaagcctgtcacgaagaggaatgtgttacagagctccaatgtgagcaattacaagatatccattcccagagtcaattaattcatgtctgtgacacattttacacatctctgaactctacctaatgaacgttttccaaatctaagactgatggtaaccttcaaaactggggccaggtgccataacctactcaaacatgtttactcaacagaaagataagactggaacaaaggtctgccctgacaatcaggactttcattggcaaattaagtgttaaacatgctagagtcctgttcctgaagttactataaaatggatagcacaggtgtcatcttaatacc

SEQ ID NO: 167939 - DNA, 358 bp, Homo Sapiens
caactatgcctcgtctttgaacagaatagacaccttctgttctttcagtcaggccatatgcacctttcatatgtctagtcattcttctctggcatgtgcttcagtttgtccacatctccctgaagcaaataacatgttgcctgtgaggtctgaccagcccagagtacagtaggactaccactaccttccgtgttctggctctctttcttatcacatctgaaagctgatttttaaatcaatttcatactccactgacttgtactgaataatattttactaggtcaccataggccttgaactccaaataaaaaggtagatatcagaagagggaagtagaaaaaagttaagagctacttga

SEQ ID NO: 167940 - DNA, 1191 bp, Homo Sapiens
gctttgaatatagaacagttgtctaaaagccaggctggtaccggtccggaatttcccgggatatcgtcgaccacgcgtccggtgtcccatcagaggtttatacaaagagagaatgactgaactatatgattatcccaagtatagttgccacttcaagaaaggaaaacggtatttttatttttacaatacaggtttgcagaaccagcgagtattatatgtacaggattccttagagggtgaggccagagtgttcctggaccccaacatactgtctgacgatggcacagtggcactccgaggttatgcgttcagcgaagatggtgaatattttgcctatggtctgagtgccagtggctcagactgggtgacaatcaagttcatgaaagttgatggtgccaaagagcttccagatgtgcttgaaagagtcaagttcagctgtatggcctggacccatgatgggaagggaatgttctacaactcataccctcaacaggatggaaaaagtgatggcacagagacatctaccaatctccaccaaaagctctactaccatgtcttgggaaccgatcagtcagaagatattttgtgtgctgagtttcctgatgaacctaaatggatgggtggagctgagttatctgatgatggccgctatgtcttgtaatcaataagggaaggatgtgatccagtaaaccgactctggtactgtgacctacagcaggaatccagtggcatcgcgggaatcctgaagtgggtaaaactgattgacaactttgaaggggaatatgactacgtgaccaatgaggggacggtgttcacattcaagacgaatcgccagtctcccaactatcgcgtgatcaacattgacttcagggatcctgaagagtctaagtggaaagtacttgttcctgagcatgagaaagatgtcttagaatggatagcttgtgtcagatccaacttcttggtcgtatgctacctccatgacgtcaagaacattctgcagctccatgacctgactactggtgctctccttaagaccttcccgctcgatgtcggcagcattgtagggtacagcggtcagaagaaggacactgaaatcttctatcagtttacttcctttttatctccaggtatcatttatcactgtgatcttaccaaagaggagctggagccaagagttttccgagaggtgac

SEQ ID NO: 167941 - DNA, 986 bp, Homo Sapiens
  misc_feature (424)..(435): n is a, c, g, or t
gggtgcattgattcctccaggtgtgtaattgtgacaactgcagtgatttggaaagtctctttgtcttgggcaaatagaaggggttcctgttgttctgctcttgtccttcgtctcctccccttttcccccagacctcccccttctttttgtcaacttgctgggagctttgctttattggttggcagtgacctaagaacaggatatggtgaggatgtcatggaagagaagagctctttccgtggtattctttggcaagagccatgtctactaagaggttaggtgacttcagtatacttataaaattcagtgagagtgccttcttctcttctaccacactctggcatagatacaggcttgctggtcacctctcattacatagatttattttaaaaacattttgattatgttaatttgagctttcccnnnnnnnnnnnnaactactttttaaaacacttgattactagtggcttagaggtgtgtacatctcctgaacatcacaaacttggtttctacctaccacacgagtagccaaaagaaaagaagcactaatagagaaaggggtgtctcacaccagacagaggacctctgctgtcaattagatccagtatcatgacctaactttaagtgtggaaaagagttcagatctctgagacactgtgaagaaatggatggctcatgtaacatctctgatccctcagtccccaaccctggacgtgtttcatttacaacattcataggagttaaccttagcagtgttgcaaggttaaggttccaaacccaaattattttaatcagggtccccccaataaatcacttatccatttattgctagttagttttatttatagcaacttgatttcctatgagtatggctcctgttgtaagaattttcccacctcttctgacatgaatgtagcataagttagcaatcggttcttccaaactcctgtgggttgaatatggtatagatggtaggcatgaagact

SEQ ID NO: 167942 - DNA, 497 bp, Homo Sapiens
ggtgatctgaggatccgggtcggcaaaggtcagtgatcaggatcgatcaattacattccccattcaccactcatactggacatgctagacaaacctcccattccgttcacgcccatagatgcacggcttccactactgtagtagctgctgttcactgctccttggttacctgcaaagagatcaatttgacaagttaggagtaatatcagactaccagtcaaataaaatatagtattccaagaaaaagtttaaaaagtatacgagtacaaatggctgctgtccaagtggcgagacgcatgtttgggaaaggggaatcccgactccaaacaagcctcaattaaccccttttctctgcagtaccaacttgccagactcttgtgctaccattttaacggattcttcaggatcaacatgaaaaattaagtttaaaggaaaactagtgtttttcaaaaattgcaaaattacttcgtatttttaaagctaaacaaggcattttt

SEQ ID NO: 167943 - DNA, 1482 bp, Homo Sapiens
  misc_feature (1244)..(1254): n is a, c, g, or t
  misc_feature (1343)..(1343): n is a, c, g, or t
  misc_feature (1347)..(1347): n is a, c, g, or t
  misc_feature (1400)..(1400): n is a, c, g, or t
  misc_feature (1422)..(1422): n is a, c, g, or t
  misc_feature (1429)..(1429): n is a, c, g, or t
  misc_feature (1439)..(1439): n is a, c, g, or t
gggatcgacgagtctggtagctgagcgttgggctgtaggtcgctgtgctgtgtgatcccccagagccatgcccgagatagtggatacctgttcgttggcctctccggcttccgtctgccggaccaagcacctgcacctgcgctgcagcgtcgactttactcgccggacgctgaccgggactgctgctctcacggtccagtctcaggaggacaatctgcgcagcctggttttggatacaaaggaccttacaatagaaaaagtagtgatcaatggacaagaagtcaaatatgctcttggagaaagacaaagttacaagggatcgccaatggaaatctctcttcctatcgctttgagcaaaaatcaagaaattgttatagaaatttcttttgagacctctccaaaatcttctgctctccagtggctcactcctgaacagacttctgggaaggaacacccatatctctttagtcagtgccaggccatccactgcagagcaatccttccttgtcaggacactccttctgtgaaattaacctatactgcagaggtgtctgtccctaaagaactggtggcacttatgagtgctattcgtgatggagaaacacctgacccagaagacccaagcaggaaaatatacaaattcatccaaaaagttccaataccctgctacctgattgctttagttgttggagctttagaaagcaggcaaattggcccaagaactttggtgtggtctgagaaagagcaggtggaaaagtctgcttatgagttttctgagactgaatctatgcttaaaatagcagaagatctgggaggaccgtatgtatggggacagtatgacctattggtcctgccaccatccttcccttatgggggcatgggagaatcccttgcctttacttttgtaactcctactccactggcaggcgaacaagtcactctccaatgtcattgcacatgaaatatctcatagctggacagggaatctagtgaccaacaaaacttgggatcacttttggttaaatgagggacatactgtgtacttggaacgccacattttgcggacgattgtttggtgaaaagttcagacattttaatgctctgggaggatggggagaactacagaattcggtaaagacatttggggagacacatcctttcaccaaacttgtggttgatctgacagatatagaccctgatgtagcttattcttcagttccctatgagaagggctttgctttacnnnnnnnnnnngaacaactgcttggaggaccagagattttcctaggattcttaaaagcttatgttgagaagttttccgataagagcataactactgatgnactnggaaggatttcctgtattcctattttaaagataaggttggatgtttctcaatncaagttggattgggaatggccngggcttntacttctccngggacttgcctcccattaaagcccaatttatggatatggactt

SEQ ID NO: 167944 - DNA, 422 bp, Homo Sapiens
tatgacagcatccggcatgcccatagccagtctgcagaggcagaacgtcgtgccaatacctcagccctggcagtacctagccctgtgagcaactcggcaagtgctcggcatcggacagaggcactgatggatgctcagaaggaggacttcaacagcaaacacatggccaaccagcgggcacttggcaagctctctgcccatacccacaccctgagcctgacagacataaatgagctggtgtgtggggcaccaggggatgcaccctgtgctacaagcccttgtgggggtgccggctgtcgagatgaggatgggcagccgcgctgtgggggcctcagctgcaatggggcagcggctacagcagacctagcactgggccgggcccggcacacacaggcagagctgcagcgggcactggcagaagg

SEQ ID NO: 167945 - DNA, 984 bp, Homo Sapiens
  misc_feature (952)..(952): n is a, c, g, or t
ggagcgagcctgggtggcgattcggacgagggcacagacgggtgtgctgggtgcctttgagagcagcttctggcacatgcaggagaagctgggcattgtgcagggcatcgtaggtgcccgcaacacctcagccgcctccactgcacagcttgtggaggccacagaggagctgcggcgtgaaattggggaggccactgagcacctgactcagctcgaggcagacctgacagatgtgcaagatgagaacttcaatgccaaccatgcactaagtggtctggagcgagataggcttgcacttaatctcacactgcggcagctcgaccagcatcttgacttgctcaaacattcaaacttcctgggtgcctatgacagcatccggcatgcccatagccagtctgcagaggcagaacgtcgtgccaatacctcagccctggcagtacctagccctgtgagcaactcggcaagtgctcggcatcggacagaggcactgatggatgctcagaaggaggacttcaacagcaaacacatggccaaccagcgggcacttggcaagctctctgcccatacccacaccctgagcctgacagacataaatgagctgggtgtggtggggcaccagggggatgcacccttgtgctaacaaacccttgtggggggtgcccggcttgtcgtagatggaggatggggccagccgccgcctgtgggagggccctcaagctgcaaaggggggcagcggggctacaggcaaaacctaggccctggggccggggcccccggcacaccacagggcaaagcttgcaaccgggacaccggggcaaaagagggggtaaccatccctccagccaaagatgggccgaagaattccgttgggcaaggccaaagcgggtgcaccaactgaccgggggccccaagccaagcccccggggacaaagggcctacctggctttccagngggcacagggggtggggacccggcgcccaccc

SEQ ID NO: 167946 - DNA, 874 bp, Homo Sapiens
  misc_feature (815)..(815): n is a, c, g, or t
gacttccagcaggaccggggggaccatttggaccatctgggccagcagctccaacggggcctgtgggaccaacaaacaccgttttcacccttaggccctttggctcctctttctcctttagcaccaggttgaccagcagcaccagcaggaccagcaaatcaattggggccagcaggaccgacctcaccacgttcaccagtgcttccccgaggaccagcaggaccagcaggaccagcagccccagcttcgccccggtcacctgtggctccagcaggaccaggggcacctacagcaccaggagcaccacgagcaccatctctgccagggttaccaatttcacctctgagaccaggttcacccttttctcccttgcctccaggtatgccagcagcacccctctctcctgggagtccactaggaccagatggaccagcagtgcccacagcaccaaccacaccaggttcacccttgtttccatcaggccctgggggtccagaaggacctcggcttccaataggaccagtaggaccggcagcaccactctcacctgggggaccgcgttcccctcttggaccagcaggaccagggagaccaaactcaccatggagacccctttctcctggtttgccaacttcaccagcgggacctgaggggccaggcagaccctggaagcctgggaggaccagcgggaccctgttcaccttttccaccttgaacaccctgtggtcaaggaggtccctgagcaccattgtttcatcaggacctggagcaccccgagcaccagcaagacaagcatgacctttataccgtttttncaaggataccagtggggccttttgggtcaggggaatccaatgttgccaggctctcctct

SEQ ID NO: 167947 - DNA, 819 bp, Homo Sapiens
  misc_feature (567)..(580): n is a, c, g, or t
taggatccactacagaatgtgcatgcctaccacccagcctaaggaccagaagcagaagcacatgggcgatgtctcccctccactgctctgacccacccctctggcagaaaatctaacaagctacaaaatgccagaaagacagggagtaggagaaggagaagccaagggtctctataaatcagccctgaatgcacccatttggctgccaagagcttctcactgccttgctagcagcctgccactgttccctggcaaattgaaaccacccacgcaaacactcaaaaccccaatctccttgctaataagatacaaccagttaacaccgtgaaaaatgcacatctccagccttcatttcaaaaaagagctctgtactaaatgcaatatgcttttaaagggggttttacagggaccaatctcaatgcaaagaccagtaccagatgtctgagttttggttacaggtttataattagacacaaaattcactccacactggagttttactttcaagctggaagctagcattagttctacttggggggaaaaaagcaaagtcaagtcaacttcggnnnnnnnnnnnnnnggaggaggaggctaagtataatcataaattaaaagtcgcgaatcaaaggtgactggtagtgtcttttaggcatgaagagactggcttacaaaagtgactactgcttctaccacacacagcgaagattgaattacagacacactaaatcatgtctcttgcagatggtctcaagtagttacataagacaggtaatcagcagcacaattgagaacaacccctaaggtaagagggctaggagg

SEQ ID NO: 167948 - DNA, 1297 bp, Homo Sapiens
  misc_feature (285)..(285): n is a, c, g, or t
  misc_feature (290)..(290): n is a, c, g, or t
  misc_feature (357)..(357): n is a, c, g, or t
  misc_feature (908)..(935): n is a, c, g, or t
  misc_feature (1040)..(1041): n is a, c, g, or t
  misc_feature (1114)..(1155): n is a, c, g, or t
  misc_feature (1162)..(1162): n is a, c, g, or t
gggttaactggttgtatcttattagcaaggagattggggttttgagtgtttgcgtgggtggtttcaatttgccagggaacagtggcaggctgctagcaaggcagtgagaagctcttggcagccaaatgggtgcattcagggctgatttatagagacccttggcttctccttctcctactccctgtctttctggcattttgtagcttgttagattttctgccagaggggtgggtcagagcagtggaggggagacatcgcccatgtgcttctgctactggtccttgngctgngtggttggtagaggagatgttgacactatgagctaagggttggcttttgtaattacctgaatctganaggaatgcctaaggttaccttggggtttctcttctggtgagatagggttcctggtttgagtaagttaatgtcctggatatttcttgtggcagggggtggtcaaagagcctgattgctgacccagtctcaggcctgtggtcgatgacctctcggtagtttcaaagggggctggagggggatatttgacttgttttttcgaaatgtagccttctaaccctcaagtctttagaagctgggtggactcttagtggtcctgcagcgtatcctaaaagactacctttgaaacaggattcttgtatggccaggatcgtgtctgggaaccagaaaccctacaccctccccctccagggaatgctgagttccagttttgagcagaggtgaggcagaatccactgtagccttccgccctggtatttggggggatgaccagcccaggcgttgggtgttagtctgcatgagtttgtgagaggaaatagctgggtgtcctggcagtgcccttgaagttggttaggaccttcctgtaaactcttgcccctacttctaactactcnnnnnnnnnnnnnnnnnnnnnnnnnnnnaagtgattagttgaactggcatcctgctttagcctgagacttgccataagaaactgctgagtacttggcaaaccctttcatagttttgttctccatctgtttggnngtaggtgttgagcgaagcaaatggatctcgatatttcagatgggcttttgatgcactgttgccaaggaaggcnnnnnnnnnnnnnnnnnnnnnnnnnnnnnnnnnnnnnnnnnncattggnggtctttcgggcaaccttacacacattgaaaaattgagctaattggaacaaaatttttaaaaattcccctttaaaaaagggccttggcctggaattggaaacttggaaaacaattatttggtaaatgggaccggc

SEQ ID NO: 167949 - DNA, 545 bp, Homo Sapiens
cctcttcagcaaaccatttggccaggctacaaccacccagaacactggcttttcctggtggaataccagcaccataggacagccaagcaccaacaccatgggattatttggagtaacccaagcctcacagcctggaggtctttttgggacagctacaaacaccagcactgggacagcatttggaacaggaacaggtctctttgggcagaccaatactggatttggtgctgttggttcgaccctgtttggcaataacaagcttactacatttggaagcagcacaaccagtgcaccttcatttggtacaaccagtggcgggctctttggtaacaaaccaaccctgactttaggaaccaatacaaacacttctaatttgggtacatataaaaagcaggtttggctctcttaaagttacactgactataccacacgttattctcctgattcgtatgattggaaatatttaaaagttctcaggtaagcggtagcttgatgtgaagtaccagagggaaaggtttaaagtcctggatatggcttgagataat

SEQ ID NO: 167950 - DNA, 619 bp, Homo Sapiens
ataaaaatgaaggggtgagagcggttccaccctagtctcatggtggaaaattcattggggagagctgtccaggatatttggagtcctgggtagaaggagcttgtaactactttaaagtcgacatctttgcacaggtgattgagtttctctgacctcattgcttcacctctgtctcctcccgtccttccgcacgtgcccacacacacgcagttcagccctctttcctccataagcctccatcgttttctcttttctcctcttgatcctttcaagcgagtatcttgttgaattgtatgttctgttggatctcctccttcataacatctggcttgttggacagaaaaaccctacagcccaccccctcccacagcccacctccacttttgaaagcccaaattacacctctcccagaacacagtgttgacgtaaatacagttacccaagtattcctgtcctgttcacctactttgctactttcactcagtagcatcccattacgtaaaatgaattccatggtcaccccgtcacaggaagtaatgaaaaatccagtgttcagtgtagtggtgcaatcctgagggcatagagctgttcatacagggctcgtggatccactagagtc

SEQ ID NO: 167951 - DNA, 1137 bp, Homo Sapiens
  misc_feature (537)..(546): n is a, c, g, or t
acccctccagaaagtgcatgcctaccatatgttccaaatactgcctggcagctgcgattcagccacctcgtggggtatggtgctagatattactcttacctcatgtccagagcggtcgcctccatggtttggaaggagtgttttctacaggatcctttcaacagggctgccggggagcgctatcgcagggagatgctggcccacggtggaggcagggagcccatgctcatggttgaaggtatgcttcagaagtgtccttctgttgatgacttcgtaagtgccctcgtttccgacttggatctggacttcgaaactttcctcatggattctgaataaaagaaacactctacacctcttaaatcaaggtcatgtagataatgactttgttataaatgctacagctgtgagagcttgtttctgatttcattgttcgcttctgtaattctgaaaaactttaaactggtagaacttggaataaataatttgttttaattacgccggccggcgggcgcgctggtcgcgcacggcgcacgccgnnnnnnnnnntgtgggcgcagagggggacgagccttgctgggccgccctcggccccttaaaaaactttttcagggcccttcgcctgtgggggccgcggggccccacagggacaggggacacgggggaagtaagggtgtttcccaaggggagacccctcggtcatgaaaaaaggggctgtggtattctctcccccaataaaaaaaacgccgccgggtgggaaaccccgagggttttttttgagaaaaataccccggtagtgggggctctctggagccgcacttttctgggggtatcttatccaaccgggggagccccccggagcagaggcttcccgaagattcacaataattcgcgccccccgaccgcttggggccccgcccgctgtcccaagagggacgcgggggcggaccagtatagtcctatgggggcccgttttcctcggcgcgcactatgtggggcagacgcctgactgtcaaaagaacggcgtcgagtgtgaagaaacaccgcacgcagacatggtcgccgcgggcccggaggatacgacaaggcagcccctctgcgctcccccccctttcgcggcgtgctatctacgtcatgggt

SEQ ID NO: 167952 - DNA, 523 bp, Homo Sapiens
acagttagctttatcctagacagaacatctatcaaactacaggtcaatatgctaatcatatttttatattatacattaaatatataactaaatagaaaatattaatttgaataccatctaaaatcttcttgtgaaccagggatacacacatcagacattggcaaacagtagtacagatttaagtgtgagaaaacccaggcataagaaggaagaaggtaagttatttgctcaaagacaaaggctaaggtgagcaccagggtctctggacccttcagtagggtttttcataggtcactgaatgcatcctttggtgcacagaccagaaatgactgtgaatgcatccaagactcatctgtgaggctaccaagcggggggaaagatcagtcacttaccagccatgtacgtgaaattgcttgggaacctgaactcccgctggaatttctacctggaaagggttgctgatgctctatttttgttatccaacctcctgcccgctctggcccctaagaggcaccagggacta

SEQ ID NO: 167953 - DNA, 357 bp, Homo Sapiens
aaagaactagacaatctcaagtgttccttccagctctgctgtttatctgaaaattcacgacagacactcagtgatacagaaatgtgtgctccagaccatgtgaactggagaacagaatttggttctcttcagcttcaattcacatgtgggttcatgtgttttgctgccttccttcttttctctacgtattgacacctaggaaaactcaagatgccagagatacctgacacctggctcatatggtaggctgcgtgatgatggagccgagagctgaaccgcccaaggacagagggcctcagcaggaactttgggaatcagcatattgatacctaagtggagacctctttccagacccag

SEQ ID NO: 167954 - DNA, 512 bp, Homo Sapiens
aaccaccgttcgcccctcaactcctgcaaagatccctacggagggtcagaaggaacctttagttcccggaaagaggctgacgcagcgtttccccgggatccctatggatctctagaccgacacacacaaacagttcgaacatacagtgagaaggtggaggagtataacctgagatactcctacatgaagtcgtgggcaggcctgctgagaatactgggtgtggtggagctgcttttgggggccggtgtctttgcttgtgtcacagcttacattcacaaggacagtgagtggtacaacttgtttggatattcacaaccgtatggcatgggaggcgttggtggattgggcagtatgtatgggggctattactacactggccctaagaccccttttgtactcgtggttgctggattagcttggatcaccaccattattattctggttcttggcatgtccatgtattaccggaccattcttctggactctaattggtggcccctaacgggtaccga

SEQ ID NO: 167955 - DNA, 382 bp, Homo Sapiens
gggtaatgcctaccactggagaagcagtttcaccgggacccaaaaggcatgtggatgagtccaaccctcggacaacctagtcctcattgggcagagggagccatctcctggaatttttaattcgaggactttttaccttgacctcttgcgaaatccctgggccatagtgggttaactgtttgtattctggccccactgattttctgtgtttgcttcagagaaggtgaaggtgaattctgcagattttccatcctaccgtctttggaacaactgggtactgtgtctccttaatgataaaagggagctcttcttgaaataggatgatcattttccacagtttcttggtaaaccaattacactagtggtgattaaattaggtctt

SEQ ID NO: 167956 - DNA, 327 bp, Homo Sapiens
ttgtcactagaggatcccgcctaagtggaactgctcggaattccctctaggagacaaattatagagaactggtcttttccaaaccactgattggatttctgtaaacattgtcttgcagataatgcatttgttttgcattgaaagtttggttgtgtgtgtggtatttgggaattgctggaagacgtatccccagttaggaatacaacttgcaaagttcggtctagggcgtgtagtcagagctctgtgatctcccttgaaagggtgtgattgtgagtgtagtaggtgccactggaatttattttctttttcggagcagttccacttagg

SEQ ID NO: 167957 - DNA, 745 bp, Homo Sapiens
aacccggggaaatacagcaaaatgcacaagtactggctggatacctgctccaagcacgcagtctgtagacatttttgcctttgcccttgaaatgcttgcaaaatactttgttaacaaaagctgcaaagagagaacatgccgtgtgcctttagttagcacagcgggcagcctcagtgaaactcttaggttaagcagttaagtcctggaacccagagctgctgtgtatttcgagcgggcagtttatcttttgctatacttattttcaattcaattacaccacgattcaaataattcccctcctaaaaccaaaaaggagggaaacgtcaactccattgcaattacttatcttcctcttctatctctgttatacgccggggcatagaatgctcgtatacatctctttaacaaccacaaaccttaagccatgtagatgaagttagtgcatcaacgggatacagttccatattgccttaaacctccttgttttagacacactaacatttataccaaattgcagattattctgcagagagggaattgcatgtttgtgttgtatatttagtatgaacttttttcagaatataatatttcttagttatcaaaagtagttggaaaacatttgcaagactatgaacatagaattgctgcttttatattttaactgcagattgtgaatttcactgccttatattatttatttctgaaacaaaagaggcatttttcaataaaactactgaaaatttga

SEQ ID NO: 167958 - DNA, 541 bp, Homo Sapiens
gactctagagtatcccgcctatagtggaactgccgggaggtggagacacccccagtttgatgtggaccctgtctgtggagaggaccacagaggggtactggtcagcggtggggggaggtgcaagcccagtgttggctggggacgcgtcccgcgggtaacaggcggcctcgatgaggttcagctggccatttcgcttcactttgtggccgaggccatatacgagcacccgtgcccacggtgccttgtacagagaggagtctttgcggaatccagattgactttctttacaagacacaacaacaaaagctgccccggggcaaaattcacgtccatgttgactttggattcggaaattgggaactcttcggaggggaactgctctggtgctgtctgcaggaaagagcagatctgtttccgtcagctctaaaaggctctcctcgccctggtgcagggtccgagtgatggccacgttgagccactctctcactgtctgggagttgcactggtaaaagagtccgtggcggagcaggtccacttaggc

SEQ ID NO: 167959 - DNA, 347 bp, Homo Sapiens
gtcttatcttgaggatcccccctaatgtggaactgctccgtcagcgtcagcggcggcgggtaggtgactttatttttcaagatgcctttcctctgctctgggggctggctgctagcaagcctggctgcgcccccgctctcctggtccggggggtactctccacggtgactgccctgctcctcgcggtgcagctccgcgctgaccttggtctccaccttcaggcggggcttgccgctggggtcctcactgtcactctcagccaggctctggtcgggccagccggccggaacgtggttggccacagcgtcccctttgggggtgctgtggacggcgcccctggccgggtc

SEQ ID NO: 167960 - DNA, 510 bp, Homo Sapiens
  misc_feature (441)..(441): n is a, c, g, or t
  misc_feature (457)..(457): n is a, c, g, or t
agtacccgatgccttcaacacagctcggcgttttctctgtgcggtacatgcagatcccttgcccatactcagcaaagtgaatcttccaggcttgctctttcagaaactctttggccaatttcgggttgaactcctcgggagaccgccgccgatacatggtcatcagggtctgtgtggctgtggggacgctgttgccatttaggttaaactggcgctctccatcagcatcagagctcgtgcttctctgggggctggaggagacgaggctgctgggtcgagagtacacctcatcatctgaactgttgtaacttcctgcaaactccttgtcagaatatattttggaagtagtctgttgcaggaaatctgagatcctctgcactagaaagtctctatctttcaagttggcaaataggaaggtcatcctgtttcgggtgctgatgngataagggatctgggngagcacactggagctgtctgccttttccactattgtcaccttcacggagtcgg

SEQ ID NO: 167961 - DNA, 225 bp, Homo Sapiens
cctaagtggaactgctccggcaggtaattccaaaccacttcacctaacaacaacacacgagcacgatgatggtagtcaccgccaattggggcccacaacaccgcacacacaacccctaccaggtatcacatgcacacggtttagcctcatccacgttcgttcgccactactagcagaatcattattattttctcctcctacgggtacgagcagttccactttagg

SEQ ID NO: 167962 - DNA, 889 bp, Homo Sapiens
tatgattgacagattgtgtcttcgtcagtcccgagtcccttcatggctttccgcagcgctttggcatctgcgtcaggattgaagtcattggctgggcgcacagttcccttcagctctactcgggccactgcactaagttcccacatctgataggccacctgcgctgcctccgggaagaactggccagcagcatcatcatctcccccagacagcttcagcagagtcttcttgtactcgccagaggtgtcattcttgatcatgctgtagagggacttctcatacttggtccggaagatctcccgaatgtcgagcatgtccaactcactacgggagaccatgatgcggatcagggtgttgtcccgagtccccaggcccttcatagccttgaagagcctttcagcaaaatattccggggtgctccggatacacttcactacggccagcattagcttctcaaagtccccagacagctcccctcggatgctggcttcaatcggcttccctgtggtcttcagatactcatcgaacaccaaccgaagatgctgcttgctgcgatttcccaagatgtaaatgaactgggcttcatctgttccccatttcagttcccctgcctcgtataggtcctggacatcctgttgtaccaggtcctcgctcactacgtcatcctcctccctggttccctggagcaggaccacaagcatcttctggaagtggccagaggtgtcgccgatgatgtcagcctccaggtcccgctcgtaggcatctttgtatgctgccaccagctggtgcatctgctcattggtccgggaagccaagatctcaatgaggcacttctcatcagtgccaatgcccgaaaacggcatcttcatcggggggatgctctagagca

SEQ ID NO: 167963 - DNA, 810 bp, Homo Sapiens
gggggctgctgggctaacgggctccgatccagcgagcgctgcgtcctcgagtccctgcgcccgtgcgtccgtctgcgacccgaggcctccgctgcgcgtggattctgctgcgaaccggagaccatggccaaaccagcacagggtgccaagtaccggggctccatccatgacttcccaggctttgaccccaaccaggatgccgaggctctgtacactgccatgaagggctttggcagtgacaaggaggccatactggacataatcacctcacggagcaacaggcagaggcaggaggtctgccagagctacaagtccctctacggcaaggacctcattgctgatttaaagtatgaattgacgggcaagtttgaacggttgattgtgggcctgatgaggccacctgcctattgtgatgccaaagaaattaaagatgccatctcgggcattggcactgatgagaagtgcctcattgagatcttggcttcccggaccaatgagcagatgcaccagctggtggcagcatacaaagatgcctacgagcgggacctggaggctgacatcatcggcgacacctctggccacttccagaagatgcttgtggtccctgctccagggaaccagggagggaggatgacgtaatgaaccgaggacctggtacaacagggatgtccaggacctatacgaggcaggggaactgaaatggggaacagatgaaaccccagttcatttacatcttgggaaatcgcagccagcagcatccttcgggttggtgttccatgagtatctgaaagaccccagggaaacccgatt

SEQ ID NO: 167964 - DNA, 500 bp, Homo Sapiens
actgccgatgcaccttgggaagaaagtgattttctgaaaagctctttgctagccttaaaattctgtgggtttatgatatcctagcaacagaaaggcattttattttgttttgaagcagctttttttctggacattcccatgcaagtccagggcgcatgaagcttggagtcatagagtttcctgtccccccactccaggtaaaggtggttttgatcttcattttatgactgagataatttagtcacattgattctaataagatgataggcaagtggcatcttgggcaaaatacttagattgtccattgttgcctaggcccgcttcagtggagtagtgtatagaagggaaatgcagtcttcactgaggagcagttcacacacatcactcgtacctgctttccttctacctgcctatcacatgggttgttcaacattctaacaaaacagcatgcccagaagcctaaacccataggcattggatctggtaaataaatctttgag

SEQ ID NO: 167965 - DNA, 395 bp, Homo Sapiens
cggagaaacttgcagaagcttggaatcaaccccaagcagcttggaagagtcagtcagaaaggcctagggcagaatccagcacagagttgaatggatgctacctgcctttctcttgtcttagtcataaagggaaacttaatatatgtgtgtttaacacgttttcacttttatttgagatgcttgctttcctatgacctgatttatcttgggttcggagcaattctgcttgtagacctgggaattttcttccatgttataatactcagtctcccttgagacaacggccagtatcagctcagtagaaccaataggtacaggagactttcagtatggcaaaaacaggatccatgctaatttacaaataaatttaccggagacagtcacaccccatctgt

SEQ ID NO: 167966 - DNA, 437 bp, Homo Sapiens
  misc_feature (382)..(382): n is a, c, g, or t
  misc_feature (426)..(426): n is a, c, g, or t
aggcaaggtaataaagcacttcagggcttgctccccaagtgggcctgatttagcaggtggtcctgcgggcgtccaggtcagcaccttcctgtagggcactggggctagggtcacagcccctaactcataaagcaatcaaagaaccattagaaagggctcattaagccttttggacacaggaccccagagaggaaaaagtgacttgcccaaggtcgtaagcaagctactggcatggcaagagcccagcttcctgacggagcgcaacatttctccactgcactgtgctagcagctcagcagggcctctaacctgtgatgtcacactcaagaggccttggcagctcctagccatagagcttcctttccagaacccttccacttgnccaatgtgggagacagggggttagttggggctttctatgggagnccatctgcttt

SEQ ID NO: 167967 - DNA, 996 bp, Homo Sapiens
tcgtggtatggcagactggatcaggaactcagacaaatatgaatgtaaatgaagtcattagcaatagagcaattgaaatgttaggaggtgaacttggcagcaagatacctgtgcatcccaacgatcatgttaataaaagccaggaatttagtggttatgttcaacaagtaaaatatgcaatgacaagaataaaagctgccatgccaagaatctatgagctcgcagctggaggcactgctgttggtacaggtttaaatactagaattggctttgcagaaaaggttgctgcaaaagtggctgcacttacaggcttgccttttgtcactgctccgaataaatttgaagctctggctgctcatgacgctctggttgagctcagtggagccatgaacactactgcctgcagtctgatgaagatagcaaatgatattcgatttttgggttctggtcctcggtcaggtctgggagaattgatcttgcctgaaaatgaaccaggaagcagtatcatgccaggcaaggtgaaccctactcagtgtgaagcaatgaccatggttgcagcccaagtcatggggaaccatgttgctgtcactgtcggaggcagcaatggacattttgagttgaatgttttcaagccaatgatgattaaaaatgtgttacactcagccaggctgctgggggatgcttcagtttcctttacagaaaactgcgtggtgggaatccaggccaatacagaaaggatcaacaagctgatgaatgagtctctaatgttggtgacagctctcaatcctcatatagggtatgacaaggcagcaaagattgctaagacagcacacaaaaatggatcaaccttaaaggaaactgctatcgaacttggctatctcacagcagagcagtttgacgaatgggtaaaacctaaggacatgctgggtccaaagtgatttacataaatttataatgaaaataaacatgtataacacatttagacaaacaaaaaaa

SEQ ID NO: 167968 - DNA, 810 bp, Homo Sapiens
  misc_feature (598)..(598): n is a, c, g, or t
  misc_feature (601)..(601): n is a, c, g, or t
  misc_feature (610)..(610): n is a, c, g, or t
  misc_feature (628)..(628): n is a, c, g, or t
  misc_feature (697)..(697): n is a, c, g, or t
gcaattgaaatgttaggaggtgaacttggcagcaagatacctgtgcatcccaacgatcatgttaataaaagccagagctcaaatgatacttttcccacagcaatgcacattgctgctgcaatagaagttcatgaagtactgttaccaggactacagaagttacatgatgctcttgatgcaaaatccaaagagtttgcacagatcatcaagattggacgtactcatactcaggatgctgttccacttactcttgggcaggaatttagtggttatgttcaacaagtaaaatatgcaatgacaagaataaaagctgccatgccaagaatctatgagctcgcagctggaggcactgctgttggtacaggtttaaatactagaattggctttgcagaaaaggttgccgcaaaagtggctgcacttacaggcttgccttttgtcactgctccgaataaatttgaagctctggctgctcatgacgctctggttgagctcagtgaagccatgaacactactgcctgcagtctgatgaagatagcaaatgatattcgatttttgggttctggtcctcggtcaggtctgggagaattgatcttgcctnganatgaaccangaagcagtatcatgccangcaagggtgacccctactcagtgtgaagcaatgaccatggttgcagccccagtcatggggaaaccatgnttgctggtcactgtccgaaggcagcaattgggacctttttggagttgaaatgtttttcaaagcccattggttggattttaaaaaaggggggtttaaaccctccccacccccaa

SEQ ID NO: 167969 - DNA, 398 bp, Homo Sapiens
ccacccttctgtactcatttaatagagatttccacacagtgtgaagagtggttgttagaaaactgtgtgacttgattcgtccttgaatgcttgatggtccctattatttttctccataggtgtaaactgttttacaagaaagacaatgagtttaaagagaaaggcataggtactctgcatttaaaacctacagcaaatcagaagacacagcttttggtgcgggcagacaccaatttaggtgggtaccttttttcagttggcacaaaatcatcatcacatagtatataaaagcgtttaccctgctgactcaaggttattaatatgtttttaaacagagcgcattcaggccaaattcatcctgtatttacttatttagagtcccaggatgatagtgtgta

SEQ ID NO: 167970 - DNA, 661 bp, Homo Sapiens
  misc_feature (423)..(483): n is a, c, g, or t
gtctggctgtttcctccgacctgctgcatcttggacctctcaatgtgctccacgtaggtctgtatcatctctgggcgcccacctctgtgtaccgctggtgcagggcattgtactccttcttcatctccgactcccgctcctccaaccgggaaatctgatcggcatagttcttggccttcagctccagctggcgcgtctggaactcgtagtgctccacctggattcgcagctctttcttcagttctcaattcagatgtcatctcctaagaaaaaactttgatgacctttcccagacttgatcagatcttactacggagcagttacacagtttgtaaatatggctgattgtatgacttattaatatttgcttcccctgctaaatccatagagtagaaggcacctgttttcttcccattgtatttnnnnnnnnnnnnnnnnnnnnnnnnnnnnnnnnnnnnnnnnnnnnnnnnnnnnnnnnnnnnncttactaaaaatatataaacccaggccgggcgcagtagctcatggcaaatatgacctaatctgcagtttggagctggtaggatcaggtagtctgcaggggcaaggtaggcgctgcacattgaaggagtcgaagatgctgtggagagagcagttaggtatctaaaatcatgggaagata

SEQ ID NO: 167971 - DNA, 751 bp, Homo Sapiens
ggggaagatgttggctgaacaggcgtcagatcgatgggtctttgaatagaactcccaccgggttctatgaccgagtgtggcagattctggagcgcacgcccaatgggatcattgttgctgggaagcatttgcctcagcaaccaaccctgtcagatatgaccatgtatgagatgaatttctctctccttgttgaagacacgttgggaaatattgaccagccacagtacagacagatcgttgtagagttacttatggttgtatccattgtactggaaagaaaccccgagctagaatttcaagacaaagtagatctagacagactggtcaaagaagcatttaatgaatttcaaaaagatcagagtcggctaaaggaaattgaaaaacaagatgacatgacttccttttacaacactcctcccctgggaaaaagaggaacatgcagctatttgacaaaggcggtgatgaatctgctgctggaaggagaagtcaagccaaacaatgatgacccgtgtctgattagctagtggggaaggtgtaggaagctctgttgagacacatgttcctgaagtgtggtggtgtttcatgttcaagcctaaatcaaggcagcccattaatatacgaactgagcatgctgggggaggggaatgcccccatccctggccggggttatgggacctcctgccatgtcataacccaatctaacgggtaatggaaaatgcctttttaatcaagccaggaaaaaagtttctcc

SEQ ID NO: 167972 - DNA, 1155 bp, Homo Sapiens
  misc_feature (161)..(220): n is a, c, g, or t
cggaggggcgggggcatgacgcgcaactccggccggagctgtccggggtcgtgagccggccccgccttggtggcggcgccccctcgcggtccagaggcagacgcatcgggtgggctcgggtctccaacccggccgggaggagggaccgggtctgcggagcnnnnnnnnnnnnnnnnnnnnnnnnnnnnnnnnnnnnnnnnnnnnnnnnnnnnnnnnnnnnctctgcgcggctgaccaggctcccagagcgtcagcgccgcccatggccgagccgctccagccagaccccggggcggccgaggacgcggcggcccaagctgtggagacgccgggctggaaggccccggaggacgccggcccccagcccggaagttatgagatccgacactatggaccagccaagtgggtcagcacgtccgtggagtctatggactgggattcagccatccagacgggctttacgaaactgaacagctaccttcaaggcaaaaacgagaacccagacgcaaattccccatgacccgctccaggggacaagcctacgtggcagccctgcggtcaagggccttctttgctgcgccatttagcctctacgtattttcccgctctcgaactttctcgcccccttataacacgccagtcattaggccagaaccgcctcctagtatttacaatgattaccgccgcctccccgttcgcccctgtttgtctaaccccgtagtttcgcgcggatatccccccgcgcgccccgttcctccgtccgcgtcccaccccgcgctattttgcatggagagagccaccgcgagttgacaatagagtatttagtacttgttcaccctcaccacccatcctaatcaccccgagtatagcgctccacatggttgtagtaccgcgctgttttactgcgtcccgtgttctaagacccacgcacaatcactctccaatccatgctccccttattgttcaatatctgtttgcatcgacgtcctcgtgttcagtatcgctcttatcgacgccccccctctttctatccgacctgccgctacgcgcatctgtgagagaccccactagtcgtctatacgaacgcacgtctatgcctccccgcgcagatttttgctcccatcgatcctccgtcgctccgctatgccctagacg

SEQ ID NO: 167973 - DNA, 901 bp, Homo Sapiens
  misc_feature (611)..(666): n is a, c, g, or t
gggacgccggcccccagcccggaagttatgagatccgacactatggaccagccaagtgggtcagcacgtccgtggagtctatggactgggattcagccatccagacgggctttacgaaactgaacagctacattcaaggcaaaaacgagaaagagatgaaaataaagatgacagctccagtgacaagctacgtggagcctggttcaggtccttttagtgagtctaccattaccatttccctgtatattccctctgaacagcaatttgatccacccaggcctttagagtcagatgtcttcattgaagatagagccgaaatgactgtgtttgtacggtctttcgatggattttctagtgcccaaaagaatcaagaacaacttttgacattagcaagcattttaagggaagatggaaaagttttcgatgagaaggtttactacactgcaggctacaacagtcctgtcaaattgcttaatagaaataatgaaagtgtggttgattcaaaaaaatgaacccacccaaagaaaacgaatgagaaaaatgaaaggaagttctggctggcagagggcaaaacatctgtttatcatagacatcaacatgacctataagtnnnnnnnnnnnnnnnnnnnnnnnnnnnnnnnnnnnnnnnnnnnnnnnnnnnnnnnntggcacacccccacaaccatctgcccacaaacaagcaacacaaaataaaacaaccatctctaaggataagtaacactcttccgtcccccaaatttttcccccggggtggaccatttgtttgggggccccttccccccccagaaaatatttttttaaaaacaccttacctcgggggcgcgcggggcccccccgacagtctacgcagcacatgtggcccacacttgttttcctaaag

SEQ ID NO: 167974 - DNA, 459 bp, Homo Sapiens
gcagtagccaaacactgctcactttgatatggttcaaggatgctgacatcaatatttatctgctcattcatccaggaagaaggggacatcagttactacagtactttgattgtgttcaactcaatcaccatgttataaaaatagcaagctgccataataaaaaataaggctcctctatccagcaccagttatcttcagttctttacctccaagcctacaaatgccataaccatatccgaagaacataagggagcaaaaaaaccgcatctgatgtagtagctgggaccatcacactgttcaggctgagctattcctctgctgtgttattttccttatatttttggtgtttcatctaatcataaggatttttaggtctaaattatatgcactcaaaaaaatgggtgcatacatttatatataaattctgactgaagatgcatgggcagatccgctatccgt

SEQ ID NO: 167975 - DNA, 238 bp, Homo Sapiens; identical to SEQ ID NO: 11269

SEQ ID NO: 167976 - DNA, 265 bp, Homo Sapiens
ttctgtgaagtttcagttatctaaaataaatatacacaaatacgaaatataatgtttcagattgcaaggtaatatgtaatagtagtgtttgtaagatactcttgtctaagtattaactagtagtattttgatttgtacagtcataatttgttaaaatgacttcatttaacattcactgatgtagattaataatgtaagttctgatttaaagaatggtggcaaaaaggtgcatgtaatacttttgcaagtgttgggcgtacgggga

SEQ ID NO: 167977 - DNA, 2709 bp, Homo Sapiens
  misc_feature (2373)..(2373): n is a, c, g, or t
  misc_feature (2503)..(2503): n is a, c, g, or t
  misc_feature (2552)..(2602): n is a, c, g, or t
  misc_feature (2631)..(2631): n is a, c, g, or t
caccatcagaagagggcctgctggcattggccggacaggccgagggatgggcggactcttcagtgtcggagaaaccactgccaaggtcttaaaggatgaaattgatgtgaagttcaaagatgtggctggctgtgaggaggccaagctagagatcatggaatttgtgaatttcttgaaaaacccaaagcagtatcaagacctaggagcaaaaatcccaaagggtgccattctcactggtcctccaggcactgggaagacgctgctagctaaggccacagccggagaagccaatgtccccttcatcaccgttagtggatctgagtttttggagatgtccgttggtgtgggccctgctagagtccgagacttatttgcccttgctcggaagaatgccccttgcatcctcttcatcgatgaaatcgatgcggtgggaaggaagagaggaagaggcaactttggagggcagagtgagcaggagaacacactcaaccagctgctggtggagatggatggttttaatacaacaacaaatgtcgtcattttggccggcaccaatcgaccagatatcctggaccccgcgctacttaggccggggcgtttcgacaggcagatctttattggaccaccagacataaaaggaagagcttctattttcaaagttcatctccgaccgctaaaactggacagtaccctggagaaggataaattggcaagaaaactggcatctttaactccagggttttcaggtgctgatgttgctaatgtctgtaatgaagctgcgttgattgctgcaaggcatctgtcagattccataaatcagaaacactttgaacaggcaattgagcgagtgattggtggcttagagaagaaaacgcaggttctgcagcctgaggagaagaagactgtggcataccacgaagcaggccatgcggttgccggctggtatctggagcacgcagacccgcttttaaaggtatccatcatcccacgtggcaaaggactaggttatgctcagtatttaccaaaagaacaatacctctataccaaagagcagctcttggataggatgtgtatgactttaggtggtcgagtctctgaagaaatcttctttggaagaattacaactggtgctcaagatgacttgagaaaagtaactcagagtgcatatgcccaaattgttcagtttggcatgaatgaaaaggttgggcaaatctcctttgacctcccacgtcagggggacatggtattggagaaaccttacagtgaagccactgcaagattgatagatgatgaagtacgaatacttattaatgatgcttataaaagaacagtagctcttctcacagaaaagaaagctgacgtggagaaggttgctcttctgttgttagaaaaagaagtattagataagaatgatatggttgaacttttgggccccagaccatttgcggaaaaatctacctatgaagaatttgtggaaggcactggcagcttggatgaggacacctcacttccagaaggccttaaggactggaacaaggagcgggaaaaggagaaagaggagcccccgggtgagaaagttgccaactagaggcccagagggaggccatctcagtctgtccactgtggtttcagctggtgcattatttcagctgtggctttcagaagaatgggaatgctgcgctgattttagccagccactggcccagctgaaatgatggggaaaggagtccttagtcctttcagcctcagaggtcacagtgggtggcaggtgactttccggaggccttgagggaaatgcacactgtcccatagcctcattgggctcccagacgtgctggaaaggttgagcccagagtggccgaggctggaccctgtggcaccaagtggggtcggctgaccgtgtggcagggatcgttgcactggactcttggcgtgtgggaagggatgctttctctttgtcgcccactcttcattcctgtttctcctcagttcccctgtgcagatgggctgtgaaattaaattggagtcttgataagaacattttaatttgacttaatattttaaagattgaatccagatcacttgttgctgtcttaatggaatggttttctacaggagctgtaacatacttaaaaatatgaatgtattatgtaaatatggcttctttacataaaaaataaaatgtcaacactgcaagcaagaagcgcaggaagccgaagacattggcgtggtcggggcggcctcggcccctcgaggaagccttttccgagaccctttcggtttggccggcgcgggggccccgggagagagtaaggtgaaacccttggccccattacccgtggtttctccctaggggaaaaatgcccggggccnccactctgaacctataggtgcccctttggccactttcttcccccctcaactaacaaaataaccggcgccgttgcagggctgaggcgcggagggcgtgttcgtggaggtgaagagtgcccgcggagtgggngaggggcggggagggggcggtctcaatgtgggaggtatctatcggagcnnnnnnnnnnnnnnnnnnnnnnnnnnnnnnnnnnnnnnnnnnnnnnnnnnncggcgggacgggtggggaggtgcaggggnaggagaaggggatgggccagtggggttgggggctggtgcggtgggcggagggggccgaggccggggtggaagggaggg

SEQ ID NO: 167978 - DNA, 107 bp, Homo Sapiens
ctatatcctttagtcattcatatctttagcagagtgatttgaatcagcttattgaaataatagctaccaactgctgagctcaactccatgcctatcaaaagacgagt

SEQ ID NO: 167979 - DNA, 464 bp, Homo Sapiens
cggtaccctcgtcttttgataggcctcaccattttcctaattaattctttcctcccctgttcacaggatgacactcctgtccaggacactaaaatgtgaagaacagctcattgtgccccagtgatgaagttgctggacacatctctttgcaggtagcagcaacagttgtagcagcagcagacgaagccattgcagaggcagaatatgctgagtgtctggagtcagcctgaagacacagggtggattatttcctggcctccacaccaaacgttcccttgcagatggagactgaatctgagggcagcagacttttatcagcttgagtttatgtcatttgatggacttggttcaacaacaagaacttacttaaaacaatgtactgtggtgatgagtcccaggggcactggtcagcctgtggagccctggatgctatccacacccacctatcaaaagacgagggtacc

SEQ ID NO: 167980 - DNA, 361 bp, Homo Sapiens
cgagctcggtaccctcgtcttttgataggtcttttaccaactattcaaagtaatgcagaattgtgggaaccaaattcagtgtgaatctctgaatttgctataacagtagtaatattgtgatagcagcttccaactatggaccatctagtatgttctaaacacagtataagatgctttcatttcaaaataccagttccaacaaatctttggcaaacatttcagttagcctcaggccaggcgcggtggctcatgcctgtaatccgctcatgcctcattctgggaggctgagacaggcagatcacttgagcccaggagttcgagaacagcctgggcaacatggagaacccctatcaaaaggcga

SEQ ID NO: 167981 - DNA, 383 bp, Homo Sapiens
ttcgagctcggaaccctcgtcttttgataggcgtgatataatccttgccctttatctttcaaatttatgttatttatagcagatagcataggacatttggattatacaagaaaaaaattaaatgttaacttgaaatgtaaacatttacagagaaagcatggacattcttaagttccttatttaaatacacttttttcctttaatacaactgttattttatagcagaggtagaatgctagcaatagcattctttattagcctagtatcttaaatttggaattgacctgagccaaaactttttaaataaaagagggaaactaagttaaattaggtttacatttacaaagtctgctgtcctatcaaaagacgagggtaccgagctc

SEQ ID NO: 167982 - DNA, 357 bp, Homo Sapiens
tctgtctctagagcatcccctcgacttttgataggatgaagagctagagagacttgcaggtctggagcaagccatcctctctcctggacagaactcggggaattactttgctcctataccattggaagaccatgctgaaaataaagtggatattttggaaatgctacagaaagccaaagtggatttgaaacctcttctttccagcctttctgcaaataaagaaaaacttaaagaaagctcacattcaggggttgtgctttcagtggaggaggtagaagcaggtctgaagggcttgaaggttggccagcaagtgaagaattcaactcccttcatggcagaacacctatcaaaagacga

SEQ ID NO: 167983 - DNA, 309 bp, Homo Sapiens
tcgtcttttgataggcaccccgaaacagaagccattgcctcccttgtttaccttgggtccacctccaccaaaacccaacagaccaccaaatgttgacctgacgaaattccacaaaacctcttctggaaacagtactagcaaaggccagacgtcttactcaacaacttccctgccaccacctccaccatcccatccggccagccaaccaccattgccagcatctcacccatcacaaccaccagtcccaagcctacctcccagaaacattaaacctccgtttgacctaaaaagccctatcaaaagacgagt

SEQ ID NO: 167984 - DNA, 504 bp, Homo Sapiens
aatacaagaggaagcaaaatccacataagttaattcctaatttgagaaatcaatagaatcaataaattgataattactgtctccataggtcacgaattccaaagactagttagtagttagtttctaactaaatgattacaggacgttctgatatatgctgtcttcttgtgatcagtttgttctggcaagacttcaacaagcacttgcccttgaaaacagctcagcgggagaacgatcggaggcaatcacttcgttttataaactagccagataataagtcccaagattagaataatcactgacaggacaagcaccaggatacacatcttcttgcgagattttttctgatagtaagcagctcgctgtaactgttcagtggctctttcgacgtgcacctctgagctttccacattggcttctatgctatcaatcagatcaccctggtcatggatcatcatggccaaatctttaaatatctgattgacatcccctatcaaaagacga

SEQ ID NO: 167985 - DNA, 485 bp, Homo Sapiens
cgagctcggtaccctcgtcttttgataggacccagatccagcattgaagagagaaacacaagctattcttcctatgcagtttcattcctttgacaggagtgttgtggtgcctgtaaagaaaccacctccaggtagtttagctgtaaccactgtgggagccactactgctggaagtgggctgccaacaggcagtacctctaatatatttgctgctactggagctacaccaaaaagtatgattaatacaacaggtgccgtggattcagggtcctcctcctcttcctcctcttctagttttgtgaatggtgctactagcaaaaaccttccagctgtacaaactgttgctccaatgccagaagattcagctgaaaatatgagcatcactgcaaaacttgaaagagcgttagaaaaagttgctcctcttcttcgtgaaatttttgtagactttgccccattcctatcaaaagacgagggtaccgagctcg

SEQ ID NO: 167986 - DNA, 410 bp, Homo Sapiens
gcgaccctagagggagccctcgtcttttgataggcgagtggtgtttcttacccattggaggagttcaatttctgcctctgaaatagatatagtactgtagtttctatttcctgatccttaggggataaaaatggcatgtcctcaaaatcttgtgttcagaaaaaattctattttatactctaagagtggattttaactgtaaaataaacaaatttgtttactagctcctcttttgcaccttttggctctctggtgtaattgttaataaaccacaacgttgtcatctctgtattttggtcagtgaaacagcaattctccaagtcattctagttcccacctttgatttctccatctcttgactcctgtcaccaaaccctatcaaaagacgaggggatactctagagtggtcc

SEQ ID NO: 167987 - DNA, 384 bp, Homo Sapiens
ctcggtaccctcgtcttttgatagggtcattgccaacttactttctttggaatacacaaacagagctgtctctttccgtcatggagattttaacagtaaaaaactcactgcaccattacctctgccttgtattccagacaatagtaaaggacattgtaacatcactgtgtcagcgcaaacaaagaactatgtaattttatcccatattaatacagtgtcacgcaggaggtactatcattagatggcaatctataaaaatggcccctgagaccaggcactggcacaattatttattcttcaattatttattcagtcctaaggatggaaatgctgacagacactgcaaaatgctctacctatcaaaagacgagggtaccgagctcg

SEQ ID NO: 167988 - DNA, 432 bp, Homo Sapiens
cgctctagagtatcccctcgtcttttgataggatactaacatccttctgctagctaggggtggtgctcaaagggtaggatgctgttaaaacatcagtagatctgagacctcggctctccatcctgaagccccctgaagaaactgcaataagcctgtttgaccccaccacttgctcattgtggttatggtggaccttgctttttcctgtcctgtgcatcaccttagacaattgggaaattacttttaattcagagatggcctcagttatggatttacagcattgcaactatgtaacattgtaacattgtgactaagtaattttaacaatgtagctacagcattgccctgctttaccgcggagacagcgccacctaatggttaaacaagtgcccagccgttccctatcaaaagacgagtggatcctctagagcg

SEQ ID NO: 167989 - DNA, 448 bp, Homo Sapiens
gacggcccgctctagaggatccactcgcctcttgataggaaagtaaataaataaataatgtgtgggactggtaccacaacgtctaggacataggagctctgtattaagggttcctgctttattactttacttattgtcactgcattatacctttgcaaaatatagttttctgtttccaacctaaaaatcctgattaagcaactgaatttgtccttgaagaaaaaataactgctagtaatatcatcagaagccagacccaaaaaggctttataacacctatttaatccttttaaatgaaaatgtatttaaatatataacttcatgtattcatttgaaataagctgctaactctaaatatttaaatattcccaactacactcctgtaaattgtacagagcaaattttattttctacctatcaaaagacgagggcaccgagctcgaactcg

SEQ ID NO: 167990 - DNA, 402 bp, Homo Sapiens
gagctcggtaccctcgtcttttgataggtttcggcctgcttctcagggatattccagtttctatcccacaaattttttcgataacaccagtttcagagcatctaagaaccactaaaggctttcaattttcaaagaatgttctgctaacaccacttgtataaataattccaggcatttgctttaaaaaagtcaacattttaagcaaggctcagtggtgaaatgatattacaccctggattcctcttctttagttggttttgtggtgtcacaaccagtaatctgaagccctgtggtgggaatctttggagaagaaaagattaatagtacttcaagaatacattttgaaacatacaaaaccagagtatttgcctatcaaaagacgaggggatactctagagacga

SEQ ID NO: 167991 - DNA, 243 bp, Homo Sapiens
tcgactctagagttatcccctcgtcttttgataggggatgatggtatgtcagcctgaacccaaagccatctctttgagatttacccatttttcccttggtagatggggaaaccatgtatatatacaaggtatgcatgtggataaacttctatttcttttttctcttgttaatctactttttgttacaggggtagctttcaactaagaacaatgaagggtggggagagaactaggtttcctcac

SEQ ID NO: 167992 - DNA, 454 bp, Homo Sapiens
actctagatatcccctaacgaccattcagcaggaaggagaattcatgttgaagtttggctcaaatggagaaggaaatgggcagtttaatgctccaacaggtgtagcagtggattcaaatggaaacatcattgtggccgactggggaaacagcaggatccaggtttttgatgggagtggatcatttttgtcctacattaacacatctgctgacccactctatggcccccaaggcctggccctaacttcagatggtcatgttgtggttgcagactctggaaatcactgtttcaaagtctatcgatacttacagtaatggtgggcaggtggatacccgcttccatggtcttgcactataaactggaatggatttctcaatgcgggaccagattatgactagagtttttatgccagaaggaatcattggtgaactttccaaggttattgctgaatgtg

SEQ ID NO: 167993 - DNA, 483 bp, Homo Sapiens
  misc_feature (393)..(401): n is a, c, g, or t
tgggccgctctagagtatcccctcgtcttttgataggattgtacatagatgctgttaacagaactttgcctttttcattcctatcaggtttagtacagttcatgcgcaggtttcagtaaacattaactacttttatcagagcttgcagtgtgctgaatggttagcaaagagagtgtactgcaagagacagatgaaaatgagagagtccaaggtcacatggattttgaattttttttaattattgagaatttaggggaaagaccatcaggcttcacactttaaatctctttatgtgggcctgccacacagcgtctttgccagcttttgtatgtactgaagctaaaacatttgttcagatgctgattggcaaggcaagtgactttaaaacatggnnnnnnnnnctttcaattaaaaaaagttttattcagggctgccttctaggatgaaagattctcaaggccctatcaaaagacgagggtaccg

SEQ ID NO: 167994 - DNA, 1951 bp, Homo Sapiens
  misc_feature (104)..(105): n is a, c, g, or t
  misc_feature (176)..(176): n is a, c, g, or t
  misc_feature (1132)..(1142): n is a, c, g, or t
gttctcctttaataggtcggtattccttaaatccctattctgttacaaattagcctgccatattcagggaatggaaccaacccagtaaaactgttactgaagannctaatttaaatgatccatttaagagaaatgcagtcaaaataaggcaataaccatcagccctatctgtactnttcttctgtgcctactcagtaaaattgagaaaataatttttgcccacttctataaaaatatcaccccatttgctacctagcatatgagagagacaagactagccctgtcacgtttgtctctaaaaagaaaaatgataggcctggtggagagcaagctatatggaaacatcagcctttccttttctaagatacgtcactccaattcttccttaaatataaacttcctccttgatttatattaaccccttaggaggcactataataactttatgttcccatggaacatagggtttttcaagaatttcttaaaataaaaaaggtttgaaagctatggagtaaactcagcagctgtgatattccgttcaatctaccacagatgtcaaacggtcacattttacagaagtcaaaggaaaacaaaaccacagttctgcactcttccacagggcaaggaattgatcatattctattttcctttcaggaattcataaaatccctaggatagcacctttgtatgggctgaaccattaactgaactaaaattaatacaggaagcttaacattcaacattgtgcttgaacaaaacttaccactactcaatttttcttccaaactatgttagtaatatacattttgcaaagagtctagaaagtttttaaaagaaatctctttaggtgatgtaacacgaaaactctaaggacaacaaaacccttcagtcttatttctgaagacaagtcaatgtttaatgcagatcattccagtacatgatgtgcgtgaccccctttcctttccttacgtgtgtcacacagccattaagacattttagtttgatcgcctccttaaacttttcagtccctctaagacatcattataaaacaaatttagtcctttagttttatcatatggaatgaccctatagtcctgggtacgatcccaacacagtgatgcagtgctgaggnnnnnnnnnnnaatcaatatccattagtaagattagcaaagatacggtggctatttttatattggtcctttaaaagggtaggcccttctccacttacttccatatccctagagaaatagatatatgtacggtggtcaaaaaaaatcaaacacacaaatacgggaatattaaaagacaggctcctcatttcttctcttcctcatcctggtacacagtgcccaaaagctttagaaatgccattatgaacaatagcttttgctagttgttaggaaagcaatttatgagttgggaattattgtggaagacttgatggatgattatagctctgggtcactaacttctttttatgaaaacatgaataatactagttataactcaaagtcaaaatagtgtaaaagctgtggagtgcttttgtagggggtatattaaattgccagaatattgcagaggctcatcttggaacaagaagtagaatgctgtttcagttaagaggactgggctgtttcaggcaacagactgatcatttcgcatcacagtggtggctgggttttccatcagtcattactaatggcaatgagaaaaagtcaggcggcttgtgtgactcccatgttaacagcaccataaaaaagttttgccctaggaatttgggggaaagggaagaatgcggactgcctttgttattacagaaatttcacaacttacttaatgacaacctcgaaagttcacctgtggcatactggctgggaagagaaacaactgaagcaagccaatgctaagtgcagattatggcactacctgcctatcaaaagacgagggtacc

SEQ ID NO: 167995 - DNA, 479 bp, Homo Sapiens
tcgtcttttgatagggaaataaggtatcctgtgagtatttataacaaaatatttaaaatttaaaaagaataagaaacatcaattggctttttgtaacttaaaagagactaaccaagtgttgtttcccagttctgtacaagcagaggccacaggaggattcttacataagaagcacagggaaaagaattgttaattctgcgtgtgtgtttttgtttctcagaattgttaggaagaactttgtccagtcagaaatgagtaaaaacaagatgtaagaaacattaaaacagggggcatatggtcttaagagataatcttggagaatatagcaaaagacaaattgctccattagatattataatttggtatgtaacatgaacatttaaaattctgattaaagtgactaaaagggtttgtttttttaacaaaaatcatacagacttacgggataaactcttatccattactctcgtatccacgtg

SEQ ID NO: 167996 - DNA, 354 bp, Homo Sapiens
ggagtctggtgtctcttaatataaggtcattaatcctaacatgaagagcttcaatgttatgatctcatttaaactttatcacctcctcatgggccccatctccaaatgcagtcacaatgggggttaaggttgaatcataccaatttgaggggtaggggttgatacaatgcaatccatagcatgaggcaactgctgcatccacaagtcaggctgcaagactaatctttcctgttgaaatttcctcttaggccccacaaactaatgggtcttgtatcatcaattaggtcatagttttccaaactgtcagttatcatatgcctgttgacctatcaaaagacgagggtaccgagctcg

SEQ ID NO: 167997 - DNA, 378 bp, Homo Sapiens
ctcggtaccctcgtcttttgataggtagtgacaatgtcaatgaaggcaattcttggcacagggaggcacaaagcattgtcagatagaggaaggaagtgttaatagaacctgggcacacaagagctaccgatttggacagtcacctgacagccagagagcaggcaaagtggatacacttaggtgcctattagactcctgactctgactccttccctgggagcctggagcaaagcaggtgttggaggtgcttaaggaaaggaaaaggcaatacacacaacttacatagagaagtgtagaaggaacctgtgtccaggctccttaagtgagaaagacagtcctgtcaatgaaaaacaggggaacagtcctatcaaaagacga

SEQ ID NO: 167998 - DNA, 420 bp, Homo Sapiens
  misc_feature (145)..(154): n is a, c, g, or t
tcgtcttttgataggcaccttctaacatttattttttgagtcttcatcttcagctcagtgcattctatgatttatagttgcattcagtgggagagacagggtagattgtgcttactccatcttttccagaattggaactcaccannnnnnnnnnaaacacaaaccaattcatgtcactcatctgcttaaaactctcaaaataccttcccattttgcttggaatgaaatatgagtatttccccatgacctttcctctgtttttactcctacaccactctctgcttgttctgttccttgatcacactgtgccttacgatttttgctttaactgctcattctctctggaaagctgtcctccaagaccatcacatgattgctttcttgttgttggattcctatcaaaagacgagggtaccgagc

SEQ ID NO: 167999 - DNA, 509 bp, Homo Sapiens
cggtaccctcgtcttttgataggtcagaacaatcggtgtagaatgtcggaaagaacacgaaacattccctgtgtgtactgattccaaggacattttgtttccattgttggtgcccacgttgctcacatcagacactgctgttcccaatttacaatgggcatgcctgtccctggggtcccacaccgctatctccctcagaggggagacagccacctggctgaggtctgcttctccacagctctaagcctcttctcgtctcctctgcacaccccgactcttggtccatcatggtgcaggggaaactgctgatcccatttattctccatcaccacgagacagactttactagaaaactcagcactcttggcccaacctctatttcttcacctcccactgtctctgaccctctctccctttggtgaatcatgacctccacatggctaaacctaaggggcccctcatcttgtagagttcctatcaaaacgcgagtggatcctctaaagtcggcc

SEQ ID NO: 168000 - DNA, 1075 bp, Homo Sapiens
tcggtaccctcgtcttttgatagggccgttttgactgttctgaccaaatactaatgggaacaattcttgacgttttttctgttgctgattgttaacatagagcagtctctacactaccctgaggcaactctacattggaacactgaggcttacagcctgcaagagcatcagagctgaccatacatttaaacagaaatgctggtttatttgcaaaatcaccagtatattttctattgagtctataaaaaatcagtcatttaagtacaagaatcatattttccattcctttttagaaatttattttgttgtccctatggaaatcattcacatctgacaatttatatgttaaagagttttactctctctattttggtccaatttgtatctagtggctgagaaattaaataattctaaagtatgaagttacctatctgaaaatgtacttacagagtatcatttgtaaaatggatgtctctttaacaaatttggttacttttaccaacaatgtaatataatttatgtatatttcattaataatagtgaattccttaaaattggttctatgtacttatatttaattggatttactggttactgcccagatattgagaaatggttcaaatattgagtgtgtttcaatatattatctggctcatttcaacatgagtaatatgagcataaactaagttacaacctgcgtctgatcaactcttttcctcatgactagaacttaacaacagtaaacttcggacaactattaagcctcaaataatcatctccaaactccttctaacactttttaaatcagactggcagacatggcacaaatcaggttcacgctgtcgcactcctctatgtcctctgccaatatccaagatcatcacatatgcgtatcatatcccatgcacgttcaaacttcagaatagacttacatcaccttcctgccctttatacatctctacctacttattctaaaagcttctacttgtgacctttcactctcctgacagttttacctcttaatctgagcactttccttactcccttctctcctggttatctccggtcctactgt

SEQ ID NO: 168001 - DNA, 438 bp, Homo Sapiens
  misc_feature (13)..(13): n is a, c, g, or t
tcgagctcggtancctgagagaccgtgttgcaatgaggcagtgtagatgaatacgtaaaataaatgactttaaccaagtagctataatgggacttagcactgtatgcatacttaaaaaggttttgaaaaacaaactacttgagaaatatttgtttatatttttctctaacatcatgctatgtgtcagtctgaacatctgacaacagaaatttcagttattattctagctaagttttgaaaacatttgtcatgctgtttaatagaaaactgcaaaccagagatactgactccattaataaaccatattttgtgccgttttgactgttctgaccaaatactaatgggaacaattcttgacgtttttctgttgctgattgttaacatagagcagtctctacactaccctgaggcaactctacattgcaacacggtctctca

SEQ ID NO: 168002 - DNA, 184 bp, Homo Sapiens
ataactacaagcaaatcaaggcagatctagaccagcttcgactgacagtagaaaagtctgagctatggggggagaagagcagcaactatgagaatggagaaataggggaaagtcaagtgaaaggcggtgaagagccaattgaggaatcaaacattttaagtccagtgcaggatggaacaaagaa

SEQ ID NO: 168003 - DNA, 168 bp, Homo Sapiens
ctcttcaagttgcttggccttttccatcctcatcacaagcccttgtttgagtggcggatccctgagcaatctttcgatggatggagatgatcattaggtacttttgtttcaacctttattcctgtaaatatttctgtgaaaactaggagaacagagatgagatttgac

SEQ ID NO: 168004 - DNA, 652 bp, Homo Sapiens
gctcgctctagaggatccactcgcgttttgataggattgagagcagatgagatactcccatcagaatccaaacaaaaggactatgaagaaagttcttggggggcgtgagagtctctgtgagactgtttcacagaaggatgtgtgtttacccaaggctacgcgtcaaaaagaaatagataaaataaatggaaaattagaagagtctcctgataatgatggttttctgaaggctccctgcagaatgaaagtttctattccaactaaagccttagaattgatggacatgcaaactttcaaagcagagcctcccgagaagccatctgccttcgagcctgccattgaaatgcaaaagtctgttccaaataaagccttggaattgaagaatgaacaaacattgagagcagatcagatgttcccttcagaatcaaaacaaaagaacgttgaagaaaattcttgggattctgagagtctccgtgagactgtttcacagaaggatgtgtgtgtacccaaggctacacatcaaaaagaaatggataaaataagtggaaaattagaagattcaactagcctatcaaaaatcttggatacagttcattcttgtgaaagaacaagggaacttcaaaaagacccctgtgacccacgttcaggaaaa

SEQ ID NO: 168005 - DNA, 386 bp, Homo Sapiens
tgttgatagatagataaatttggcctctgtacagggcccgggatgcctttctcagcagccccacgtggagaggtaatccgcctcctatatgaacagccaggggtgaagctcccagtggtatttgacagatgctatcagggccctgggcccttccagctggggctcagacttgtttggtaggaatgtggtgaaattacataggaacttacggctcacgcatatttgtctacacctggagcccgtatgaaaaggagtgtacagtcacccgtgccaagacattagctcaaactatgtggctccatggtgggagccaggagaccacatggcagaaatagcactagactcagaagccctgggttctagtccaggtcctatcaaaagacgag

SEQ ID NO: 168006 - DNA, 524 bp, Homo Sapiens
  misc_feature (77)..(85): n is a, c, g, or t
gcctattatccttaatgggctggcggccaaaaaaaagaaacacagagctgcctgtcctaaaaattcctcccaaactnnnnnnnnngaagttccagccaggccaacactcagatttggaaagaaactctgcagcaacctggacatatggttagctgagtcgacatttgattagcaggcattttaaactgatttcctcttaacatacgcaggagagaaaacattttcttcctgcagggcatgttctactacatcatatttctgaatcccttcttcctattcggtcactctctgaaaaaagctggtttgtttttcccatgtagaatcactctgggtacaagaacctttatttgttccaattattatttgttttaaatttagaacctgtgttgggtctaaaatacccatttcccactcccacaagcagatgatgaccaggctctgccaagagcagcagaaaaagggaaaaccaaaccagaacatgaaggcaagtacccagggctttgcagtcaccacgtgggtcgtct

SEQ ID NO: 168007 - DNA, 896 bp, Homo Sapiens
  misc_feature (24)..(24): n is a, c, g, or t
  misc_feature (65)..(65): n is a, c, g, or t
  misc_feature (123)..(123): n is a, c, g, or t
atctcagtgcaactttcccaaaangaacttttcatgtcatgcaatttagggacttaatctcaaanccccaggctcctcttgaactctgggcaaactttaatcaggttgggcaccctctgctanaacgtggaatgggatggctctcttccctcagccacgccgcttgtgaggacagaggtgggggagtgggaagtgggaagtcacccagagaacaggagagggatttgagggcgcgaccccagcgctctccacggaccagccagagggactggagccaggtgtgcatgggttcaaggccctggccctgcccagcctctgtcttgggagctcagccccagggttcggtcgtcagcagtttcccaagaacaagatgtgatggcatctgctgctgaaaccctgatgaggaccaggccccctgcaccgctgtcagcctgaggaattaaagctttggtgctgggaagagcattattcctctgaggagccgctgtgcttccttctgaagtgagggccgtgccccgggtcccatttcccctttcacttgagtcgggaagcacagcaactttaaggctcgcgcccagcaacatggctcccctcgcgtctgcatctccctcctgctctggtgttgccgctgcaccctgtcctcggaggacagcagaggtttggatggagactcagggagggagggaaggaggcaaggacgcctgtggaaacatctttcaggcagctctagggtctgggggccaggatgcctgggtctcccaaggcctgtctgctgtctctgccaccctcagcggctgccagaagcagcgtgtgggggaggcatgtgctgcagcacacctgcggccgagaccagcactcagaggtcggctcccctgacaggaaccgtgtagggtgca

SEQ ID NO: 168008 - DNA, 704 bp, Homo Sapiens
cacgtaacgccttcctgagagaaaacctgtctttccagccagaggagcaggaaaaaatgaccctatggtctgaagaatgtggaaataatccatctttttttctctctctgctttctgcctgaggggcgttccttttggcaaaatgagcaggcagtgtaggcaggtaatcatcagagagaaagcccatctttctaagccagaggatgaggaaaaggggccccctgggtgccagggagtctggggggaaatcctgaagagcaaggacctgaaaagaggattctctaattctgtacatgagctgaattccgtgctcagcccagagctgcacatacaagagacagagcccaggcaacacagccacactctgaactgacactcggaccaccaccaccaaacagaaggcaacgcaggacctgcagactaaggctaacgaggctgattgcctgacaaaacagaaaaaaaagaaacattcttcagggaattttagcagaacacagagtctcccaacataaaacagacagtcctcactgcacagcagttcagaactgtaaaaatgaccttccaacctgaaactgccatgtgctgttcataatcattaatgggtaaaattgtgatttttttcctgtcttttgaaaattgtcaaaacattgataatcttgtactgttagaaatgtataaggaaacaataaagtaaatatttttgt

SEQ ID NO: 168009 - DNA, 595 bp, Homo Sapiens
  misc_feature (447)..(447): n is a, c, g, or t
cgtaacgccttcccactagaatagtctagggctgtgtctgcttcatgactttccaattggctgatgacactttctggatggtcatctagggatcatggggtgggggcacagagacctgtaccatccaccccctccagttcctattccctgatatacctgagaatctcagagacttaccaaccacatgccccaatgttggagacctgaggtccagggaaggggcacaggagcttgcatttcagatgctctgacttccagcacctgccactcaacacatgaatgagagtgcactgatctgagagtgaagcagccttcccatgtcccccccagagaaagagtaacactgcctttcatctccccatgacccatgcattcattcattcgacaaaggtttctagaaggccaggactgtgctaaacactgtggattctgtgaagaacaggacanacagagctttgccttcattaggtttatgatccagtggatggactgacaagaaacaggcaaacaaagaaatgagtacagaatggcctatttagataatgacatctgccttcttctgaagtgtaatcctcaactggccaacctgatgaag

SEQ ID NO: 168010 - DNA, 548 bp, Homo Sapiens
agatagttgtgtgtgtctatatgacatatataaaacattgtgacattgaagcattttgttgaagtagaaagtcttgtgtatgtttatttgaataacaaatcttgctttccctttaataagtaaaagtaggaaatatcacacttgaaatgcttaagactagtttatacgatggaataggggagaatcttttacttatttgttgatgtatatagattgattgtcttgtgtttttctctagatcttagtttcattgtaccctctctgcaacctttttctgtaagaatgagaataggaaggcctgaatgttagtaggtagttgatagtctgctgtttttattttcattttccttcttatgaagaggaagaaaaaaatagaatcctggaaatagcactgaagtggaccctgggagatctttgacgttggtctttgttctaatattcattcaaacagtgtaaatttggacagttattattttctgtgccagtcctcatttgtaaaataagaaattgaacaataggtaaggcctgtttaagttttgtaaaatatg

SEQ ID NO: 168011 - DNA, 237 bp, Homo Sapiens
gctcggtacccacacgtaataagtgccaggattcaaaccctcgtagccaacttcagaatcctcaactgtcatccccacactaccctcctgatacactggtgatctagactaatgaaaggaccttataccacttactcaagttaagtacatttagaccaaaaataaagaataaagtgctcatcccaatagaaccaatgtcttctgactgtggttagctgctcactatcgaccaacaga

SEQ ID NO: 168012 - DNA, 830 bp, Homo Sapiens
tcccctccaaggcccagcctctcattgagatcaatcatcttagatatgatcggaccttacagtcaccacaggacaacaatcaggctggaattggtgcccatcctcctgcagggcctgccaagatcacagccctcacaggctcctggtcctgctgtgcatcgcccaggtggatgccgaatgggcctcataactcacactagtacctcactctcagcagataccagagcaaccaaattttgcagatttcagtcagtttgaagtatttgctgcatcaaatgtaaacgacgaacaagatgatgaagccgagaaacatccagaagtcctgccggctgaaaaagcttctgatcctgcaagttctcttcgagttgccaaaacagatagtaaaactgaagaaaagacagctgctagtgctcctgccaatgtgagcaaaggcacaacaccacttgctccaccacctaaacctgttcgaagaagattaaaatcagaagatgaattaaggccagaagttgatgaacatacacaaaagacgggtgtcttagctgctgttcttgcatcacaaccttctattcccaggatgttcttgaggagagaatttccctggaagttcaactggaacaacttcgaccattctctcacctataagccaattgccgttaactgtgaacatacttgtttttaagtggttttgggttcaaagccaatttggagacctagacattcagctcactgcttaactcaacattaaattttatgattctgttttgccctatatgttcaccgttgtatttaagtatcttttattttttaatttcgacaataaaaaggtcagg

SEQ ID NO: 168013 - DNA, 757 bp, Homo Sapiens
  misc_feature (52)..(52): n is a, c, g, or t
  misc_feature (66)..(66): n is a, c, g, or t
  misc_feature (68)..(68): n is a, c, g, or t
aagattatctatttctttaaaggtcagaggtttcacagtaatggctagtggnatttgtatgatcgncngccagtctttaagttcccatttcctgcatgtggattttgcttggagtcatacgaatagaactggatgacaatagcagatcctcactgctctgattcagctcaggccatgtctggtttagtgatggcatcgatggtggcttgcttggaggagcttcagcaggagagcctgaataacctacctcacctggctgatccccaacatctgctgaatcttccaaatcaatcagtttgggcattaagctttcaggaagtttttctggtaaatcatagccattcttcctagcaaccaccagatgaaaagcagcacaaaactcatccagtgtcaatgcacccacctttatcaaaatcctgagagttccccaaatatgagaaagtccaagaataggaagttttgattttgtaaaaaactctttagctgcagatccctggaataaatccgtttagatcaggctgaatggttttaaactgatttacataatactgtctttgttcatctgttattttcccagggatcatcataactactggattgcctacgaatttcaatggcagttgtagctgatgctacagttcgtactgttgtctggtcctggacagaagcaggatgcatggttaaaagagtactggttggtggagtatctgcaaaactgacccagttttcttgaggtggaggtggggaatgccctgac

SEQ ID NO: 168014 - DNA, 1055 bp, Homo Sapiens
ggggctatgatttaccagaaaaacttcctgaaagcttaatgcccaaactgattgatttggaagattcagcagatgttggggatcagccaggtgaggtaggttattcaggctctcctgctgaagctcctccaagcaagtcaccatcgatgccatcactaaaccagaacaatggcctgagctgaatcaaagcagtgagcagggggagacatttagtgaacgctcttcaagctcacaaactctgacccaattggattctaacattgcaccagctgatcctgatactgctatggtccatccagtccccattcgtatgacctccaagcaaaatccacattgcaggaaagtggaacttaaaagaacgtggcagcgatcatacaaattcccactagcccattacttgtgaaaccattctgaccttttagaagaaaattaagataaattcatcggtgaaatccgcttcgtggtaatactgtagcagatggttacagtagttcagactctttaacttctgacccagaacagatcgggagcaatgtaactcgtcaaaggtctcattcaggaacgtcgcctgataacactgcaccaccacctccccctccaaggccacagccctctcattctagatcatcatctttagaatatgaatcggacctttacagtcaccacaggacaacaacagggctggagttgttgccccatcctccctgcagtgccctccaagaccacaggccctcacaggctccgtggtccctgctgtgcattcgcccagtgtggatgccgatggcctcataactcacactagtacctcacctcaggagataccagagcaaccaaatttggcacgatttccgtcagttgaagtattggctgcatcaatgtaaccgagacccaggatgatgacgccgagaaacttccagaaagtccgtcccggttgaaaaaggccctgaatcctgcaggttctcttcgaattggccaaaccgattgttacacttgacgaacaagacgtgctagtgctcctgccatgttaccaaggcccacccattggcccaccacca

SEQ ID NO: 168015 - DNA, 171 bp, Homo Sapiens
ggtccaggtcggggaactggctggaatcgaacaccggggtcttgatacccgccgcgcgctggttgtcgtagtcgttgaggatgcgcatggcaatcttgaacaggaacgccagggcgaacaggttgacgaacgcgagcatggtcatggtgatgtcggcgaaggcgggtaccg

SEQ ID NO: 168016 - DNA, 450 bp, Homo Sapiens
tcctagctgacttagagttaactttggaagggaggaaggaacttaggatttttttaataagtcactagcacattgtaaggcttgaataacatgacagcttaggcaggaaggaggcaaggatggatgagagagtaagttttgaagcagggtgataggaaaaaaaagggttccaatctggttaattctactgtgtgtatgtgcatatatgcatgtgcatactctaggaaacaaaagttttatgctgagaagaagaggtagggaaggagtttgaagaagtagataatttttaaagtaacgagggaaagaaagctaggacgaattaaaaagctgaccattgagacatggaaggaacttaggatttttttaataagtcactagcacattgtaaggcttgaataacatgacagcttaggcaggaaggcgtgacgtgtgtggatgctctagagtcag

SEQ ID NO: 168017 - DNA, 384 bp, Homo Sapiens
atgttgctggaaatctagtaacaccaccaaaataaataagtagcaaaatacgcaaatagataaactaaaaaaaagccaaacacgtcagtttaatgcatttcattgttttctccacacaacaaaagtaggcatgatttaaagatacatcaaaataagctaaaaaattatgcccttcacctttatctttagaaatctcaattgtccaattttcacaaagacatggataaaaataatgcaaagccagaaatgcacattgaatggtcaacattacatctgattatggctatatttatacaaggtttgcaggctcactcttcacactgaacttggcaaatatacaaatgtcatttatttctgtccagataaaacatgatttctattata

SEQ ID NO: 168018 - DNA, 591 bp, Homo Sapiens
  misc_feature (475)..(475): n is a, c, g, or t
tcacaaaagggacaaaaccagggcagttttcgccggtatcgcttgtagcgttggagctgatcgccaacacaaaaaaagacccacgcttgctactggcgtacttagggttggccaggcatacgaccatgagggatttggacggccgtggccctaacatgctgactggtgccggtgcggagaaggtcagggtgctgacaggctgtggaacgcctatggccacaggcatagttaacgccttagccggcatggggctgatcaagaagccagcggcagggctaccacccaatcaggcccgatgggcgatgcagcaccaaggaactgtgaatattcctcatgcgctgatagacggtgggataggaaatgcggacggcattggtcgcttattgaaagacggggccactgatgaggttgtcgtctgcgctgttatgttgctgattaactgttacgcagtgcacgatctagaaatgttcggcgngattgatcaccagcagatatggcgacattggaaccatatggtcagctctgaggctgaaggggtccgggtgacggctgagccaatcaacgacacagcccaagcaaaatttatcagca

SEQ ID NO: 168019 - DNA, 634 bp, Homo Sapiens
cagtttcctcatctgtaaaatgggaatgttacaaatgcctccctcatgaagcagctgtgagggttaatcacaagcttagaactgtgcctcacacataatgcatcctcagtcaacgtcagctcttcatcacttggtggttgttattgtacgagggacgtattgcaattggaaagggagctgaagggaagttacagcctttcctcccaagaagtctctaaattcactgactgcattttctgttttctcgagtttggcttctgccccctctactccaccaaaagggcacttgcaaaggtcaccagcaacgtttctgtggtctaatccattgtgtggttttagatcctcatctttctcgtcctctcagaaactctgaacaccactgagcttgaatctcattccttggattccatgacttttcactgtcataattttcccttcacttttcttgtcactctctctcacttccacttgccagcgtttctcctttcccttggtctctcctccgtcggtctttagtattttccatgttcctcgtgtctcgtgtcgtctctccaggtctcttttcgctatttctatggtgttctttctgttgctcgtgcttcttaattccaaatgttgtgtcctctttccaagg

SEQ ID NO: 168020 - DNA, 1054 bp, Homo Sapiens
acttctgcaacaattgcatcccagcgtgtggttaaacctgccagcttttctttcaaggagcttccatctgcctgggagagtttctgcacaatcccatccccagttcggtttagtgctgcaaaactgggctggtggctgctgatgcccacctcaagttcctgctgatgtatcctggctttctctaagtccaggctgccacctggagcacaggtatcaaccagtaattcttcagcctctgttatccactgtgtgaggtcattaaggtcacaatggaactgtctccattcttccattgccctgtcaaaacaacctttccgatcactgtacattctattaattctgtcccattttgcattcagctgagtaagtgtatctctgatctgaatggcttcaggtccagaggcttcaaggatgacatctggctgtttttcatgaatgactgcaatctgctctccaagattgtccagctggtcgttgatattcttcagagagtcttcctgataaagagaagtcttcgtaaatagcagtggtgagctctggaacagtaagcgataattcaacatcatccatgcaaagtaaaattttgtgaattgcaaccagataatctgtaggaagaagtgatgatctaattccagaagcaagttgacccatgtttcctctcttgaatagggattgccttaattctgttgtatctagtatgcaaaagtaataattgcaaacggatcttttcttttttattatcttccataggttgatgtaacatttcttctcctctttgtagaacttcctcaatctgggcactctcctcatccatcttttcatcttcatcactggattgcacagtgtttttccactgattttaacatattttctatgtcatgttctgatttttccgagtccgagaaaggcacaccagtttcaaatgttatcagtggtgaccaacattggtataatggctcctgagcgacttagcactttggcacttttgatacgttgagacaccgtttctaagttcctatccttggatagactgctgtacgttgggggtcctctg

SEQ ID NO: 168021 - DNA, 1020 bp, Homo Sapiens
cagctgggacagaggcgagcccaggcgaggcggcagaccatcaggcattctaccaggggagaaggacaggggacccacgaaagccagcaacaccaagctggtctaccagatcttcgatactttcttcgcagagcaaattgaaaaggatgacagagaagacaaggagaacgcctttaagcgccggcgatgtggcgtctgtgaggtgtgtcagcagcctgagtgtgggaaatgtaaagcctgcaaggacatggttaaactttggtggcagatgtgacggagctaagcaggcttgccaagagcggaggtgtcccaatatggctatgaaggaggcagatgacgatgaggaagtcgatgataacatcccagagatgccgtcacccaaaaaaatgcaccaggggaagaagaagaaacagaacaagaatcgcatctcttgggtcggagaagccgtcaagactgatgggaagaagagttactataagaaggtgtgcattgatgcggaaaccctggaagtgggggactgtgtctctgttattccagatgattcctcaaaaccgctgtatctagcaagggtcacggcgctgtgggaggacagcagcaacgggcagatgtttcacgcccactggttctgcgctgggacagacacagtcctcggggccacgtcggaccctctggagctgttcttggtggatgaatgtgaggacatgcagctttcatatatccacagcaaagtgaaagtcatctacaaagccccctccgaaaactgggccatggagggaggcatggatcccgagtccctgctggagggggacgacgggaagacctacttctaccagctgtggtatgatcaagactacgcgagattcgagtcccctccaaaaacccagccaacagaggacaacaagttcaaattctgtgtgagctgtgcccgtctggctgagatgaggcaaaaagaaatccccagggtcctggagcagctcgaggacctggatagccgggtcctctaccattcactactggggg

SEQ ID NO: 168022 - DNA, 207 bp, Homo Sapiens
cgccttcatgaggagtccagggccagagaacagctagctgtggagctcagtaaggctgagggcgtcattgatggttatgcagatgaaaaaactctttttgaaaggcaaactcaggaaaaaactgatataatagatcgtcttgagcaggagttgttatgtgcaagtaacaggttgcaagaattgaaggcgttacgtgatgtgtatcct

SEQ ID NO: 168023 - DNA, 698 bp, Homo Sapiens
tcacgtagtcctcggaggagtaggccagcgggttgtggaactcgtcatagccctcgtccatcatgtaccaatcccgatcggcttgcctctggtcatcttcccactgctgccgctcctcctccgtgtcaaatgaaattccttcttcgccctcctcacgtcttcctcggcccctggacagacgcggggtggaccccaagtgtcttctgtcatcggcccactcgttatatttgtaggagggagttggcagaggcgtgtcatccgagtacttgcccctcacagacctgtctcgatctcgagtggacagccgatggctccgctcagaatcccgataggaaggcgtcggggagggcgattcccactgtgagcgccttgaggagccatagccactgtcctcttcctcccaggtagaccttgaaggggtggctgcatctttaggtcgatgtcgtgggctctcgggttcatttcttctgctgctacgctctgaccctccatctcgctctgatctgctgctgtgcctacttctatcccgctcatctctgtccctcttgcggtcatagtctcgatcccgcgatttctccttcttccaatccttttcttctttggacgaggcatagacgccatgttttttccgctagggctctctctgccgcctgcgttcgcaatactcttcgctcagtgtatcctctagagtcagctat

SEQ ID NO: 168024 - DNA, 166 bp, Homo Sapiens
acccacaagcatggctaatttctgaatacctctcatactgccttgctttaaaatgaacttggaataaaatttcaaatgcccggtgacagataatgagacacgcagaggcagcttcaaagtttggaaacccaccaggacagcacaagggttcagaaagatgatcaat

SEQ ID NO: 168025 - DNA, 499 bp, Homo Sapiens
tcatcttgggcctgtgttatctggacactctctccagcagataccaccagttcctttataactgggtatggtgctgaggtgctctggaatagaggcctagggggtaggggtagcataactgtaggagggagccactggctgggggacagcaatctgggttttctcagaactttttacttgttgagtgctgggcgtagtagcaagaccctctgatatttcaggttgcactgatacattctttggcccaccagacagctctgcagtcaggtctgtggttaggggactggaaattgtaatcgccttgcggacctctgcagagccactggtagtcagaccacctaattcgttggagtcattcactttagaatgctgtgtcactataggtgtaactacgtcactgggactacctttcagcttgactgtagtagactctgatggagctaccaactctactactgcaaacctgacagtgaacaaagctgtggattacccccctgtg

SEQ ID NO: 168026 - DNA, 566 bp, Homo Sapiens
ccacacgtacgccttcctagaagtagaagtcactgccactgcctacatcagactgcaattccgggacatccagacaacagcaagggataattaggaataaatttggctggaagaaagggagaatgcagcttaggcagcctaaaccaacaggcttatttttctcactcagtaagagagctgaggtcgcctgactcagctcaggttctcagtgagccatcagccaccaggtgccacctttcagtgagtgggcttctatcccttccaggtgtctcttcatgctccatgggaattagatgggacatgctttgactctctcttccagaagctttctcttctttttgaaggggcttctgtttgcgctgggtggtcaatgactcagcctagtcttgatttatcccccaggatggggacagacagcaggggagagatctcaggttgagatgagtgtacagtaagggctgggagtatcagaaggggaaacgctctcccagatagtgacaaagctaagcgtccatgtgaagggagaggacacacattccattgaaaggcgtcgcgtgtgtgtgggc

SEQ ID NO: 168027 - DNA, 348 bp, Homo Sapiens
acacgaaacgccttcttaaacttcagcgcctatgatcatacgacaaaatgcacggcacgggttattgctcctctctgttaaaagaaactgaatcactaattatcagaatcaatataggtgtgaggctggagtatcaattagtcagaaaagaaaaaccctagagtccaccatttgatgacatcatgttttctcttaattacttttagtggaaattgtcacaaaaacctgagcatacggtatgggtttgaattaggagggaactacatcttctggttggataaaaagctcaaggaactagaatcaatggagaccaagtacttaaatatgacaaatccagcatacgtgtgt

SEQ ID NO: 168028 - DNA, 313 bp, Homo Sapiens
tcgagctcggtacgcgtcaacaactattcttaaaaaatgtcaatatgactctgtcagtctcaagggtcatttatttcttcatgacttcctactacttatgagtagtagatgtaagcttcttaacagtatatatgtttccttgtcagcactcttgctactaaaccagtttaactgggcctcatcgccacattgtatttcatgtccagcagcaataccgtgcttgctgggtgccggaaaacgctactctgtgtccccacttcttgccttagctcatgctaacttaatgtgagttcagcttaggagtccttccctc

SEQ ID NO: 168029 - DNA, 620 bp, Homo Sapiens
gtaacgccttcatacacatcacagtgttgaaatagtgttcaaattttgaaataagtgcaattcttttatgagcactaaaaacctaccaagtggctgcagtaggggtaatcatgataagtgttataaataccaatagctaagagactcaaccataatcccccatcaatggagataaatccctttttctcctatccaggaccttatttctatcaactgcttaaaaatgttaaaaatgacatttctaattcattgtctaccccattgttccatatgtgacattctggtaactgtacagtcaacggtacagtacctttgagttgtctctataagaatgaactagtgtaagcaaataatccataggaataaatgtggttttgcaatttaagtttacatacattcctaaccatatcatacaagtgatcaatgatactgatattgcacctaacaaactgcaatggctggaggcattcaaaaaaatttacagaaatttaggattcctttaacaatagaaaaaagcccaatatacatattactaaagactaaatgctacttttctaaattgctctatctccttcttagacaattctctaccctcattaaaacacatgaaatcaacctgg

SEQ ID NO: 168030 - DNA, 138 bp, Homo Sapiens
acacgtgacgccttccaggctaaagcgcttacggctggtaatgtaagggaataaagtggttggtgtttaagggttaaggaaaagaggaaaggatggcaacaagcccaaactcgagttcctcccatccaaaaaaagaaa

SEQ ID NO: 168031 - DNA, 109 bp, Homo Sapiens
ccttctggaatagagttaattccactgtaaagaatcatcaaatattttcttttggcatgacaaaagtcaggcacctgtgtcagtagcttgaacttgaaaacatgacagt

SEQ ID NO: 168032 - DNA, 1095 bp, Homo Sapiens
tcgcggtttatcccctataacaccaagccagtgagcctctaatgctactgcgccctgggggctcccaggcctgggcaacttagctgcaactggcaaaggagaagggtagtttgaggtgtgacaccagtttgctccagaaagtttaaggggtctgtttctcatctccatggacatcttcaacagcttcacctgacaacgactgttcctatgaagaagccacttgtgttttaagcagaggcaacctctctcttctcctctgtttcgtgaaggcaggggacacagatgggagagattgagccaagtcagccttctgttggttaatatggtataatgcatggctttgtgcacagcccagtgtgggattacagctttgggatgaccgcttacaaagttctgtttggttagtattggcatagtttttctatatagccataaatgcgtatatatacccatagggctagatctgtatcttagtgtagcgatgtatacatatacacatccacctacatgttgaagggcctaaccagccttgggagtattgactggtcccttacctcttatggctaagtctttgactgtgttcatttaccaagttgacccagtttgtcttttaggttaagtaagactcgagagtaaaggcaaggaggggggccagcctctgaatgcggccacggatgccttgctgctgcaaccctttccccagctgtccactgaaacgtgaagtcctgttttgaatgccaaacccaccattcactggtgctgactacatagaatgggggttgagagaagatcagtttggggcttcacagtgtcatttgaaaacgttttttgttttgttttgtaattattgtggaaaactttcaagtgaacagaaggatggtgtcctactgtggatgagggatgaacaaggggatggctttgatccaatggagcctgggaggtgtgcccagaaagcttgtctgtagcgggttttgtgagagtgaacactttccactttttgacaccttatcctgatgtatggttccaggatttggattttgattttccaaatgtagcttgaaatttcaataaactttgctctgtttttctaaaaat

SEQ ID NO: 168033 - DNA, 1170 bp, Homo Sapiens
  misc_feature (273)..(273): n is a, c, g, or t
  misc_feature (1059)..(1059): n is a, c, g, or t
  misc_feature (1109)..(1111): n is a, c, g, or t
  misc_feature (1117)..(1117): n is a, c, g, or t
ccggagccagcgtggtggccatagacaacaagatcgaacaggccatggatctggtgaagaatcatctgatgtatgctgtgagagaggaggtggagatcctgaaggagcagatccgagagctggtggagaagaactcccagctagagcgtgagaacaccctgttgaagaacctggcaagcccagagcagctggagaagttccagtcctgtctgagccctgaagagccagcccccgaatccccacaagtgcccgaggcccctggtggttctgcgngtgtaagtggctctgtcctcagggtgggcagagccactaaacttgttttacctagttctttccagtttgtttttggctccccaagcatcatctcacgaggagaactttacacctagcacagctggtgccaagagatgtcctaaggacatggccacctgggtccactccagcgacagacccctgacaagagcaggtctctggaggctgagttgcatggggcctagtaacaccaagccagtgagcctctaatgctactgcgccctgggggctcccagggcctgggcaacttagctgcaactggcaaaggagaagggtagtttgaggtgtgacaccagtttgctccagaaagtttaaggggtctgtttctcatctccatggacatcttcaacagcttcacctgacaacgactgttcctatgaagaagccacttgtgttttaagcagaggcaacctctctcttctcctctgtttcgtgaaggcaggggacacagatgggagagattgagccaagtcagccttctgttggttaatatggtataatgcatggctttgtgcacagcccagtgtgggattacagctttgggatgaccgcttacaaagttctgtttggttagtattggcatagtttttctatatagccataaatgcgtatatatacccatagggctagatctgtatcttagtgtagcgatgtatacatatacacatccacctacatggttgaagggcctaaaccagcccttggggagtaattgaactggtccccttaccctccttatggcctaangcccttttgaactggtgttccatttttacccaaagttttggaaccccagnnntttggncccttttttaaggggttttaaggttaaaggaaccttccggaaaaaaggttaaa

SEQ ID NO: 168034 - DNA, 920 bp, Homo Sapiens
  misc_feature (532)..(532): n is a, c, g, or t
  misc_feature (776)..(776): n is a, c, g, or t
  misc_feature (858)..(858): n is a, c, g, or t
  misc_feature (874)..(874): n is a, c, g, or t
  misc_feature (894)..(894): n is a, c, g, or t
cgtgacatgaccctcatccatggctactttggcagcacgcaggggctctctgatgagctggctaagcagctgtggatggtgctgcagaggtcactggtcactgtccgccgtgaccccaccttgctggtctcagttgtcaggatcattgaaagggaagagaaaattgacaggcgcatacttgaccggaaaaagcaaactggctttgttcctcctgggaggcccaagaattggaaggagaaaatgttcaccatcttggagaggactgtgaccaccagaattgagggcacacaggcagataccagagagtctgacaagatgtggcttgtccgccacctggaaattataaggaagtacgtcctggatgacctcattgtcgccaaaaacctgatggttcagtgctttcctccccactatgagatctttaagaacctcctgaacatgtaccaccaagccctgagcacgcggatgcaggacctcgcatcggaagacctggaagccaatgagatcgtgagcctcttgacgtgggtcttanacacctacacaagtactgagatgatgaggaacgtggagctggccccggaagtggatgtcggcaccctggagccattgctttctccacacgtggtctctgagctgcttgacacgtacatgtccacgctcacttcaaacatcatcgcctggctgcggaaagcgctggagacagacaagaaagactgggtcaaagagacagagccagaaaccgaccaggacgggtactaccagaacacactccctgncattgtcttccagatggttgaacagaaatcttcaagttgctgctcagataaagtgaagatttgaaaaacaaagggtactaanttttattgtcttcagncaggatggaatttcttttcnctaagccagataataaagaatggagg

SEQ ID NO: 168035 - DNA, 1055 bp, Homo Sapiens
gcatacagaccaagggtggaggaagtggcgagcccaaaaggtccgcagagctgaggtggtggtccatatcgaatgggtggtggtacagggcctcccatgggggtgctcatgagagggactcctgggaaaggagggggcccttttggagccatattaaccttgccttcatcgagtaccctggtaggggaagagcctcttgagctgctgttcatcatggtagctgtaccagatcctggatcagaaggagagggtttcccagatgcctcagctgaccatcgaggatgaggtagaggcccgtccactgatccaaattcacttctaggcatatctcttcgattgagagtagcagagagaggtctcacgggtggctccactgtcaatggaggggagcattctccaccactcacaggggatgggccaaaagagccattctggctcagaggacctctccgtggagggttttgtgtatttggttttcctggcattggttttacaatcacaggttcttcttgcagcattgccatcttttgtgttaattctaataatttgtgtctcaaattggcagcttcccttttctcttcagctatagctctttctgcagcacgagctttgagccagttttcatgagctttcttctcatgggtagcgatctggtttttaaatgaccgctctgtcttctgtaattcatcctccatttcttcaattctccgcttgtaagtttttacttcctctgcagccgaaactgccttttcatctgcagctgacagcctgtgctctctttcttgccgttcatactcttcttgactcagtttcttttgcaaagccatctccttctgctgatagagctcattcagaatctccactttctgcctcaaggttttgcattcatcttccagtccagctttggcagcttgtagtgagttgcggtcatcttccaatttctttacctggtcttccaggttacatttagtggacacggaggctcttagcttaagctgtaaaagctttagatcctcttcaactaccgatattgcagtctgtgtccgagagacatc

SEQ ID NO: 168036 - DNA, 1362 bp, Homo Sapiens
  misc_feature (1229)..(1237): n is a, c, g, or t
gggagaaacggtcatttaaggtgcctctgggaaagggaagacgctgtgtcgttttagcagatggattctatgagtggcagcgatgtcagggaacaaaccagaggcagccatacttcatctattttcctcaaatcaagacagagaagtcaggtagcattggtgctgcagatagtcctgagaactgggagaaagtctgggacaactggaggctgctgacaatggccgggatctttgactgctgggagcccccagagggaggagatgtcctgtattcctataccatcatcacagtggattcctgcaaaggcttgagtgacatccaccacaggatgcctgccatattagatggagaggaggcagtttctaaatggcttgactttggtgaagtctcaactcaggaagctctgaaattaatccacccaacagagaacatcaccttccatgcagtctcttctgtggtgaacaactcgcgaaacaacactcctgagtgtctggctcctgtcgacttggtggtcaaaaaggagctcagggcaagtggcagtagccagaggatgttgcagtggttggccacaaagtcacccaaaaaggaagactcaaaaacaccctcaaaaggaagagtcagatgttccccagtggtccagtcagttcctgcagaagagtccactccccaccaagagaggcactgcaggactcctagagcaatggctgaagcgggagaaggaggaggaacctgtggccaagcgtccttacagccagtgacacaggactttcagagaccaaggccagggtctgctgcactgctgttctgataataggttcttaacattgtatgtatatgtgtttgctttgggaggaggtggcactgtgttagttgacagttgtgggctcatgtactcttttttgccatgagtacgagcccctagtggggctggtggacagctttggaagaggtgtcctgctgctgttaccagccatgtgggccccataggggcactgcgcctgctgccctttcctggcagggctggtggagccttcccctaaagcatgccttacccagctgggaaatctctgccctgatctggcaatccttgtaataagcctgatttgctgtccacccactggggctcttttactctttttacctcctaaaaaatttgatttttttagattccaacactaacataaccgaacagggtccttaacaccttccaagccaggcccagaccgannnnnnnnntgggtcatttctatgttcgccgtctggcgtgacataccattccgccattgtgtatgtgcttcagacgtgcgccccctcaaataagcttgtctctctggaccacccgacattcacagccggtgctc

SEQ ID NO: 168037 - DNA, 688 bp, Homo Sapiens
catccaccacaggagctcagggcaagtggcagtagccagaggatgttgcagtggttggccacaaagtcacccaaaaaggaagactcaaaaacacctcaaaaggaagagtcagatgttccccagtggtccagtcagttcctgcagaagagtccactccccaccaagagaggcactgcaggactcctagagcaatggctgaagcgggagaaggaggaggaacctgtggccaagcgtccttacagccagtgacacaggactttcagagaccaaggccagggtctgctgcactgctgttctgataataggttcttaacattgtatgtatatgtgtttgctttgggaggaggtggcactgtgttagttgacagttgtgggctcatgtagtcttttttgccatgagtaggagcccctagtggggctggtggacagctttggaagaggtgtcctgctgctgttaccagccatgtgggccccataggggcactgcgcctgctgccctttcctggcagggctggtggagtcttccctcaaagcatgccttacccagctgggaagtctctgccctgatctggtactccttgtagtaagctgttttctgctcagccactgggctctttcacttttttagttcttaaaaatttatttttaagttctaaaataaaataaaaataagttcttaaaatttaaa

SEQ ID NO: 168038 - DNA, 270 bp, Homo Sapiens
ccatgtcccttgggaaggtctgagactagggccagaggcggccctaacagggctctccctgagcttcggggaggtgagttcccagagaacggggctccgcgcgaggtcagactgggcaggagatgccgtggaccccgcccttcggggaggggcccggcggatgcctcctttgccggaacttggaactagactcacggccagcgaagtgagttctatatggctgaggtgaggtacccgcagtacctcataagtctactcatacacttcata

SEQ ID NO: 168039 - DNA, 642 bp, Homo Sapiens
taaactgttggtgctgggcacatcacccaccctcaccaccaccaaagacactggtgcagtgagacttcgagtctgcaaaaaccccggggaggacaggaggcagggccactctccctgtgtgtcatcagcctgcagtgcctgaaactccagcctgtgcacctctggcaggatgccccacactgctccacaggtttggcggtgagttatttgtaaactatggctccatgctgtgtgacagatcaacgtgctgatggtaagtagactaggcttccccaggcatgccgtccgtgggggcctgaagagacagtgagtgccattggccccattcgcagatgtgggagactctgctcaggcctgtgaggctgggcagcccttcaccagagttcggaggagcagtgtgtggcgccacgtcccgactggccatacccacacagaagcagtgctgcccggggcctcatctgggccagcttggactctgcttcctccaggagcagcagggaagctctgggccacctccctggatagcaggaacttgacctgccatgtgtgccctgccttcctggccagctgtgcttgttatcttccattctcacaaactgtctttgaagcaatagaataaagaatgtgtgttttctttcctgg

SEQ ID NO: 168040 - DNA, 1001 bp, Homo Sapiens
accccggcaacactatgaggaggaagaggatggagccacatacagccaaggccacaatcacctctgtgtctgcaggaccgcttgccagctggcactcctgctgccaatccttgggcacgacgggctctgtgaggcgaaggaagtcctgcagtgggcagcggtgagggcagccaggcaggctgagcggccagggggccttgtcactctcgttccgaaagtacatctccactgagaaattcccagaatcttcctggtacagttcaaatatgtggcaggaggcgtagggggcttgttcaccattgtagacatccagtgccatttgcagggcaaccagggtagtgtcgtgcgcagagtaaaccagcagcttggggagctgggaggtggtcgccattagggtcaggttcttccttatctgagccagcaggactccccactgaagccgggccttctccgcctgctggtagattccgaagaggaagcggaagctgaagtcctttagccggctgagacgctgcatggtttggggtgaggcccagggcggcaggcgcagcccgtgcgtttgctcacagaagagtgtgtcatagacattccagacggtctccagtgtcaggtctgtaagccctgtctcgttggccaccatgtccagaaattgtgcattccgagaactctcattctgatactctggtgtctgccgggtctcgttctgcagctgctcataacggggacatgggcccaacgggaacttcagcagcctgtcctcagtgatgggcacagtgtgcacaggaataggctgccacgagatgttcgggttgaagcgctgcatcccgttgggagggaagagtccagccaggttggcctcagcactcatgagagtccggtcaaagtctgtgcttcgccacataaacctcttgccggtgataagaggtgtttaggaagccgtgatagcgctgccgcagggcctggcccagttcccagtgctgtagcatcccctccttggttaa

SEQ ID NO: 168041 - DNA, 389 bp, Homo Sapiens
ggcgactaatgaacgcgtcgtgaatggaaacgaaactgtaggcgagcttctgcgtgttgctcactcaacacctcctccattcaaacgaaccgtcccactcctcagtcagtttggcttctaaaactcagttagttcttctatagtagctcctcctgactttttagcaactttctcttctatagtaggtggaggtgcaggctttaggtttggtggtaaagggacaccagccttagcacacatggcagctgcattagctttggctatttcaagtaattgagccttatccaaatctgtcagacgtttgggtgatctgcctcgttcagaagacctggatcttttacgacggatgggagatctgctaaaccttcttcttaagggtgttctgactc

SEQ ID NO: 168042 - DNA, 492 bp, Homo Sapiens
tacccgcgggcgagtcaagaacacccttaagaagaaggtttagcagatctcccatccgtcgtaaaagatccaggtcttctgaacgaggcagatcacccaaacgtctgacagatttggataaggctcaattacttgaaatagccaaagctaatgcagctgccatgtgtgctaaggctggtgtccctttaccaccaaacctaaagcctgcacctccacctactatagaagagaaagttgctaaaaagtcaggaggagctactatagaagaactaactgagaaatgtaaacagatcgcacagagtaaagaagatgatgatgtaatagtgaataaacctcatgtttcggatgaagaggaagaagaacctcctttttatcatcatccctttaaactcagtgaacccaaacctatttttttcaatctgaatattgctgcagcaaaaccaactccaccaaaaagccaggtaacattaacaaaagaattccctgtatcat

SEQ ID NO: 168043 - DNA, 564 bp, Homo Sapiens
ccggaccggcagatcgcggggacgacacacgtccggaagtaaatccaaagggacagatgatatgtgcattcgtgatggaggcaggaggagctccatctttactcttcctttatagaacagaggccaaaatgcaggaggcaacaggaccattcgcacagttgcaggtgtacaatcttcctgtgctgctgaacagctggaattctgacatggggcacttccagacatcaccagacatcactgaaccccaatatctgcttgacgtgatctgagctgcaagaagagtaactcaaagggataggagaatgacaaccaaaaaaatataaggaggaacaaccagagcaaagaaaactgccaagggagcaaccagcttatgagacttacattctatatataacataaggtggaaaggcccggctagagagagagaggaaagatacagaaaattcccctccccacaaatcaagtattgtcaggaaacattacaagtagaaatctatgtaagcagcttagcatttaacattcagtcaagacactaaaaccttacaaaacaagaacctctattac

SEQ ID NO: 168044 - DNA, 199 bp, Homo Sapiens
tcttacttactgtgacaggaaagcagccatgcataatacgggtgtagctgtgtttcaggaagactctaaaaataggaggcagcctgaatttggcaaacagtcctagtctgccaaccctttgccaaagaattaaaagagtcagcttagttcgtagaagcacatctgacattctaatgatgacacaagttattttgatttg

SEQ ID NO: 168045 - DNA, 213 bp, Homo Sapiens
  misc_feature (17)..(17): n is a, c, g, or t
  misc_feature (158)..(158): n is a, c, g, or t
cattggataagcggatnagggtgggtgttataaaagccagtctgtaaagggtaaattccaaatcttgtgccttgttataccaatccttcctgattcccgtttaaaccaactactctatttctgtgctgcctacattttcaatcctccctcatccgctnatccatgccctcatccgcttatccaatgggggatcctggagattcccatagaggc

SEQ ID NO: 168046 - DNA, 217 bp, Homo Sapiens
ggtattcgaatgtgagtggagctgaagtggcccaacccaacgcattgcctgtgaagcagcaaagtctggtcttcatcttcaatatgaataatgtcctcttaccactccttatctgttactgacaaggtctattaccctttaaagccaccagccttcctggcctgggcaactctacaaattctttagttaaaaacactacaaagggccgggtgccccg

SEQ ID NO: 168047 - DNA, 207 bp, Homo Sapiens
ggcgggcaccggctgaggtggttatcttgccctccattctccacatctttggaactgctgctgacttcactgaagtttaaactttcacagtcaccctcaatcctgcccactgtcattggatccatgtccaaaatctctggataagagacaaactggtacacaatacttctgactcattcacttcctttgactgatacttcttctaca

SEQ ID NO: 168048 - DNA, 273 bp, Homo Sapiens
  misc_feature (211)..(221): n is a, c, g, or t
tacatgatacgactcgagctcggacccctatgcgtgtaccaacactaaattcaagctgtcattaatgaataacaacatgaaattcaaactgtcattattgaataacaacagaggagattaaaactgttcccaacttgcagttattacaaatgtgctaacaaacacaatttgtgttccttgccccttctaccgtcttggaaaaaaagcaggnnnnnnnnnnnggggttcctgtggggttccaaagattttatgctcaccaggtttttttgactc

SEQ ID NO: 168049 - DNA, 1523 bp, Homo Sapiens
  misc_feature (1446)..(1446): n is a, c, g, or t
tgaaagaggagaaataaaggccatggaaagaaaccccaggaagagacaggcctcgtccacagaccctaggcaggggaataaaaaaattcaagtcatttcacagaagtcctgaaagggcatgaggatttctggacagttccctagaaaaaggccaacattttctttattcttggtatccatgggccaaggaacaccgacatgtgagacttgcttcaccagccgccaccgctttccttacaatctcccgcactgctggagcgggctgggtaactacaggactgtgctctgtgtgataagatttggtgattccactttataagaaaggaaactgctttaattaaagcaggttaataattaaaacttcaaagtactgcacagccacagaattttcttgaagggagaaagcggtcactggccatatgatgcggagatggttttatctgaggcctgagaaccaacagatgtgcctgcgccctggcctgtgcagctgtgggcagatgtgtccccaggggcctgccctcactcgtgaccatgcaataccctgcaacataaacattttcttttccaaggatctgcaggggtggacatgatgctccaggcacagagtaggaagaaaagggggtgacctggggttcccagcaaacaggtccacctcatgctcactgcgttctcagggtgaggcatagggcctgacatatggtaggagctctagggatattcactgaacaaaagaacataggaaagaaaagaaacgaggtcggatggaagaaacgacccagccagttaggcaggccttgagtcaatgcctgaagtgaccgaaatcaccaccagatggcagcatggaaagcagttcagaccgcggcctccgtggggcccgggggtccagtgcccgcaccactatggggcccgggactgggctccctgtccagacctccaacccaggcacagttccaaaaagaacaaaacaaaacaaaagtgcactcctcttgtttttataaaagctgagtcctgatggccttgctcagtgtttcctgttttgagttaaatgaactcgatgccttcgtatttcacgcttccgatcttggtctccggcaacaggaagcgcccgtccagcgtgaaggccatgatgtaggaggcgactctgccgctgtcctcctcggatttgagggccacaatgatctggtcgtcggtgttggggatgaacttgaaggaagagaagccgtgagtggggaccaccgccccgacgtggctcacagcgatgtcgccgaagtcaggggaggcgctcagctgcaggttggcgcccttgccgtcgtcgtccttctcgctgtaggctcctggctggcgcggcgcgcaggtaagaaccagcgctgcagcgtgtcactccagcaggcagactcatggatgaggtagcctggcggctggatgccggcagcagcccgcacggtngataagttggacacccagttctcgtggtccacgctgcccttgtagcccaccaccttcacccactccgggttctcgtt

SEQ ID NO: 168050 - DNA, 1043 bp, Homo Sapiens
taagtaccataacgatatagagcagcaatcaccataagcttcctcactgacataccctgaatcacccgtatcatgaattactcgacccccaagccccttaaacttaaaaatcatttctacttcctcttccgtcgatgcataataaaccatacaaaactccattattaaaccagaaacaaatgctccaaaaacagtcttattagaaactcaaacctcaggtacatctcagtagccatggcagtagtataaccaaaaaccactaacataccccccaaataaatcaaaaacaccattaaacctaaaaaagacccaccaaaattcaatacaatgccacaaccaactccaccacttacaatcaacccaagtccaccataaataggagagggcttagaagaaaaaccaacaaacccaataacaaaaatagtacttaaaataaatgcaatatacattgtcattattctcacatggaatctaaccacgaccaatgacatgaaaaatcatcgttgtacttcaactacaagaaccttaatgaccaacatccgaaaatcacacccactaataaaaattatcaacaacgcattcattgacctcccagccccctcaaacatctcatcatgatgaaacttcggttccctcttaggcatctgcctaatcttgcaaatcctaacaggcctgttcttagcaatacattacacatcagacacaacaacagctttctcatcagttacacacatctgtcgagacgtaaattacggatgagttattcgctacctacatgcaaacggagcatccatgttctttatttgcctattcatccacgtaggccgaggcctatactacggatcctatatattcctagaaacatgaaacattggagtagtcctactatttaccgttatagcaacagccttcataggctacgtcctgccctgaggacaaatatcattctgaggagctacggtcatcacaaatctactatcagctatcccttatatcggaacagacctcgtagaatgaatctgagggtactactgaggtgtaag

SEQ ID NO: 168051 - DNA, 220 bp, Homo Sapiens
tgtgctcggtacctcaccatgggacgcagcaccaaggccttgggaaatgacggaaaatcgcttctgtattgttaatagcaatatatgacctctgctgtcctcctatctttaaattttatgtaaatatttacaaactgttcatgtccaaactgaaacctgctatgaactaaacattttgtaaactcagtaagatcgcccaaaatacaactcaactttcacc

SEQ ID NO: 168052 - DNA, 403 bp, Homo Sapiens
tcttcattgcaacacaggcagttcttccagcaccttggcttcaacaaacaggccccttctttccataccaccacagtcacctgaccaaataaacggagaaagcttccagaacgtgagcaaaaatgctagttctgcagcgaatgcccaacctcataaactgtctgaaaccccagggcagttaaagcagagtttcatccctgtctttaaactgggggtatgtccactctaggcaagtaaaaaaactactgttacacgttccagcaactctgtcaatattttcttgtatcaggaattgttattatggcagccttcatttgggggtgggttttcatcattttggcactgtggaataggctttacaggtggcatttactacaggccaggaggggacatttatatatat

SEQ ID NO: 168053 - DNA, 650 bp, Homo Sapiens
agctacatgatacgactcgagctggtaccctatgcgtgtacaaaagacaatgaagtggagcaggaagatctagcacagtccttgagcctggtgaaggatgtgattggagctgtagacagcaaagtggcaagttatgaaaagaaagtgcgtctcaatgagatttatacaaagacagatagcaagtcaatcatgaggatgaagagtggtcagatgtttgccaaggaagatttgaaacggaagaagcttgtacgtgatgggagtgtgtttctgaagaatgcagcaggaaggttgaaagaggttcaagcagttcttctcactgacattttagttttccttcaagaaaaagaccagaagtacatctttgcatcattggaccagaagtcaacagtgatctctttaaagaagctgattgtgagagaagtggcacatgaggagaaaggtttattcctgatcagcatggggatgacagatccagagatggtagaagtccatgccagctccaaagaggaacgaaacagctggattcagatcattcaggacacaatcaacaccctgaacagagatgaagatgaaggaattcctagtgagaatgaggaagaaaagaaaatgttggtacacgcatagggtccgagctcgattcgtatcatgta

SEQ ID NO: 168054 - DNA, 1397 bp, Homo Sapiens
  misc_feature (994)..(994): n is a, c, g, or t
gcgctgggatatgggtgcttagggcagtgcaagcagagtgggaaaggaagctgaactgcttgctcccttcctactcggcttctcaggccttgtcagaggtgaattgtctatggacttactttctttctctttagcagcccaaagggagccttcaggcacatgacacatcatcactgcccacggtcattatgagaaacaagccctcacagcccaaggagcgtcctcggtccgcagtcctcctggtggatgaaaccgctaccaccccaatatttgccaatagacgatcccagcagagtgtctcgctctccaaaagtgtctccatacagaacattactggagttggcaatgatgagaacatgtcaaacacctggaaattcctgtctcattcaacagactcactaaataaaaccagcaaggtcaatgagtcaacagaatcacttactgatgagggtacagacatgaatgaaggacaactactgggagactttgagattgagtccaaacagctggaagcagagtcttggagtcggataatagacagcaagtttctaaaacagcaaaagaaagatgtggtcaaacggcaagaagtaatatatgagttgatgcagacagagtttcatcatgtccgcactctcaagatcatgagtggtgtgtacagccaggggatgatggcggatctgctttttgagcagcagatggtagaaaagctgttcccctgtttggatgagctgatcagtatccatagccaattcttccagaggattctggagcggaagaaggagtctctggtggataaaagtgaaaagaactttctcatcaagaggataggggatgtgcttgtaaatcagttttcaggtgagaatgcagaacgtttaaagaagacatatggcaagttttgtgggcaacataaccagtctgtaaactacttcaaagacctttatgccaaggataagcgttttcaagcctttgtaaagaagaagatgagcagttcagntgttagaaggcttggaattccagagtgcatattgcttgtaactcagcggattaccaagtacccagttttattccaaagaatattgcagtgtaccaaagacaatgaagtggagcaggaagatctagcacagtccttgagcctggtgaaggatgtgattggagctgtagacagcaaagtggcaagttatgacaagaaagtgcgtctcaatgagatttatacaaagacagatagcaagtcaatcatgaggatgaagagtggtcagatgtttgccaaggaagatttgaacacggaagaagcttgtacgtgatgggagtgtgtttctgcagaatgcagcaggcaaggttgaacagaggttcaagcagttcttctcactgacatttaagtttccttcaagacaaagacc

SEQ ID NO: 168055 - DNA, 817 bp, Homo Sapiens
ggtttattcctgatcagcatggggatgacagatccagagatggtagaagtccatgccagctccaaagaggaacgaaacagctggattcagatcattcaggacacaatcaacaccctgaacagagatgaagatgaaggaattcctagtgagaatgaggaagaaaagaaaatgttggacaccagagcccgagaattaaaagaacaacttcaccagaaggaccaaaaaatcctactcttgttggaagagaaggagatgattttccgggacatggctgagtgcagcacccctctcccagaggattgctccccaacacatagccctagagttctcttccgctccaacacagaagaggctctcaaaggaggacctttaatgaaaagtgcaataaatgaggtggagatccttcagggtttggtgagtggaaatctgggaggcacacttgggccgactgtcagcagccccattgagcaagatgtggtcggtcccgtttccctgccccggagagcagagacctttggaggatttgacagccatcagatgaatgcttcaaaaggaggcgagaaggaagagggagatgatggccaagatcttaggagaacggaatcagatagtggcctaaaaaagggtggaaatgctaacctggtatttatgcttaaaagaaacagtgagcaggttgtccagagcgtttgttcatctctacgagctcctcagcgctctgcagggtgtggttgctgcagcaggacaggtacattgaggaccagaaactggtgctgagcgagagggcgctcactcgccagttgtcccgccgagctcctca

SEQ ID NO: 168056 - DNA, 1130 bp, Homo Sapiens
gggaaacctctttggttgtcctttccttcctggggtatagaatgttcttggaagctccattgatttagtagctgctccatcatctagcttgtgaaaccattccaaactaattttttaaaaccataactgatttgtcattttgtatttgtgatataacaagtctagaagttagaactgttgtcattcacataataagattactctgtctccttgggaaaaaaactttatggaggctgtttgtcctctcaatatggttttaagattgaaagtaagaaaacggatttaggatgaaaactctagaactaccctatgctgtttatactgggaaatgctttgtaccaagtagcagtgactagacccacagacatgaaaagcaaccttaggagtaaagtgacccaaacattaaaatgacaggaaagagaaagtagaagcagcaataaatactgccccaactttcctggagcccgaggcctcatccatagctatgatcacttgccctctgaagcttatttttgcttctttggttttaagaattgagaaatatcacattgcccctgatgttttgacagtctcctagtgctcctggtagtgccactaagggaaaaccaaggtgcgcattccttctccctggactttaccttacttgttagtctacgccccactgtttccacccatccccttagccaacctctgtctttttgaattttctgagaatattgtcctatcctcttttatatatggagttctctcctctttatatcctgagactttgacaccagatgtagatatttatctggagctggaaagaaaaattctttttctgtacctcatgcctatctggtaatgtttaatgggttatttctctttgagggtggctttctctggaacattggttagagcagctttgttgtcgtgtttctggattctcttccccattttgcgtaaatattggtcttatatattcttgcctattttgtggcatatgccacagtaaaaaatgaacctgatatagacaagtactaccttttcaaattctgaaaggtattaccactttaactctttgtgctcctccaaatagcttttaaaatgtgggctttgtgaagaccacttttcaacagggagcatgaaac

SEQ ID NO: 168057 - DNA, 660 bp, Homo Sapiens
  misc_feature (136)..(144): n is a, c, g, or t
cctcaggacttaagtgggcaggcttctgtcaatttcattatcatcaagcaggaattatgtcgtaagtcactgaccctaactgcagaccatgaagtaaattatgtaactaggtttttgcttctccagtggtgaccannnnnnnnnatccccgctcacaacttgggttcttctcagcggggcgagctgagaagcggtcatgagcacctggggattttagtaagtgtgtcttcctagaattcgaaggctctctctttctagaggtgcttcatagttggtaatgcttggaatggcaatagggtagaatgattaatcaaaggcatatcttctatatctgaagagtatccttccttcagggtttaatagactgagtcagatgggtctgatattaatcaaaattgtctcttctgaggaccgctgataagcattgacttgctgtcccctaaggaaatccgagcggctacaaagcgtttctttacttttcacttcaattaatgctgcgcttcgcttggtgagtgcgtactttttctacctgtacacattcctgcactcatgtattttgtttttttgactaaagctatgttacatggaaaggatttgaagacactgaccactcgggtacgagctcaatcgtatcatggcatagtgtccggtgtggtcccc

SEQ ID NO: 168058 - DNA, 1777 bp, Homo Sapiens
atcaacagaatggattgtaccgctgtgagaagtgcgacaccgaattcccaaatttcaagtaccgcatgatcctgtcagtaaatattgcagattttcaagagaatcagtgggtgacttgtttccaggagtctgctgaagctatccttggaaaaaatgctgctaatcttggggaattaaaagacaagaatgaacaggcatttgaagaagttttccagaatgccaacttccgatctttcatattcagagtcagggtcaaagtggagacctacaacgacgagtctcgaattaaggccactgtgatggacgtgaagcccgtggactacagagagtatggccgaaggctggtcatgagcatcaggagaagtgcattgatgtgagaggagcagtgccaatcgggcagaagtttgcaaaataggcagaatggaatcgatttcctcccacctccgtgtgacagatcccatgttagctacacagtgcagaggctccttgatggtggactaagcaatttcccccctcgtgcgcatctcagaacccatcggtaggcaaaggaaaatacgctcaggtggttgtggtgtagactgtgtcaggcctacggagtcagccagttggctagcgcaagaccagtcactccctctgccttcaggcttctgtcaatttcattatcatcaagcaggaattatgtcgtaagtcactgaccctaactgcagaccatgaaagatcggaagttggcattctggaaaacttcttcaaatgcctgttcattcttgtcttttaattccccaagataagcagcattttgtccaaggatagcttcagcagactcctggaaacaagtcacccactgattctcttgaaaatctgcaatatttactgacaggaacaatccgggacttgaaattgggaaattcgggtgtcgcacttctcacagcggtacaatccattctgttgatcaatcactttcttattgcagtcctgagtcgggcaggcttggtacatgcagttctctttgcgaagatacaccactgtggccacagaactaaagtagtccggcttgtcgccttggcccaggttctcggatttgacctcatacaaggttttccagttggtgttactccctccgactccgccgctctttagatcagagatggaaacaccatctaaggcttgtccttctgcgtcaaaccatccacgaagcttataggcctctgggatgtcaggattcgcaatgatagtgcttgaagacagcacggagaggctccgtccaccgaaatcagagactcgggctcctttgatagccaacacgggctgtctagaaccatcaaatttatcagcatcttccccccacagtgtagcagtcaccaccttcccggatgtgtccatcaagtagatattcctcttggcaacttctctgttgttagacctcactgtgattttagtggcgtcttcatagctcttgcagatcccgatgatgtctacaagtgagtctttcgacttgttctcgaggtcatcaatccccgtgaaatcaaactgaaccgtaggtaaatgatggtcgtcctcacagggcatgacggaagtctcgttattgaaggtcatctcgtagtcatttttaacagctgtgaactgcttgttagcaatcttcagggtgcctttcgagaaataatacaccttgatcacttcataagaggaaagacttgtccacttgctccgatatcccgggaatccggccgtacagcctgctttatcaccagcggttatagtctacataatgcattgacac

SEQ ID NO: 168059 - DNA, 795 bp, Homo Sapiens
aatggaagctcgggaatgggttctactgtttctaaggcttatggtgcttcaaagacatttggaaaagctgcaggtcccagcctgtcacacacttctgggggaacacagtccaaagtggtgcccattgccagcctcactccttaccagtccaagtggaccatttgtgctcgtgttaccaacaaaagtcagatccgtacctggagcaactcccgaggggaagggaagcttttctccctagaactggttgacgaaagtggtgaaatccgagctacagctttcaatgagcaagtggacaagttctttcctcttattgaagtgaacaaggtgtattatttctcgaaaggcaccctgaagattgctaacaagcagttcacagctgttaaaaatgactacgagatgaccttcaataacgagacttccgtcatgccctgtgaggacgaccatcatttacctacggttcagtttgatttcacggggattgatgacctcgagaacaagtcgaaagactcacttgtagacatcatcgggatctgcaagagctatgaagacgccactaaaatcacagtgaggtctaacaacagagaagttgccaagaggaatatctacttgatggacacatccgggaaggtggtgactgctacactgtggggggaagatgctgataaatttgatggttctagacagcccgtgtatggctatcaaaggagcccgagtctctgatttcggtggacggagcctctccgtgctgtcttcaagcactatcattgcgaatcctgacatcccagaggcctataa

SEQ ID NO: 168060 - DNA, 1119 bp, Homo Sapiens
  misc_feature (28)..(28): n is a, c, g, or t
  misc_feature (39)..(39): n is a, c, g, or t
  misc_feature (47)..(47): n is a, c, g, or t
  misc_feature (53)..(53): n is a, c, g, or t
  misc_feature (61)..(61): n is a, c, g, or t
  misc_feature (74)..(74): n is a, c, g, or t
  misc_feature (76)..(76): n is a, c, g, or t
  misc_feature (82)..(82): n is a, c, g, or t
  misc_feature (100)..(100): n is a, c, g, or t
  misc_feature (103)..(103): n is a, c, g, or t
  misc_feature (121)..(121): n is a, c, g, or t
  misc_feature (128)..(129): n is a, c, g, or t
  misc_feature (156)..(156): n is a, c, g, or t
  misc_feature (162)..(163): n is a, c, g, or t
  misc_feature (167)..(168): n is a, c, g, or t
  misc_feature (171)..(171): n is a, c, g, or t
  misc_feature (191)..(191): n is a, c, g, or t
  misc_feature (199)..(199): n is a, c, g, or t
  misc_feature (211)..(211): n is a, c, g, or t
  misc_feature (215)..(215): n is a, c, g, or t
tttcataagccgcagtcgtcgatatcanttcaaaatccntggtgatntttccnatcgctancttcctgacaaangngccttntggaataaaagccagaanacngctttaaagttttccaangccactnnggttttcaatcagatcaggtcaaatgnagaccnncacnncgnatctgattaaggccactgtnaagacgtnaagccgtgactnccanagagtaggccgaaggctggtcatagcatcaggagaagtgcattgatgtgagaggggcagtgccatcgggcagaagtttgcaaataggcagaatggaatcgatttcctcccacctccgtgtgacgatcccatgttagctacacagtgcagaggctcttgatggtggactaagcaatttcctccctcgtgcgcatctcagaacccatcggtaggcaaaggaaaatacgctcaggtggttgtggtgtagactgtgtcaggcctacggagtcagccagtggctagcgcaagaccagtcactccctctgccttcaggcttctgtcaatttcattatcatcaagcaggaattatgtcgtaagtcactgaccctaactgcagaccatgaagtaaattatgtaactaggtttttgcttctccagtggtgaccacccgcccccatccccgctcacaacttgggttcttctcagcagggcgagctgagaagcggtcatgagcacctggggattttagtaagcgtgtcttcctagaattcgaaggctctctctttctagaggtgctacatagctggtaatgcttggaattggcaatagggtagaatgattaatcaaaggcatatcttctatatctgaagagtatccttccttcagggtttaatagactgagtcagatgggactgatattaatcaaaattgtctcttctgaggaccgctgataagcaatggacttgcccgtcccctaaggaaatccgagcggctacaagcgtttctttacttttcacttcattaatgctgcgcctcgcttggtgagtgcgtacttttttctacctgtacacattcctgccatcagtggattttggttttttttgactaaagctatggtacatggaaaaggattttgaaagcctttt

SEQ ID NO: 168061 - DNA, 578 bp, Homo Sapiens
cctactcgtgtacctaagtgggtggatacccagaagtccccagcctttctttggactccacaaattcttgccccatcttcattttctcccactcttccttacgtgtcttgattttacgtgggtttacattccctcgatttggattatctttcttttctttcctatgctttctcttctctttcatgatatccttggtgtcctgcagcatcttctccttccaaagatcaaagaagtatgaagggtctgtgtagaatttgagtgcctcttttccatcgtcactgtaaggggtaagattgttgagagggggaggagtatcacaggtattgtatgtttctaagacaggcactgggagagagtttctgtcaaaaagcttctggtcttgaatggtggaacttctgaaggcttttcgggtgtagattccttgcagtgacacttcttcttccttgggatccagctgagtgactttaacctgtagtcggtcgaccctctcagcaagggagcttacccgagaggcaaaggtatttgcctgagtaaagagctctccaaaaatgtcctctgcatatttactcaggctgccc

SEQ ID NO: 168062 - DNA, 565 bp, Homo Sapiens
tcagcgctaacctatgcgtgtacaatccacagcacatccagaactctgacaggatgatctgactcataaaacggaggacaaggaatgacttttttttcctgcaaaggtaggagatactggaccacagttccattctgttttcccactgccagctgctttcctttggggctccagcacacagaggttactgctaccgtggaaggaagagttgcacatactttcactgtttccgtgacttgcaggacagcaatactaccatcagccagacaaactgccaccatggaggggacagtggggttccacttcatatcaatcaccatgcctcctgcatctttcaaaaagcttatgataggcaaatgggcgtatttgctgtttagcctcatttgagaatgtgcgaacttcagaaaaaagcaaataatggaaccatattcactggacatcatgcacgcagagagtgtgaggttatcacagctcaaggccaggtgatggatcgggaatttcataggaactagcaagccttggactttatcaactattttgtgggtacacgcatagggggatcctc

SEQ ID NO: 168063 - DNA, 734 bp, Homo Sapiens
tatgcgtgtacaaatgcatacctggaagaacagacatagagttggaaatatatggtatggaaggtattccagaaaaagacatggatgaaagacgacgacttcttgaacagaaaacacaagaaagtcaaaaaaagaagcaacaagatgattctgatgaatatgatgatgacgactctgcagcctcaacttcatttcagccacagcctgttcaacctcagcaaggttatattcctccaatggcacagccaggactgccaccagtaccaggagcaccaggaatgcctccaggcatacctccatttaatgccaggtgttcctcctctgatgccaggaatgccaccagttatgccaggcatgccacctggattgcatcatcagagaaaattacacccagtcattttgcggtgaaaacataatgatgccaatgggtggaatgatgccacctggaccaggaataccacctctgatgcctggaatgccaccaggtatgcccccacctgttccacgtcctggaattcctccaatgactcaagcacaggctgtttcagcgccaggtattcttaatagaccacctgcaccaacagcaactgtacctgccccacagcctccagttactaagcctcttttccccagtgctggacaggctcaggcagctgtccaaggacctgttggtacagatttcaaacccttaaatagtacgcctgcacaactacagaacccatacaccgataagc

SEQ ID NO: 168064 - DNA, 837 bp, Homo Sapiens
  misc_feature (29)..(29): n is a, c, g, or t
  misc_feature (35)..(35): n is a, c, g, or t
agggccatccaggagggtgggtaattccnggggtnccagggtgggccattcatttcccaccccattggggcatccattatggtttttcacccgcaaaaatgacctgggtgtatttttctctggatgatgcaatcccaggtggccatgcctgggcataactggtggcattcctggcatcagaggaggaacacctggcattaatggaggtatgcctggaggcattcctggtgctcctggtactggtggcagtcctggctgtgccattggaggaatataaccttgctgaggttgaacaggctgtggctgaaatgaagttgaggctgcagagtcgtcatcatcatattcatcagaatcatcttgttgcttctttttttgactttcttgtgttttctgttcaagaagtcgtcgtctttcatccatgtctttttctggaataccttccataccatatatttccaactctatgtctgttcttccaggtattgcatttggtacggcatctattgtttctttatgtacctgcatgcaatgaatagctaagccaggtcctgtatacaatttcttgtgacatatatggcatttaaaatgctttgctttttggtgctgaataaggatcttctcatcatcaaaatctctattacaataccagcaccacggcttcagctgcttcttcttcttgcgacccataactgtgttctaccggcaaagtaaaagggaggagaaaagaagcaggagaaacgaggccaaaaatccctcactttcccaacccaacggctaccaccacgtcccacaggaagcagacacaaaatggccgacggcctcgttccccgctccccc

SEQ ID NO: 168065 - DNA, 362 bp, Homo Sapiens
tcgactcgagctcgtaccctatgcgtgtacaaaggggagactgagagtaggggatggcttaggttttggcttgggtgttcagaggttagagataaagaggtgtcatgacatgatggacttacgaggccaagagaacagacagaaaaagaggccctctaagtggctaggtcttcagggctggtgcccagaagaaaaacccgagttgtagaaagacctggggagtaggctcagagaatgtcctgaagatggggagatcacccaggaagcctgcacaaggatggtaggtaggacacttaagagttaggcagagaaaagatcatataacttggtgagcataaattctttgttacccaacagaaacc

SEQ ID NO: 168066 - DNA, 522 bp, Homo Sapiens
  misc_feature (26)..(26): n is a, c, g, or t
gataaaagaatcagagtgtctcaacncttgacaagaggaccaagtgcctttattccagagaaggaagttgtccaagcaaacacagtggatgaacgtactaactttcttgtggaagaatactctacatccggtcgtctggacaacatcacacaggtcatgagtttacacactcagtacctggagtctttcttgcggagccagttttacatgttgcgcatggatggtccccttcctctaccatacaggcactatattgcaataatggctgcagctagacatcagtgttcttacttaataaacatgcatgtggatgaatttttaaagactggaggtattgctgagtggttgaatggtttggaataggtgccacaaagactgaaataatcttaatgaaattaataagctgctagcacatcgaccttggctgatcacaaaagagcacattcagaaacttgtcaaaactggagaaaataatgtggtctctgcctgaattggtacacgcatagggtacaggctcgatcc

SEQ ID NO: 168067 - DNA, 533 bp, Homo Sapiens
agttacatgatacaatcgagctttgtacccaggcatgcagcttggtaagaagctcctcactgtagcactccgttcattatacaattcagtgttccagtcaggtcctttcatagatatacagcatatagaggatatcagcttgttcctgtaaactatgaggtctccttcaactgtaaaaccagtgctttaaagtccacctccccagactggtctctaggaagatgtatttctacacgaacagagggaacctggttctcctgtcggggatgaggtgaatcaagtaagttgaatgaaggccgggaagcctgaaataacttcgtaggaagatacatgtgaacattctgtacatgcagttccttggccttggtcaccaaggacattatgtcgcaggttgtttgcacagcagcttggaaccgatctagccctcccttctgtgaggtaggggctagtttaggatggggagcagtgtgcgccaaaaggtgatctaaataacgagcaacttcatcaccacagcgagcatgactggttgaatc

SEQ ID NO: 168068 - DNA, 979 bp, Homo Sapiens
  misc_feature (897)..(897): n is a, c, g, or t
  misc_feature (941)..(941): n is a, c, g, or t
  misc_feature (952)..(952): n is a, c, g, or t
cccggattcgcggggaggacactgtctgtgatggaggactctgcccaggagatcgccacctgcaacagccggaacgggaacccggcccccaagatcacgtggtatcgcaacgggcagcgcctggaggtgcccgtagagatgaacccagagggctacatgaccagccgcacggtccgggaggcctcgggcctgctctccctcaccagcaccctctacctgcggctccgcaaggatgaccgagacgccagcttccactgcgccgcccactacagcctgcccgagggccgccacggccgcctggacagccccaccttccacctcaccctgcactatcccacggagcacgtgcagttctgggtgggcagcccgtccaccccagcaggctgggtacgcgagggtgacactgtccagctgctctgccggggggacggcagccccagcccggagtatacgcttttccgccttcaggatgagcaggaggaagtgctgaatgtgaatctcgaggggaacttgaccctggagggagtgacccggggccagagcgggacctatggctgcagagtggaggattacgacgcggcagatgacgtgcagctctccaagacgctggagctgcgcgtggcctatctggaccccctggagctcagcgaggggaaggtgctttccttacctctaaacagcagtgcagtcgtgaactgctccgtgcacggcctgcccacccctgccctacgctggaccaaggactccactcccctgggcgatggccccatgctgtcgctcagttctatcaccttcgattccaatgggcacctacgtatgtgaggcctcccttgcccacagttcccggttccttcagccgcacccaggaatttcacgctgctgggtccaagggttcgncagatttaaaaaggacaggcgggaattaggagcccaagggcagntggggcagttnggaggggaagggagacgagtaacattt

SEQ ID NO: 168069 - DNA, 407 bp, Homo Sapiens
  misc_feature (301)..(343): n is a, c, g, or t
tccctcttccttcttccctctccctgccaaaccctcccttccttcctctgccggcaaaggcagggacccaaaatggctgcctgcctccgggagggaaggaaagggagggtgggtgggtgggagggggccttcctccagggaatgtgactctcccaggccccagaatagctcctggacccaagcccaaggcccagcctgggaaaaggctccgagggtcggctggccggagctatttttacctcccgcctcccctgctggtccccccacctgacgtcttgctgcagagtctgacactggattnnnnnnnnnnnnnnnnnnnnnnnnnnnnnnnnnnnnnnnnnnntacctccgccccaccccatcatctgtggacactggagtctggaataaatgctgtttgtcacatc

SEQ ID NO: 168070 - DNA, 1078 bp, Homo Sapiens
  misc_feature (86)..(86): n is a, c, g, or t
  misc_feature (984)..(1037): n is a, c, g, or t
  misc_feature (1054)..(1054): n is a, c, g, or t
ggccagagcgggacctatggctgcagagtggaggattacgacgcggcagatgacgtgcagctctccaagacgctggagctgcgctnggcctatctggaccccctggagctcagcaggggaaggtgctttccttacctctaaacagcagtgcagtcgtgaactgctccgtgcacggcctgcccacccctgccctacgctggaccaaggactccactcccctgggcgatggcccatggctgtcgctcagttctatcaccttcgattccaatgggcacctacgtatgtgaggcctccctgtcccacaggcccggtcctcagccgcacccagaacttcacgctgctggtccaaggctcgccagagctaaagacagcggaaatagagcccaaggcagatggcagctggagggaaggagacgaagtcacactcatctgctctgcccgcggccatccagaccccaaactcagctggagccaattggggggcagccccgcagagccaatccccggacggcagggttgggtgagcagctctctgaccctgaaagtgaccagcgccctgagccgcgatggcatctcctgtgaagcctccaacccccacgggaacaagcgccatgtcttccacttcggcaccgtgagcccccagacctcccaggctggagtggccgtcatggccgtggccgtcagcgtgggcctcctgctcctcgtcgttgctgtcttctactgcgtgagacgcaaagggggcccctgctgccgccagcggcgggagaagggggctccgccgccaggggagccagggctgagccactcggggtcggagcaaccagagcagaccggccttctcatgggaggtgcctccggaggagccaggggtggcagcgggggcttcggagacgagtgctgagccaagaacctcctagaggctgtccctggacctggagctgcaggcatcagagaaccagccctgctcacgccatgcccgccccnnnnnnnnnnnnnnnnnnnnnnnnnnnnnnnnnnnnnnnnnnnnnnnnnnnnnngccggcaaggaggtgancccacagtggctgcctgcctccgg

SEQ ID NO: 168071 - DNA, 411 bp, Homo Sapiens
  misc_feature (15)..(15): n is a, c, g, or t
  misc_feature (33)..(33): n is a, c, g, or t
  misc_feature (40)..(40): n is a, c, g, or t
  misc_feature (45)..(45): n is a, c, g, or t
  misc_feature (56)..(56): n is a, c, g, or t
  misc_feature (66)..(66): n is a, c, g, or t
  misc_feature (78)..(78): n is a, c, g, or t
  misc_feature (87)..(87): n is a, c, g, or t
  misc_feature (96)..(96): n is a, c, g, or t
  misc_feature (132)..(132): n is a, c, g, or t
  misc_feature (136)..(136): n is a, c, g, or t
  misc_feature (147)..(147): n is a, c, g, or t
  misc_feature (159)..(159): n is a, c, g, or t
  misc_feature (162)..(162): n is a, c, g, or t
  misc_feature (190)..(190): n is a, c, g, or t
  misc_feature (288)..(288): n is a, c, g, or t
  misc_feature (297)..(340): n is a, c, g, or t
aaggcctgcccaaancctgccctaagctggacnaaaggantcaantccccctgggngatggccccnaatgtgtcgctnagttctatnaccttcgantccaatggcacctacgtatgtgaggcctccctgccnaaantcccggtcctnagccgcacccanaanagctcctggacccaagcccaaggcccancctgggaaaaggctccgagggtcggctggccggagctatttttacctcccgcctcccctgctggtccccccacctgacgtcttgctgcagagtctganactggattnnnnnnnnnnnnnnnnnnnnnnnnnnnnnnnnnnnnnnnnnnnnacctccgccccaccccatcatctgtggacactggagtctggaataaatgctgtttgtcacatcaacaaaaa

SEQ ID NO: 168072 - DNA, 528 bp, Homo Sapiens
ctcagaggacagttccgtggtcctgccagaagctcagctgttccacatgacccttaaacatttaaacaattttttggtttaaaggaaaaggaagccaatcaaaatgctttggaaacaaattaaagttgcaaattatttccccacatagtaaatacatatccttgctacctgaaatgataatcatcactccccctgctggctgagagcgcttctcctccttcagactggctctgccacaaagctaagtattagtagaagttgttgccaagcctcacctctagcctgtacatgggctctgaggtgaacacaggagtcagagtccccactccagcagtgactggaggaggcctgacagaacaagccccttggggacaggaggcaagctgcactcacctctgggaccccacccgggatgggcgctccacgagtcccttggccttagggaacctctgtttcattccatccagacgaggatagggaagcttcctgccctacctcgacagcctctaaggcacctcggtccgccac

SEQ ID NO: 168073 - DNA, 750 bp, Homo Sapiens
  misc_feature (690)..(690): n is a, c, g, or t
  misc_feature (738)..(738): n is a, c, g, or t
  misc_feature (742)..(743): n is a, c, g, or t
  misc_feature (746)..(746): n is a, c, g, or t
tcctccaggaggtccataaggccgctagactcgcccccaagtccctgtaggctgggactgctgcctctggctccttctcggcgcgaggtgagcgtctccatcacctggcccagcttctcctgcagctcctttacttgctgctccaactgcagcgcgctcttgttctcgtgcttcagctcctccaagtcgctctgtggctcggccagctgctgaagcctcttctcccgttcccgaagcctctcctgctgctcctgaagcctctcctcctgctcgcgaagcctctccttttgcccacggttcaggagactgatgcactgattgttttccacctgagcctggagctctcctgccactctctccagctccttcctcaggtcttgcagctccacctcagaggacactgctggggcatccgggggcagtggctcagccatctggtttttgagtctggacaagctcctctccagctcctctacccgatgcgtatcatgcttcttctcctccttcaatgtgcaaacctcctgcgacattttcctcatcctctgctgccactgggccctctctccttttatttgttcagcatattgatctctctccagctggacttctttaagcgactccttcaactgtgctcacgtgtcctttcagcagtatctgctcccgtatggactgctctaactgccgcttganaagtgctttactgccgctcgagaacccatccggcttcttcttctgtgntggnngcnacag

SEQ ID NO: 168074 - DNA, 993 bp, Homo Sapiens
gcaggacagctgcagcgtgctccatccaagcaagatgaccgtgtgcagccccgacggccccggcggccgctgccagtgccgcgcgctgggctcgggcatggcggtcgactgctccacgctgacctccaagtgtctgctgctcaaggcgcgcatgagcgccccaagaacgcccgcacgctggtgcacgaagtgagcacgcgctcgtggacaacgatggcctctacgaccccgactgcgaccccgagggccgcttcaaggcgcgccagtgcaaccagacgtcggtgtgctggtgcgtgaactcggtgggcgtgcgcgcacggacaagggcgacctgagcctacgctgcgatgagctggtgcgcacccaccacatcctcattgacctgcgccaccgccccaccgccggcgccttcaaccactcagacctggacgccgagctgaggcggctcttccgcgagcgctatcggctgcaccccaagttcgtggcggccgtgcactacgagcagcccaccatccagatcgagctgcggcagaacacgtctcagaaggccgccggtgacgtggatatcggcgatgccgcctactacttcgagagggacatcaagggcgagtctctattccagggccgcgccggcctggacttgcgcgtgcgcggagaacccctgcaggtggagcgcacgctcatctattacctggacgagattcccccgaagttctccatgaagcgcctcaccgccggcctcatcgccgtcatcgtggtggtcgtggtggccctcgtcgccggcatggccgtcctggtgatcaccaaccggagaaagtcggggaagtacaagaaggtggagatcaaggaactgggggagttgagaaaggaaccgagcttgtaggtacccggcggggcagggggtatggggtgggggtacccgaattttcggctatcggccccagaaacccaggtggagttcacgccttccctgaattccctccggacggcaac

SEQ ID NO: 168075 - DNA, 1188 bp, Homo Sapiens
  misc_feature (756)..(764): n is a, c, g, or t
ccctatcatccatctcatgcctgttcgaccccagataactgcacaagggaggaggcctggggtggagaattccccacaagggtgctccgcgctgaccttttagtgtctgctgctcaaggcgcgcatgagcgcccccaagaacgcccgcacgctggtgcggccgagtgagcacgcgctcgtggacaacgatggcctctacgaccccgactgcgaccccgagggccgcttcaaggcgcgccagtgcaaccagacgtcggtgtgctggtgcgtgaactcggtgggcgtgcgccgcacggacaagggcgacctgagcctacgctgcgatgagctggtgcgcacccaccacatcctcattgacctgcgccaccgccccaccgccggcgccttcaaccactcagacctggacgccgagctgaggcggctcttccgcgagcgctatcggctgcaccccaagttcttggcgggcgggcactacgagcagcccaccatccagatcgagctgtggcagaacacgtgtcagaaaagccgaccgggacgtggatactcgcgatgcccgcctactacttcgagagggacatccacgggcgagtcatgtattccaggcgccgcgacgagcaggaacttgaccgagagctagataacccccgccgcgtggagcccaccctccatctcagtacctgggacgcagattcccgccgagcgtgattgctgtaagagacccccggcgggcaggtcctcaatctacggcgcccgccnnnnnnnnncacgtgtcgggacccgccgcccccgcggggaatgggcccacccccgccgggatcacacccaaccgggccaaacaagtgcgcggggccaggcatcactgtaaccgctcgggcgacaccccggtggaccttggggcggctatgcttccatcaaacgcgcaaaccggccagctccaggtaatgaatcaccccgcacccgcgcgctttatccgcaatcgccgcgcctcgccgggttacggaggagaattgcccgaggtgatcgtaacccgcagagcagcggcatgaggcggcagatacgcggggcggtgctcgcgcgatatagcaccgcagcggcgcagacgagggggcggacagcgctcatcgcagcgattttaagaagacaggcgccggcccgctcgacaccgaggatccgccgcgctagatcgag

SEQ ID NO: 168076 - DNA, 414 bp, Homo Sapiens
  misc_feature (50)..(50): n is a, c, g, or t
  misc_feature (338)..(338): n is a, c, g, or t
  misc_feature (385)..(385): n is a, c, g, or t
  misc_feature (397)..(397): n is a, c, g, or t
tgctccacgctgacctccaagtgtctgctgctcaaggcgcgcatgacccncccaagaacgcccgcacgctggtgccgcggagtgagcacgcgctcgtggacaacgatggcctctacgaccccgactgcgaccccgagggccgcttcaaggcgcgccagtgcaaccagacgtcggtgtgctggtgcgtgaactcggtgggcgtgcgcgcacgaacaagggcgacctgagcctacgctgcgatgagctggtgcgcacccaccacatcctcattgacctgcgccaccgccccaccgccggcgccttcaaaccactcagaccgggaacgccgagctgaggcngtctctttccgcgaagcgctaatcgggctgcaaccccaagtttcgtnggccggccgtgnactaaggagcagtccaa

SEQ ID NO: 168077 - DNA, 410 bp, Homo Sapiens
  misc_feature (41)..(41): n is a, c, g, or t
gccaaataaggccagctagtgccccctgttcttggccccancccctgtccatcatccactacatcccgattctctcaaatgttcataaagaataatgaacttaaaacttcaggggttccctgaaaactggtattaaattaaaagcagagtagtcaaaattctttgcaaatgacttctgtgatagaaaaaaatatttccaacctgcgtcagaggagaattatcttttaggtgccaaggaaagagtgataaagatgctgagtatattagtcaaggtcatctgagaagactattttgtggttgattcttctgagcccctgaattgtccaacattattggtgtacctgtagcgtgaacaacattgcaaccaataattttttgaatacagcaatgtaaaaccctcaactttaatg

SEQ ID NO: 168078 - DNA, 438 bp, Homo Sapiens
aagctccggaagtatgagtaaacttatttttctcaaggatctgggagtataacctgaagactcaccttaaagaaatcctgttttgcactttaatttcatgataaatctgtcgtgttttaatgttaaaatgttttaaatgaggggataccctaatggttaagagtgtacgttttgagtctcacgaacctgatttgagtcctatttctcccattttttagtaatatagcttctaaaagtactagtacctatcttaataggattattgggaggattaaatggctgtttaatgtgctacctgatacacggtatgcctttgataaatgttaactattaactactgttgttactatcaagtaaagtatatgttcaggaaaggtgatgtttattttagtttatttatttttgagatgaagccatctgtccccaggctggcaacaa

SEQ ID NO: 168079 - DNA, 255 bp, Homo Sapiens
ttagtccaactgagcccaatgatatgtgtgttaagctctgaaaatactttggggagaacacagtgatatcatttaaaaagttctctgcaggaaaccgggaaattaagtactagagtggaaaagcccgggtaggcactaaaacatctactgaaaattaggtctcctgttgatagaggaaaagactacacaagtcgattgttttaaagatcactagcattttaaaggttcctagaacccgatctaaaatccaatttt

SEQ ID NO: 168080 - DNA, 585 bp, Homo Sapiens
cgactctacaggatcttcggaagtagtccaataacttcatcaatgtattaaaggattctgtatctcaaaaggggttaaaaagcattgccttaagtgttgatccaaaataaataaaattagcagttaaacttaatgtaatattgcaaaatcagaacccagatctttaacccttgataaatgttaggtatggtagttttaatacctagtggcagagatacatctttaacaaagaaaaactaacaagaaattacacacttttttttcctaacacagacaatgagttacaaggcactaatagttctggatccttgggtggtcttgatgttcgcagacgaattcctataaagctcatctccaaacaagcaaacaaagcgaaacctgcaccgggaactcaaagaactataaacaggatgcctgcaaaggctccacctggtgatgaaggtaatttgtttaactaataggtccaacactctttctgttttatctgattgcttcggacagtctgtgtgatcttatagctacctctttttgtcttacatattctattcattcttcaaccttcttgttggacttactcgcgggtta

SEQ ID NO: 168081 - DNA, 241 bp, Homo Sapiens
tagggtcttagggagcagtgaaatgggggttggatcatagagacaggcgctggggactcgggtactgcagttaggaaagtagcgttatgagttgtactgaaaatgttgattctctaatctgccagaaaaggacctgtcttttcatgcagatttcatattgtctttgtccttttcattgcttcttgaccttcctggcaggtgtcgctcagtttcttcctgtttccctcctgtatgccccacc

SEQ ID NO: 168082 - DNA, 786 bp, Homo Sapiens
tagggtcttagggagtctaaacaaaaatgcaccttcggtcaacttttgcttttttaaattcctcgtttgacttcccgtcccagtgcacatggaaatgacagctgccgcgagaggtgtggagtcggaggagtctccgggagcatcagagggttcgggggttgtattctggcagtttcttgatcttctctttctcagtctcactttcatctcttgctatcaccaaggagtgtgagtagcccatggcgacctgctctgagacaaatgccatccatgagtctttacctcactgggctgcagtggaagacttgggcttgtggtccccgtagcccagttccccaaaggtcggtgacggaccccagctgatgtgtgctctcatcgtgcggccacaaatgatgctgctcttcccacaagccaggctccggattctccagccgcaggggtcctgcactgcttttgggtacatggtagattcacgggaggtgttggtggcccccccagaaaaacagaccacccacttcactgacagcaaaggagcaggtgtaaccagcatagatctgtgaagccaaacgcccagggaagtcaaaacagcttcaccaggcgggggaccatctcatccttcttgctctgggtggccccaagccggccatagccaccaaagccccaggagaagactcgcttctgggagtccaggaccagcgtgtggttagcgccaacaggccacgtctcgtacaacccacgtttggtacaggccgaatctgtccatctttcgtcttctccatgaagatg

SEQ ID NO: 168083 - DNA, 1349 bp, Homo Sapiens
  misc_feature (1057)..(1218): n is a, c, g, or t
  misc_feature (1263)..(1274): n is a, c, g, or t
gtgtgcctgggtacccggggtcccgcgaaagttctgggatatgtcgaccacgcgtcgaccacgcgtcggtcttcacagtaccgccagctgctcagtgactacgggccaccgtccctaggctacacccagggaactgggaacagccaggtgccccaaagcaaatacgcggagctgctggccatcattgaagagctggggaaggagatcagacccacgtacgcagggagcaagagtgccatggagaggctgaagcgcggcatcattcacgctagaggactggttcgggagtgcttggcagaaacggaacggaatgccagatcctagctgccttgttggttttgaaggatttccatctttttacaagatgagaagttacagttcatctcccctgttcagatgaaacccttgttttcaaaatggttacagtttcgtttttcctcccatggttcacttggctctgaacctacagtctcaaagattgagaaaagattttgcagttaattaggatttgcattttaagtagttaggaactgcccaggttctgaatgttatgataaagcattgatttaaaagatgcacggaaagttatcttacagcaaactgtagtttgcctccaagacaccattgtctccctttaatcttctcttttgtatacatttgttacccatggtgttctttgttccttttcataagctaataccactgtagggattttgttttgaacgcatattgacagcacgctttacttagtagccggttcccatttgccatacaatgtagggtctgccttaatgtaacttcttttttgcttaagcatttgcatgactattagtgcttcaaagtcaatttttaaaaatgcacaagttataaatacagaagaaagagcaacccaccaaacctaacaaggacccccgaacactttcatactaagactgtaagtagatctcagttctgcgtttattgtaagttgataaaaacatctggaagaaaatgactaaaactgtttgcatctttgtatgtatttattacttgatgtaataaagcttattttcattannnnnnnnnnnnnnnnnnnnnnnnnnnnnnnnnnnnnnnnnnnnnnnnnnnnnnnnnnnnnnnnnnnnnnnnnnnnnnnnnnnnnnnnnnnnnnnnnnnnnnnnnnnnnnnnnnnnnnnnnnnnnnnnnnnnnnnnnnnnnnnnnnnnnnnnnnnnnnnnnntggggggcccccccccccccaaaaaatttttaaaaaacttttgtnnnnnnnnnnnncccaaagggaaaggaaagggggcaaaagtgtttcccgagaaaaaccggggaaaaaaaggggggtggtttcccccc

SEQ ID NO: 168084 - DNA, 684 bp, Homo Sapiens
aaagtctactccgttttccacttccaaatcattaagtagtttaaagtcccatttaacaagtatttactctagattgtggaccacgcttgaaatatgagtgtacgcttcgcaggcccctgtgtttccagctctctattggaggcatcatcattctgaaggataccagtgaagacattgaggagctggtggaacctgtggcagcacatggcccaaaaatcgaggaggaggaacaagagccagaacccccagaaccatttgagtatattgatgattaaggaccagaggatctcacttgcttatctgaagaagattgtccaggctcatattgggaatgcttatgaggaaattcatgccgagacctgctattcaatgcatgtatcgttgcctctgcactgacctgaagaaccctgtctccaagtctttggttgaagagaagatatatgactgttgagtgtgctctttcacagaacttggttttcaaataaatataagatctcccgatggacaagacatttgtttttcagcctgggtttttaataaatgtatctaatcctccccacaccatgaaatgcctaaatcccaagagccagagtcttgatttgctaggatgagtatgcacgactttcatattgatgaaaaagtcaaactattcttaaattatagaccatgaaaataatggaaggg

SEQ ID NO: 168085 - DNA, 1711 bp, Homo Sapiens
  misc_feature (799)..(808): n is a, c, g, or t
  misc_feature (823)..(845): n is a, c, g, or t
  misc_feature (916)..(924): n is a, c, g, or t
  misc_feature (1102)..(1148): n is a, c, g, or t
cccatggactccatcatcgccatccgggcaagaatataatgtccgagttgcttcccgatacttcaaaggtcctgagctacttgtagactatcagatgtacgattatagttgggatatgtggagtttggggtgtatgctggcaagtatgatctttcggaaggagccatttttccatggacatgacaattatgatcagtgggtgaggatagccaaggttctggggacagaagatttatatgactatattgacaaatacaacattgaattagatccacgtttcaatgatatctggggcagacactctcgaaagcgatgggaacgcttggtccacagtgaaaatcagcaccttgtcagccctgaggccttggatttcctggacaaactgctgcgatatgaccaccagtcacggcttactgcaagagaggcaatggagcacccctatttctacactgttgtgaaggaccaggctcgaatgggttcatctagcatgccagggggcagtacgcccgtcagcagcgccaatatgatgtcagggatttcttcagtgccaaccccttcaccccttggacctctgggcaggctcaccagtgattgctgctgccaaccccctttgggatgcctgttccagctgccgcctggcgctcagcagtaacggccctatctgtctcctgatgcctgagcagaggtgggggagtccaccctctccttgatgcagcttgcgcctggcggggatgggtgaaacacttcagaagcaccgtgtctgaaccgttgcttgtggatttatagtagttcagtcatnnnnnnnnnnttataataggctgannnnnnnnnnnnnnnnnnnnnnnaactcgaacttttcataactcaggggattccctgaaaaattacctgcaggtggaatatttcatggacaaannnnnnnnnctcccctcccaaatttagttcctcatcacaaaagaacaaagataaaccagcctcaatcccggctgctgcatttaggtggagacttcttcccattcccaccattgttcctccaccgtcccacactttagggggtggtatctcgtgctcttctccagagattacaaaaatgtagcttctnnnnnnnnnnnnnnnnnnnnnnnnnnnnnnnnnnnnnnnnnnnnnnncccaatctataggagcagtggactgcttgctggtcgcttacatcactttactccataagcgcttcagtggggttatcctagtggctcttgtggaagtgtgtcttagttacatcaagatgttgaaaatctacccaaaatgcagacagatactaaaaacttctgttcagtaagaatcatgtcttactgatctaaccctaaatccaactcatttatacttttatttttagttcagtttaaaatgttgataccttccctcccaggctccttaccttggtcttttccctgttcatctcccaacatgctgtgctccatagctggtaggagagggaaggcaaaatctttcttagttttctttgtcttggccattttgaattcatttagttactgggcataacttactgctttttacaaaagaaacaaacattgtctgtacaggtttcatgctagagctaatgggagatgtggccacactgacttccattttaagctttctaccttcttttcctccgaccgtccccttccctcacatgccatccagtgagaagacctgctcctcagtcttg

SEQ ID NO: 168086 - DNA, 734 bp, Homo Sapiens
  misc_feature (247)..(256): n is a, c, g, or t
  misc_feature (271)..(293): n is a, c, g, or t
  misc_feature (364)..(373): n is a, c, g, or t
  misc_feature (552)..(598): n is a, c, g, or t
aaccccttcaccccttggacctctggcaggctcaccagtgattgctgctgccaacccccttgggatgcctgttccagctgccgctggcgctcagcagtaacggccctatctgtctcctgatgcctgagcagaggtgggggagtccaccctctccttgatgcagcttgcgcctggcggggatgggtgaaacacttcagaagcaccgtgtctgaaccgttgcttgtggatttatagtagttcagtcatnnnnnnnnnnttataataggctgannnnnnnnnnnnnnnnnnnnnnnaactcgaacttttcataactcaggggattccctgaaaaattacctgcaggtggaatatttcatggacaaannnnnnnnnnctcccctcccaaatttagttcctcatcacaaaagaacaaagataaaccagcctcaatcccggctgctgcatttaggtggagacttcttcccattcccaccattgttcctccaccgtcccacactttagggggttggtatctcgtgctcttctccagagattacaaaaatgtagcttctnnnnnnnnnnnnnnnnnnnnnnnnnnnnnnnnnnnnnnnnnnnnnnncccaatctataggagcagtggactgcttgctggtcgcttacatcactttactccataagcgcttcagatggggttatcctagtggctcttgtggaagtgtgtcttagttacatcaagatgtcgaaaatctacccaa

SEQ ID NO: 168087 - DNA, 563 bp, Homo Sapiens
ccttgggctggggaatcccctctttcccacctgtggggaacagggtggggagggggtaagtgggaccctgctgcctggagggctcaggtctgagcagcagggagccctcagcgcccactccagcagacctattgggaatttactacctgaagacaaattataggtctagggtcttctttgtgattttgggggagtcgaggcattggggggtgagaggtatggtctaaggtcacagtctgggagaggagtccttgggatcagaggttgtgcagaagcaccttccccacctcctgcctcatgagataaggttgccaggattccattatcacggtgaatttctctgggctcatgggttaggggtcatagtggagccaccaaggtagacatcacaaatggaatgcatatgtgttaaccgacagtggcctggccagaggtcagggggcactagatccttggcaagaaagctaagggaccaacaggtgagatgtgagacgccaggggcatggcagctcacacatacatggcccgggacatgacaactttgccctggtagtatttgacgg

SEQ ID NO: 168088 - DNA, 980 bp, Homo Sapiens
  misc_feature (266)..(295): n is a, c, g, or t
  misc_feature (771)..(771): n is a, c, g, or t
  misc_feature (859)..(859): n is a, c, g, or t
  misc_feature (895)..(895): n is a, c, g, or t
gggttcgaaccgccggagctgagcgagaggccgggggtgccgagccgggcggggagagctgggccgggagagcagaacagggaggctagagcgcagcgggaaccggcccggagccggagccggagccccacaggcacctactaaaccgcccagccgatcggcccccacagagtggcccgcgggcctccggccgggcccagtcccctcccgggccctccatggcccgggccgctgccctcctgccgtcgagatcgccgccgacgccnnnnnnnnnnnnnnnnnnnnnnnnnnnnnncctggaaaccggagcccaggatgtgcgagttcaagtgctacccgaggtgcgaggccagctcgggggcaccgtggagctgccgtgccacctgctgccacctgttcctggactgtacatctccctggtgacctggcagcgcccagatgcacctgcgaaccaccagaatgtggccgccttccaccctaagatgggtcccagcttccccagcccgaagcctggcagcgagcggctgtccttcgtctctgccaagcagagcactgggcaagacacagaggcagagctccaggacgccacgctggccctccacgggctcacggtggaggacgagggcaactacacttgcgagtttgccaccttccccaaggggtccgtccgagggatgacctggctcagagtcatagccaagcccaagaaccaagctgaggcccagaaggtcacgttcagccaggaccctacgacagtggccctctgcatcntcaaagagggccgcccacctgcccggatctcctggctctcatccctggactgggaagccaaagagactcaggtgtcagggaccctggncggaactgtcactgtcaacagccgctttcacttggntgccctcgggccgaagcagatggtgtcacgggtcacctggcaaagtggagcatggaaagctttccaaggaaacaagccttgtata

SEQ ID NO: 168089 - DNA, 1596 bp, Homo Sapiens
tggctgaggcccagaaggtcacgttcagccaggaccctacgacagtggccctctgcatctccaaagagggccgcccacctgcccggatctcctggctctcatccctggactgggaagccaaagagactcaggtgtcagggaccctggccggaactgtcactgtcaccagccgcttcaccttggtgccctcgggccgagcagatggtgtcacggtcacctgcaaagtggagcatgagagcttcgaggaaccagccctgatacctgtgaccctctctgtacgctaccctcctgaagtgtccatctccggctatgatgacaactggtacctcggccgtactgatgccaccctgagctgtgacgtccgcagcaacccagagcccacgggctatgactggagcacgacctcaggcaccttcccgacctccgcagtggcccagggctcccagctggtcatccacgcagtgaacaagtctgttcaataccaccttcgtctgcacagtcaccaatgccgtgggcatgggcccgcgctgagcaggtcatctttgtccgagagacccccaacacagcaggcgcaggggccacagacggcatcatcgggggggcatcattcgccgccatcattgctactgctgtggctgccacgggcatccttatctgccggcagcagcggaaggagcagacgctgcagggggcagaggaggacgaagacctggagggacctccctcctacaagccaccgaccccaaaagcgaagctggaggcacaggagatgccctcccagctcttcactctgggggcctcggagcacagcccactcaagaccccctactttgatgctggcgcctcatgcactgagcaggaaatgcctcgataccatgagctgcccaccttggaagaacggtcaggacccttgcaccctggagccacaagcctggggtcccccatcccggtgcctccagggccacctgctgtggaagacgtttccctggatctagaggatgaggagggggaggaggaggaagagtatctggacaagatcaaccccatctatgatgctctgtcctatagcagcccctctgattcctaccagggcaaaggctttgtcatgtcccgggccatgtatgtgtgagctgccatgcgcctggcgtctcacatctcacctgttgatcccttagctttcttgccaaggatctagtgccccctgacctctggccaggccactgtcagttaacacatatgcattccatttgtgatgtctaccttggtggctccactatgacccctaacccatgagcccagagaaattcaccgtgataatggaatcctggcaaccttatctcatgaggcagaaagtgggggaaggtgccttctgcacaacctctgatccccaagactcctctcccagactggggaccttagaccatacctctcaccccccaatgcctcgactcccccaaaatcacaaaggaaaaccctagaacttataaatttgtcttccagggaagaaaatttccaaatagggtcctgccttggaatgggcccccttaagggacttccctggctggctcagaacctggagccccttccaggcaagca

SEQ ID NO: 168090 - DNA, 591 bp, Homo Sapiens
  misc_feature (571)..(571): n is a, c, g, or t
cctagggccttagggagctggctggtggtgacagacgtactgcttgctgttaggggtgaggtgagactatccaaaaacataggaggacagtactggggatcaactggaataagggaaagaaaatccaaacctggcaaatctgatgacatgcttgatattggcgtatggtggaatggtactgagtagtctgttaatgaaggcggaatagcagcaggatcaaccgaagtcacactgggcacccttacagaagatggctgatacatgagaacccctttggttgggctgctttgtgtttctgacataaagatgcatttccttttggcaggagggtcttcctcttcgtcagaagagctttctattgtaagatcaataacatctactttcttcttgcttgcctcactggctacagtcactgaacaaggctgactgaggacgctcgaactttctatttttgtacacggttggctggatactttcatagcttctttcttcggtctcattggacaccaagaaccatcttcttggaatttgatctcatctacatcagaacagtcattgagaatttccatanaaagcccatctaatattaga

SEQ ID NO: 168091 - DNA, 431 bp, Homo Sapiens
tgatctagcaggatccctcgacggtctttacccatatgcgaggccatgcgccgtcttacacaccacgtttctgcgtggaaagcggccctgtgcagcgagctcgacggatttgttgtagcagaggtagagcattttcaccgaggcgtgttgtgtggcgtagcccaccagtgtggtggttttgccggtaccggcaaaagcctgaaccagtagcttgtcagccgtggaatggatgatgggctgctgttcttgtgtccactgcatgggcagctcctaaaggtattttttgaagcttgaaacggtgatgtaaacggacacacccaacagcacggcgcagggcaacagaatcaaaagggggctgatgctgatggggatggccaggtagaccgtccagggcacgatggtcagcggaatgagtaacagccgtaagggtc

SEQ ID NO: 168092 - DNA, 346 bp, Homo Sapiens
tactgatcctttatggtctgttacccacgtctgcttcaatcccaggcaggtatctggttcagaaacgaattcttgcccggccgctggcgcttgatggaaaactaccgtgcgccagtagaggggcccaatgctaccgacgttacctgtgcatcatgtatgaaatgatttcaaggcataacaatttttacggtgttttacctggcaatgcgcatttgttgctgcttggacactgttcaacaacaattgaggctctgcttgctacgcaagcaagcaggaatgtgcatgcttggaagctgggttttttggccagttgaggtgcaattggcctgtttcaaactcaagatga

SEQ ID NO: 168093 - DNA, 208 bp, Homo Sapiens
ggtcgaaaaataaacgggtcgaaagtaatgtggctagggtatttcgagctccggcagaggaacattagccatcccccaacgcgcgctgctcgcccctctgacagcacattggaggctttcaccgtgatttcctgcaggcgcagcgtgacattggtcaccaccagctctgtgcgaccgctcaggtcgggttgtaacagccgtaagagtc

SEQ ID NO: 168094 - DNA, 113 bp, Homo Sapiens
acgagaaatagtggtatagccaaggtattagtcccatttccatgtgataggacttaaatctatttgtggttattattgcatcattgtaatccacagcaggtttctgcaactca

SEQ ID NO: 168095 - DNA, 417 bp, Homo Sapiens
caggatcttatacggtctgttaccctctcgcccccttctacctgtcatccgtcaaattactagcctccatgcgcatcagtgtggataggtgcgtggcggcgattgtgataacatccggcggtttccagggctgccccgaggggttgcctattaacgtgcagatccgtgtcataactcgttgatttgtcgtaagtctgttgtcaggcaccgtgccgacagcggcgagcttcgttcgtcccgaatggatgtgacgaggtttcaccccgaaaaaggaatcaggcttctcatgggcgaactgtgcaaagaaatcctcccggtcaatatcggagacgagctgaaacagtcctacctcgaatacgcgatgagcgtaattgtcggtcgggcaactgccctgatgcgcgcgatggattgaaagcc

SEQ ID NO: 168096 - DNA, 326 bp, Homo Sapiens
  misc_feature (20)..(20): n is a, c, g, or t
  misc_feature (227)..(227): n is a, c, g, or t
ccaacatctggcaggattgntaagagtgatgccatcttgaagagcagctggcatgatgactgctgtttgactcctggcataccaaagatattctgcagccaatgtctgttaaacagtgcccggtagtacaagataacccctcataaagatgcttagtctaacctccccagtgttcagggtgttcacaagaaagtctgagatatgactagctaccacgtttgccaaanatgctgttatataaaggtactttgggagggtgagtgccgccattagtgctgctagaacatgcttctgttgtaagtccgcaatgtgggatcttagagtcg

SEQ ID NO: 168097 - DNA, 690 bp, Homo Sapiens
gggggtcttgaaattcagaagatgatagtcactcttcccatatttataggctattaaggcaagggatatcttaaacatcatattactttatttagatttctactactccaattattaatgttatgtatttctcattgttttacttcttcatggtattatgaagactatatagatgattcaaccaagcctgcaaatctccctcttgtggaattccactggacccaatctgttttccatttccattgcaatactactaaagccatacaatatcaagcaccctccctctaggtccagggactatcacagaagaagcaggcatgtaagattttaaggactggtttcgaggggtcgagtgtaggaaaacagcctgttgcattgtaagagtgatgtcatcttgaagagcagctggcatgatgactgctgtttgactcctgcataccaagatattctgcagcaatgtctttaaacagtgccggtagtacagataacccctcataaagatgcttatctaacctccccagtgttcaggtgtttcacaagaaagtctgagatatgactagctacacgttttgccaaaaatgcttgttatataaagggtacttttgggagggtgagtgccgccatttagtggctgctagaaacattgcttctgtttgtaagttcctgccaatgttggtgatcctgcgagag

SEQ ID NO: 168098 - DNA, 171 bp, Homo Sapiens
gcatactgtttgctctaactggctttaacagtgaggcccgatgtcaaatgctctcagctaagccagggaattcttttgccttgagtctcgtatccagacgttatggtttgcagctgctacagttttctttaggatgctaaatgatgtgttagcctgagagaatgtgtcctt

SEQ ID NO: 168099 - DNA, 271 bp, Homo Sapiens
tcgagctccgtaccccggagcaacttacgagatttaagtcacaattctaaattttggaataataacaagaaacgtttggaacactttgcagatagtttcaggtgtgtatatgtgagtgtaccctttattttctctgcagcccttacctaacacacagcagagagaaaaataccaaggaatgaaattgtgttttatgagtaaacatgatgacttccttctcaaacagacataactctggactgcgtaagtgtcttccgatatcctggagagt

SEQ ID NO: 168100 - DNA, 330 bp, Homo Sapiens
caggacttccaacattggcaggaggattctttcctaaataactttggaaaaatacatgaattgcacaagtagtacatgtttgtaattaggtatttcttaagcctatagaatctttgcctgagactccttctagatttaaaagtcttgaccttcaggatttaagactctggaaagatatttagtaaatggtttttaaaaataaatcagttaatttttcagttaagcttctaccatatattgaaatacataaatatctatatatataaatgtgttaaatactttaaaattctcaaactatttttcctgccaaaatgtagggggtaccgagct

SEQ ID NO: 168101 - DNA, 323 bp, Homo Sapiens
  misc_feature (65)..(65): n is a, c, g, or t
  misc_feature (143)..(143): n is a, c, g, or t
  misc_feature (194)..(194): n is a, c, g, or t
gacaacttacgtattggttgtcattaagaactatttcgtgaggttcagcctcattctctaccctnctatagattaattctacctctcttttgaatcaaggaacggatagaagataaagaaggtttgccaatcacctacgtatnggcgtaataaccttgagcgacggatatacgttcttggtcaatttgacgaanacactagtaataggttcaacctaatctagcaaagacaaatcttaatgcttgttggataattacagaagtgacctctactctgacaagaaagtaagcagttgccatcgtagtttcggtcttagagtcaca

SEQ ID NO: 168102 - DNA, 308 bp, Homo Sapiens
tacgtatagttgtcattaagaactatttcgtgaggttcagcctcattctcacccttatagattattctacctctcttttgaatcaaggaacggatagaagataaagaaggtttgccaatcactacgtatggcgtaataaccttgagcaacggatatacgttcttggtcaatttgacgaaaacactagtattagtttcaactaatcttagcaaagacaaaatcttaaatgctttgtttggaatatttacagcaagtggacctcttactctgacaatgaaaagtaaagcaggttgccatcgtaagtgtct

SEQ ID NO: 168103 - DNA, 288 bp, Homo Sapiens
  misc_feature (119)..(119): n is a, c, g, or t
tacccccgggaggacaaaccttacggggtgaaatttgtactctgtacactcgtgagggtaacacgagcaaaaaagagcaaacaatgtcttagcgttaattgtgaaaacagggtttgacncttgcagatcctactgaaaggaccttaagggacctttgagtccctaccacactttgagaacttcactttaaagatacaacttgtcttatgatgtgtaatcgatggagtaaaagcaataccatgtgaaacttaagggaacaaggtgaaataatccttcgtaagtggttct

SEQ ID NO: 168104 - DNA, 255 bp, Homo Sapiens
aagacagcttacgagagaatcccagtataacactgattattttgagggctatgacatcagtgaactaaacattcagttggatgaaactcagccaaaggacagaggttctcgacctttgtgctatacatgtagtaactggcatagctgtgaattgcattgtggagcctgtgggaagaacagagatcctcttgagcgcttattttggaacttctgcaggacagaacaagaagtcgaatcaaggtaaagttgtctccg

SEQ ID NO: 168105 - DNA, 260 bp, Homo Sapiens
gggctgccttagaggacccccaacattatgcaggaggatatttggatagctttgaggatttcgtatgaaacgggattgtcttcatataaactctagacagaagcattcccatgaagcttcattgggatgtttcaaattgaagtcacagtgttgtaacagtcccctttcattagagcatgttttgaaacgaatctttttggtagtatctgggaagtggtcattttggagcgttcctcaggactacggtcctgcaaaatgtt

SEQ ID NO: 168106 - DNA, 181 bp, Homo Sapiens
gagtcagatggtggctcagagattcagataccattgactaattccatggaaccccttggcactgccagagtgcagtgagtcctggacaggctgggggttggcacatgttagggtaaactatacccatgaaatcatgagataagagacttcaaacatctcctcataactgtgtcagtcagag

SEQ ID NO: 168107 - DNA, 402 bp, Homo Sapiens
tctgcggttcatactgttatgttatacgtaacaatgttcatgttaacaggcacctgttaatattaacagataatgttactgttaacaggtaagagaaattgctctaagtgcccaaactttatatacttcagttttaatgacaagcatttcagaaatataagagcggcagccagaccaaccagtttttccagatatcttgatgtgaacctgaccctactcctttagaagacagcctgttcatttttaaatagctttaacccaaactgttctatgaccattgtttcaagagacattaacacagttctgtaaatagaagtgtctatggacaaataagtttgggaaatgtggcatactgtatccttttcttaacatttgcatattaaagactatgagacccgcaag

SEQ ID NO: 168108 - DNA, 432 bp, Homo Sapiens
gatctaaggatcccctgcgggtctcatagatgatggtgacaccccagaagcagctgctctccgggagcttgaagaagaaactggctacaaaggggacattgccgaatgttctccagcggtctgtatggacccaggcttgtcaaactgtactatacacatcgtgacagtcaccattaacggagatgatgccgaaaacgcaaggccgaagccaaagccaggtatgtgtgtgtcggctgtgatgaaggtggtgtggttgcattacgtgtcttggaacttgctgctagtttgatttattaaaagaatgtagtctttcatggaaagaatcggtctttcaaatagacttcatcagtattcttgtctctcttcctaatcatgtattttagcatttttcttttgccacttcattcatctttacgctttctttgtaaaaca

SEQ ID NO: 168109 - DNA, 942 bp, Homo Sapiens
agcaccgcgagaggcgccggtgtttcgagccgtggcaccggcatcggctgacactgctgcctccagctagttatttcgtcctcttccgttcttcacccctacaccttggaggtgaacttctcacctgagggctgtaaagactcgtttgaaaatggagagccaagaaccaacggaatcttctcagaatggcaaacagtatatcatttcagaggagttaatttcagaaggaaaatgggtcaagcttgaaaaaacaacgtacatggatcctactggtaaaactagaacttgggaatcagtgaaacgtacaaccaggaaagagcagactgcggatggtgtcgcggtcatccccgtgctgcagagaacacttcactatgagtgtatcgttctggtgaaacagttccgaccaccaatggggggctactgcatagagttccctgcaggtctccatagatgatggtgaaaccccagaagcagctgctctccgggagcttgaagaagaaactggctacaaaggggacattgccgaatgttctccagcggtctgtatggacccaggcttgtcaaactgtactatacacatcgtgacagtcaccattaacggagatgatgccgaaaacgcaaggccgaagccaaagccaggggatggagagtttgtggaagtcatttctttacccaagaatgacctgctgcagagacttgatgctctggtagctgaagaacatctcacagtggacgccagggtctattcctacgctctagcgctgaaacatgcaaatgcaaagccatttgaagtgccctttcttgaaattttaagcccaaatatgacactgggccattttttgtaaacgaagaccaccaggccttcttcactaagactttgtattcaacttagtttaatgtagatttgccattagctttttcgtaaaataaaagcacagaaca

SEQ ID NO: 168110 - DNA, 1131 bp, Homo Sapiens
ggggactcttccggtccctaaagcaagaaggaagaccgagaaaaggaagcggaggagaatcccggggcatacgcttgacacacacgcatacaaaaagagctttagtctcgaaagaggaattaccgaagtgtcgagagaggaattttaagaagtttacaactccgtcttcgccctaaacgcacgctgacccggaaagtaatctcctgaagctaggtcaaaggcgggggttctacggatgccggaaggagggtgcgcgcccatccttttagcaccgcgagaggcgccggtgtttcgagccgtggcaccggcatcggctgacactgctgcctccagctagttatttcgtcctcttccgttcttcacccctacaccttggaggtgaacttctcacctgagggctgtaaagactcgtttgaaaatggagagccaagaaccaacggaatcttctcagaatggcaaacagtatatcatttcagaggagttaatttcagaaggaaaatgggtcaagcttgaaaaaacaacgtacatggatcctactggtaaaactagaacttgggaatcagtgaaacgtacaaccaggaaagagcagactgcggatggtgtcgcggtcatccccgtgctgcagagaacacttcactatgagtgtatcgttctggtgaaacagttccgaccaccaatggggggctactgcatagagttccctgcaggtctcatagatgatggtgaaaccccagaagcagctgctctccgggagcttgaagaagaaactggctacaaaggggacattgccgaatgttctccagcggtctgtatggacccaggcttgtcaaactgtactatacacatcgtgacagtcaccattaacggagatgatgccgaaaacgcaaggccgaagccaaagccaggggatggagagtttgtggaagtcatttctttacccaagaatgacctgctgcaaagacttgatgctctggtagctgaagaacatctcacaggggacgccaggggcctattcctaagctctaacgctgaaaaatgcaaatgcaaagccatttgaagggccccttccttgaaatttttaagccccaaatatgaacacttggcccatttttttgttaaacggagacccac

SEQ ID NO: 168111 - DNA, 391 bp, Homo Sapiens
tcatagagaaactttacccaatatttagagattccttaaatcgtatgtaggaaatggatgtggaaaaaaggggttcagccaaagaattattacagcatcctttcctgaaactggccaaaccgttatctagcttgacaccactgatcatggcagctaaagaagcaatgaagagtaaccgttaacatcactgctgtggcctcatactcttttttccattttctacaagaagccttttagtatatgaaaattattactctttttggggtttaaagaaatggtctgcataacctgaatgaaagaagcaaatgactattctctgaagacaacgaagagaaaattgcaaaaagacaagtatgacttttatatgagaccgcaagggggatctcaggca

SEQ ID NO: 168112 - DNA, 267 bp, Homo Sapiens
cttgcggtctcataagcaaggaagattcccagcagcagcagcagccccttgtaaccatagaaaatgccaagccatgtattcatcttcctggagctgcaatgctccagctggggcagaatagagacgtcaatatcttccttaggttcctccttggcaaatgtctagggcagaaacaaggtcacaagaaagatggttgccagcctcccctcctctcctcaacgcttctcagtctctggcttccaactgttttcctattagacccgcaag

SEQ ID NO: 168113 - DNA, 122 bp, Homo Sapiens
gctactaagtatactgaagattaacaatctggcaaaatactttctgtaacaatcaaattaagctcacctgttccttttcacacttaaaaactcttagatatgggtcaggtgacagtggctga

SEQ ID NO: 168114 - DNA, 449 bp, Homo Sapiens
aaacaccccagaaagggacagaatcatggtcctctagatcaggtatgttcagcagagatttccagaccatgaggtgtatgagaaccgaaaggtggccaggcctggtgtagcctcaatctcatctagtaaagtctgggtttaggccccacagggccccagacagcacatcttcttctttaagatggtggaccatcccagcactggccatctcaggcaccaatagccaaagaattacagtgctgggagtgatctttcactagggtgcactatggccaagggagtctctcagggcctgggacccacctaggccttcccacccattgttcccaggggaaagggaaccaggcaaaatgcccatggccttgagatggggctacctggtggaggcctattgctagtcttgcccagacatggctgccaccagcctcttgagccacagctttctgtat

SEQ ID NO: 168115 - DNA, 283 bp, Homo Sapiens
taaaacgagttaggacatattctctctgcttctatcttctgaaaaagattgtagaaaataggtatatttccttccttaaatgtttggaaaaattcatcagtgaacccatgtgggcttagtgctttctgctttggaaggaacacttgtttggtgttctctaagtttcctggatctgtggtttatttcctgactttaatatgggggaaattctcagtcatagttgctttgaatactgcttctgctccttttgctttctcctctttctggtactcccatacatgta

SEQ ID NO: 168116 - DNA, 466 bp, Homo Sapiens
gttgtctcccgctctagacaggaagctctttgagtacagggaccctgctgtggtcattgtagtatgttctcaacgaaggactgaataattcaataatgaatgaatgatgcagaatgaagtataaacgtaacatacctgtcaaattctctggttcacaaaacacttccacagaacttatctcatcctgacttgacaggtgcagatataaaagctgtgaaacttaaatggattcccaaatccttgcaggtggtaaaatggcaggtacaggacctgaattttgtgtttttttcagaaaaaaacagatgcctgtcattattttatttcctaacatagtgaattctacaatatttaaaaggcacatcaacgcccgcccccatcaaaaatcatccatatctagatctcatatttctactggtagctgggaatgagaaagagatagcagttagatatatgagacccgcaaaga

SEQ ID NO: 168117 - DNA, 295 bp, Homo Sapiens
ggtctcatatctacggggtgtaaagagaaaaagggggggatttcttcagtaatggaagcacacatcccaaaaacaaggaattaatattagccccagcatttgtcagagaaacatcagcagaagcttctgccgcactcttcagctgttttttgtacttcgccctttgcaacagattattataggactcactgataagcctctagatctcatacccattaaggatttaaactttccaaataaaacattcctccttgagaaatagaatctttgctgtgtgtctatatgagaccgcaag

SEQ ID NO: 168118 - DNA, 261 bp, Homo Sapiens
cttgcgggcctcatatgtgcataaatctaaaataataaggtattaagtggttagcatcatatgagaaatatatagataaaacattaagggaactcaaaggagaagtgatttatagctgaggagactgaaaaattgaatggatgaggtattgagatgtgcctttaaagaagagatgtccaaacgtgatcaaccaaaatactacttgagatcacatttataataaaagatatgttataaattaaagaaatactatgagacctc

SEQ ID NO: 168119 - DNA, 484 bp, Homo Sapiens
tacggtctccatacaaatcatgcttacaggactggcttacttagaagagtcagtagtctttcaataccaaacttacaaatacagattaaatgtcttcccttctgtctcctctggatttaacatgtttacagagagaaagcaagagaacacagttgtggtataatcatgataaagatatgtttaaattccctgagtccaccagtaatctagaacatttggttcaggtctgaaaactgaggattcaacttgctttcgtgttaagcgtgcaatgtgaaatgtgatccgtgtcatgtgaaaatacagctttcttgctttgaacctcgcgaagttaaatgactatgaaattgccatgatgactatgaaatatattaccacctttttgagggggatttttatggctactggtagaaaatgttactaatagtcacagtcatggtcattacaaagaaattaataaaaatggttatatctgaaatattaagta

SEQ ID NO: 168120 - DNA, 296 bp, Homo Sapiens
ggaatgggaagacagcctctcagatgagaggtgtgcggagtgattgctgtgaggaattgctcaataggaaagttagccaacctgaggacgtttctaggggaggaaaagggaaactcatatggttctctgctaattcttaaaaataaggtagattcttactcatctagggtgcttgctcgttatgaacacaggaagattaaggaatgagtatggactgtttctactctatgttttcgtacaagaagaataataaaaaagcactgggtagctggaacaactgcagagacatggggatc

SEQ ID NO: 168121 - DNA, 425 bp, Homo Sapiens
agtccaatcgaggacaactgatagttgggaaaagaagattgggttattttgccatatcatttagctggaagtgacatttaaaagcaccctgcatcactagtaatagtgtattttgctattctgcccttgtaatcggtgtccctgtaaaacaatccccacagattactttcagaaatagatgtatttctctacgtaagggccaggtttattttctccttttttgagatttctagaaaaaatgctgcttgcacatgttggttcttgaaaccttagctagaagaatttcaggtcataccaacatgtggataggctatagctgttcagaggtctcctgggggagcttaaaacgggggaaacactggttatcacagatgctccacatggctgtctttaaaagactcaaaacttttttttgtcctcgattg

SEQ ID NO: 168122 - DNA, 1394 bp, Homo Sapiens
gcctaagaagtggtacctgccagcactttcaatgatagagtttttgccagtgaattgaatgcaggaattataaaaacagatcaaaactatgaaaagatgatgtttaaagaagctttgaaaacagggttttttgagtttcaggccgcaaaagataagtaccgtgaattggctgtggaagggatgcacagagaacttgtgttccggtttattgaagttcagacacttctcctcgctccattctgtccacatttgtgtgagcacatctggacactcctgggaaagcctgactcaattatgaatgcttcatggcctgtggcaggtcctgttaatgaagttttaatacactcctcacagtatcttatggaagtaacacatgacgcttagactacgactcaagaactatatgatgccagctaaagggaagaagactgacaaacaacccctgcagaagccctcacattgcactatctatgtggcaaagaactatccaccttggcaacataccaccctgtctgttctacgtaaacactttgaggccaataacggaaaactgcctgacaacaaagtcattgctagtgaactaggcagtatgccagaactgaagaaatacatgaagaaagtcatgccatttgttgccatgattaaggaaaatctggagaagatggggcctcgtattctggatttgcaattagaatttgatgaaaaggctgtgcttatggagaatatagtctatctgactaattcgcttgagctagaacacatagaagtcaagtttgcctccgaagcagaagataaaatcagggaagactgctgtcctgggaaaccacttaatgtttttagaatagaacctggtgtgtccgtttctctggtgaatccccagccatccaatggccacttctcaaccaaaattgaaatcaggcaaggagataactgtgattccataatcaggcgtttaatgaaaatgaatcgaggaattaaagacctttccaaagtgaaactgatgagatttgatgatccactgttggggcctcgacgagttcctgtcctgggaaaggagtacaccgagaagacccccatttctgagcatgctgttttcaatgtggacctcatgagcaagaaaattcatctgactgagaatgggataagggtggatattggcgatacaataatctatctggttcattaaactcatgcacattggagatttatcctggtttcttaggaatactactactctgattgtgtctactgattggctatcagaaccttaggctggacctaaatagattgatttcatttctaaccatccaattctgcatgtattcataattctatcaagtcatctttgattcctggacctaataaattttttttccctttctttgggtgtctaa

SEQ ID NO: 168123 - DNA, 281 bp, Homo Sapiens
tcgaggacagagttctgaagtcaggaaatacagcaagagccttcctcagggatgaaacatgtgatctaatggtctgactagcctcaagccagctgagctcattgccatgcaacttggtagttaatgattgctagtaagaagtttaaaaggatcatcccctcaaagaatgtcagagttggaaaagaccttagggacattaggctaggaaagacaatgtcctagtgagtgactgcttgggccctgtatagaagggattgctcagatcacttggatgtcctcgt

SEQ ID NO: 168124 - DNA, 313 bp, Homo Sapiens
aatcgaggacaatgtgtgaggacaggaaaaggtatgtggatgaaggagaacagccaccacagtggcggcacagacgaagcaggaaggctgacgtcagaacagcaacaggaggggcgcctggcccctctagaatctggtgaaacaagaagaataatgaaacacacaaaaatgatgactggaagcgtcattcaggaatctaaaaatctcataccaagcaatactctatatgtctacagcctggaagaaaacatcctttgaagcacttcagaggactcaatgctgactgaaaaactgtgctgcctgcctcgacttg

SEQ ID NO: 168125 - DNA, 361 bp, Homo Sapiens
gaccagccacgaggacaaggaatgttgctgatttctagttatttcactgtggtgaaggtcttcagctctaggaaagacagaggaagggattctgggaggttgtagcagtggaaaaagttcttttcttcctctgatcgccctctcagctctttccttctgactgaaaatcatcttcagcacctctcttttaccaccactgccaccacccacccactgcgagtcctattggctataggttgtatgcaggcagtagtagagctatcaaaggatattaagaaagggagtgattattaataaatcatgtaatgtttctgattttagctcttaaaaacagttcttaaattgctgtcctcgataatcg

SEQ ID NO: 168126 - DNA, 579 bp, Homo Sapiens
taccagtccatcgaggacaggtcaggccgcgctccccaagtgagccaaaagttagtgaatcgccatctcctgtgactacaaacactccagcgcagtttgctacagtgtccccaacagttcctgaattcttgaaagactcctccaacgtgcagatcagcctcccccacggcctgcagctcctgtcctccccacaaacactgggtcagccgcggacccaagccagccaaaagttagtgaatcgccatctcctggtgactacaaacactccagcgcagtttgcttcagtgtccccagcagttcctgaattcttgaaaactcctccaactgcagatcagcctcccccacggcctgcagctcctgtcctccccacaaacactgtgtcctcagcaaagcctggcccaaaagttagtgaatcgccatctcctgtgactacaaacactccagcgacagtttgcttcagttgtccccaacagttcctgaattcttgaaaactcctccaactgcagatcagcctcccccacggcctgcagctcctgtcctccccacaaacactgtgtcctctattggcttagccaatcg

SEQ ID NO: 168127 - DNA, 458 bp, Homo Sapiens
catcccagtcaatcgaggacagctctgggttaaacagtctcatattgtgaatcagtgttcctaaatagctagccaaggatcagcctgccagcactgaatgtacggccagccctctagggcagtgctgtgtctgtgggttccaagtcagtattcactgaattaaggtaccatttagctctccctgttgactctttctagttctaaactgtgttcaacaacatcatttaaataatgacggcatttttaatagaagctgttgaaactgaggtgaaaggaaaggtgccacttaggattttaagtactctaaattttgccacattctcctataattataataggattgacttaaatccattagtctgtccttcactggcccttaactaacatttcagggttgaggaagtattaattaccctgttggtacgccttgtttcattataaggtttctgtgagcttgt

SEQ ID NO: 168128 - DNA, 168 bp, Homo Sapiens
aaagaggaagggaggctatttggatggcagtgtctgcagaaagcacgcatctgctgaaggatatatgcaaaggtgctgtcaggtctgagctcacgtaactggggtgcttcagagatacattagatgtataacaacaatacatacaccttccaggaggttggcgggtgc

SEQ ID NO: 168129 - DNA, 286 bp, Homo Sapiens
tccattcaatcgaggacaggacagaaggacgagacagaaggacagacggaggtcttgaacataagtatatgtcaggcaagcaatgattagcacaagtcttaacagagacaggtttgtctagtgaacaagaatccagacccattctcttcttcctccatgctggaaattgccttgtatttgttattttcctgatgctgactctgaaccaggcacaggctgaaggctctcaggtaccttatcttcaaaacaacctgaaaaggggctactggtcctcgattgactggtg

SEQ ID NO: 168130 - DNA, 283 bp, Homo Sapiens
accagcacaatcgaggacagatgtattcttcaactgttctaattggcaatccagagagtattcagccaccagctccactgttgtcccatgattcactcatcttacctaagatgactctttttctctctcagccgtacaatgatacacacacatggatagtttcagtaatcagttcatggtaaagcagatgatttaagaccttaggtgcaagacttgagtatggtgaggaaagggggtgggggacattaccatctctctatgtcctcgattgctggtaccgagg

SEQ ID NO: 168131 - DNA, 213 bp, Homo Sapiens
ccccattcgaggacatgcgacacacctaccgcagtgcccaacacagagtgggcactccatgaaaattagtttcctcttttccataagcaagtgtctggaactactaagaataaagaagtaccctcaagtaaccacagtcactagaatcttcccagctccttttgttccactgggaaagctgacacctgtgtgtgtgtcctcgataggctgggg

SEQ ID NO: 168132 - DNA, 214 bp, Homo Sapiens
gcctaatcgaggacagagacacaaggagtagtgaaataggacaagaagaaattgtcaaaggagtaaagggagaatcaggagggagagacatcgtaaacaaaaggaatgaaaatttcgagataagacttagatccctataaactaatgttaaaagaaaccctccaaattagcataaaaagatggcaaataatatgaatagcaaataaaaagtctg

SEQ ID NO: 168133 - DNA, 788 bp, Homo Sapiens
ggggctggtgggaggccggcgactgagtaagatgaagatccagtttcagacatgagactcgttgggtgatcatttcattgagatcaacctgaatgaccaggtgtaaagtgcaagagtaatatgctatgactgagtaactatgtttccggtagcccctaaaccccaggattccagtcaaccatcagacagactcatgactgaaaaacagcaggaagaagcagaatgggaaagcataaatgtgctattgatgatgcatggcttaaaacctttgtctctagtcaaaagaacagatctcaaagatctcatcatttttgacaaacagtcatcacaaaggatgagacagaatttgaaattgttggtggaagaaacatcatgtcaacagaacatgatacaggagcttatagaaactaatcaacagcttagaaatgaacttcagctagagcaaagccgagcagccaatcgaggacaacgagctaatgacttggaacaaattatggaaagtgtgaaatccaaaattggtgaattggaggatgaatcactaagtagggcttgccaccaacagaataaaataaaagatcttcaaaaggagcagaaaactttacaggtactgagttatgaattcttagatgatggttagttagtactaaaacagctcattatggtcccaggtgacttccatgttgtttgattcagtggtttttaccttttttggcttatcactgctaccttgaaattctcttcacttggtttctagaatgtccttatgtccctctgtcctcgttggctgg

SEQ ID NO: 168134 - DNA, 252 bp, Homo Sapiens
agcctatcgaggacagagaaaagtgacagtttcagctaggacgaacaggaggtgtcagactgctgaagccgactctgaaagtgatcatgaagttccagaaccagaatcagaaatgaagatgagactaccaagacgagccaaaaccgcagcactagaaaaaagtaaacttaaccttgcccaatttctcaatgaagatctaagttaggaaagacgatggaggtggatcctttaagattatgtcctcgcttggct

SEQ ID NO: 168135 - DNA, 577 bp, Homo Sapiens
tcccccagctgtggggtctttgcagagttgcaattggagcacataatcccattgttgagagctgttactgtccacctgcccctcatcgcgcttcttacctggccccacctgtcccagccaccacgtggggctttttaaagaagactttttaaataccaccgtgtcctctattggctagcctatcgaggacaccgcactgcccggggccttcaagacgcggaagggcatgttccgcactgtggggcagctttacaaggagcagctggccaagctgatggctacgctgaggaacacgaaccccaactttgtccgctgcatcatccccaaccacgagaagaaggccggcaagctggacccgcatctcgtgctggaccagctgcgctgcaacggtgttctcgagggcatccgtatctgccgccagggcttccccaacagggtggtcttccaggagtttcggcagagatatgagatcctgactccaaactccattcccaagggtttcatggacgggaagcaggcgtgcgtgctcatgataaaagccctggagctcgacagcaatctgtcctcgttagctggg

SEQ ID NO: 168136 - DNA, 434 bp, Homo Sapiens
taatcgaggaccagtagcaggcacaagctgtatagggataaaattgcttccctcctttgtttgggtgtgctgttgccattgtttcacctgtgaggagcaccctttctgcagaaagtaaaattgccttgctgaaaacactttttgtctaaatgctgatttttccttgcagtactgaggagcaagcattctgtttctaaataaacactttacttataacaagcccactttaaattatgtattagaacacattgagtccacttggaaaagccgattaagtcttgggctgctgtggttcctgagcatgagctttgttcagctttgtcaggtcttcctaaatactatgccaggagtttcttttgaccagatgattcctgcttattgctttgatcctagcttcatatctagatattatagatatcctacactttttctga

SEQ ID NO: 168137 - DNA, 284 bp, Homo Sapiens
acaataggggttgtgtcttggagatggtaaacctagttcccgttgctttgcttcagtgttagaaaattactgaactcttgcttcctggaagtcccttataaatctcccttttacaagactgttctctggggcacgaaaatgcctttgcttataaagagcctgttgaaggtccatttattttccttttcttaacagaaagattttccagtgccattaagttaggacttacgggaaacatgttgttaaaatcaatctgtctcgatggctggtgcgaggctgagtca

SEQ ID NO: 168138 - DNA, 310 bp, Homo Sapiens
cagcaacgaggcacaactcctaaccttttatcccttgctaaaagaccctaacgcacatcacctcactgctgctaatttagcttttttcaatattccaatactgtattaccaagcactgagcacttttttcattccacaaactttactttacatgctcttctggtttgaaaacaaataaacaaaacaccaaagaaaaagacacaacttggatcattcaagctaatagaactgagaataaaagcactttggattattggctctagttcccttatatgaaaaatcgaataaaaggctttttttcctctgagga

SEQ ID NO: 168139 - DNA, 467 bp, Homo Sapiens
agctaatcgaggacacagcgcagggcctgtgggcatccaagggaaacaaactgctgcctggatgccagatgcctgcctcaaccatgaagggcaggtctatgggacaaatcccaattcatagggtttctctgccttcctgtaacatttatctttgccttggtaaaatccagtccaaatattatcaagtgaagcctcaaccctaaggatgaaaaggtaaacctcaagatctatgtcctcactggaacgagctatttcaaaaggatccatgtcaatgaagactcagaggattttaagggaggaatagcatggaggtgggctttgaatgttcttggtccctcctaaacattcaataaatgtttgtcaaatgaatgaatgaatgttgatgaaaattatactttgctatcttgctggctgcctctgtttttctttccccctttcttacccactctctcttctcttccactcca

SEQ ID NO: 168140 - DNA, 507 bp, Homo Sapiens
acatagtctgtatatgacgaattttttctttacagtctttctagggtgtgaaatcaggaaataaaacaaatggacgaaagctacagttttctttagaaggtgctaattaatttgacgataccagttttcacgggaagaaatgtaccgatgatctgtgcagcatcttgactgggctttctgaggagttggagttctttttcagcagtcgcacaggtacattccttctgttgatacacaatgcttgtacgaactcacagcttaactttgtaataacacaggagtcccttacccccagtgttgtctaccatatgttgtgtttacgtccgtttgtgactggggagaagggccttaggttttacttgatactcagaagtctcctctccgaaagattaagaaccaccacagtgaaccagtatgttcagttttcaaactcaagcagagacagtgaggagcaataaaatcagtaggttacagactttataaatgaaatacactcacagctttcac

SEQ ID NO: 168141 - DNA, 289 bp, Homo Sapiens
ctatgctggaggagaatgaggtgcgaacaatggtggatccaaactaacgcagtgaccccaagcttcaagaactgatgaaggtattaatggactggattaatgatgtgttggttggagaaagaatcattgtgaaagacctagctgaagatttgtatgatggacaagtcctgcagaagcttttcgagaaactggagagtgagaagctaaatgtggctgaggtcacccagtcagagattgctcagaagcaaaaactgcagactgtcctcgatagcgcgggagcctcagagtc

SEQ ID NO: 168142 - DNA, 455 bp, Homo Sapiens
ccacaaagaaaactctctttttcctgttcactgacacctaaaattcttttaaagcaaaaatgagagtaaattgcaatcgattgcaaatgttctcctagaagtaggcttggaaggagatgcagaggaactgtggagtttcaaagaaaatcctgaggacactgatttctgaggggaagcaaaggacatgcaagggagtattggggaatcaaaaccaaagaaggccaagggaagacctatgtgtgaacctgcgcttcgaggaggcaagtggttcttcttaagtgtatagatatttttgtttgcatataattaaataattggaaaaaatcctgcaaagtgaaatataatcttgatccattagaatgacaatcaatcaggaagcttgaggcttggtaactggtctttcatgctgaagaattgatgacttgccaggttcatattcaaaaatactccttgca

SEQ ID NO: 168143 - DNA, 612 bp, Homo Sapiens
acaaaataagccccagttcttcgattctgggcttgaagtgagatttcttgaatggcagccattgttttgcctcttaggtaagtgagtgcagtaaagacccggtaaggcccacgcagaagaaacactgatggaagaagacacttccaaagtaacaaaggggaggaagcagccaacgcccgaggacaacatggcaagaaggagcctttggattccggactgggatgaaagagagttgattgaatcccggaatttggaaaccccagatacggagggcggacggtacaaccggagctgtcaggtggatttccaaggctttgcattggctgtacctgaaacttatggtggcctagactccccagtatccactcttccttatcttggtaaacaagcccagttctgagtcacatccctgctctgcctacttacaggggcatgtggtcccaatctaagcaacgtagcataattccaacctaaatcagcagaatcccattccctgccacagttattggctggcaatgagcgtaacatatttgggccaatgagaggagcaatttcctggtctttgttgggaaaagtttttctttcattttctgagagcgcttcagagtaata

SEQ ID NO: 168144 - DNA, 1143 bp, Homo Sapiens
  misc_feature (125)..(206): n is a, c, g, or t
  misc_feature (214)..(276): n is a, c, g, or t
  misc_feature (364)..(364): n is a, c, g, or t
ccaggtgattttgttggtgaggagtggtcgcgcgccgagtaacagggaatagttggagagggctccctccccacgagggaaagggcgggaaagaagtttgatggaggagcgggggacgcgcaggnnnnnnnnnnnnnnnnnnnnnnnnnnnnnnnnnnnnnnnnnnnnnnnnnnnnnnnnnnnnnnnnnnnnnnnnnnnnnnnnnnccgcggcnnnnnnnnnnnnnnnnnnnnnnnnnnnnnnnnnnnnnnnnnnnnnnnnnnnnnnnnnnnnnnngcatcgtagtactcaaacaactttatttcactagccatgagcaaaaagttgaccgggctccaggggattttccatcctgccctctccntggtgggtggctcccatgatttggaaataacctcatgttccacttggcagtgcctggctttgtgcacccacatggttttggcctgggtcccagtgaaaatggtcctcacctggctggggaacatggttctgagaggccccttgatctgccctggggacatgtgtggccatgctaagggccctgcccaccttcacgtgactggccacctctgccagggtgcaggcagctcctagcatggagacatccttcatggaagtgagctttcccaccccacctccatacccacatttctcagaaacagagttaacagggaaccaagagtcaagaagccacagggctggtaacgtgcctacagccaaatctgtgaccattacctgaagaggcaggacaacaaaagtaatcaggaaaggagaagatgtgggctggaatgagataggacaagagaagacagaataaaggcaggaaaatcagaaacaccagagagcacagtagcattaaagggacacaccaacacctgggctcttgcacacaggggagtctaagggttccctgactccctgcacctacacctgaggagagaatccgagttatacgaggacagcatggcaaaagggccgacagggtagtaggtgtagaggcgaggcaggaggctacgtgaagggctgccaacagaaactggaaaggtaggaggccacatcgtcttttcccaaatctccatctacgagttgcctcaactgtccccgtgatactatataggtgcttgcccctcgttccgaatt

SEQ ID NO: 168145 - DNA, 444 bp, Homo Sapiens
  misc_feature (73)..(73): n is a, c, g, or t
aaccttgtgccttccttgaactcctgggttccccctgttaaactcttgtttcctaaaaaaatgtgggtaatgnaaggtgggtggaaaaaagctcacttcccatgaagaatgtctccccatgcctaggagctgccctgcacccctggcagaggtggcccagtcaccgtgaaaggttggcagggcccttagcatggcccacacatgtcccccgggcagatcaaggggcctctcagaaccatgttccccagcccaggtgaggaccattttcactgggacccaggccaaaaccatgtgggtgcacaaagccaggcactgccaagtggaacatgaggttatttccaaatcatgggagccaccagcagggagagggcaggatggaaaatcccctggagccggtcaactttttgctcatggctagtgaaataaaattgtttgagtactaga

SEQ ID NO: 168146 - DNA, 591 bp, Homo Sapiens
taaaaaggatcaagtgttccttgagaaaacccattctggtaataaatgtcccctgctccccaaaggtggacttcacccttagctaagaaagagacttcgcactcctcagtctccaggtgcccttgaaagatgcgaagagctgtggcctccatcaactcctcagaggccctgaggtccagctggtggcccattcgccatggctaaaggactctctgtccagaacgacaaacatccagggtatcaacctgctcttctcctctcgccgggggcacctctttttgcagacggaccagcccatttacaaccctggccagcgggttcggtaccgggtctttgctctggatcagaagatgcgcccgagcactgacaccatcacagtcatggtggagaactctcacggcctccgcgtgcggaagaaggaggtgtacatgccctcgtccatcttccaggatgactttgtgatcccagacatctcagagccagggacctggaagatctcagcccgattctcagatggcctggaatccaacagcagcacccagcttgaggtgaagaaatatgtcctcgattactgggatgctctagagtgac

SEQ ID NO: 168147 - DNA, 530 bp, Homo Sapiens
agtcaatcgaggacagagcgtggggcgggcccaggcgctggggtgcagctaggtcatgtgattcagcaccaggtgggggcgcggctccttccctctgttctctccgggctggggtcccacaccccgtggtgccgaggcgtagatgaagtcaggtgggaggggagggagaagccttcactgtccaggatcaggacgtgcacgggacactcacgaacgaatggcatgctgaggtcacgaggttgctctcgggagcccgggctcggcggctcctagcccatgaagcaagccggccccacttcaaatccaaatttctgtgacgcttcaccgaagtcattgaacatgatgtccacgatgggcacctgctccactttgggggtgtcgatctccagaaccgtcttctggtagcctttcttggtagcacagccgtccaccagggcgcggatgtaggggttgttgtcataggacatctcctcgtcgttggagcccaggaagcggagggccttgtcgtagctgcccgtggctgcgtcctg

SEQ ID NO: 168148 - DNA, 298 bp, Homo Sapiens
agtcatcgaggacacgtggccaccaacctcatctaccagcaggtggtgcgaggagtcaagtttggggagtacaggtgtgagaaggtgagtgggagggaatcttccgccaggctggcttggctcacagcctcctgctttccacgtttgggctgagtgctcctctgtgagccatcattagctcaggctggggtgagcctgactgcaaccaggcactcttcaggctcctggatggacaccgcctacttacagggggctcgtgaggagaggcgagatggcgggacaagggcttctgagatgg

SEQ ID NO: 168149 - DNA, 1125 bp, Homo Sapiens
  misc_feature (820)..(863): n is a, c, g, or t
atcattgggtgacatgtaaaaagaaagaatagcccttatatacacacaggtccaggacagcagagcaaaagtacctgcaggcaaccctatcctagaccccatcctacagggtctctagcccaggccttcctagggcccctaccgggagcactgccaggggcctagggccaactaggctggaagccttgccttttccctgtggaggcgcagaggctctggtttgtctgtcctggccccgggatcattttccagcacacagcacagtctagtccatccactctccccactccccaaattcaaggtcatcagggttctggtggcctggagatgggtacaacattctcatactcaggttcctcctgcctttcctcttcagcctgcttctggggatcctgttctggggagccacagccagagactggctcctgggctctccttgaactctcggtgccagcccccagcccccggggtattgagtggccatgtgacacagcgttggtggttgtagaagtgtatgactattactgtgttgctttggaagcttgatgccataacaaaagtgcagaattccatgtttgataactttctgacttgatgaaaatgaattgtggatacagatttcactatccatgaattgtggccttaactttctcatgtacttactttaaatcagagagcccacctgtccaattctagcttctcctgggcatcctgtatttgacacagcccctcccagcattctgagtcatcgtctgctgctcttgcactgtccgttttccaaatgaggaactcatcggtaaggccagaaaggaaagggagnnnnnnnnnnnnnnnnnnnnnnnnnnnnnnnnnnnnnnnnnnnngagcgtatttatagatggtagagaattctgggcatgagaaacccagccaaacaagtggaatgtgtgcataggtgggactgctgatcttgttttatgaaagaaataaaggcaagtcaaacagatcctttcgcaaggatccccatgtgagtatgtctaacccagtgacaggtaaggcagccaggagctgctgttatttcagtgcaaagctgtatcaaaatcacagacatgcacaagctcaaaaccctcaatggacatcaatacg

SEQ ID NO: 168150 - DNA, 947 bp, Homo Sapiens
acctgtctactgtatccctaccctatctcaccttctctccgagcacatcctcgaccgaagagattgtgtgggacatgaccttgaaatgctggcgatgatccacactgggatatcatcgctggcgactgcactctcaggagcccaaaatcaggagtgaaattgccacttctagtccccttatttcctatggaaacaacgccttccgcacccctagcacctgccgtcctcactgtaaaggttcatcaggatcgtccaccgtgtatattatacgcttcagatcatgttgcttatattgttgctgcaatgaccatcgttttcactttgctggtaaccacttgattgctgacagctacagtcaatgaacctgctgatgactttttttaatgtagtacaacagtgacagttatgacaggcttaccttggaagagttgtcatttttactgccaattttttggatgaagatgcttttataaacctttcaaaatggtctgcaaacagagcaggaattgcacaattaactcaataatgctgtgtgttctcaagaagctcccttagtgaggccgatcttaagatggccgattctgcccgttgaaggcatcctgggaaagaaaacaagcatcccagcgggcatctcaccacgacttctcctggagtcctcacatggccactcaatacccaaactctgcagccagggtctttttacagggctggggaccccattcttacttacttccccaagtggtctgtaataagcttgctgagacaacctgcaggagttggagctgggggactctgtgctgaaagcaatcctgcaggtttcctagagagtaaaagtacaacttgcactcgtttgttcaagaacctggctagtagctgtaccttggattcagccctcaatgctgcctcttactataacttcacagtcataaaggttccaagaagcatga

SEQ ID NO: 168151 - DNA, 873 bp, Homo Sapiens
tcttcctccccatcaggtgcagtgcccacgtctttggagctgcagcgagggacggatggcggaaccctccagtccccttcagaggcgactgcaactcgcccggccgtgcctggactccctacagtggtccctactctcgtgactccctcggcccctgggaataggactgtggacctcttcccagtcttaccgatctgtgtctgtgacttgactcctggagcctgcgatataaattgctgctgcgacagggactgctatcttctccatccgaggacagttttctccttctgccttccaggcagcgtaaggtcttcaagctgggtttgtgtagacaactctgttatcttcagagagtaattccccgtttccttcaagagttttcatggattctaatggaatcaggcagttttgtgtccatgtgaacaactcaaacttaaactatttccagaagcttcaaaaggtcaatgcaaccaacttccaggccctggctgcagagtttggaggcgaatcattcacttcaacattccaaactcaatcaccaccatctttttacagggctggggaccccattcttacttacttccccaagtggtctgtaataagcttgctgagacaacctgcaggagttggagctgggggactctgtgctgaaagcaatcctgcaggtttcctagagagtaacaagtaccaacttgcactcgtatcttcaagaacctggctagtagcttgtaccttggattccagccctcaatgcttgccttcttactataaacttcacagtctttaaagcgttcccaagaagcatgacctgatccacagacatatggagtaccacgttcctgtaataccttaccctccgaggctaatgctctc

SEQ ID NO: 168152 - DNA, 286 bp, Homo Sapiens
tcagaaaaacctcagagaaaacctcagcaaaagttccctactgccgatgccaaataaatgagagaagggaacttttgctgaggttttctctgaggtttttttgatgctttataggaaactattttttataaaaagccatttcccacccaaggacacagtggatgtgttttccctgactccagcagggcaaggaatgtagccgagaggttgtgtgggctgggctctggtgccctcttgcctggccaggacacctctcctcctgatttccttgcacctgtcatactgt

SEQ ID NO: 168153 - DNA, 938 bp, Homo Sapiens
tgacacccatgcccagcctaaaaggacattcttaaggcagaaagaagggggcaggcaagggtggtctcagcccccagatggaagtcagagtgggctgcaaaagatgcagatgggcaggcagggagacaggtaaacagacagaaagacaaggtgccaagggaatcaggaggagaggtgtcctggccagggaagagggcaccagagcccagcccacacaacctctcggctacattccttgccctgctggagtcagggaaaacacatccactgtgtccttgggtgggaaatggctttttttaaaaaatagtttcctataaagcatcaaaaaaacctcagagaaaacctcagcaaaagttcccttctctcaaatatttggcatcggcagtagggctggcatggctcgctctggccctggctttcctattgctgtggcccggcctggcccactcctggggtagctcctggcccctgctgctccctcaagagagggatgggcaggaggtgggagattgcaggtgggcttcggggtgtccctgggtccctgtctggaagttcgagtctttggtaactgggaaggggaggaggagaaaagcaaagcattgggcgttgggagggtccagtgggcgcctttatcaccgagaattcagccgtggggcgaccacagccaggtgcccgttcttggccttggtgatgagcagctccgagccgggtgtgaagtcaatggtgccatccctggccggggccccctgcaaacgtgatgctgccctggttgatgttgatgctgttcacgcggttggcactgagggctgtcttggtcagcgtctcaatcacgtggtcactctgcagcaccacatctccctttggcttattgtccgcacgctgtacatgaagcacaaaaagacttcgctcaggctgctgacagagattccggtcagcct

SEQ ID NO: 168154 - DNA, 458 bp, Homo Sapiens
gggccacatcctcttcggcaatttggggccagacatgagggggctactcagtaatttgtgaccccaagaatgtgtggctgcatagtacactgcatgagacgtgtttacatgcgcctgtgtgcaaacacgggggctgtatcaccccgggctcacttgaagcccagggcatctgtggcctgggagaggagaggatccctaacagagacctagtgtttttctcagcagcagaggccacagtctgcacggtgacactggagaagatgtcggcagggctgggcttcagcctggaaggagggaagggctccctacagcggagacaagcctctcaccattaacaggatctttcaaaggtgtggggtgtgtctggttctttgcgtgctctccagttgtgggcatgtggccaggcccccaaaaggcttctgggcactttctgggctatgcttgtttcccacaaccat

SEQ ID NO: 168155 - DNA, 578 bp, Homo Sapiens
aagtgcggaagtccagaacaagaagcttatagaggaacttgaaaccttgaaagacatttgttctcccaaaacagattactagaaatatttaactataaactgaaggcagcatgtatagtttgcttttgaaggaatacaatatatagctggcaagaatggtggcttcttttctttgtatcattcatcttcttctttaatcacttaacattcctaaaatgcttcactgtacgtagttaagtcgtagctattacttcaaattttttaaaagagacaaacgtaaaaaatgtgtgtattcttaaaatgcaatattgtaaggctgttccaatgccacatacttgcagctcccattctatgtgtcatcaatagtgtcctatgcaataaaattatttgcaggtctttaaatcattttaggaaaggatgatcaaaaataatgcatccagcagtacaataaaagtaaaccacaaaaaaatacctcaggaaagaatagaaagaaagtctatctaatgacatgcctatatgagaagaatagcctagatatgaatatatggcatttgcagatttttatattagtgcttgtt

SEQ ID NO: 168156 - DNA, 281 bp, Homo Sapiens
agtccatcgaggacataagacaactgatttaaacagaataatggttgatctcaacactccagactctcagataatagaatgtgagcataaatcctctcttgaagaaagagctaagacagaggtgtaatcaaatgtaaaaatacccattaagccaacttaacttttctgaatggccgtgagattgtttcaatggttttgaaatgaaaaggcacagaccaatctttccctttaacatgtgaggaacacctgccctccctaggtcagccgaatgcttctgaagg

SEQ ID NO: 168157 - DNA, 436 bp, Homo Sapiens
tctagaggactcccagtcaatcgaggacacgtgagttagtgtcacctgaggtgcacacgtgagggtggatatcatgagggtggctgtcaagagggtggatgctggttcagggctggcatgaagaccctagtcaggagggagccaaggcgtccaaggaggccctcaggctgcaagtgttggtttggccccagtcttggtgatgacaggacctttgggaatctgaagcccggtgaccttgggctgtggggagctggcgggctttatctgcccagcgtctctgccccagttttgggcctgtctgtgatgctgggcacctgctgatgtgcgcagcttcattcattcctcctccactcacccacctgaccactgtgtggggcgcccctgctgtgggccaggctggttccaggatccatcagcaacagaaacaaaaatgccc

SEQ ID NO: 168158 - DNA, 220 bp, Homo Sapiens
aggccaatcgaggacagaacagatttggttaaaatattgttagtaatttgtatcaatattttaaataatgttttaggctagtaacacatgaaaactaaatcatatcttgtttattcttccattaaaattagtttttcctctggtaatgtaacaggagaacttatgtatataagatctgtgaaattctgacaacaacatatagtgtgattgtcctcgatat

SEQ ID NO: 168159 - DNA, 413 bp, Homo Sapiens
  misc_feature (72)..(83): n is a, c, g, or t
acagaccaatctttccctttaaaaagtgaggaaaacctgccctccctaggtcagccgaaagcttctgaaggnnnnnnnnnnnnccgtctctagggaaggagagtgtggcttgctcaacagccccagaatgtggacctgctgctagagggcagggaggtggaaggactgcactgatgcactccaaaactcaaaatcatttcaaaattatctcctgttaccaagtgaaaagtgaagaaatgaaggcagtttcttgggcactagaataaaggtaccatttcctaatcactatttctacagggctctatgtagaaccccttttgaagataattaatggtatataaaataacttgttgaaattctcctatgtggtaaaatgttgttgtttgttgatgaaatagtccatcatacttcct

SEQ ID NO: 168160 - DNA, 308 bp, Homo Sapiens
aggtttacactcaatatatggtaattatcattgttaccaggaaagctgtgatcagtggggtcagtgttgttaaaactatgcaggtatttgaaaatccaacttgaaaatcattgagaccctctaacataaagatatgataaactcattttaaaaatcccatcaagttcttagataaccagataacatttgatgctagaaattgtccatttatcagctttgtctgttttagagaattgtcaaataacgttgtccttattagcattataatgcaaccggattccattttaactctgcaaatgtcctcgatt

SEQ ID NO: 168161 - DNA, 197 bp, Homo Sapiens
tggatcgtaaggacaggctgccaacattggaactgctgagtgaaaagcggacctgcttgtgttttctctaaacttcacattataccatataggcatttcccatgtactgtggacccgtgagggtcatttcgaatggctccagcacgttcccttctatagctggatcctcacttacttctcatgtcctcgaattggct

SEQ ID NO: 168162 - DNA, 182 bp, Homo Sapiens
ctgaagcaaaagcaagtataaaacaggtacaggcttctcaaccacttcgcagatgtctgccaataatatcctgataaaatccaggaagcaggatttggcttgatctcccagcctcttctccatggccctccagacaggcagaaccagtacacggggctcagggccacatagcgggcccctgc

SEQ ID NO: 168163 - DNA, 621 bp, Homo Sapiens
taaggtcgatctctagaggaataccccggagtgggggagactggccccatcaatccagctcagagcccgggaaaagtgcaggaacacagacaaataaccccaacacggcgaaggacacacctccgagaaccagaacggcagcgtccacacgacgagacgaccaggcgagaaacaccgcggaggacacggtgtcaacctcggaaggggcctcctatgctttccacaccaaattctcccacgggagaaaccctgccacaaggcccaggaaaccacagacccccaagccaaccatgcccagcacagacaccaaggaatgacagtgacgccggtgacgccaggaggacgcggccccgcctctcttctggcaggtgagatcagagtcctactgcagcctcaaggctgggagcacagagtgtggaccagaccccgaggccaagacggtaacacagctctgccaggcagcacctgcctccggcccctcaagcacaggtaggaaaggggcagccccccttctcctcgcccacctgaccggctgcagtcacccctcactggaccaacctgaccgacagccctgaggcagctccaccgtgcagttcacgcggtcatgccgcggaatgtcca

SEQ ID NO: 168164 - DNA, 265 bp, Homo Sapiens
cagtaagaaggcagctatctgcaagccaagcagagaggcctcagaagaatctaaagctgtcgacaccttgtcctggactttcagcctccagaactgcaggaaaataagtttctattgtgtaagtcactcagtttgtggtactatgttatggtatccttagcaaactaataaaggatgaaagcctgaatcttttaaaaatttcaaaatgtgttacataatcttctacccctttgtcctcgatggactggggatgcctcagagtcga

SEQ ID NO: 168165 - DNA, 115 bp, Homo Sapiens
ggtcttgtgagggttgcttgaggtcagggataccccatttaccctgatgtgttcatatacatttcatgactgtatcaaaatatctcatgtacccccataaacatatacacctatg

SEQ ID NO: 168166 - DNA, 276 bp, Homo Sapiens
  misc_feature (255)..(255): n is a, c, g, or t
acggagtataccagctgcccaacacatattgcgtagtattgttagtggagaccttgaataggttacattaacttcctaatccctgtgtggaatattgtccctcttttacctcaagaggcctgttaaaggaatagctagtcttagaggagttggttggaatagtgattatcaatgggaggtgttggccccgactgtaaaagcccttgctgcccgtttctggttgtggtggatctctctagtagctcgaccttgcanggctatgcaacgtcttggcac

SEQ ID NO: 168167 - DNA, 127 bp, Homo Sapiens
gatctgattgtagaggactgactgagataatgtaaactaagaagggctattgtataatatttaagaaagagtgagaggcaagcttatgttgtgtaggtcatggggaaataggagaaaatacgtgccc

SEQ ID NO: 168168 - DNA, 155 bp, Homo Sapiens
ccacagaaagggagaatatgatgtcacaatgccaaaggttgaaagtgagattaaagttcctgatgttgaacttaaaagtgccaaaatggacattgatgtcccagatgtggaggttcaaggcccagactggcacctgaagatgccctttctggtgg

SEQ ID NO: 168169 - DNA, 269 bp, Homo Sapiens
ccacagaaagggatggggttcgccttgctgccctgtgaaaggagaagggacagattgagtcagagttcctcagaaatgttgtgccctaaacccccaagacagaaacatctgtctactgcagctaacacattttggtaaagcattaacattccactgggatgggatagcctccatagaatcacctctaccagtgactgtcttcacaattcttcaacatcaatagatgactaaaattaactaaattcatgtcaatatgccctttctggtgg

SEQ ID NO: 168170 - DNA, 1470 bp, Homo Sapiens
  misc_feature (623)..(711): n is a, c, g, or t
  misc_feature (1338)..(1338): n is a, c, g, or t
gatcaagcgatgcagccagcacaataaactacagccaagtcttgattccgttccccatgcagagaacttggtgtgatccccaagtctgtgacaccagaacgcattgctgagaactttaaggtctttgactttgaactgagcagccaggatatgaccaccttactcagctacaacaggaactggagggtctgtgccttgttgagctgtacctcccacaaggattaccccttccatgaagagttttgaagctgtggttgcctgctcgtccccaagtgacctatacctgtgtttcttgcctcatttttttccttgcaaatgtagtatggcctgtgtcactcagcagtgggacagcaacctgtagagtggccagcgagggcgtgtctagcttgatgttggatctcaagagccctgtcagtagagtagaagtctcttccagtttgctttgcccttctttctaccctgctggggaaagtacaacctgaatacccttttctgaccaaagagaagcaaaatctaccaggtcaaaatagtgccactaacggttgagttttgactgcttggaactggaatcctttcagcaagacttctctttgcctcaaataaaaagtgcttttgtgagcccnnnnnnnnnnnnnnnnnnnnnnnnnnnnnnnnnnnnnnnnnnnnnnnnnnnnnnnnnnnnnnnnnnnnnnnnnnnnnnnnnnnnnnnnnggaacaacagagcaaaatacaataaaggcgcagacaacccaagggcacacacccgcacgacaatgacagaacacatccacaccccatacccctccagcattgcagactacctcctgtcccccgaggagcacagaggcgcatcaaaacagccgaaacgcaggcaagggtctggcacgcgacgagaagagcgcgccgggacagtacattcccccacgaagccgcgacagattgagcggacccgaactgacgaaaccgacgccaccggcaaacccatggacaccaacaccaagacagccgtaagaacaccactaaaaaaactaaccgagcgacaaccaatacaatgactcacgacacgcaactatgcaatcagtccgcggcattagtgcgccagatatacccgtaccccactcaaacggatattctccgccactcaacgacgcacacccgcgcaccacggagaagtgtcgagcagagaggaacccatctctgcgcagaaaccgggacgcacaccgaggcggcgataacccctatgcgctaccccatagtataaggcaccagctacgtcaagcgaccacagctgcgctagagagtgctccatctcaacagacgccacatcgatgcaggccnccaagccacgaatcccgctcgggtcgaatggagtccacgccccatccgcacgctacactataagacctacctggactcggtcacaagacacgaacaccgtagcacatagcacaaccagccaatccaccaaaa

SEQ ID NO: 168171 - DNA, 1454 bp, Homo Sapiens
ggaagcatggtatcaacgcagagtggccattacgccgggggccgacctcacgggctatttaaaggtacgcgccgcggccaaggccgcaccgtactgggcgggggtctggggagcgcagcagccatggcaagccgtctcctgctcaacaacggcgccaagatgcccatcctggggttgggtacctggaagtcccctccagggcaggtgactgaggccgtgaaggtggccattgacgtcgggtaccgccacatcgactgtgcccatgtgtaccagaatgagaatgaggtgggggtggccattcaggagaagctcagggagcaggtggtgaagcgtgaggagctcttcatcgtcagcaagctgtggtgcacgtaccatgagaagggcctggtgaaaggagcctgccagaagacactcagcgacctgaagctggactacctggacctctaccttattcactggccgactggctttaagcctgggaaggaatttttcccattggatgagtcgggcaatgtggttcccagtgacaccaacattctggacacgtgggcggccatggaagagctggtggatgaagggctggtgaaagctattggcatctccaacttcaaccatctccaggtggagatgatcttaaacaaacctggcttgaagtataagcctgcagttaaccagattgagtgccacccatatctcactcaggagaagttaatccagtactgccagtccaaaggcatcgtggtgaccgcctacagccccctcggctctcctgacaggccctgggccaagcccgaggacccttctctcctggaggatcccaggatcaaggcgatcgcagccaagcacaataaaactacagcccaggtcctgatccggttccccatgcagaggaacttggtggtgatccccaagtctgtgacaccagaacgcattgctgagaactttaaggtctttgactttgaactgagcagccaggatatgaccaccttactcagctacaacaggaactggagggtctgtgccttgttgagctgtacctcccacaaggattaccccttccatgaagagttttgaagctgggggtgcctgctcgtccccaagtgacccatacctgtgtttcttgcctcatttttttccttgcaaatgtagtatggcctgtgtcactcagcagtgggacagcaacctgtagagtggccagagagggcgtgtctagcttgatgttggatctcaagagccctgtcactagagtagaagtctcttccagtttgctttgccctttctttctaccctgctgggcgaaagtacaacctgaataccccttctctgaccaaagagaaccaaaatctaccagggcaaaatagggccactaaccggttgagttttggactgcttgggaactggaaaccctttcagcaagacttctccttgtgctcaaaataaaaagtgcctttggc

SEQ ID NO: 168172 - DNA, 212 bp, Homo Sapiens
cctaccagaaagggcatcctgtagccctgggacagggcggtcatcacgtcggcaatagttctccctgggtagggaattttcccataggtgaaaatttcgtataggaggattccaaaggaccacacatcagacttaatagtgaaacatccaaagttgattgcttctggagccgtccacttaatagggaacttagcaccttccctttctggtgg

SEQ ID NO: 168173 - DNA, 492 bp, Homo Sapiens
tccagaaagggcaggaacaacttgatggtgctactttgaactgcttttcttttctcctttttgcacaaagagtctcatgtctgatatttagacatgatgagctttgtgcaaaaggggagctggctacttctcgctctgcttcatcccactattattttggcacaacaggaagctgttgaaggaggatgttcccactcttaggtcagtcctatgcggatagagatgtctggaagccagaaccatgccaaatatgtgtctgtgactcaggatccgttctctgcgatgacataatatgtgacgatcaagaattagactgccccaacccagaaattccatttggagaatgttgtgcagtttgcccacagcctccaactgctcctactcgccctcctaatggtcaaggacctcaaggccccaagggagatccaggccctcctggtattcctgggagaaatggtgaccctggtattccaggacaaccagggtcccctg

SEQ ID NO: 168174 - DNA, 354 bp, Homo Sapiens
  misc_feature (35)..(35): n is a, c, g, or t
  misc_feature (40)..(40): n is a, c, g, or t
  misc_feature (275)..(275): n is a, c, g, or t
  misc_feature (316)..(316): n is a, c, g, or t
  misc_feature (343)..(343): n is a, c, g, or t
tgcagatgcagaagagagtatcgggtcactatgtnagtcntgcagctgccaagagtgtccatgctgcccctaatcctgctccaaaagaactgacaaataaagaggcagaaagggatatgctgccttctccaggagcagactgctttctccacttaagtaaaatgcctcactctgttccacaacccctatgttgaaaaaactgatgatgatgtcaatcggtcaggctcgcatgctgaagcctcccctccatccaatagctccaaaacctgtgacanttcctgctagtcaggtatccacacaaaatctgaagactttnaaaacttttggtgccccacggccatantcaagttctgg

SEQ ID NO: 168175 - DNA, 254 bp, Homo Sapiens
ccaccagaaagggcaccaccagaaagggaagggaaggaaaagaagtagcatcagacatcaccaggtcccacagttaggacaatcaatcttggcacctgattttcccatccttacgcctgcattcctgtgagatgcccccatatccctctaataaatgcccttttttcataagtcagtatgagcgggtttctagtcctataacaagacactccctgcccaaggacatccatcaaagcacaatgccctttctggtg

SEQ ID NO: 168176 - DNA, 215 bp, Homo Sapiens
accagaaagggcaacagaagaagacacagtctcaaacaaagaaacaaacaaaacctttatcttaatttttatgtttctatattcatttttctcttttgaccacaagtatcttgataataactctacttctgatggtaactgattatttatcaattatccaatccaaatgcctttaataaatcctctctatccctttccttctccctttctggtgg

SEQ ID NO: 168177 - DNA, 659 bp, Homo Sapiens
tgactagaggatcccacgaaaggcaaatggggtacaaggatgtctaggacgtcgctgctcttcagcacgaagaagaggaatttcttgttgaagtcgcagagcttccagaagagaactagcagctcctggtggaactggatcttcttggtggagttaggcaggtaggtctggagcagggggttggacagcagccgggctatacccttgaggatgaactggaagtcctcctcacgatggatgcgggacaggtagttcacaaacaggttctcagggcctggaggatcagcatcatccatggcggtgccagtggtggtgccgtccacagtggtgctggcactgctggcactgtcgtggtccaaagtgacaatgagcacctgggcagcctcctccaccaggggttcccggtagtcagagaagagcaggtggttgtaggggatcccgtagcccacagggtcataggcacacacggtgttgaggagggaggtgaagaggggcagggcatgtctgttctccgtggaacaaaagaactgaacccatgggttggtgctgccactttccggagctgggggcaggtacatggcctcggagaagcatgtcagcagcaagtttcggagctccatccgggtcatatcgtggatgtagttaggctggggggagtg

SEQ ID NO: 168178 - DNA, 242 bp, Homo Sapiens
ctacagaaagggaaagacggggatggtccatttcagcagaagcaaaggtttccagtccattaattttaacgtaatgcaaatcggtttatggaagtgctgacatgccgttatttaaaaagcatgagtagcatgataattaaatctccatctatattttattctagcacatttatagtgtatccttgcccagctggggagatagatttccagccttataataattatataaactgcaaatcact

SEQ ID NO: 168179 - DNA, 436 bp, Homo Sapiens
cttggcaagcgtcttcttaattctcaatgctgtgagtctggaggctggattgtgggcccagcattctgacattagcttcaaaactgctcgtagacattcatcactgttccaccgattagacacaattggccgcaaacgtttgacacacacaacctcacgcatatcttcgtatgacggatcactcggtaccatgttgtaatatggcaattggtattcttccacgatccctcctgtgatacaacgacgagccatctcccaaatgattaggccgaagctgtagatgtcagccatgatgtagggctggaagtggtttttgttcaggctatcgtccagcacttcgggagccatgtagcgtttggtgcccaccctggtattaagggcacataaacttcatttgtgtcactgttgaatttaacagcaagatatgcacagtagt

SEQ ID NO: 168180 - DNA, 370 bp, Homo Sapiens
acctggagtctggtaacgtctttacctctgccttccagatgaccattgataactttgcattataatagattagattacatattctacattataatacgtgatttgatgtcgtgaagtgtttaatcttaatccctggatggtatcgtgcggtataaatattttgagatttgtcagtgacgaaacaagagtagttaactcctttaaatattgctgagatgacatgctatgaaatatcactgtataatcattaatctgtattatacaatcattaatctatttctcattgttaggcttccataaataaaacaacagacactttagtacagttcttaatgtaaatatgtttctttttaaaaaatgcgacagtagt

SEQ ID NO: 168181 - DNA, 318 bp, Homo Sapiens
  misc_feature (64)..(75): n is a, c, g, or t
ccaaaaaaaagccaaatacagaatgcaaccccagcctgggcaaaagagtgagaatccatctccnnnnnnnnnnnnttggtaaaataagtataggccttgaaagtctttattaatcattcttttcccaactaaagttttcaaatccttaagatctccttgaatttgcttccttctatattagtatattaaaggtaaaagagaccttagacatcattatatctgtgatgtctgctagtgttccaccatacggtgagaagccaccccagatgggctaagaatttactcacttcctatttctgtacccatatgcgacgtagt

SEQ ID NO: 168182 - DNA, 333 bp, Homo Sapiens
actacgtcgcatatctctatatgaatatcaatattgttaaatttcaggacaaaggaaatggttaaaaacgtttgttcaggttggttaaagaaagtcaacctagaactagtggatattactttatatctaaaagagataattatttcttttcaaaaaggatatgccagtgatgattatagtctttaacagcagtagcttgtgagagtattaaaatgtttcttcttttataattcattctacgttaaaaaaatgaattaaaatgtatgcaaagtgtactttttcaagtcagtgaagaatatgcgacagtagggatccgtgctagagtcgacctac

SEQ ID NO: 168183 - DNA, 221 bp, Homo Sapiens
  misc_feature (15)..(15): n is a, c, g, or t
tgctgagatgacatngtgtgaaccacaatggctggcatccccatagtatatagtagataacctaaggaatttgaaccatagtcttaaaaaagcaaagttgttcatagtagcattattcataatagccaaaaactaaaaactagtgccaaactgaaaaccacccaaatgccaatcagcgatagaatggatgaatcgtggcagcttcacaaaatgaaatgcga

SEQ ID NO: 168184 - DNA, 290 bp, Homo Sapiens
acaccaggaaacaggctatgaacgacgagttacgaagttcgagacgtcggaaccccaactaacggtcgcaaaataggcgtttgacagacaacaatgaccaatcgcgggcgaagcgccgctgcccaacatcaagcgtgattgcgtgagcaggctacgacctttgagataacggcgctggcgccgcggcccaggatgttgagcagtccgctcgctgtaccaatacacaaaattcaccacgccaaagctcataggtgcttggagtaagggcctggctggatatgcacagtagt

SEQ ID NO: 168185 - DNA, 220 bp, Homo Sapiens
tctctagcaggatcccgcatatggctttgacagacacaatgccatcgcgggcaagcccgctcccacacaagcgttattcgtgagcagctacgcctttgagataaggcgccggcgccgcgcccacgttgtcgagcatccgctcgctgtaccaatccacaaaattcaccacgccaaactcatacgtctcggagatacgtcctggctggatatgccacagtac

SEQ ID NO: 168186 - DNA, 359 bp, Homo Sapiens
actactgtcgaatatatcaccaagtcagattaatagctggcatagatttccattgtaaatagcattcgaatctatgagataaagagatatattctgctatgataccctatttcagactaacctttcacctatcctgccaccatcctacagttcacatcttccacgcagtgtaacatcacctttctaggtctaggttgaaatgcaccgaccaatcatacaacaagtgagcaatatgcaaaccttaaaatgttagttatataaatagtaatttagtagtctatttcatatgataaattaataacaattccaataaagaattggagaagatgtacaaagatttaaaataatgcgacagtagt

SEQ ID NO: 168187 - DNA, 368 bp, Homo Sapiens
acttactgttcgcatatatttcacgaaaagaaaatgactaagacaatcatgtaatctctcttctgatgagggagaaggaattttagtcaagaatgcaaggtgtgcctgcaggctttacacctatgctgcacacatgctacgtacacaagcgtgggcatgtgcacacacacacaggtccattctgcttattcacttactgatgaagagacatgccgtgttggctaaagatcaggaaataattcgtgttgggttgacaagcagccaaaccgtaaggctcacatgtctcattgggcaatattaattggccaaccttcatttaaaaaaatgcgacagtagtggggatccgtgtagagacgaccacaagcata

SEQ ID NO: 168188 - DNA, 150 bp, Homo Sapiens
tagaagtgcctgtacttggtaaaataagttaaattttcaatatttacatgtcaaagagaacaaggactatctatattgcaacatttatttttcgcttatcatggttgaacaattgtcagcatctgtgctaacaccccatatgcgacagta

SEQ ID NO: 168189 - DNA, 360 bp, Homo Sapiens
aggatccctactactgtcgcattttcaagaaactatcactgtttgattcatttagcctttctattctttattcatccgataaagtaactgatgtcacaacatgtcttgtgaagaaattgaaattaatttttttatgtaaaaaataattagattttgctgtttatttctaccaatgagatagactttggcgaatcaaaagttgattatattatagaactcacccttaaacttattttctcctttaacagttgcttgcaatcctttaacagctgcttacaaataatttagaatcgcatgaagacctttaagtagaggtaggggaagggaaagcatgtaaaaacctctacatggattaccata

SEQ ID NO: 168190 - DNA, 175 bp, Homo Sapiens
aggataccctacgtcgcatatttatagagtatactgtgatgtactgatagacgtatacattgtgtaatgataaatcaaaataattagcatatccatatctcaaacacttgtcatttctttgtggtgagaacagtcaaaattcctctctaaagtatattttattttaattaattca

SEQ ID NO: 168191 - DNA, 325 bp, Homo Sapiens
tctggttcgaatctagcaggatccccatctacgtcgcatatgtgtacaaatggtcatgtggatcatgtgatgatcatccatcttatttgattgtattaatgcatcatgctaaacatgtagtacaggttaacaataccagatttatgtcctgttcaacaactcagtactctaaatgttgttatgcttttaataagaccttcccagattataatcttggagctcttttcccagctgtctaccatgcatttgcaacaggaggaagatgtaatgaatatgcagtattaagttgatttatgaacagtgctttgatatgcgacagtagtgg

SEQ ID NO: 168192 - DNA, 975 bp, Homo Sapiens
tttttctttccgtcgcagagagcatcggccggcgaccgttccggcggccattgcgaaaacttccccacggctactgcgtccacgtggcggtggcgtggggactccctgaaagcagagcggcagggcgcccggaagtcgtgagtcgagtcttcccgggctaatccatgccgggttggaggctgctgacgcaggtcggcgcccaggtgctgggtcgactcggggacggcctgggtgctgccctgggcccggggaacagaacacacatctggctttttgttagaggtcttcatggaaagagtggtacatggtgggatgagcatctttctgaagaaaatgtcccattcattaagcagttggtctctgatgaagataaagcccaattagcaagtaaactgtgtcctctgaaagatgaaccatggcctatacatccttgggaaccaggttcctttagagttggtcttattgccttgaagctgggcatgatgcctttatggaccaaggatggtcaaaagcatgtggtcacattacttcaggtacaagactgtcatgtcttaaaatatacgtcaaaggaaaactgtaatggaaaaatggcaaccctgtctgtaggaggaaaaactgtatcacgttttcgtaaagctacatccatattggaattttaccgggaacttggattgccgccgaaacagacagttaaaatctttaatataacagataatgctgcaattaaaccaggcactcctctttatgctgctcactttcgtccaggacagtatgtggatgtcacagccaaaactattggtaaaggttttccacggttgtcatgaacagatggggatctaacaggccagcctgtaccatggtcaaacgacaacccacggagaccggagtgtgcaacctggggattgggcaaagctggccggactaaatgctggaaaatgggaactttacaggacacaattgacggaaggtggaata

SEQ ID NO: 168193 - DNA, 734 bp, Homo Sapiens
ccaaggcccaccatattctagtaatggcctcgtacctggacataacaatgcctagtaaaggtcaaagattctaaactgcctgcatataaggatctcggtaaaaatctaccattccctacatattttcctgatggagatgaagaggaactgccagaagatttgtatgatgaaaacgtgtgtcagcccggtgcgccttctattacatttgcctaacatctttggacgtggcagaaccttacatattctgtgagcttcgatgagccagagtgatatcataaccaccagaaatcatactctcctttcttagtcacaacaaaatcacacatgtcatctttgtcaagggcataaatatatcattcatacccccattaaattttgttagaaaaattaccacattaaatatatgagttaagtagattggatttgctgaaattggtgttgggcatattagcaaaatattcttaatttgtggactcgattcttttttactacatatttcccaagttatcttaagatgtctgtaaatttaacttttattaaagttttgtcaatctttgtgaaatagtggttgtggaacagtagaaaaccatatggggactatagtgcaacctatttgggtaaagaaaccatttgctaaaatggagaaagtaaatagatttttatttaaattacagaaacatgttaaaggccggacaaaggaaagacaataaaatcataaattatcggtcctgttt

SEQ ID NO: 168194 - DNA, 1177 bp, Homo Sapiens
catctacgtgagctcatatatttaaggtggtaagttttctaacaaaatttaatgggggtatggaatgatatatttatgcccttgacaaagatgacatgtgtgattttgttgtgactaagaaaggagagtatgagtttctggtggttatgatatcactcgtggctcatcgaagctcacagaatatgtaaggttctgccacgtccaaagatgttaggcaaatgtaatagaaggcgcaccgggctgacacacgttttcatcatacaaatcttctggcagttcctcttcatctccatcaggaaaatatgtagggaatggtagatttttaccgagatccttatatgcaggcagtttagaatctttgacctttactaagcaatttttatgtccaggtacagagccatttacatagattatgttgtgctttgtgtttattctccacactttcagtccatattctgtcctgtatatgtttcccatttttccaggcattttagttccaggccagactctgccaatatcaccagttgcaacagctccaggtctcctgtgggttttcgtttgaccatgcgtagcaggctggcctttaaatccccatcttttcatgacaccttgaaaacctttaccaatagttttggctgtgacatccacatactgtcctggacgaaagtgagcagcataaagaggagtgcctggtttaattgcagcattatctgttatattaaagattttaactgtctgtttcggcggcaatccaagttcccggtaaaattccaatatggatgtagctttacgaaaacgtgatacagtttttcctcctacagacagggttgccatttttccattacagttttcctttgacgtatattttaagacatgacagtcttgtacctgaagtaatgtgaccacatgcttttgaccatccttggtccataaaggcatcatgcccagcttcaaggcaataagaccaactctaaaggaacctggttcccaaggatgtataggccatggttcatctttcagaggacacagtttacttgctaattgggctttatcttcatcagagaccaactgcttaatgaatgggacattttcttcagaaagatgctcatcccaccatgtaccactctttccatgaagacctctaacaaaaagccagatgtgtgttctgttccccgcc

SEQ ID NO: 168195 - DNA, 169 bp, Homo Sapiens
actacgtcgcatattcatgatgagatttcagtgtcaagcatggatgcttctagacaactaatgttgaatgaagaacagttggaagatataagacaggaacttgtacgacaataccaagaacatcaacaggcaacggaattgttaaggcaagcacatatgctacagtagt

SEQ ID NO: 168196 - DNA, 803 bp, Homo Sapiens
  misc_feature (455)..(523): n is a, c, g, or t
  misc_feature (527)..(527): n is a, c, g, or t
  misc_feature (539)..(617): n is a, c, g, or t
  misc_feature (619)..(620): n is a, c, g, or t
  misc_feature (625)..(625): n is a, c, g, or t
  misc_feature (627)..(627): n is a, c, g, or t
  misc_feature (633)..(670): n is a, c, g, or t
  misc_feature (696)..(738): n is a, c, g, or t
gaacccaacgattccagcaggtgctcaaacgccctctgtgacctcccaggcccatacatggaaccttgacctaacctcgggtgactttcctcccatgaacgcccttccctgtctggtgccccaagtggacatggcaagaacagcctacctggacctgctccgcctgatccggaaggatgccatcctgttaactgatgcttttgacttcaccgatcagtgtttaaattcagcacttggctgttatgatggaaacgtctacgaacgcctgttccagtgggctcagaagtcaccaaccaatactcaggagaaccctgcctatgaggaatatataagaccacttttacaaagttggagatccaagctatgaaataaccaacagtattcaagaagcaaccagcaccatcatgtgataatggtactatggcatatatgcaacattaaaattttaaattagnnnnnnnnnnnnnnnnnnnnnnnnnnnnnnnnnnnnnnnnnnnnnnnnnnnnnnnnnnnnnnnnnnnnnaaanaacaacaccaannnnnnnnnnnnnnnnnnnnnnnnnnnnnnnnnnnnnnnnnnnnnnnnnnnnnnnnnnnnnnnnnnnnnnnnnnnnnnnanncccananacaaannnnnnnnnnnnnnnnnnnnnnnnnnnnnnnnnnnnnnaaaaaactttttttaacccctctctnnnnnnnnnnnnnnnnnnnnnnnnnnnnnnnnnnnnnnnnnnncatctttgtcgtttctccaaaaaacaacgcggccacaaaaagaaggggtggtttttttcccccac

SEQ ID NO: 168197 - DNA, 235 bp, Homo Sapiens
cccaccactgtcgcaaatcaacgtttaacattcatgggctaatgaagagatatctttcatgttactggccctttccttctccattctcctgtattcataaatagtactcttaccaagacaaaacctgtactaaaaatgtgtataaacatcatgaaaaaataatggaattaacacatgtcaaagtgagtattaccaaacaaggtaattatacataagagactatatgcgacgtagt

SEQ ID NO: 168198 - DNA, 410 bp, Homo Sapiens
aactacaaatgtcggcaatttcatagagtttattttattcagtccaaatgtagctaatttcttcagcataacaatgagctacaatttcgattacattccacatattaatgctcttcgtgtcttttcattgatttttcttatgtttcagaacatttgtttcatcttctaattaaatgtagattagagattaaagcaatgtgaaaatgtatcatttctactctgccagaaaactaaagtctgaatatttcctgatttttttccccttagtgtgaatcatattatacaatttctcataaagggcatgtagtaactatttagataaaattcagtgtgaaacatattagagatttaaggaaactctagaagtcttatcttctatacttagttcctcttaaaatatgcgacgtagt

SEQ ID NO: 168199 - DNA, 344 bp, Homo Sapiens
caatactaaattataacttataaatacacatacacacatttacacacactctcacacgcacttcttacatgaactgtgcttggggaaactccatttgttgaatgccactgaaggcatattttgctaaactgctgctccatgtatttttgtttggaacatctatcacagtaaggcacagctgtttattggatgagcagaaaagaaagatatgcttgtggcaaccagaatgttttacggtctttcaagttgtataaaatggacctgcagaaacgtttaagtgttctcaggatgcaaagttggagctgaaatgtgacatcaaaccatttgccaaaagtgtgccaggt

SEQ ID NO: 168200 - DNA, 465 bp, Homo Sapiens
tgttggtcactctacaggatcccgcacactttttgcattttagggattatagattattgaaaattatttaggacacggaaaatatctaaaacatgaaacctttcttaacaaaagcatcatagtctattttggtgtgactgttcattacctacagacccccaaaatagttcttcctcttttgaaggttacacttgtaaatctacactcttggttcaatttatcactgtccaaataaggtggagaagctgttcaaactgatccacagaatgcagtatgcctggaagaggcaaaacaagtattttcaagacataacaggccattacatcttaatatgctgccccaaattcaaatatattgtagacaataacaaatacagatgaagacattttgtgtaaagctcaaacctttagcatctaacaagtgcactctagttccagcatctatgaaaagatgacatcctccacc

SEQ ID NO: 168201 - DNA, 372 bp, Homo Sapiens
cgaagggagtccttatgttaagtttcaaaatatattactctcctggattctcttcttcactatatcagacattgggtccattttcatttcattgcactcctattccaggcagctctattctagcagagccatagcaggacatgttaaaattccaatagaaaacactaaaaggaaagtctgtggaatcactagtgactaaatactgggaacctattttctcaatcttcctccatgttgtgttctatgtattcttgagatgataatatattatgtatttgaattcctgaaaaatggaaaatgtataagatatatgtatataaagtgtatgctgtattggtgcaataatggtaattaaaaatatgaaaaaagtga

SEQ ID NO: 168202 - DNA, 228 bp, Homo Sapiens
ccgcacactttttgcattagtatgaaatataactaagctttgtaataaattgtagcaaagccacccccttataacagaattcacacattttaaaaaagcttacaaaattctatttgctaaattttaacctgtttactgtattcatcaaatatgtatacaaaactctaattttcctatggtaaaaaactaaacaattgatatatcaatttcacaactgcaaaaagtgtg

SEQ ID NO: 168203 - DNA, 217 bp, Homo Sapiens
gtgtgaaagtgaaaaatcaattgtttagtatttaccaaaggaaaatcagagtctagtaaaaatatttgaagaatacagtaaagcaggttaaaatgtagcaaatagaattttgtaagcatttttataaatgatgtgaattctgtgataagggggtggctttgctacaatataataacaaagctaagttatatttaccataactaatgcaaaaagtgga

SEQ ID NO: 168204 - DNA, 535 bp, Homo Sapiens
gcacgaggcttctcatcacccagcacttcagcctggtggagcagctgaccacatcctctttctggaaggaggcgctatccggcagggggaacccaccagcagctcatggagaaaaaggggtgctactgggccatggtgcaggctcctgcagatgctccagaatgaaagccttctcagacctgcgcactccatctccctcccttttcttctctctgtggtggagaaccacagctgcagagtatgcagctgcctccaggatgagttacttgaaatttgccttgagtgtgttacctcctttccaagctcctcgtgataatgcagacttcctggagtacaaacacaggatttgtaattccttactgtaacggagtttagagccagggctgatgctttggtgtggccagcactctgaaactgagaaatgttcagaatgtacggaaagatgatcagctattttcaacataactgaaggcatatgctggcccataaacaccctgtaggttcttgatatttataataaaattggtgttttgta

SEQ ID NO: 168205 - DNA, 892 bp, Homo Sapiens
accatcacactggggaccggcttctctgctctcccgttatgggggtcgggggaatgatgggtcaagggtcttccgaagaaagcgagaaaggaacaggcgccttcaaaagcccacttggcgatgggttacagtaagagtttcagagtgctggccacaccaaagcatcagccctggctctaaactccgttacagctaaggaattacaaatcctgtgtttgtactccaggaagtctgcattatcacgaggagcttggaaaggaggtaacacactcaaggcaaatttcaagtaactcatcctggaggcagctgcctactctgcagctgtggttctccaccacagagagaagaaaagggagggagatggagtgcgcaggtctgagaaggctttcattctggagcatctgcaggagcctgcaccatggcccagtagcacccctttttctccatgagctgctggtgggttcccccctcccggatagcgcctccttccagaaagaggatgtggtcagcctgctccaccaggctgaggtgctgggtgatgagaagcactgagcgggagtaccgctcagggctttcgtacaggagctgctccacctgaggaaagacatcggaccgtcagagccggggactaccctcagcccagggagacacctgtgtttccaggggctgggactgacctcacaggatcactgctggctctgctaacaaccccaaggacaccaacgtttcccattctgagtacttctccgcaaaccctttgtttcattaaggactgttttacatgaaaggtgcaaaagtaggataaaaatgagaaccctaggggggaaacacgggaccgaaagaataaggactattggattagtcctctttctctaccatgggacttggcatt

SEQ ID NO: 168206 - DNA, 1498 bp, Homo Sapiens
  misc_feature (1466)..(1467): n is a, c, g, or t
  misc_feature (1470)..(1470): n is a, c, g, or t
tatttatcgcccaacacccagattcattagcaaaataagctcactggtgtgtttcttaatgataggctcctgtggaagtaggcatttctgggcagagaagtgaggcctgtgtctggctggcatttataatagctgtattacctgcttttcctctatagactcctgtggaagaggtccctgctgctattgccccattccaggggagggtgttgattggtgtggggaagctgttgcgtgtctatgacctgggaaagaagaagttactccgaaaatgtgagaataagcatattgccaattatatctctgggatccagactatcggacatagggtaattgtatctgatgtccaagaaagtttcatctgggttcgctacaagcgtaatgaaaaccagcttatcatctttgctgatgatacctacccccgatgggtcactacagccagcctcctggactatgacactgtggctggggcagacaagtttggcaacatatgtgtggtgaggctcccacctaacaccaatgatgaagtagatgaggatcctacaggaaacaaagccctgtgggaccgtggcttgctcaatggggcctcccagaaggcagaggtgatcatgaactaccatgtcggggagacggtgctgtccttgcagaagaccacgctgatccctggaggctcagaatcacttgtctataccaccttgtctggaggaattggcatccttgtgccattcacgtcccatgaggaccatgacttcttccagcatgtggaaatgcacctgcggtctgaacatccccctctctgtgggcgggaccacctcagctttcgctcctactacttccctgtgaagaatgtgattgatggagacctctgtgagcagttcaattccatggaacccaacaaacaaaagaacgtctctgaagaactggaccgaaccccacccgaagtgtccaagaaactcgaggatatccggacccgctacgccttctgagccctcctttcccggtggggcttgccagagactgtgtgttttgtttcccccaccaccatcactgccacctggcttctgccatgtggcaggagggtgactggataattaagactgcattatgaaagtcaacagctctttcccctcagctcttctcctggaatgactggcttcccctcaaattggcactgagatttgctacacttctccccacctggtacatgatacatgaccccaggttccagtgtagaacctgagtcccccattccccaaagccatccctgcattgatatgtcttgactctcctgtctacttttgcacacacccttaatttttaattggttttcttgtaaatacagttttgtacaatgttatctctgtgggaggaaggaggcaggctgtggtgggactgggtagggtatagtatcactcctgagttccactgctctagaatctaaccagaaatagaaacctagtttttanntcngaagatgatttaaggccaaaagcttgtt

SEQ ID NO: 168207 - DNA, 1941 bp, Homo Sapiens
tagtgttgtctattggagaaactgtagaagaagtgactgactctgggttcctggggaccaccccgaccttgtcctgctccttattaggagatgatgccttggtgcaggtctatccagatggcattcggcacatacgagcagacaagagagtcaatgagtggaagacccctggaaagaaaacaattgtgaagtgtgcagtgaaccagcgacaagtggtgattgccctgacaggaggagagctggtctatttcgagatggatccttcaggacagctgaatgagtacacagaacggaaggagatgtcagcagatgtggtgtgcatgagtctggccaatgtaccccctggagagcagcggtctcgcttcctggctgtggggcttgtggacaacactgtcagaatcatctccctggatccctcagactgtttgcaacctctaagcatgcaggctctcccagcccagcctgagtccttgtgtatcgtggaaatgggtgggactgagaagcaggatgagctgggtgagaggggctcgattggcttcctatacctgaatattgggctacagaacggtgtgctgctgaggactgtcttggaccctgtcactggggatttgtctgatactcgcactcggtacctggggtcccgtcctgtgaagctcttccgagtccgaatgcaaggccaggaggcagtattggccatgtcaagccgctcatggttgagctattcttaccaatctcgcttccatctcaccccactgtcttacgagacactggaatttgcatcgggttttgcctcggaacagtgtcccgagggcattgtggccatctccaccaacaccctacggattttggcattagagaagctcggtgctgtcttcaatcaagtagccttcccactgcagtacacacccaggaaatttgtcatccaccctgagagtaacaaccttattatcattgaaacggaccacaatgcctacactgaggccacgaaagctcagagaaagcagcagatggcagaggaaatggtggaagcagcaggggaggatgaagcgggagctggccgcagagatggcagcagcattcctcaatgaaaacctccctgaatccatctttggagctcccaaggctggcaatgggcagtgggcctctgtgatccgagtgatgaatcccattcaagggaacacactggaccttgtccagctggaacagaatgaggcagcttttagtgtggctgtgtgcaggttttccaacactggtgaagactggtatgtgctggtgggtgtggccaaggacctgatactaaacccccgatctgtggcagggggcttcgtctatacttacaagcttgtgaacaatggggaaaaactggagtttttgcacaagactcctgtggaagaggtccctgctgctattgccccattccaggggagggtgttgattggtgtggggaagctgttgcgtgtctatgacctgggaaagaagaagttactccgaaaatgtgagaataagcatattgccaattatatctctgggatccagactatcggacatagggtaattgtatctgatgtccaagaaagtttcatctgggttcgctacaagcgtaatgaaaaccagcttatcatctttgctgatgataccctacccccgatgggtcactacagccagcctcctggactatgacactgtggctggggcagaaaagtttggcaacatatgtgtggggaggcttccaccctacccccatgatgaagcaaatgaggatcctaccggaaaacaaacccctgagggaacgtggcttgctcaaggggggcctcccaaaaggcagaggggatccttgaactaccatggtcggggaagaacggggctgtccctttgaaaaaaaccaccctgatcccctggagggttccaaatcccttggctttaccacccttgcctgggaga

SEQ ID NO: 168208 - DNA, 2248 bp, Homo Sapiens
  misc_feature (1621)..(1738): n is a, c, g, or t
  misc_feature (1870)..(1878): n is a, c, g, or t
  misc_feature (2007)..(2019): n is a, c, g, or t
  misc_feature (2101)..(2109): n is a, c, g, or t
ctagaactagtccggacgcgtgggcggacgcgtgggtcgaaaagggcagctcagtggttactcaagctcaaaagggtttttttaagagcaagcatggttaagtctgtgtatactgagttggaagtgatttcagcacattcttttttagtggagtgaaagttctgaagcccccttttaacttcctcttggtttttcattataattggtagccatctcatgaactgtctctgactgttgtctctttgtggtcatgtgattgtgagcttgctttctgacttgcatttctgactttatcctgttgttaggaagatagaaactaggttttgaaagattacatgattcaagcgagggattttaaagtaaagatgtatttattctgaagaatctaaaagataacagattatttgcttatgaaagaacaatatagtctgggaatcccagaatgtcaagccaaaggtctaagaagtcatctccttcaaatactttaataaagaagtatttcgaggagatatctgtccaaaaaggtttggcctccagattccagttatttttaaaaagcaacttaccactaaatccttgagtctccatagagtaacagtaaagaaactgatgtaacagactctcctctcaaaggatctcctcttggaagagactatcagcggcagcattctccagggaagacccatcccctagtgccagagcttgcatcctggagactaaagattgcacttttttgtagtttgttgtccaaaatgcaatcccatttctgtgcctcttagcatgcagttagatttggacaaacaagattcctaaggaatgactttattaactataatatggttacagctattatataaatatatattctggttatagttctaatatggagatgttgtgtgcaatgctggcctgtggtggtctgtgtaatgctttaacttgtatggaggaggccaggctcagagctgagatgtggcctgaaccttccctgtatcgatcctttaatttagaactgtcaagatgtcactttctccccctctgccttttagtggtatctgacatatacttcaaaacagtaatttcctggtcacatcattaactgctaattctgtatttataaagaattttcagatggacatgtacaaatttgaactcaaaccatccccagtccagatacagggcagcgtgtaggtgaccacaccagagcctcagcctcggtccttctcagccgtcgggataggatccaggcatttcttttaaatctcagaggtagcagtaaacttttcagtattgctgttagcaagtgtgtgtttgccaatagatacccattatactaatgtgccaagtaaatgttcattgcacatctgcttccactgtgttcccacgggtgccatgaagtgtgtgaggagcccctcatctggagggatgagtgctgcgttgactactgctatcaggattgtgttgtgtggaatattcatctacataaattttatatgcacagtaatttccctttttatatgtcaagtaactatttgtaaaagttatactcacaaattattataatgattactaatatattttttccatgtttcattgcctgaataaaaactgtttaccactgttnnnnnnnnnnnnnnnnnnnnnnnnnnnnnnnnnnnnnnnnnnnnnnnnnnnnnnnnnnnnnnnnnnnnnnnnnnnnnnnnnnnnnnnnnnnnnnnnnnnnnnnnnnnnnnnnnnnnnnttttggcgggccccccggccctcaaaaaacttttaaaaccctttttttggggggccgggccccaaaagggaacagaacatggctttaagggttcccccaaaaaccccggccaacacaagggggctggttctnnnnnnnnnaaaaaaagcccccgggcgcaccaccagagtttttaaaaaaaccccgaaggggggtttccgggacccattcccggggcctacaaacacgaggggcgccaggggggaggccgggaaatacaaaatatccgnnnnnnnnnnnnntggaccacatttttgcccggagagaacggggggcgccaccctccttttataccctatttttccgccgccacacgtgggagannnnnnnnntcctccaacacgggggcgtgtataataagcacccccttttacactctccccccagcgggggccaccctaaaaaccatgttgtggggcccccgtgttgtggcggcataaaaataattagtcgcgccccgcccggggcgcg

SEQ ID NO: 168209 - DNA, 1375 bp, Homo Sapiens
agtaaaagtatttagttgattagctaccctgcacggcgcaaatattagatgatcacccgctatactatgagctctgggcttcatcttcctattcaccgtaggaggtctaacgggcattgtactagctaactcctccctagacattgtatacatgatacatattatgtagtcgcacacttccactatgtcttatctataggagcagtgtttgccattatagggggctttgttcactgattccccctattctccgggtacacactcaaccaagcatgagcaaaaattcactttgtaatcatattcgtaggagtaaatataacattctttccacaacactttctaggactatccggaatacctcgacgatactccgattatcctgacgcatacacagcatgaaatactatttcctcaataggctcattcatctcactaacagcagtgatattaataatcttcattatctgagaagcattcgcatcaaaacgagaagtatctgcagtagaactgacaagcacaaacctagaatgactacacggatgtcctcctccctatcacacatttgaagaaccaacatatatcaacctaaaataagcataagaaaggaaggaatcgaaccctctcccactggtttcaagccaacgtcataaccactatgtctttctcgataatcgaggtattagtaaaatattacataactttgtcgaagttatattataggtgaaagccctatatgcctctatggcttaccctttccaactaggcttccaagacgccacttcacccatcatagaagaactcctacactttcacgatcacaccttaataattgtattcttaatcagctctttagtgttatatatcatttcacttatactaacaacaaaactgacacacactagcacaatggatgcccaagaagtagaaacaatttgaacaatcctacccgctattattttaattcttattgcccttccatcattacgaatcctttatataatagacgaaattaataacccagccttaaccgtaaaaaccataggacatcaatgatactgaagctatgagtatacagactatgaagacctcacctttgactcatatataatccccacatcagatcttaaacctggagaaatacgactactagaagtagacaatcgagttgttctgccaatagaaataacaatccgaatattagtgtcctctgaagacgtactacactcatgagctgtcccatccctcggtttaaaaacagatgctatcccaggacgactaaaccaaacaactctaatatccacacgacctggcctttattacggacagtgctcagaaatctgtggatcaaaccacagcttcatgccgagtatgcggt

SEQ ID NO: 168210 - DNA, 589 bp, Homo Sapiens
aggcccgtacaatgaggacatccgtgtagtcattctaggtttgtgcttgtcagttctactgcagatacttctcgtgttgatgcaaatgcttctcagataatgaagattattaatatcactgctgttagtgagatgaatgagcctattgaggaaatagtatttcatgctgtgtatgcgtcaggataatcggagtatcgtcgaggtattccggatagtcctagaaagtgttgtggaaagaatgttatatttactcctacgaatatgattacaaagtgaatttttgctcatgcttggttgagtgtgtacccggagaatagggggaatcagtgaacaaagccccctataatggcgaacactgctcctatagataagacatagtggaagattgttcggggcctgcaggccccgaacaatgaatagtgatagtatcattccttctaggcatagtagtgaagatattaagtgagatcgatatataagtaaccctgcaagggcgatcgcgaatgctataatgatgtttatatatactaatggcacttgataattatgaagtaatcatagtctaatggagtcgaaatcatttgtttgt

SEQ ID NO: 168211 - DNA, 827 bp, Homo Sapiens
  misc_feature (497)..(497): n is a, c, g, or t
ggtacggccggaagtacgggatatcgtcgacccacgcgtccgatgatctgtctcgagagaaccaccgagaagtaattgctacagttataaggaaacttcttaaccacatacttgataattcagaagatgatactaagtcatgtttcttattataaagattattggagaccttttacaattccaaggatctcacaagcatgaatttgactcccgatggaaaagcttcaacttagtaaagaaatcaatggaaaatcggctccatgggaaaaaacaacatatcagagcactgttgattgatagagtaatgttacagcatgagctacggacactaactgttgagggttgtgaatacaaaaagatacatcaagatatgatcagagatcttcttcgtttatctacaagttcgtacagtcaggtgagaaataaggctcagcaaacattttttgctgccttgggagcatataacttctgttgcagagatatcattcccttggttntggagttcttaaggcctgatagacaaggtgttacacagcaacaattcaagggtgccttgtactgtctccttggaaatcacagtggtgtgtgcttggcaaaccttcatgattgggactgtattgtacagacgtggcagcgatgtttcttcagggcttagccaagcaatgtccctggaaaagccatcaatagtgagattgtgtgatgatcttgcagaaaagattcatacgcagtatgaaacaattggcttggacttcacaattccaaagtcatgtgttgaaatagcggaataacttcaacagtcaaaaaaccttttattaacagatattgtt

SEQ ID NO: 168212 - DNA, 575 bp, Homo Sapiens
tgaatcagaggaaggaacgaactatctggcagagcaagggtatatctgtaaaaagggagaaatatgatgcacgtcctaaactcaaacagtatactgacacatgtagtaggaaccatagaactcgtgtgactgtatagatcccggtagttctgaaagagaccagtgtggcctcctgtgaatgttaggtgacaactggctgctgggcaggttcaatcaagtggaaatcatcgtctaattaagcgggcagcagctgggcagcatacatttatggagacattaaagccttgtcaccaaaggacagtaggaggctgccgcagctgacccctccagaaacaatgttgtatgctgttgtcatgacatgcaaaaatccagtctgattaggctgaggtttagtgagtcagatttgcaaatgctaataaatggtgacaggatttatgtactgattcgattcctgctccacttcattctctcacctcttgaaagtgaatgttgccatgttttctctaggccttcattcaaacatacaaaagaaaaacagatacattcaaattataactcagcctcagtatgtgtca

SEQ ID NO: 168213 - DNA, 393 bp, Homo Sapiens
taatatcagagcattctatagcggtgactgtccagtactctacgctccatgtgtgctgcagagggctactttctgtctgtgatgtcctttgatcggttccttaccatctgtcgacctttgcattatcccacagatcatgactcaccacctgtgtgtccgattagtggccttctgcagggcaggtggttttctatccatactgatgcctgcagtgcttatgtcccgagtgcctttctgtggccctaacatcactgaccattgtttctgtaacctgggaccattgctggcactgtcctgtgccccagttcccaaaactactctgaccttgtgctacagtaagctctctcatcatcttcatcaccttcctctacattcttgggtcccatatcttag

SEQ ID NO: 168214 - DNA, 626 bp, Homo Sapiens
cccacggtagagctgcagaaagggcagccacttgcacctgcagcagcccgaagcgcccaaaggtgcgcagccgcacacactccagcagcgtcttcaggctgatcttgatgatgccggtcagcaccgacaccttgttgaactccacagggctgaacacatcaatacgttcagagaatagcttctggatattgctcaagaggttggtgtccatcggggcactgggggtatagctgggggcgtagcggccctgctgccgagagctgctgtacacggagaaagtcctcttgctggagtcgctgcttctgggccttgcgaacaccctcttcgtacaggagccccacctgcacgtcgatggcggtggtatcctccaccacccgcttcatgacggcccgcacattccggggctccagagtgctgagccagtcgcgagtctccacgctcttgcgcagcatctgtgatatgaccaggccctgcaccttcacgtagtgggtcagcagccgccgcgccgtttccctggcctctgcacacagcgtgctcacgggcgtcactgggaactgatcctgcaccagaaactgttcatcagtgagagtgaggatgtaggagatggtggccgtctcgtagtcccc

SEQ ID NO: 168215 - DNA, 1206 bp, Homo Sapiens
  misc_feature (741)..(752): n is a, c, g, or t
  misc_feature (794)..(814): n is a, c, g, or t
  misc_feature (867)..(884): n is a, c, g, or t
  misc_feature (916)..(931): n is a, c, g, or t
  misc_feature (1045)..(1076): n is a, c, g, or t
ggcggcctcctcggagagcagcagcaccaaccacagcatcgggagcacccagagcaccccctgctccaccagcagcatggcatagcccggccccccgcgctcgcccagcaggagagactgagcagccgccagctgggagcactggtgtgaactcaccctgggagccagtcctccactcgacccagaatggagcctgctctccgcgcctacccttcccgcctccctctcagaggcctgctgccagtgcagccactggcttggaacaccttggggtccctccaccccacagaaccttcaacccagtgggtctgggatatggctgcccaggagacagaccacttgccacgctgttgtaaaaacccaagtccctgtcatttgaacctggatccagcactggtgaactgagctgggcaggaagggagaacttgaaacagattcaggccagcccagccaggccaacagcacctccccgctgggaagagaagagggcccagcccagagccacctggatctatccctgcggcctccacacctgaacttgcctaactggcaggggagacaggagcctagcggagcccagcctgggagcccagagggtggcaagaacagtgggcgttgggagcctagctcctgccacatggagccccctctgccggtcgggcagccagcagagggggagtagccaagctgcttgtcctgggcctgcccctgtgtattcaccaccaataaatcagaccatgnnnnnnnnnnnncacaccccaaaaaccccaccgccgggggcggcaccgaagggnnnnnnnnnnnnnnnnnnnnncgaggcgcccgggaacaaaaactgcataagaaagaagggtgctcgggggcggnnnnnnnnnnnnnnnnnngaaaaaacttttctcaaaaccaatttccgttnnnnnnnnnnnnnnnncccccctgggaggtgaaagggggaaaccggggggccctaagaggcgggttctccacagaggagaaaaaccccgggggcagaagggacacaaaagggggctttggggggcctctnnnnnnnnnnnnnnnnnnnnnnnnnnnnnnnngggcgggggaaacacccgagaggcttttgtggaacaaacaaccccccagaaggggaggttctcgtggggggcccattttgcgggggacccaacacccacgggggagggcccaagaggggggcctccaaat

SEQ ID NO: 168216 - DNA, 442 bp, Homo Sapiens
acatacggggcaggttgtgtcgcaataaaaggaggggcacacagtataagttgcacattctaaaataatatgaaaagaccataactgaagagctgaatttggaatgtctggttcttcacaatacaagtagatgatgaccaccaaccatggtttctgaatgaactggggttcaaaacatatctggttgcaacagagggcttccttggaccctaacatttgaaattaaacagaggtaattagaggagctgcgattttacacagtggtggcatcctggggagcttctattccatcagtcaattttaatatctcacaatcgtggaaaaggagtatccgagcagggacgagcaatatcgatgggaagccgatacttgggccatctcttggagattcctgctgtaaggacggcaagtgtttctccagagaaagcacttgcctgggtat

SEQ ID NO: 168217 - DNA, 595 bp, Homo Sapiens
gagatcgatggcctgctggcccaaggtctgcggcctgagagccccccaccatgccggtccccgtgctcaacggggcccccgctggtgagagtccccagcctaaggccgccccgaggcctcctcgcctgcctgcctcacccctccagcatctcctgccgtggaaaggcgtgtggaccttgggccccccaagcccagcgagcaggagactggagagcaggtgatcagccccagcagccaccccgccctccacaccaccaccgaggacagtgcagggtgtgcagactgagttctaggccagtgggtccctgactgctgcacatggcacaggccgttcccttccggacccaggcaggctcagctctggggagggcaacctggtctgtgccattgtgggtggaggcggggcagggctgtgtgacaccgccagggagacgggcccacctgaatcactttattgggttcagtcaacactttcttgctcccatgtaatctcattctgagggatgatctcagatgcaggggctggtaaagaggtaacctgcttgtgccaagggctggacactgctggggggctggaaagcccctcccattcctg

SEQ ID NO: 168218 - DNA, 723 bp, Homo Sapiens
tgacgactatgccctcctgatgcagatttcccaggtctgctataagggctcgtgggcgtcatttcaccacacatacatgggcgcgtacagctgtggtacaggtacgcactacatcaccgatgatgtattgtctcaagatcagtatgtctaaggtcttcaacagagttgagaagcccatgagcacggcggacacgaaggccagcaggttcatcatcagcattgaattccgccggccaaagcggttatacgaaaaggcccacagagaaggagccaatcatgcccccaacagaaaagatggccactgagagggaccagagcgtggtgagcgtggtgggcaggatgctctccccatagcggtggacccatgtctggttgtagaactcctcgatcaccttctggggggcattgatgactccagtgttgtagccaaactgcagggagccaagcactgctcctcccacggccagcatgaggcgacccgtcagcttcttgctgctgggctccatggcagcgctgcgctggtggctctggctgcgccgggtacgcgggtggcgacgggcgtgcgagcggcgctctcccgctcaggctcgtgctccggtccggggactcccactgcgactctgactccgacccccgtcgtttggtctcctgctccctggcgtgctcactcggggacccgcgactagcgaccggcacgctcgctgttgctacctcttgcctctt

SEQ ID NO: 168219 - DNA, 723 bp, Homo Sapiens
  misc_feature (700)..(700): n is a, c, g, or t
atctgatacacacaagatagcggctgtagaagtctgcctccgataccgcctgtcctcctcaatgctatctacctgagtgccaagtggaagacaacattggatcccaagaaaaccagaatggaaccctttcacttcaaaaactcagttataaaagtgcccatgatgaatagcaagaagtaccctgtggcccatttcattgaccaaactttgaaagccaaggtggggcagctgcagctctcccacaatctgagtttggtgatcctggtaccccagaacctgaaacatcgtcttgaagacatggaacaggctctcagcccttctgttttcaaggccatcatggagaaactggagatgtccaagttccagcccactctcctaacactaccccgcatcaaagtgacgaccagccaggatatgctctcaatcatggagaaattggaattcttcgatttttcttatgaccttaacctgtgtgggcctgacagaggacccagatcttcaggtttctgcgatgcagcaccagacagtgctgggaactgacagagactgggggttggagggcggctgcagcttccgccattttctgtgggcccgcaccctgctgggtcttttgaagttgcaggcagccctttcctctttcgtggttttggggaccagcaggcacaaagtttccctgttttttcatggggggggcgagttntattggaacccccagggggcctt

SEQ ID NO: 168220 - DNA, 312 bp, Homo Sapiens
tcacaggtcttagtcacggaagcgtgtctcggccacccaggtgttgatgagctccaagttggcgtcactgttgttgcttaggactctggggctgctgctgtacagggtccgagaggcattcacaaaggtgtcccttatggccaggtctgggctgtggaagatctgagagactgaggtgacacctttggtcgtgaagcccttcagggcctggtggacacaggtgaagtccttggggtaagagaggatgctctccaggtttgttttggtgttctccccagccccgagcaggacctggagagcaccaccaataca

SEQ ID NO: 168221 - DNA, 547 bp, Homo Sapiens
  misc_feature (537)..(537): n is a, c, g, or t
gatatgctctcaatctggagaaattggaattcttcgattcttcttatgaccttaacctgtgtgggctgacagagaacccagatcttcaggtttctgcgatgcagcaccagacagtgctggaactgacagagactggggtggaggcgctgcagcctccgccatctctgtggcccgcaccctgctggtctttgaagtgcagcagcccttcctcttcgtgctctgggaccagcagcacaagttccctgtcttcatggggcgagtatatgaccccagggcctgagacctgcaggatcaggttagggcgagcgctacctctccagcctcagctctcagtttgagccctgctgctgcctgcctggacttggcccctgccacctcctgcctcaggtgtccgctatccaccaaaagggctccctgagggtctgggcaagggacctgcttctattagcccttctccatggccctgccatgctctccaaaccactttttgcagctttctctagttcaagttcaccagactctataaataaaacctanaaattacatg

SEQ ID NO: 168222 - DNA, 166 bp, Homo Sapiens
cattactgtgaccgggattatgctgtgaagacccaccaccacttgtgttgccgccaccctcccagccctactcgcgatgagtgctttgcccgtcgggctccttaccccaactatgaccgggacatcttgaccattgacatcggtcgagtcacccccaacctcatgg

SEQ ID NO: 168223 - DNA, 312 bp, Homo Sapiens
gcgctcatctctaagccgcttgccatccatgggcagcaacatagagcagaggccgaccccaggatcacgactgggggccccgcaaaattcggggatcagtaccttggaacgtggacagaagccgcccccaacaccttcaggaaaactcgtgtccatcaaaatccagatgctggatgacacccaggaggcatttgaagttccacaaagagctcctgggaaggtgctgctggatgcagttagcaaccacctcaacctcgtggaaggtgactatttgggcctcgagtttcctgatctttctgtgatcaggaaact

SEQ ID NO: 168224 - DNA, 360 bp, Homo Sapiens
  misc_feature (163)..(163): n is a, c, g, or t
tcccttttttttcagatcaacaacccctccccgtcgtaaacgctgaggaatgatgtggcaagaatgccatgatgttctttaaaaaaattccatgagttttaagggcttgtctcattatagaggcacattgtggctgtgtaggtgaaaccagaatctttttttnttttaatctgtaaataggtgtactttttccaatgctgctccaagttacttaataggatttctttgtattacgtttttttcaaaaaatatagtgcataataagactataaacatgccattctctttcagctgtaatgttcttaaaattattcttgaatgtaccgtgatgtcaataaagctctttagttcatttttgtt

SEQ ID NO: 168225 - DNA, 491 bp, Homo Sapiens
gaaggtggaacagaagaagaaaatagagatggagatgttattgggcctttgccaccggagccagaggctgtgccaaccccacgtcctgctgcccagagtagcaaagtagaagtcattgtccaggagaggaaggacaccaagcctggagtgacacacataccgggagtgggaacgcggaaaagaattttcctttggatactggtcgaagaggcagtcagatcatccgggcatgagagagatcctgagatttgccccgccgtcagattactttgtgggtcagaagagaactggtttttccagcagacaggcatggagcagacctgggccagcacagagtgacccagggcagtgccctgaccagagccacggacctagccctgaacatacgtcacccactcctgcccccgacaacccaccacaagcccccacagttactttcaaaactctggatgacatgatttcctattacaaacaagtgacatgatcttcca

SEQ ID NO: 168226 - DNA, 394 bp, Homo Sapiens
cataaattcgctggaatagtggtgtggcattaagacttggaacggtcaaaaaaacttcaggggttcacaaagttgagtgttgtttaaaaaatgactttcttacttaatcttccccttcctcagccaactctgtttctttgtgtaccaccactcttgtgaccgacatgtcagggtgctgctctctggcttccctgatcgcctgagccagtgcctggtcatgatcaatatctccatctcctgtgatcacaatgcgtttctcaattcttgtttcagaaattccaccttttacagtcttggtgatgtgtgtggttgtcgttgttgacacggactcagatgtgatggtttgtgcggtcagtaacgtgaacgaaaaaccaccactccccgccgatagctc

SEQ ID NO: 168227 - DNA, 386 bp, Homo Sapiens
ccaacagagagtgaatgtagctcacatgaggaccagtgcaggtaatgctcacgccaggatctgactgctaacaaaggaagtcataggctgttgtagtacgtcgcatatccatgaacatagtcctaaaggaagtaactgtatttggtgaagtctgggattatccgaaactctacttctcaatgttcaagtcaatatcatatttttcttaccagaagatctccacactcctggctgaggtcaggctatcatgtagtccagctctaatttccaaaatatggagaccactgaacatctcccagctgcactcttctgtaccagctcttcacaggagagctttgcaataacatggtttcctgttacagccacacctcatttatttttatact

SEQ ID NO: 168228 - DNA, 182 bp, Homo Sapiens
tcagagataggacagcacaaatacaaataagcaagtgggtaagtctggataacggatatccagatgttctttatactatatttttgtaacttttgtaaatgtatacttccaaataaaaggtatttaaaaaagtaaaaattggccgagtattgatggcacacacgtggtaatcgcagctataa

SEQ ID NO: 168229 - DNA, 445 bp, Homo Sapiens
  misc_feature (66)..(215): n is a, c, g, or t
gcctagaggaccccagactgatggctccaccgctccagaaaaacaaagtatttgtaattgagctgnnnnnnnnnnnnnnnnnnnnnnnnnnnnnnnnnnnnnnnnnnnnnnnnnnnnnnnnnnnnnnnnnnnnnnnnnnnnnnnnnnnnnnnnnnnnnnnnnnnnnnnnnnnnnnnnnnnnnnnnnnnnnnnnnnnnnnnnnnnnnnnnnnnnnnggaaagaatgacagaaaaattcaaaggatgaaagactagtcaaatcatttcatttctgaaagttaccggaactctgaaaaaaagacaaaaaccaaagttaaacatttcagtcacttaagagtagaaaataatggcagtaaccaaaatattcatataagggttaatgaaaacctgtaacgtcaatttaatatttttaagaaacgggtaggctgggagcggtggattgctcc

SEQ ID NO: 168230 - DNA, 355 bp, Homo Sapiens
tgcccctggacttttacctgggcaatgcagtgactgagatggggaccccatggcgagtgtaaaccttttcactcttgacattgagggtcagtgtgttgagagagatcctctggatctgttggatgcagggcaggacaaagacacgccctccagccaccatgactggggggcttcggcagaacccggagaccaccatggcctcatttgggccacaagtgaaaaacatggttcaggctggagcttccgggacgcgggcggcagcccagcgagggtcatcgggaagggcggggtcgcgcagggacctgggagccgggcaggggccgctcgcagaccagctttcctgggagctggcccc

SEQ ID NO: 168231 - DNA, 570 bp, Homo Sapiens
cctgtagccagagtaggggtaggaaaggtgtggtgggggtctcatgaagtcagagaaaaagcagagagagaagggagagccctctaagaaatgcttcttccatttcagggaaagaaaggaggaggaggcaagtgccttggggtgcctggaaaagatgagactagcagaggaacttctctgcaggcaagggttgagaagactgtggccagaagatgtcataatgtctgggagagagggtgatggggaagtggactgtggggaaaaggctctgaaagcttcacctgggcaatgccagtgactgagatggggaccccatggcgagtgtaaaccttttcactcttgacattgagggtcagtgtgttgagagagatcctaggggaaaaagaagggacagacagtaagaagaggaggaaaaagagaaaacggaggtcccccttccctggttcccttcttgcctacctctggatctgttggatgcagggcaggacaaagacacgccctccagccaccatgactggggggcttcggcagaaccctgcaaggtgtggggcagtgaggaacggtggcaga

SEQ ID NO: 168232 - DNA, 252 bp, Homo Sapiens
cagagtagggagtccttttgatagctgagtagtattccatggtatggatgtaccacagtttgcttaaccattcacccactaaaggacataagagttgttttcagttttttgccctaataaagctgctgtgaacattcatgtacaggtttttatgtgaacatacattttcattttctgggataaatgctcaaaagggcaactgtagggttgtatggtaaacacatatatttttgtaagaaactaccctactct

SEQ ID NO: 168233 - DNA, 651 bp, Homo Sapiens
cgtgaaaaatgtggagtcactccgtcgtcaaacactcccacggctttagcaacctaagctccatatacgtcttctaaatcctttgttgtcatttcaagtaacgtgcacagtatcttcattaagggtaaacgccatctcaaaacaccactatacagggctcatccataagaagcaaattcccatacattcaacacagatcatgagatagtagcaatacggtcacatcttccacttctaatttctctggtgatttctagcacatctttagataaccacctccactgaagtctggaacccttcaaagttaaccatgaagtttagaatcaacttcttccaaactcccgttcatattgttattatggtcccctcccataaatcgcaaatgttcttaatggcatctaaaatggtaaatcttttccagaaggtattcaatgtactttctccagatccatcagaggacacacactgtctaccagcagctatagcccatgaaatgtatttcttaaatggtaagacttaaaagttgaaattactactccttgatcccatggcatgcaataaggggtgtagcaggcatgaaaacaacaataacctccttgtatatcttcatcagagctctagagtgacttgatgcatcgtcaatgagcagta

SEQ ID NO: 168234 - DNA, 132 bp, Homo Sapiens
cagagtagaagtcgatacctggcttcaaagcttcaaggtacaggacagactgactctcttgttacggttaaatgcagctggtgactgtaagttgaagccagtgctcattgccattccaaaatcctaggctct

SEQ ID NO: 168235 - DNA, 293 bp, Homo Sapiens
acagcgcgcagccatatgctgtggaagtaccttggcctggagagccctccagctaaatgatgagtgtgtctttctacacaaaccctatttgaaggcatgtcgctgcagtgtagtatttacccctcaggtaaaatgttattttctaccccatatccgaggcagataagccctgaaatcggccagaatgtggattccacatgttttctcccactcttccaactggatgtgctcttgaaaacattgactttcttggtccttgtcatatgatatgtttacttatcgccatacttcct

SEQ ID NO: 168236 - DNA, 797 bp, Homo Sapiens
  misc_feature (726)..(734): n is a, c, g, or t
  misc_feature (743)..(743): n is a, c, g, or t
ctcgatactggcacatcaactatgtgcttatggtacttgtgtgtacctcctatgcctcatgtctagccaggttgagcctaggggccagttgggggaccacaggacaattttcatatggcctaaatgtatccattgcctttgatgatgttcccagccatactccagtcaacggggactactagtccctcactcttaggttctaggggagtccttccatctgctccttcttaaactgtcctagggagttggcttttcagccagggccaaaggaaaaagccctgctgcatttaaaaacaaagtgtccaagctgccagtggtgtgtttacaatctctcctggcagaggttggccctttctctaatgccttctggaaggcggaaaatgtgggaactataaatcactaggcggttgccttgttttgacttgagacacccaagaggaacagtcatgtttctcataaaaatcagtgggatcatttttgaattccatcagcctttgtatgtgagtgcaaaacattttaacagttttctcaaatcaacaaacagccttctcctatagctgtacttgcccccctccccaaaaaaccatggatgagaaagaaaggagtcaggggcctgataaaaaatacagacttaatgagcaactcaagatgagaaaactgctctttttccaaaaattaccaactgctgattacagctgaaatggaaccaaatgtttgttttctgannnnnnnnnaatagctgnttaacaaattagtctttgctgagtaaaaggggaaatttctaaacctagtgcact

SEQ ID NO: 168237 - DNA, 367 bp, Homo Sapiens
tgcccgactagggaaagcgtaatgatccgcagaggggtgatggtccagaatagtaatggagtcggtattagaagaaaataagggtaaaatcaggctgaactgcatgtatatggctccactgtggcttgtgacacttttaaaatcatccgtatgtcagtgtatctggatacacgaggaaaaggaaagagtctcagagtggaacaaagagtgggaagaggtgatctgtaatgttacaaattgtgctattactccaaggtccaacttttccagtgcattacatggtattgtatatcagtggagaaatgtattatttccatgatcaaatgtagtctctgttaaggtcaagttttcttttataagcctttaa

SEQ ID NO: 168238 - DNA, 412 bp, Homo Sapiens
  misc_feature (205)..(231): n is a, c, g, or t
caaaacatctctttctacatacacttgagtaggtggcataaaatgcactatcaatatatagaaaacatgaaattttccaaatatttccgatcagagaatcacaagagcagcaaatgtggtttcatcaagtgggaagaaagcagccaatttaaaataactttttgggagactgaattgagtaataagaaaacttcagtctttcgcnnnnnnnnnnnnnnnnnnnnnnnnnnncaacttattgaatgtggccagctcactagatgaggaaagaggaaggcattttctgcattcttgcctagttttccttataagcaccactaagttaatagctctgtctttttggtgtttgcactatgtaatgcttttaatactttttaattgtgcttttttatgtattaaatgtttttccttt

SEQ ID NO: 168239 - DNA, 190 bp, Homo Sapiens
tccctacggctcataagtgctgggattataagcatatgccaccacacctggcctggagtggtttttaatagtaattacagcagaaaatacgttaggtagcacagactctgcccaaggcactgtcctaagcacttcatacacatcaactccttaatccttatacttaccctaggaggccaggccagtagtg

SEQ ID NO: 168240 - DNA, 394 bp, Homo Sapiens
  misc_feature (272)..(272): n is a, c, g, or t
  misc_feature (322)..(322): n is a, c, g, or t
  misc_feature (331)..(331): n is a, c, g, or t
  misc_feature (366)..(366): n is a, c, g, or t
  misc_feature (377)..(377): n is a, c, g, or t
ccaaaaccaatcaggtcaactcgggcggtgtgctgctgaggttgcaggtgggcgaggaggtgtggctggctgtcaatgactactacgacatggtgggcatccagggctctgacagcgtcttctccggcttcctgctcttccccgactagggcggggcagatgcgctcgagacccacgggccttccacctcccgcagccttcctgcatggacccaccttactggccagtctgcatccttgcctagaccaatctcccctccagggagcccaccntgacccacccccacttgcaccccctccccatgggttcttttcctttcctnttgaacttnttttagggagtcaattgctttgttgtgggtttctnggggacaattnaaaccaaatggcttttt

SEQ ID NO: 168241 - DNA, 235 bp, Homo Sapiens
aattgcaaactcaccccttgttgaacaccactgatagacactaatccctaatatcaactaaccaatgaaatgctgtacctcttgttgtatgagaagaagaaacagacatcttctcaagtctatgagaatggcttttaactaatcaacaccttgattaaccagtagaaggcatatttagtgatgattcgcttatgactgcctgtggttaaggcgggtatactctagagtcgccatc

SEQ ID NO: 168242 - DNA, 551 bp, Homo Sapiens
tcatggatggtggtgacatggacttgtttatagaagacaggtcagctgtctggtcgatgatctacattctgaagttgtctgaaaatgtcttcatgattaaattcagcctaaacgttttgccaggaacactgcagagacaatgctgtgagtttccaacctcagcccatctgcgggcagagaaggtctagtttgtccatcaccattatgatatcaggactggttacttggttaaggaggggtctaggagatctgtcccttttagagacaccttacttataatgaagtacttgggaaagcggttttcaagagtataaatatcctgtattctaatgatcatcctctaaacattttatcatttattaatcctccctgcctgtgtctattattatattcatatctctacgctgcaaattttgggtctcaatttttactgtgcctttgtttttactagtgtctgctgttgcaaaaagaagaaaacattctctgcctgagttttaatttttgtccaaagttaattttaatctatacaattaaaaccttttgcctaacaa

SEQ ID NO: 168243 - DNA, 232 bp, Homo Sapiens
tcttaacggcagggctgacagaactagcatagccaagatttacacttcaaaggtaatatatgaagcagtaatatgtcacctgaggaaggaggcatattcctttgggtacttgatcttagggatattaaatccttttttatatacacatgcaaataaactatgccatggttaaattttgctgtaaaatgtccaattgttcaagggattaggaaaaggttataatttcttaaga

SEQ ID NO: 168244 - DNA, 1000 bp, Homo Sapiens
  misc_feature (368)..(368): n is a, c, g, or t
  misc_feature (954)..(956): n is a, c, g, or t
ggcctgggtggcgaattcggcacgaggcagccaggttggcagctgacgggacagccggggtctatttagttgcgggttttcagcaaatccagggctggtctggaggcgcgaaaacttaaggcatacagaacgatggagtatatggcagaatccaccgaccgcagccctggacacatcttgtgctgtgagtgtggtgttccgataagtccaaatcctgccaatatttgtgtggcctgtttgcgaagtaaagtggacatcagccaaggtattccgaaacaagtctcgatttcgttctgcaaacaatgtcaaaggtattttcaaccaccaggaacgtggatacagtgtgctttagaatccagggaacttcnttgctttgtgcttgaaaaaaatcaaagcccctctgagtaaggtacggcttgtagatgcaggcttggtttggactgagcctcattctaagagacttaaagttaaactgactattcagaaagaggtgatgaatggtgctatccttcaacaagtgtttgtggtggattatgtcgttcagtcccaaatgtgtggagattgccatagagtagaagctaaggatttctggaaggctgtgattcaagtgaggcaaaagactttgcataaaaaaactttctactatctggaacagttaattctgaaactatggaatgcatcagaatacacttcgtatcaaagagattcatgatggtctggattcccattattcctcaaaacaacatgctcagaagatggtcgaatttcttcagtgtacagttccctgtagatacaaagcatcacaaagactgatctctcaagatatccatagtaacacatacaattacaaaagcactttttctgtgggaaattgttccaatatgcaaaggataatgggttgtctggtctggtctccaaaactgggcacaaaagcctgggaaaatatgaaaccannnattttgggtggtggtatttcgaaggtaaacccagttgcccattt

SEQ ID NO: 168245 - DNA, 512 bp, Homo Sapiens
  misc_feature (15)..(15): n is a, c, g, or t
  misc_feature (66)..(66): n is a, c, g, or t
cggtaccgttcttanccacaggcacaggagagaatagagtgactaacagataaaatcaagagaagncgattagagacttacaagaagttctgaaggggaaaataaaaaaccaggtggacaagcaataactaaataatagatgggatgaagaaagacttgagactgcagatcagaacagctggctgttgtctagccaggagagaagtgagggaaacacacaaacacctatgcagagtctggcataatccctgaattccaaggaaaaagtaaaaatcctctaagcttccatatgaaagaccaagttgcatacaaagaaaaagaaccaaaccgacaccaggcaatcttccttaccacacaagcagaagtagaaaaaagtggaatgacgctacacagttgacaaagaactgcaactcaggaaccttgtactcagccaaaggaccctccacatgtcagaatgaaaaggagatactagtttatcctatctgaggaaaactaaagaaacaacctgtggt

SEQ ID NO: 168246 - DNA, 275 bp, Homo Sapiens
ttcttttccaggatgtgcatccaggggagtcagtgcaacgtcgaggtcgaaagaagtgacaagcttgccctgcctggctttgagaacctcacagcaggatataacaaatttctcaggcccaattttggtggagaacccgcacagatagcgctgactctggacattgcaagtatctctagcatttcagagagtaacatggtaagcgctgttcctttgtactctacccaagtagtccctctctgtgtgtttaaaggggatatgctttctagccgctc

SEQ ID NO: 168247 - DNA, 570 bp, Homo Sapiens
atgctgaggccgactctaaggatcccatgctcatcctcctgtgcacaggctaactcagctggaatcagtgatgcagtgtcaagactggaaacaaaccaaaaagaacaaatagaaagtcttactgaggttcatcgacgagaactcaatgatgtcatatcaatctgggaaaagaaacttaatcagcaagctgaagaacttcaggaaatacatgaaatccaattacaggaaaaagaacaagaggtagcagaactgaaacaaaagatcctcctatttgggtgtgaaaaagaagagatgaacaaggaaataacatggctgaaggaagaaggtgttaagcaggatacaacattaaatgaattacaggaacagttaaagcagaagtctgcccatgtgaattatcttgcacaagatgaaactaaactgaaagctcatcttgaaaagctagaggttgacttgaataagtctctgaaggaaaatacttttcttcaagagcagctagttgaactgaagatgctggcagaagaagataagcggaaggtttctgagttgactagcaagttgaaaaccacagat

SEQ ID NO: 168248 - DNA, 1118 bp, Homo Sapiens
  misc_feature (619)..(905): n is a, c, g, or t
gggaagatcactgctgatggacttcaggaggtgtttgagaccaatgtctttggccattttatcctgattcgggaactggagcctctcctctgtcacagtgacaatccatctcagctcatctggacatcatctcgcagtgcaaggaaatctaatttcagcctcgaggacttccagcacagcaaaggcaaggaaccctacagctcttccaaatatgccactgaccttttgagtgtggctttgaacaggaacttcaaccagcagggtctctattccaatgtggcctgtccaggtacagcatcgaccaatttgacatatggaattctgcctccgtttatatggacgctgttgatgccggcaatattgctacttcgcttttttgcaaatgcattcactttgacaccatataatggaacagaagctctggtatggcttttccaccaaaagcctgaatctctcaatcctctgatcaaatatctgagtgccaccactggctttggaagaaattacattatgacccagaagatggacctagatgaagacactgctgaaaaaattttatcaaaagttactggaactggaaaagcacattagggtcactattcaaaaaacagataatcannnnnnnnnnnnnnnnnnnnnnnnnnnnnnnnnnnnnnnnnnnnnnnnnnnnnnnnnnnnnnnnnnnnnnnnnnnnnnnnnnnnnnnnnnnnnnnnnnnnnnnnnnnnnnnnnnnnnnnnnnnnnnnnnnnnnnnnnnnnnnnnnnnnnnnnnnnnnnnnnnnnnnnnnnnnnnnnnnnnnnnnnnnnnnnnnnnnnnnnnnnnnnnnnnnnnnnnnnnnnnnnnnnnnnnnnnnnnnnnnnnnnnnnnnnnnnnnnnnnnnnnnnnnnnnnnnnnnnnnnnnnnnncatatatacatttaatatatatgtaaaaccagagctgacaatgacactctggaacattgcataccttctgtacattctggggtacatggatttctactgagttggataatatgcatttgtaataaactatgaactatgactctcttttccttccttttgggattatctccaagactgggtatgtgtatgcatatgagaaaaaagattgggccg

SEQ ID NO: 168249 - DNA, 461 bp, Homo Sapiens
ccactctagtccaacgaggggacagtgaggacggaagcccaagtggcacaaatgcagaaactccctctggtgatgatttcagcctctccttggcagatactaatctaccatccgaagtggagccagagctgcgcagtttcattgctaagcgtctttcaagaggtgcagtctttgaagggctgggtaatattgcatctgtggagctaaaaattccaggttaccgagttggttgttattactgccttttccaaaatgaaaaactgcttcctgaaacagtaacgatagactctgaacgtaacccttcagaatatgtggtctgtgtttttaggagggtctgaaaaaggacttgagctatatcctttctttggtttttgagaacactcaggaaggaaaacatgggaaggcaggtggaagaatattactaccaacctccaaaaagcttttctctcctcgttaagctt

SEQ ID NO: 168250 - DNA, 873 bp, Homo Sapiens
cctgtttgagctccctcagtagctcaatttctgttgttgtttttgttaattaaagattgattctttaaaggcacagaaacaatagctgatacattgcagtaaagtgttcatcttaggcatataaaaataattttgatctaacttctgaagaattgttgtcagccattctaattataatgtaggaatatcacagagcctactgtgaccagtgcttttgggcttagtttatattctagctgtaacaaaacccaaactaggctgtgcgactgtagcaagttatgtgactgaacaggaaatcagttcatttatcctcatataagcggagttggactaggataagtggttctccatgggggtgaggaggaaggattagtcatcacagagggagcatgtgacaaagtctggagatacttattgcttgtcactacttggtgggaagtggtgctaatggcatctattcagtagaggccaaggataatgctaaacatcctacagtgtacaggacatcctcccacaacaaagaattacctggcagtgactcagtttttttgtctattcaaatctaacctgtacttgtttgcttgaagatttttctttttctgcctggctccataagtctacctaatcaaaaccatgcttctgtcctactttatccattgtggtgtctctatcacctcatgcacatatcttgccgtttccaaactccatgccttcttatatcttctctttttggaatgtatttctgccacctcttatatttacaacttctccagacataatttttgtgttcccttagcattttgtgttaatttagactaatcatagttctttagtttcacacattcttatgtgtatttccttttattttctttg

SEQ ID NO: 168251 - DNA, 262 bp, Homo Sapiens
  misc_feature (21)..(21): n is a, c, g, or t
cctaccccttggctaatgctngggtcggattttgatttatatttatcttttggatgtcagtcatacagtctgattttgtggtttgctagtgtttgaatttaagtcttaagtgactattatagaaatgtattaagaggctttatttgtagaattcactttaattacatttaatgagtttttgttttgagttccttaaaattccttaaagttttagcttctattacaaattcttaaccttttttgcagagaagcaaagcaaata

SEQ ID NO: 168252 - DNA, 787 bp, Homo Sapiens; identical to SEQ ID NO: 86118
  misc_feature (14)..(14): n is a, c, g, or t
  misc_feature (162)..(162): n is a, c, g, or t
  misc_feature (447)..(463): n is a, c, g, or t
  misc_feature (643)..(667): n is a, c, g, or t

SEQ ID NO: 168253 - DNA, 142 bp, Homo Sapiens
agttaacacataaaattagccatcacattgtccttcagtaatcgcatgtcatttcccctaacaagtgacactaattcagttattatgacaaatggactcaaccagtttctgctattccaataaaccagtcaaggatgagtgg

SEQ ID NO: 168254 - DNA, 228 bp, Homo Sapiens
ccactctagtcattagtccagtgattaatgttaaacagttttacttataggatgatcttaatagattttcctttcaaagataatatggggagaattattttaccgtgtgtcttttgttcagaattgtatctgacacatttattttatcttatttttacttttgtcttaaaaatgcatacttagtcttcatttttacaataaagttatttttattaaatggaagagtgg

SEQ ID NO: 168255 - DNA, 1022 bp, Homo Sapiens
cggcctgctgtgctgcgtgttctgggggtgatgcctgtgctggtgggaggtgagtgttcacgggtgtgacatgctggtgtgtcgtgcggcgcgggtgggtctggtgtaccgtgacgtttgtgctgggttgagtgcacgccgcgcttgatagatgcatgcagggcgagggaagggcattcgctgggtgtgtctgtgctggttggcccccgataactgagctcttcaccttcaggaactgtacagctgggtactgtgcggcaaggcagatcatgcaaccattcatggcttcggtccatggaatgcccatcgtcgatgaatatggaaccatgatgacgatgctgtttctgttcttgtgatcaatcatgtcgtggatagcccttgctccactggagatctcagtgacctgcttgaattggggcccccttgtggaagctggctgccgcatctcgtccattcgctgctttccggtactgctgcagaaactcgttcagtcatcttggtcctcattcgattatggcgactccttcagagtcatcttcccgctgatcttctcctggaggtctttctgtttctgttgctcctcctcttcatccagatgggacctgcaagtcatagacagcttcttgatcagccttaccatctaccggcagctgctcctccctctgctctgtctccaactgcttgaagcggcgccagtcattgatcacaccttttgggccggtgttaactgagatgccttcgcctgccagctcagcctctgcaggcacagaactgcatggctggggcacatctgcctcggtccttgtcctcgtggtcactgtcctcatcctcactgctgctatagtagtactgcagtttctcccccagcaacttatcatcaagggtggtcatggtgtctgccctagctcgctccggatccctttgggccagcagctccgggcgccggaaggaatggagcactttcttaagaggaagagcagtgggtcagcgcctgagcgctaaagagaaaagccgccgaagcc

SEQ ID NO: 168256 - DNA, 300 bp, Homo Sapiens
agcactgattaagagccacctctacaaataacgcctgaacagcaggacaacacaggtgaaaacagacaaggctaaagtcaccttattcatctcacttatgcttgtcctcccctccagcctcaggcctgctgccattacagaatggaatcatatagaacccatcacagaaccctgatgagagaggtcgactctcactaccagcattaagttctgtgctcgggcagtctcaagaaacgaacagttgcagaaatgcataacttacgaggtttcttggatttcttttcctcggaagtatgtagt

SEQ ID NO: 168257 - DNA, 323 bp, Homo Sapiens
  misc_feature (25)..(25): n is a, c, g, or t
aaggtatgacaagcatctctgctangaggatgtaactctcataactcctgtgtaaaatgaggatcctgttggtgatcctcattccagtttccaaagcgagaggagccttctgagcagaagtatgcaagactgactctgtttggaacagtttcctatttggctgcattctaggaggcctcctgacttattcatagtattgtcgcctggtggcattggtgtggggtagcttgtcctgctacttgctaaagttctctttctttgagaaaactgaggaaccagaatgcttagagttcataaaataatctctagaccatgtacgagaa

SEQ ID NO: 168258 - DNA, 380 bp, Homo Sapiens
atcgagccggtaccggacttcttggtgtgttggttaaggaaactgctatagaaaccaaagttaccgtctcggaagaagagattctgccagcaaccagaggaatgaatggagactcttctgagaatcaagctcttggtcctcagcctaaccaagatgataaagcagatgtacaaacagatgctggctgcctttcagaaccagtggcttctgctctgattcctgtcaaggatcataagctcttagagaaggaggactcagaggctgcagacagcaaaagccttgtacttgaaaatgtaaccgatacagcacaagacatccccaccactgtggataccaaagagttacctccaacgaccatgccaaagccacaacacaccaag

SEQ ID NO: 168259 - DNA, 380 bp, Homo Sapiens
cgatagctcagcagcacatgaaatgagggagaaaagagagaaacaagtgcttcttcttaccaaacttctatataacttcaaatactttaaaaaaatttgcctaaaaggcattctgctgcctttctgaggcatgaacatttgggtgtcttctcaagaccaaccccgggcaagcaggtggcgcctgtgaaatggaaaacattcggaaaacagcagcccctcttcagctccatgtaacaggagactttctgatttccaatcttggctcaggtcagaagaaaaaggggaaaggttacattcctggaaagaaaatacagcctatttgagggcatgcctgactttcagtccatgcactagtgtgagcagcattgggtaccgagctc

SEQ ID NO: 168260 - DNA, 863 bp, Homo Sapiens
  misc_feature (322)..(331): n is a, c, g, or t
  misc_feature (572)..(696): n is a, c, g, or t
  misc_feature (698)..(700): n is a, c, g, or t
  misc_feature (714)..(729): n is a, c, g, or t
gtttcttgacaaatacatgccccagttcatgaaacatcttcattatagaataattgatgtgagcactgttaaagaactgtgcagacgctggtatccagaagaatatgaatttgcaccaaagaaggctgcttctcatagggcacttgatgacattagtgaaagcatcaaagagcttcagttttaccgaaataacatcttcaagaaaaaaatagatgaacaagaagaggaaaattatagaaaatggggaaaatgagaagaccgtgagttgatgccagttatcatgctgccactacatcgttatctggaggcaacttctggtggnnnnnnnnnnctcacgctgatggcttggcagagcaccttcggttaacttgcatctccagattgattactcaagcagacagcacacgaaatactatttttctcctaatatgctgtttccattatgacacagcagctcctttgtaagtaccaggtcatgtccatcccttggtacatatatgcatttgcttttaaaccatttcttttgtttaaataaataaataagtaaataaagctagttctattgaaatgcnnnnnnnnnnnnnnnnnnnnnnnnnnnnnnnnnnnnnnnnnnnnnnnnnnnnnnnnnnnnnnnnnnnnnnnnnnnnnnnnnnnnnnnnnnnnnnnnnnnnnnnnnnnnnnnnnnnnnnnnnnnnnannncaaaattgtgcggnnnnnnnnnnnnnnnnaaaaaaaattttcacaaaacccttttttttgggggcggcggggccccccaaaagagaaagggaaacgggggcaaaatgggtctcccaaagaaaacccccgggaaaagaaaaaaggggtggggatcccccccacc

SEQ ID NO: 168261 - DNA, 971 bp, Homo Sapiens
  misc_feature (668)..(668): n is a, c, g, or t
tacactataaacagtcgcttataaatcggctgtacggtccggaattccgggatatcgtcgaccacgcgtcgagactggggccgtggctgctggtcccgggtgatgctaggcggctccctgggctccaggctgttgcggggtgtaggtgggagtcacggacggttcggggcccgaggtgtccgcgaaggtggcgcagccatggcggcaggggagagcatggctcagcggatggtctgggtggacctggagatgacaggattggacattgagaaggaccagattattgagatggcctgtctgataactgactctgatctcaacattttggctgaaggtcctaacctgattataaaacaaccagatgagttgctggacagcatgtcagattggtgtaaggagcatcacgggaagtctggccttaccaaggcagtgaaggagagtacaattacattgcagcaggcagagtatgaatttctgtcctttgtacgacagcagactcctccagggctctgtccacttgcaggaaattcagttcatgaagataagaagtttcttgacaaatacatgccccagttcatgaaacatcttcattatagaataattgatgtgagcactgttaaagaactgtgcagacgctggtatccagaagaatatgaatttgcaccaanagaaggctggcttctcataagggcactttgatgacatttagtgaaaggcatcaaaaagcttcagttttaccgaaataacatcttcaagaaaacaaacctagatgcaccacgacgaggaacacttattgacaactggggaaaatgagaaagaccgtgagtttgatgccagttatcatgctgccactacatcgttaatctggaggcaactctgggggtttttttctcacgctgaatggcttggagagcaccttcggttaaccttgcattctccagatttgattactccagcgaccgccaccgaaa

SEQ ID NO: 168262 - DNA, 1021 bp, Homo Sapiens
  misc_feature (244)..(258): n is a, c, g, or t
  misc_feature (810)..(925): n is a, c, g, or t
  misc_feature (930)..(955): n is a, c, g, or t
  misc_feature (963)..(980): n is a, c, g, or t
ccaggaataagaactccatttcaaacagttctggccattctgagcctgcttttgtgattgctcatccattgtcctccactagaggggctaagcttgactgcccttagccaggcaagcacagtaatgtgtgttttgttcagcattattatgcaaaaattcactagttgagatggtttgttttaggataggaaatgaaattgcctctcagtgacaggagtggcccgagcctgcttcctattttgannnnnnnnnnnnnnnaactgatagatggtgcagcatgtctacatggttgtttgttgctaaactttatataatgtgtggtttcaattcagcttgaaaaataatctcactacatgtagcagtacattatatgtacattatatgtaatgttagtatttctgctttgaatccttgatattgcaatggaattcctactttattaaatgtatttgatatgctagttattgtgtgcgatttaaacgttttttgctttctccctttttttggttgtgcgctttcttttacaacaagcctctagaaacagatagtttctgagaattactgagctatgtttgtaatgcagatgtacttagggagtatgtaaaataatcattttaacaaaagaaatagatatttaaaatttaatactaactatgggaaaagggtccattgtgtaaaacatagtttatctttggattcaatgtttgtctttggttttacaaagtagcttgtattttcagtattttctacataatatggtaaaatgtagagcaattgcaatgcatcaataaaatgggtaaattttctgannnnnnnnnnnnnnnnnnnnnnnnnnnnnnnnnnnnnnnnnnnnnnnnnnnnnnnnnnnnnnnnnnnnnnnnnnnnnnnnnnnnnnnnnnnnnnnnnnnnnnnnnnnnnnnnnnnnaaaannnnnnnnnnnnnnnnnnnnnnnnnntttttcgnnnnnnnnnnnnnnnnnnaaaaaattttttaaaaactttttttggggggccgggccccc

SEQ ID NO: 168263 - DNA, 413 bp, Homo Sapiens
gcggtaccggccgcgtgcgctacgatatactgattggggttagaaatgagaacagttttatatagcatcgtcctctggtggtgcctagaatcctgaaatgtaacattgccaccataacccaaaaaaaagctgcttaccaagagtgaatagcatttaattcagtaaactttatttctactcactaaacacaatacagattacaaatccatgcaaatcacttgacacttttctaacaatttctcctctgaacaagtatgctaatattcctcccatcttcaagatactaattttaaccaaaagctaaaattttgttaacctaattctacaaagttctaagacccttaaacagctaacaagaaactaaattgaagaacatgaatgttttatttaagtttcttgttagcgcgtgctgt

SEQ ID NO: 168264 - DNA, 585 bp, Homo Sapiens
ggacagcacgcgctaacaattatacccagcactgtaagcatcaaaatacctttctgcatgactctttccagaatgtggctgctgtctgtgatttgctcagcattgtctgcaaaaatcgtcggcacaactgccaccagagctcaaagcctgtcaacatgactgactgcagactcacttcaggaaagtatccccagtgccgctatagtgctgctgcccagtacaaatacttcattgttagcgcgtgctgtcccacacttcgatcgcggagaaggcaaaggagttaaagatgatatctggagcagcacaactcacaatcgcaaagatgtggaaccaacctaactgcccatcaagcaatgagtggataaagaaaatgtggtatatatacaccatggaatactactcagccacaaaaaggaacgtaaataataccctttgcagcaacttggacggagctggaggcctattatcctaagtaaagtaattcaggaatggataccaaatatcatatgttctcacttatgagtagatgctaagtctatgatgatgcaatagacataagtatgatatagctttccgtctccctct

SEQ ID NO: 168265 - DNA, 244 bp, Homo Sapiens
aacaaggcatgatctccaggatgacgggatccaggaactcctcaggcacatcctgaatgatctcggccagcttctgcaggctggagggagcctgctggctctcaggctggtccccaggatcacagtcactttccatgggcaaggctggagcctgcagagccacatcctgaggcaggttctctgaggtgaccagcaggatgctgtctatcacttcctgggagcaggtcttgttagcgcgtgctgt

SEQ ID NO: 168266 - DNA, 968 bp, Homo Sapiens
agcaccaaatggtggagctctctgccagctcagcttcttggggcctctcaggtaaaggtgatgtttgaggaccccacgcccatatgaggggtggagaggagaagccagcagcactggggtgagccttggcctacacccttccttcttacccttcccccatcttcagtaaggccacagagaggatgtggggtggggaaggccagaatggtatcgtgtttcttggtttctgggcagtgggctgcgtcctcccaagcaggactgaagggttcagaatcgcttttcctcaggctgagaggttatgagcagctcctttgttcccgaagtcccaccaggccgtcatgtggaacgccatgttggttaagacaacagtgtactccaggatggcaaagatggtgtacactccagcctcacaatacatgttgtgccgaaagtagacagccagcgccgagaagaaggagatgaagttgatgatgaagagccgctgtttccagctgtaggacttgcgatctgtgtgcttcttggtcaaccgccagagaatgcaggtgaggagcatgtgcccgagggatgaggcaatgaacacaatgaaagcattttcgtggatggtgaagtcctcggaggaggagacataagtgagcactagcaacgcgaggttctccacgacattgaggccgaagttgaggcggcagagcgggcgatagcaggaacacggggaggtgcagctgaggtagtggttccagtaggcgaaggccaccaagaagcgaggcgccgagtgcaggccgatgcagaaacgccacaagtagcgctggggcacctccccgccgatggctgagctcaccgagggcaggtaattgggcaccccacagtgtgtggccgttgtctccttgaagtggaagagcagggaccagaggatgcagaagaggaaggcgacaagtggacagcagaccgtgaccagggccaccatggtgaag

SEQ ID NO: 168267 - DNA, 504 bp, Homo Sapiens
acagcacgcgctaacaatatgcaatatgtaatgaaagattctaaggatgttatatcctttaatctaataaacttacttctacaaatttatcctcagtgtttacttggacacaaagccccaaagacagatgcaggtagtccatcacagcttatatgtgtatataacagaaaacaaactatccagtagtaggagactggcctaacaaatgagggtatatctaaaaagtaaaatactatgcaaatcttcagactgataatgtatgagacagaaagttatttgttacatgatttgagaaatgattccaagataggtatagcatctgatttttaaagacatgtagtataggcatctatgtgttgtagatgcatacaaaaatgcctaggtcaatgccaaattttaggaattatctcaggttggtgaaattaagagtggttttttattccattttcagagatagggtctcttttgttagcgcgtgctgtcccacactgcgatcgaagtgtg

SEQ ID NO: 168268 - DNA, 741 bp, Homo Sapiens
gggactccaacgctgggtgacattgagctcaccagcgccaccgtccccggcgaagttctgcgctggtcggcggagtagcaagtggccatggggagcctcagcggtctgcgcctggcagcaggaagctgttttaggttatgtgaaagagatgtttcctcatctctaaggcttaccagaagctctgatttgaagagaataaatggattttgcacaaaaccacaggaaagtcccggagctccatcccgcacttacaacagagtgcctttacacaaacctacggattggcagaaaaagatcctcatatggtcaggtcgcttcaaaaaggaagatgaaatcccagagactgtctcgttggagatgcttgatgctgcaaagaacaagatgcgagtgaagatcagctatctaatgattgccctgacggtggtaggatgcatcttcatggttattgagggcaagaaggctgcccaaagacacgagactttaacaagcttgaacttagaaaagaaagctcgtctgaaagaggaagcagctatgaaggccaaaacagagtagcagaggtatccgtgttggctggattttgaaaatccaggaattatgttataacgtgcctgtattaaaaaggatgtggtatgaggatccatttcataaagtatgatttgcccaaacctgtaccatttccgtatttctgctgtagaagtagaaataaattttcttacataaaaaaccagacacaacacacag

SEQ ID NO: 168269 - DNA, 606 bp, Homo Sapiens
agcccatctccttctccttctctggatttctctgcccctggtacacctgcctctcattctgccacacctagcttgctttcagaagcagatctgattccagatgtgatgcccccacaagccttgtttctatgatgacgatgagatggaaggcgatggactcatagacccagggtatggagtacgtcccacctccctgctgggtcagtagcctctgggccagtggttgggggcagaaagaaggtcagaggccctgaacagataaagcaggaggtagagagtgaggaggaaaaacccgacaggatggatattgacagtgaagacacagattcaaacacatctttgcaaacaagggctagagaaaagaggaagcctcagctggagaaggacacaaagccgaaagagcccaggtatactcccgtgagtatctacgaggaaaagctgctgctcaagaggctggaagcttgtcccggtgctgttgccatgactccggaagctcggagactgaaacgcaaactgattgtcagacaagcgaaaagggataggggattaccactttttgactggatcaagttgtaatgccgctcttatgtttgtgcacgctgtccg

SEQ ID NO: 168270 - DNA, 371 bp, Homo Sapiens
tgctgatggctctcctggcaaagatggcgtccgtggtctgaccggccccattggtcctcctggccctgctggtgcccctggtgacaagggtgaaagtggtcccagcggccctgctggtcccactggagctcgtggtgcccccggagaccgtggtgagcctggtccccccggccctgctggctttgctggcccccctggtgctgacggccaacctggtgctaaaggcgaacctggtgatgctggtgctaaaggcgatgctggtccccctggccctgccggacccgctggaccccctggccccattggtaatgttggtgctcctggagccaaaggtgctcgcggcagcgctggtccccctggtgctactggtt

SEQ ID NO: 168271 - DNA, 724 bp, Homo Sapiens
gtacatcagtaacaaaaacaagatactagtttcaattctggagagggtaagagccagtagaatttggaaaagacagacaatgaacgatagacataatgaagtaaattatgtctattgttagcgcgtgctgtccggacagcacgcgctaacaaatggctgcctttcattaaccatggacatgagaagtactacaattgccggtcttggtgggtttgaaggtgcatttacagatgcaaagtagtcttggtttacttggcagcctcgaataacttctgatacagtatttatggtctcagtcaggatatcagcaggaaccccagtagccattaggatagtacaaagctgctgcaataacccacactggaacatagccttctggcagctactggtagcaccaggagggttggtgggagataccaatacacgaacaagctgtagcattagatgtagattggtcactttctgtgcagaccagccagaattttcatctccaacttcaaaccaaggtttcatacgttgaatatatgagccttctttaaaaaaattttgattggagttgttgttttttaataagttttggagcaaaatcaaacaatcttcaactactatacctccatcactgttcccctcctctgaaataatgtccagtagtctctcgaaagcattttcaaaagcaacaattttctggattgcaccattgcttcttgttagcgcgtgctgtccg

SEQ ID NO: 168272 - DNA, 884 bp, Homo Sapiens
  misc_feature (174)..(185): n is a, c, g, or t
agaaaaagtaatcacttcgcccagcttataaaatagttccagtttcgcaagatctgtaactttaaacagagagcaccagttgggcaatagaatgagcatttcatactgcataaaaattagtgaggtggtaagaaccatcgactatctcaggcattactacatggcgtatccaannnnnnnnnnnnactatacatgcaaggcacattgatataaaaatagatctctggccaacaaatatattaaataagcaaattaaaattttggctttgcgatattggcaacatcaaaatataaccagatagctttggcccacacatctttctcattcctccacctcatttggtgtttcccacccattatttggggttcaatcaccttcaagttagggtatgtgcttgagaaatgacttttcttcttgtcaagtagcattcactaaagttttcctttgctaagtaaaaagacaagagaaacagctggagtcttgattgatttgatttaaactaaatctgatgggttcagggcagcactatttcccctctatatacaaacaaaaaataagtccccagcttacatagacaaatgttttctaaaagatcagcaacaaatcaatgacaccacgtcctttaagccattcttcccaattcctctttctgaggcagagagagggaataatagaaacaaagctaagatttaaactatttcagtagtagaagacatttaaggccaaaaagtgtactattaacagaattcttatattcctaagttattgtccttcataggacaatatcagctaagaattagttacttgtattgattccctcccataaagaattttataatgcattcactcttgtagcgcgtgctgtcccacacgatcggtgaag

SEQ ID NO: 168273 - DNA, 446 bp, Homo Sapiens
ttagcgcgtgctgtaccggacagcacgcgctaacaaaaaggcagaaacagatactacagtagacctgaaaatattattgtagttttaaccataaactctaggagaatctctataagtagagagtatggaaaagctttatgatatcatatgtcagcttcactacatacccgaacttagtctgttgttaaatgtttgttagttatgcttttagctcagggcaagatcacaggtagctagcaatacaatctcaagaaggggctttagtcactgtttcattgcgggggcttttcctaatcttttcaaacaagtattttttaaatctcagggcataccacttctaagtagatgcttgagtgcttttaatagtatctgagtcaacttggggcattgcattaggaaagcccccgcaatgtgttcattttatcatccagggccgagctcgatga

SEQ ID NO: 168274 - DNA, 405 bp, Homo Sapiens
cggaccggaccgccgcgctaacaaaaacagacatcaccagagccaagaagttgggcttttatgcatgacctggttgtcgaacaatcttattactcaatatcataattaataaactgtttagcagccagtatggagggctttgcaaagaactcataaaggacacattcacaaaagcagtatgatgaacagttctgcttctaaatcaaggttttgtataacaaagtcacagaagagccttgattccagacacctgggtgacaaatccctcttaggatcagggaagtgagaggaaataagtatgggacattgaaggccacccaaggagcattacagcagtctcatctctagaatgacaggagttccacagttgttagcgcgtgctgtccggacagcacgcgctaacaa

SEQ ID NO: 168275 - DNA, 433 bp, Homo Sapiens
acagcacgcgctaacaatgatggatttaagttattaacagatcaaaaagagatggatggtggtttgcttttcttaatctatatcatcatctagatctatttaaagatatgtggcacactaacaaacttggttaaggtttcgataaaatcagtaaaaataatctgcccccgttacattgagtctgtatcgatcaataaaatcacttgtagaaggacggtactgttaagtactgacaatcccagccattaatattatttaacacactgttcacaatctttaacaagaacaaagaacagtttgtctcatgtgataagcaggaccttcatagaaactgtattctacaggcttctatggtgattttataaagttcaaattatacatccctcttttatcaaccctcaccaagttgttagcgctgctgtccggtaccgac

SEQ ID NO: 168276 - DNA, 517 bp, Homo Sapiens
ggtaccacacctcgatcgcggagaagccggcgggagcttgagatcaagtgtctgatcaaggtacttgaactcgatcttggagggctctggggagccatggaagatgctggataaaggagtgacagtcagctatgttttcgagatgactgtagaagcctgcctggaaggagtgaacaagagccaggagaccagggagggagcttgtggggcaggtctggagatggtgagggagggatcctgcttggatgaaaggtcttcagggactgtctcaggttacacacaggtgtcctcagagctagtgtgttcagagtcttgcctccagaatgaaaatgggaaggagttgtcagacgaggacatataaatggaggctggcatattcatgagtgctggtggtggtcccggtgtgggactactgtgggaacaggggtctctccatccagggatatgatggatggaccctacatcactccattctgcccttcctttccctcctcccattctccgcgatcgaagtgtg

SEQ ID NO: 168277 - DNA, 606 bp, Homo Sapiens
gatcccccacacttcgatcgcggagaaacagaatcaagggagcagaggatcttctgcctcaaagatgagctggggcagggcgcctgtcagcagcccatcgttagcacaaaagctatgccgggcacacaccagatccctgttaccctaaactggcctgtcacttggacatgctggcagagtcccccgacctgccccctcaacagtggatcacttgctgaaattgaaagcttgaccatctgtcgtggggaagacacggccatcaactggtgcctgaggcctcacacaagcccttatgtggaaaagacgctctgaagggccagttctttaggggaaagccagccctaccccagaagggagcctcagaaattctttcaaagttttcccctaagtaaaagccaagtgcctgaccctttcggattacagttccttaaaggaactgagaggagttagaaggaggagttaaaaatatccccacctgagagacagacatggcacacgaatttgggggatgacttatcaggctaagtttataaggcctttgtaaaccgggggacatgtgcacgtctgctggcctacggagaagatcgtctccgcgatcgaagtgtg

SEQ ID NO: 168278 - DNA, 544 bp, Homo Sapiens
atatgttagatctccttgctttgtccttacatttattcttttctagttcttctaaactcttgtagatttctatttcattttgcccattttcagagatagggtctcttttagttagcgcgtgctgtccggacagcacgcgctaacaacgaattgcagggatgtgagaatgaggggtggagaggcccttcaggctacactatgtgagaagttgaaaggactagagatctttaacagagaaggggcatacatttcatgtatttgaaaggaaatgacgcagacttctctttggttgttccaggggcagatctaaaaagggaaattacaggaaagtgaactttttaacaatcagagctgcccaaaaatggaactgaggcttgcggactgaatagctctccctccctggaagcattctggcagaggttgagtgccacctgtgagggagaggaataagggctacaccatgggatcaaggaagggccagaggaggaatgattcagtttggagataggaaaggcttgttagcgcgtgctgtccggggatcctc

SEQ ID NO: 168279 - DNA, 187 bp, Homo Sapiens
acggacggacagcacgcgctaacaaagaggaggccaggattaaaatatgtttccaagaaagtcaaatcttacaggagactcttgacttcacatctgctgacccctttacccgataggacctagagcagccattataaatctctgtacctgcttgctgcttttctacctcattgttagcgcgtgctgt

SEQ ID NO: 168280 - DNA, 206 bp, Homo Sapiens
tctatttgtgtcgttgcagtcttgaggatctggctaagcctctgcctacgcagtgagtcctgttccttctcctctccaggtcttccctctttaaccaacatttccctctctgctgattcttcctttctgccttcaaatgcaagtccctgctacctccaaccaggcgacttttcaaatgaatgaactgaagcaatttctccgcgcat

SEQ ID NO: 168281 - DNA, 744 bp, Homo Sapiens
  misc_feature (283)..(406): n is a, c, g, or t
acagcacgcgctaacaagagtgacatctgagcatcatttctgaagctctgcttcagaaaggggatgtttagtaagaaagaacaataataaatgctattcaacgtaaaacaaagtgtggggatccacagggttaacaggctggccggtaaccagtaacacaatgacggcaagcacagagaaggaaaaagtcagatcccctaaagaaaaacaaaggacagtatttcaaaagaagcctatctcacttatttggatataatattcaggccaggcacagtggtgcatnnnnnnnnnnnnnnnnnnnnnnnnnnnnnnnnnnnnnnnnnnnnnnnnnnnnnnnnnnnnnnnnnnnnnnnnnnnnnnnnnnnnnnnnnnnnnnnnnnnnnnnnnnnnnnnnnnnnnnnnnnnnattgttagcgcgtgctgtccggacagcacgcgctaacaaatactcgaggaaaacacacagaaccattcccattatgtgtatctgtataaccaggcttgcagccctccctctggtctccagtctaggtccccccacagcagggccctctccggaaagctcctgtctcccttcgagtccctgactttcagaagtcacaacaaacgcccatttttctgttgctagctttcctagtcccctttgaaaaggacaaaaatgtcgacaacacatataaccacatataagatggccaattgataggaaaaatgaccaacctcatcatttaaaaatgctgattggcc

SEQ ID NO: 168282 - DNA, 263 bp, Homo Sapiens
cacacttcgatcgcggagaagtgggaaaaagaagacctggagaatagggtgatttacacggcattaagtgaagcttgcaaaagtgagcactgagaatcaagagacctgcgtatgaatcaggaatggctgctcctatgagttgttagaaaggagatgatgccttcttttcatatctataacagcagcacctagcacagtgcctgttcaaagtagtgaactggaggtgagaaaacaatcaccctattctccgcgatcgaagtgtg

SEQ ID NO: 168283 - DNA, 1107 bp, Homo Sapiens
  misc_feature (16)..(16): n is a, c, g, or t
  misc_feature (36)..(36): n is a, c, g, or t
  misc_feature (64)..(64): n is a, c, g, or t
  misc_feature (66)..(66): n is a, c, g, or t
  misc_feature (69)..(69): n is a, c, g, or t
  misc_feature (96)..(96): n is a, c, g, or t
  misc_feature (109)..(109): n is a, c, g, or t
  misc_feature (156)..(156): n is a, c, g, or t
  misc_feature (191)..(191): n is a, c, g, or t
  misc_feature (197)..(198): n is a, c, g, or t
  misc_feature (205)..(205): n is a, c, g, or t
  misc_feature (234)..(234): n is a, c, g, or t
ataagaaccttttttnccgcatttagaacaaaaccnggacaatacccccgtgaagaaccataancnttncaggtgaaattttgaccaaagcaaggnaaaacttgtgttnttggccaaggtgaaccccaagccaccattgcggagatcaaagacctnttcattaagacccatccgcagtggtaccccgcccnccagtnnctccgcntggaccccaaggcaagtccctgaaggatnagatgttctacagaagctgcccgtgggcaccacggccacactgtacttccgggacctgggggcccagatcagctgggtgacggtcttcctaacagagtacgcggggccccttttcatctacctgctcttctacttccgagtgcccttcatctatggccacaaatatgactttacgtccagtcggcatacagtggtgcacctcgcctgcatctgtcactcattccactacatcaagcgcctgctggagacgctcttcgtgcaccgcttctcccatggcactatgcctttgcgcaacatcctcaagaactgcacctactactggggcttcgccgcgtggatggcctattacatcaatcaccctctctacactccccctgactacggagctcaacaggtgaaacttgcgctcgccatctttgtgatctgccagctgggcaacttctccagccagcatgggccctgtggacctgcggccggctgggtccaagacgcggaagatcccataccccaccaagaaccccttcacgtggctcttcctgctggtgtcctgccccaactacacctacgaggtggggtcctggatcggtttcgccatcatgacgcagtgtctcccagtggccctgttctccctggtgggcttcacccagatgaccatctgggccaagggcaagcaccgcagctacctgaaggagttccgggactacccgcccctgcgcatgcccatcatccccttcctgctctgagcgctcacccctgctgaggctcagcccctcaacccggtggcattctgggggaggagtggggcccacagctctccagcacccggaataaagcccgcctattttacaccaaccccacggtgcgttggcccaa

SEQ ID NO: 168284 - DNA, 1001 bp, Homo Sapiens
ggcctgggtggcgaattcggcacgagggcgagcgctgtagggagcctgtgctgtgccgcgcagttaggcagcagcagccgcggagcagtagccgccgtgggagggagccatgaagcattacgaggtggagattctggacgcaaagacaagggagaagctgtgtttcttggacaaggtggagccccacgccaccattgcggagatcaagaacctcttcactaagacccatccgcagtggtaccccgcccgccagtccctccgcctggaccccaagggcaagtccctgaaggatgaggatgttctgcagaagctgcccgtgggcaccacggccacactgtacttccgggacctgggggcccagatcagctgggtgacggtcttcctaacagagtacgcggggccccttttcatctacctgctcttctacttccgagtgcccctcatcgatggccacaaatatgactttacgtccagtcggcatacagtggtgcacctcgcctgcatctgtcactcattccactacagtcaagcgcctgctggagacgctgcttcgtgcaccgcttctcaccatggcactatgcctttgcgcaacatctgcaagaactgcacctactactggggcttcgccgcgtggatggcctattacatcaatcaccctctctacactccccctacctacggagctcagcaggtgaaactggcgctcgccatctttgtgatctgccagctcggcaacttctccatccacatggccctgcgggacctgcggcccgctggggtcaagacgcggaagatcccataccccaccaagaaccccttcacgtggctcttccctgctggtgtcctgccccaactacacctacgaggtgggggtcctggatcgggtttcgcccatcatgaacgcagtggtctccaaatgggccctggttctcccctggatggggccttcaccccaaatggaaccatcttggggcccaaaggggccaagccacccgcccacc

SEQ ID NO: 168285 - DNA, 503 bp, Homo Sapiens
gatcccctacaagagaagagacgagatgtctggagtgtggtgtaatcctgggtcaatgaatgcacaatacagggagaaaggtgaaacgtgtagaaacactggctgaatagatgcaggactggggagcgtgtggtttctgcctggagcagatataggtggtgatgccctttacaaggcaagatgagcgggggtgagtggggatagccttcttgggcaggtgagggagaacagtaccatggtccaatcaacccttgcccttttgaacacatgaagctggagatgtttgtcagatgtcacaggggcagttagaacctcgagttggaacacatgggacatgtctgggctcaaaaaaatttgtgagtcaccaacacatggatgctatgtaataccaagagaatggaagagatcacctgaggagagggctcagagagaaaagtggcccaggatcagtcatctcgtctcttctcgtattacaagagaagagaccgagattataaaattcg

SEQ ID NO: 168286 - DNA, 438 bp, Homo Sapiens
ctccatcaggtcatcagtatcaagtgctgaaagctctaactcgatatcctataaggtttagtatctagtcgcatcttctgtataatcacgtctgtaactcaccattacttagttcaattatccttgcttaaaagcgtttaaggtaaagtagacggccttcatccagggaaatccacttctgtatgcgatggccaaagctattggcctctctctgaacaagtaatgagttgctctaggcctgctgagagctcaaggctcaaaaggtccccagtactggaatcgctttctatgaccagataaatcagtaacaatgaatctgtccctttcaacatagtgtgctgatgatgtggcctcgttgccatatgaactccaccttgaatcaacagcattgacataagggacataatctgatacactgatgggacgaagatgcggcgt

SEQ ID NO: 168287 - DNA, 615 bp, Homo Sapiens
tcttccagagaacttcacagagtttgatctttgtctctatagcatgttcccgggtataatgatcatgtaatctatatcaataggaaatggatggtcttttgtccaaacctccaaacttttcttccaccaaacataacgctgaaaatatacaaggaaacaatcaagttttcgtttactggaacctctgtacaagtactggccacatgtgtccagaatagtgcatacgagtctaattctgaaaagatgctcaggtgggtccaggggaacttggagagccatcaggattaacaccaaatgaggtaaaagaatacagagttctgaaaataacagctgattccaccattcggtaattgtaaagttctcctaagaacttggcactgctgatgcgcctctgattaaatttaggttgattaacctccattcctaatcgaatatcttctaacactccatccacaacgtggatcccaacatcctgttggtagagcactagtcctgctaagaggttggcgacaccaatgaatactattatatttcacatcccagatgtctatcatacaccaaataacatagtctttcacttcttggtctgcccaggcagctttcgcatctgtctca

SEQ ID NO: 168288 - DNA, 1010 bp, Homo Sapiens
attgggtcttcggtccccccggccaaggccccttgatgggggggaccacccacggttcccccaatggttgcttcccccttccaatgcaaggaccccgttccacttcccacaattggcgatcctgggccccgagcccctgaagcctcagcccggggagtctgggtccactgaccggatgaactggcctggcttggacttgtcgctgtgcaggttgaagccatagccactgggggcccttcttcatggtacagagccgaggccgaagctcgcgctgctccgggtggctcttgtcggcctcgcgaggctcattttcgttgccagccccctgcacctcggcggcggccggcggctcggcctgccccggcgcttcctgggcgcgcagcagctcctctcggacctggacgccgagcttctgcagctgctcgtccgtctcggggtcgaccaccagcaggcgcacggcgttgagtgcggcgcggatgcggctcaccacctgctggtgggtctccttctccacgttttcgccgttcacctccaccagccggtcccccgccagcagccccgccttctcggccggcgagccgggctccaccagccggatgtactggcccaacttgcccttctccccgtgcaggtggaagccgtagccgttcggacccttctccaggcagcagagccggggcaggggcgccccggccgctgcgtccgcgctcatctcgccctgcgacgggtcagcggcgcgacttggggttccgatggggacgggacgggacggcccagcccttcttcccgtccagcgaaccgggagcgcagcagagaagccctgagccgccggacgggccaagcaagcaggtgtcccaggaaccgtcggccgccgcgagccgcgaggagccgagagaggaccacagaccaatccccgccccgcgcggcgtctgagcgtcccagagtccgccccggctccttaccccgggggcggggccgcgctgagggtggggacctccgcgggccaaaat

SEQ ID NO: 168289 - DNA, 1898 bp, Homo Sapiens
  misc_feature (1703)..(1731): n is a, c, g, or t
gggattggtctgtgctcctctctcggctcctcgcggctcgcggcggccgacggttcctgggacacctgcttgcttggcccgtccggcggctcagggcttctctgctgcgctcccggttcgctggacgggaagaagggctgggccgtcccgtcccgtccccatcggaaccccaagtcgcgccgctgacccgtcgcagggcgagatgagcgcggacgcagcggccggggcgcccctgccccggctctgctgcctggagaagggtccgaacggctacggcttccacctgcacggggagaagggcaagttgggccagtacatccggctggtggagcccggctcgccggccgagaaggcggggctgctggcgggggaccggctggtggaggtgaacggcgaaaacgtggagaaggagacccaccagcaggtggtgagccgcatccgcgccgcactcaacgccgtgcgcctgctggtggtcgaccccgagacggacgagcagctgcagaagctcggcgtccaggtccgagaggagctgctgcgcgcccaggaagcgccggggcaggccgagccgccggccgccgccgaggtgcagggggctggcaacgaaaatgagcctcgcgaggccgacaagagccacccggagcagcgcgagcttcggcctcggctctgtaccatgaaaaaaggccccaggggctatggcttcaacctgcacagcgacaagtccaagccaggccagttcatccggtcagtggacccagactccccggctgaggcttcaggggctccgggcccaggatcgcattgtggaggtgaacggggtctgcatggaggggaagcagcatggggacgtggtgtccgccatcagggctggcggggacgagaccaagctgctggtggtggacagggaaactgacgagttcttcaagaaatgcagagtgatcccatctcaggagcacctgaatggtcccctgcctgtgcccttcaccaatggggagatacagaaggagaacagtcgtgaagccctggcagaggcagccttggagagccccaggccagccctggtgagatccgcctccagtgacaccagcgaggagctgaattcccaagacagccccccaaaacaggactccacagcgccctcgtctacctcctcctccgaccccatcctagacttcaacatctccctggccatggccaaagagagggcccaccagaaacgcagcagcaaacgggccccgcagatggactggagcaagaaaaacgaactcttcagcaacctctgagcgccctgctgccacccagtgactggcagggccgagccagcattccaccccacctttttccttctccccaattactcccctgaatcaatgtacaaatcagcacccacatcccctttcttgacaaatgatttttctagagaactatgttcttccctgactttagggaaggtgaatgtgttcccgtcctcccgcagtcagaaaggagactctgcctccctcctcctcactgagtgcctcatccaaccgggtgtccctttgccaccctgcctgggacatcgctggaacctgcaccatgccaggatcatgggaccaggcgagagggcaccctcccttcctcccccatgtgataaatgggtccagggctgatcaaagaactctgactgcagaactgccgctctcagtggacagggcatctgttatccnnnnnnnnnnnnnnnnnnnnnnnnnnnnncatttgatttttggtaagagtgcagtattgcagagtcctagaggatttttgtttcctttgattacatggatttttctgggttgttacatccagggcatggcagtgggctcagccttaaactttttgtttctactccccaccctcacgaaatgggccaaaaacgggga

SEQ ID NO: 168290 - DNA, 919 bp, Homo Sapiens
  misc_feature (874)..(874): n is a, c, g, or t
cctgggtggcgaattcggcacgaggcctcgtgccgaattcggcacgaggctagacttcaacatctccctggccatggccaaagagagggcccaccagaaacgcagcagcaaacgggccccgcagatggactggagcaagaaaaacgaactcttcagcaacctctgagcgccctgctgccacccagtgactggcagggccgagccagcattccaccccacctttttccttctccccaattactcccctgaatcaatgtacaaatcagcacccacatcccctttcttgacaaatgatttttctagagaactatgttcttccctgactttagggaaggtgaatgtgttcccgtcctcccgcagtcagaaaggagactctgcctccctcctcctcactgagtgcctcatcctaccgggtgtccctttgccaccctgcctgggacatcgctggaacctgcaccatgccaggatcatgggaccaggcgagagggcaccctcccttcctcccccatgtgataaatgggtccagggctgatcaaagaactctgactgcagaactgccgctctcagtggacagggcatctgttatcctgagacctgtggcagacacgtcttgttttcatttgatttttgttaagagtgcagtattgcagagtctagaggaatttttgtttccttgattaacatgattttcctggttgttacatccagggcatggcagtggcctcagccttaaacttttgttcctactcccaccctcagcgaactgggcagcacgggggagggttttggctacccctgcccatccctgagccaggtacccaccattgtaaaggaaacactttcagaaatttcagctggttccctcccaaaaaanaaatacacacccacaaaaacacctcaacgaatgacataacaccaa

SEQ ID NO: 168291 - DNA, 953 bp, Homo Sapiens
  misc_feature (888)..(888): n is a, c, g, or t
gctggcggggacgagaccaagctgctggtggtggacagggaaactgacgagttcttcaagaaatgcagagtgatcccatctcaggagcacctgaatggtcccctgcctgtgcccttcaccaatggggagatacagaaggagaacagtcgtgaagccctggcagaggcagccttggagagccccaggccagccctggtgagatccgcctccagtgacaccagcgaggagctgaattcccaagacagccccccaaaacaggactccacagcgccctcgtctacctcctcctccgaccccatcctagacttcaacatctccctggccatggccaaagagagggcccaccagaaacgcagcagcaaacgggccccgcagatggactggagcaagaaaaacgaactcttcagcaacctctgagcgccctgctgccacccagtgactggcagggccgagccagcattccaccccacctttttccttctccccaattactcccctgaatcaatgtacaaatcagcacccacatcccctttcttgacaaatgatttttctagagaactatgttcttccctgactttagggaaggtgaatgtgttcccgtcctcccgcagtcagaaaggagactctgcctccctcctcctcactgagtgcctcatcctaccgggtgtccctttgccaccctgcctgggacatcgctggaaactgcaccatgccaggatcatgggaccaggcgagagggcaccctccctttcctcccccatgtgataaatggggtccagggctgatcaaagaactctgactgcagaactgcccgctctcagtggacagggcatctgttatcctgagaactgtggcagacacgccttggttttcatttgaatttttggntaagaagtgcaggtattgcagaagtctagagggaattttttgttttcccttgaattaacatggaa

SEQ ID NO: 168292 - DNA, 896 bp, Homo Sapiens
  misc_feature (24)..(24): n is a, c, g, or t
  misc_feature (161)..(161): n is a, c, g, or t
gtctcaagcgcccccgctctggtngggactaccttcctacgggagcggccgttcgcttgaatttgaagcattctctcgtgggcccgggggcaaacaggggggccccccccagaatcggccgccggccaaccggggcccctcagaatgactggagcaagganaaacgactttttcaggcaccctctgagggccctgctcccacccagggatggccaggcccgaaccagcattccaccccacctttttctttctccccaattactcccctgaatcaatgtacaaatcagcacccacatcccctttcttgacaaatgatttttctagagaactatgttcttccctgactttagggaaggtgaatgtgttcccgtcctcccgcagtcagaaaggagactctgcctccctcctcctcactgagtgcctcatcctaccgggtgtccctttgccaccctgcctgggacatcgctggaacctgcaccatgccaggatcatgggaccaggcgagagggcacctcccttcctcccccatgtgataaatgggtccagggctgatcaaagaactctgactgcagaactgccgctctcagtggacagggcatctgttatcctgagacctgtggcagacacgtcttgttttcatttgatttttgttaagagtgcagtattgcagagtctagaggaatttttgtttccttgattaacatgattttcctggttgttacatccagggcatggcagtggcctcagccttaaacttttgttcctactcccaccctcagcgaactgggcagcacggggagggtttggctacccctgcccatccctgagccaggtaccaccattgtaaggaaacactttcagaaattcagctggttcctccaaaacaaaacggacac

SEQ ID NO: 168293 - DNA, 731 bp, Homo Sapiens
gggcttctctgccaaccgctgtttcagcccctagctggattccagccattgctgcagctgctccacagcccttttcaggacccaaacaaccgcagccgctgttcccaggatggtgatccgtgtatatattgcatcttcctctggctctacagcgattaagaagaaacaacaagatgtgcttggtttcctagaagccaacaaaataggatttgaagaaaaagatattgcagccaatgaagagaatcggaagtggatgagagaaaatgtacctgaaaatagtcgaccagccacaggttaccccctgccacctcagattttcaatgaaagccagtatcgcggggactatgatgccttctttgaagccagagaaaataatgcagtgtatgccttcttaggcttgacagccccacctggttcaaaggaagcagaagtgcaagcaaagcagcaagcatgaaccttaagcactgtgctttaagcatcctgaaaaatgagtctccattgcttttataaaatagcagaattagctttgcttcaaaagaaataggcttaatgttgaaataatagattagttgggttttcacatgcaaacattcaaaatgaatacaaaattaaaatttgaacattatggtgattatggtgaggagaatgggatattaacataaaattatattaataagtagatatcgtagaaatagtgttgttacctgccaagccatctgaagacagcatgg

SEQ ID NO: 168294 - DNA, 771 bp, Homo Sapiens
cgggagggagcggtcgccgcgggatttggagctgcctagcctcgcggtcgctttggcagcatgtaagcagctgtttgccaagaacccaggtcactgctaagaaagggtgccttcgggagaagagtgtccagaggataccaatgccagatgcatctggagttacactcagcactcgcagtatgagacattgtgtgccagcatctctttccttctggcaaagactgtagctctccaggtaggaggatcctggaagctgtgagcaccaggagccttgccagaggaggatggggccagatatgaactctctaccatgaacatggatctcggcttatgaaggaattttaagtaaaacagttatttaatttccacatattcaagtcaaaagccttctgtgtgaagagccagtgattacccctccacaggagttatcaggatttttctggcaccaagtttaattcttcttcgtacttctggtagtgacagatctgcaggacagatttatctgttgaatgctcttgggcaggaaaaccatgtaaaacctctggaagcggcatcaggacagcagagcagagcccccgtcctcactgctcacttgcacagaaactccatctggactcggatgcttttactgaagacccatctagcttcaatcatctttagagtccatccattctggagagacctggcgtttgcagttgcctcctgtggccgtgtttttctgtcattctgttcccaggccttctattcaggcgaaagaagggtgtgctttca

SEQ ID NO: 168295 - DNA, 225 bp, Homo Sapiens
tataacataacttggttcccataaaggcaatgttacttctgcgatgcaagatctccattatgttgcagctggctgaggagctgtcaccttagaacaaggcgttgtctcacctgtcaagctggactcatcaatggaaagatccacagcctcaaacaagcgtaagtcagcaggaactctatccccaacagaaagcatactgtatcacctgtaccaagtatgtatccc

SEQ ID NO: 168296 - DNA, 1264 bp, Homo Sapiens
tataacataacttggttccaagatacattcctcagaaacagtctgaggacatgcatgcctttgtcactgaagttgcctacaaaatggagcttctgcaaattgaaaacatggttttgagcccctggaccctaatagttgctgttctgcttcagaaccggccatccatggactttgatgctctggtggaaaagactttatggctaaaaggcgtaacccaggcatttggagggtttctcatttggcctgataataaacctgctgaagaagttgtcccggccagcattcttctgcattccaacattgccagccttgtcaaagaccaggtgattctgaaagtggactccggagactcggaagtggtcgatgggcttatgctccagcacatcactctcctcatgtgctcagcttataggaaccagctgctcaacatttttgtgcgcccatccttagtagcagtagcattgcagatgacaccagggttcaggaaagaggatgtctacagttgctttcgcttcctacgtgatgtttttgcagatgagttcatcttccttccaggaaacacactaaaggactttgaagaaggctgttacctgctttgtaaaagtgaagccatacaagtgactacgaaagacatcctagttacagagaaaggaaatactgtgttagaatttttagtaggactctttaaaccttttgtggaaagctatcagataatttgcaagtaccttttgagtgaagaagaggaccacttcagtgaggaacagtacttggctgcagtcagaaaattcacaagtcagcttctcgatcaaggtacctctcaatgttatgatgtattatcttctgatgtgcagaaaaacgccttagcagcctgtgtgaggctcggagtagtggagaagaagaagataaataataactgtatatttaatgtgaatgaacctgccacaaccaaattagaagaaatgcttggttgtaagacaccaataggaaaaccagccactgcaaaactttaataatcaacaaatagttatggaaaattcggtcacgtaattactctcatcgaaggactcattacaacaaacaggggaagtaaaggaagagacacattcctctcatactcccctgagacttctgagaacagtggacgcagagggaagagatgatcattggaagcaatcagtttactcttccccaccacagtggttaaaaggcgtttgtatctgacactatgtgtgtgttttaaaataaacttttggaaacatgtttg

SEQ ID NO: 168297 - DNA, 136 bp, Homo Sapiens
ccgtataatgtatctgtctctactgtaacatcttttgaggtgtttggttagtgaatcagcagatctttatagaaacctgcatattagggactgtgggagatacaagatgatatgacagaatactagtgactaggga

SEQ ID NO: 168298 - DNA, 360 bp, Homo Sapiens
tataacataacttggttcctctccacttttagagccaatgaattaggaaaaacactttcttccttccctctctgtcattctatgttggcatttgtcccccttgggttgatgggcagacacaggtatgaaacccataacttcatctctctgggattcagtttctgggcagagtgggcaagggaggccagggtcttctagactcactaagtcagaagcatctcctcctgatctttggtttaatttttcttttgaaggtactcagtccatgatttcagattagggaggcaccacctggcaaagggggagcctgacaatgcagggcagttctaagtaccaggcttggaaccaagttatgttata

SEQ ID NO: 168299 - DNA, 376 bp, Homo Sapiens
tataacataacttggttcctgagtgtgggagtaatggcccagatggggtaatacctgggcactaccgggttctttatccagtgtctacctttgtcttgcataccctccaaagacctattccctcccttggaaagtccatgggttagtatctatctctgccaccatgtgctgtcttcgtcatacaacagggccaatccccactgtgctgggacaacctggccaggaaatcaagcatccccatccttctgagatgagcagtctcagctccaccagcggcaggcacacacacatcactgagcagcaattccggaccttgtcccacctcgttccaccctttagttagactgactttagggtggaaccaagttatgttata

SEQ ID NO: 168300 - DNA, 365 bp, Homo Sapiens
tataacataacttggttcctcttcagctcagctaccgatgagcaattgagtaggctttgcctttttggacttttgtccagagacctcaccaaaagtttctactggtaagtgggggaaaagggatttgtgtggtaggtggtgggaaaatgtggttgagatttctgtgtgtttgaagccaaacagctaaacacccacaagtggtaaattctgtggatatgtatgctcttagcttttttaatttataaagattatggtcctagatttttcagatgtgcttcgcttttgaatgtctgtatctgactaatgagggatgcaaaataaccaagaagttaaaagcgtaagatctggaaccaagttatgttata

SEQ ID NO: 168301 - DNA, 383 bp, Homo Sapiens
cggtatacatacttggtcataccataaagaactgtgagctggagagcaaggtgcttactagtggaagcatagctggtagcaggacaggtgcaggtgagtggttcagatgccaggtgccagtgaatcagagaccacttagagctcagtctcattggtctggggatgttgccaagcaggaaacaagatttgaacataaacctccagaaaactgaatagccttcccaggactaaagaggggagcatggtaggcatagtcaggtgtgggggctgccttgttcaggacagtgggcggtgaggacacaggtgtggctagagttgacagttaccttaatttgaacaagcaaactttctactagaaataaatggaaccaagttatgttata

SEQ ID NO: 168302 - DNA, 373 bp, Homo Sapiens
tagaggatccccaggactagtcttaaggaaggaatcaatttctttcgcaataagagcactggcaaagactacgtctgtacaaagaataagagccgactgagggcatgcaagaatatgtgcaagcaccaaggaggcctgttcataaaagatatcgaggatttagccggaagttgttgaaatggatgaaaacaacggactttagcttatagaactgaatcctcctaacccttgggacttacagcccagatctcctgaagagtaggctctgggagaagtacagataacatatctcactcatgcctgcattggacctcaagttaggagacaagagaatggtgtaagaccctgggataagactggtcctgggtaccga

SEQ ID NO: 168303 - DNA, 769 bp, Homo Sapiens
ccagtcttatgcagcacagatggaagactgaacgcctgtcaatagatgatagcccaacctaaattggctaggacttcaattctaaaaatcagtgtaccttagcactgcacagcacgaaataagtggcccttgcagcttccccgtttaacccactgtgctatagttgcgggtgggacagtcaaccttgctagtagtttatgatattgccctctttgtattcccatgttccacagttttttccgcagacttctttctgccaattattcagcctcccaatgcaaatgaatgatataaaaataagtagggtacatggcagagagtggtgcttcccagccacacaatgtgggaatttgacataggatgagagtcagagtataggtttaaaagataaaatctttagttaataattttgtatttatttattctagatgtatgtatctgaggaaagaaatctggtatttttgctttccaataaaggggatcaaagtaatggtttttctctcagttctctaagctggtctatgttatagctctagcagtatggaaatgtgctttaaaatatgcttaccttttgaatgatcatggctatatgttgttgagatatttgaaacttaccttgttttcacttgtgcactgtgaatgaactttgtattatttttttaaaaccttcacattacgtgtagatattattgcaacttatattttgcctgagcttgatcaaaggtcatttgtgtagatgagtaattaaaaaatatttaaatcacaaaaa

SEQ ID NO: 168304 - DNA, 509 bp, Homo Sapiens
ctctagaggacccccaggactagtcttaacaaaaacaagcagctctagtaactggtctaaagattcgcctctcaggtaacaatgcatactctccttagcaaaactaccaatcatcaagtccttgtgggtatttggtttgtccctctattctgtgcaattaatggctcattcagattttcagtgaggccacaaataagttccatccaatcaaatcatgactggattttctcatataactagtatgcataaagtcaagatgtaagacaaaatccattttaatattttatatctacaaatagttttagttataacagtgcaattcacggaagtatgtggttatctaattattttaacatgcaaaatccaattgggatagctaatccctttctacatggataaataccctcataaattagattggagaaataattggcatgcagtagccactttactgaacctcccacttcaacaaatgtaactgtaaaactctatttataagactggtcctg

SEQ ID NO: 168305 - DNA, 696 bp, Homo Sapiens
  misc_feature (555)..(563): n is a, c, g, or t
tgcgagatgcatacgggacgtcatcaatgtgttcaccgccttcgacagctgagagacaaaaagaagcccgtgcctctactactggatcaagattatgttaatttaaagaaccaaattataaggggcggaaagacgagttctcaaagagttgggtttctgcgtccatgtgaagcatcctcataagataatcgttatgtaccttcaggtgttagagtgtgagcgtaaccaacacctggtccagacctcatgggtagcctctgagggtaagtgactaagacttctcctctgcggtccaagcgctttggtgcagggacagcggcatcttcagccaatccagtgcaggctctccaccgaaggcgggctctagacgggtggtacgcacataacataaccatggccgactcctgctgtggttctctgacgattgtgcttcttgttaatcctctgtcgtgctttggtaatcgtattgattagagtcggtaactgtcttgacttgaattttgtccctttaaaactgctgtacctgtatgataaagatgcagtacctttctcttnnnnnnnnntgctatggaaagctgtgagtattgaagagacaaattggctgtgtcagtgtggggttatgtcatgatttctagaagccctgaacgtgcgtcttttgagcacgttgcatgacacgctctggtaaaggtatgcact

SEQ ID NO: 168306 - DNA, 776 bp, Homo Sapiens
ggatataaaataatataagaacttctggtttacaaaatgtaaaatcttaagccaatggaacccttgattacctacctcagtgtacacccaactatgggttgtatcagtttgtgtatgtgcaaatgtcaaataatctttggctttaatggctactgtactggcttggaaagattacctactattttatgataaaatgtagttgtctccagtagcttaaatataattggtaaagcactgggtttaaattttctctcatacctataaacagtatagcattaagggtttctattaatgacacagaattattggccaagtgtaatttcttaaaatttagcattactttaaatagccagcatgtaatacaagtaactacactacctcatatctacatgattttcaagttgtaatgcagatggacagataaaaaagattttacgtttgtcttttggccataagtgggaaagttttctgtatattgcatagcattacacatttatgcctattttaacattaacttctaaagaagttttttctaagaaaatgtttcaaggcaatattttttttgaggctgccgaagacaaatgacaggattatgagtatacagtgtatgcccttttccttcatgcagaattttgaaatgttttcagtttgtatattgcatattcacatgatcattggtcactattttatgaactggccttctcaatgtttgatgattttttaaagctgttatgttgaattcagtaaaataacattaccttaattttttttcctat

SEQ ID NO: 168307 - DNA, 407 bp, Homo Sapiens
tgccgagatgcatacccatcccaagaagtttcaaatatttacggtgatatacagagtaatgccacttcaacggcagcagctaatcctcaaactctgacttcatttataacatctctttcaaagcctccaccctcttgattaaacaccaaccagaaagtgaaggtttagtaggcaagataccagaacatcttccacatcagattgcatctcactcagtaacaaccttcagaaatgattgtaggagtcctacccatttgacagtttcttctacaaatacactccgcagtatgcctgcattacatagagcaccagtatttcacccaccaatccatcacagcctggaaagaaaggaaggcagctatagtagtctttcccctccaactttaactacggtgatgccagtaaat

SEQ ID NO: 168308 - DNA, 561 bp, Homo Sapiens
acagataacagagaagctgaaagaaaagcccaagaggaaacattctgtggagacatccttagcactccttgcaaactagcctgtctacaaccttatgtttggagggagacttgttcaacatcagcagcaaagtcatttcaggtccaaccattcccaaatagtgtaaggtcaagggatcctccaaacaagtgccttttccttaaggcaacacttttgggttctagtatgtagtaagagagcactggatcactcttttgttcaccccaatccttagttctgctttgacacttgctagatatcccatttctttgcctaaacacatctctgatgtctacccactccaggtctccatagcaagagaataaccaagcttgaaccaaagttatgtctgtataactgtaacattcttcatcttgatttctatctcctccagtttctcacaactccttccgtgtcggtacaagccccagtccagcaccatactctgccctaatcactctgccctccatgccatcctctccagcagagtcaatctctaagtgttcctgtcggggtcctcta

SEQ ID NO: 168309 - DNA, 716 bp, Homo Sapiens
tgctgcgtgagggtgactctagaaggatcccctgcgagatgcatactgaaattactgatatgccgatctatgggcaggtcagtttgctacaatagagactaattatcacatgctatacggtccatgtcaaggtgctaaaagcactttagttcccaagtatagtttagttccctctcccccacaccactgatgtgtaccatgttatcttcagttacaatgcaactaaaggaaaccacacaactgagtcagatataccaaagaatcaagttggcactttttatctgagaactgcaacagaactgaatactgcctgacaaattacagctctaaccccacacccacacagtttggatgtaagctagctttaccatacaagtgtaaggtgctgcactgtaatttcattgtcagaaatgtgatgccagaatgcccacggaataaaagtacatacaagtcaccaagttagattatattgcttgtaacctacctgtatgcagtcggcaatgagaatcttggagcaagcaggaatactacatccgggtcctaatgtccattgccatttgcggtactacgttcctcacagttacgcactgcagaaatgctggctaaatgcagttatgtagcaggccactactttaatagtgcataattgcagtccaagtacaccagaaaatactccgccggaacttagtggcttcccaagaaaagccaagtatctc

SEQ ID NO: 168310 - DNA, 407 bp, Homo Sapiens
  misc_feature (176)..(201): n is a, c, g, or t
aatgcagtattcgtagaaggcaagtcatgccttatcagagtataaaaacactacagtggtcctcagccttgatgggtcaacccttcttagtgtgaattttgttaacggcctgtgtctgaagtacctttctaggcactgcaaactttctgagtgtttcccttcaggactctatgttnnnnnnnnnnnnnnnnnnnnnnnnnncacttctgtatttccatggaagtgatttttaagaaaaacaaataataaaaatgcatgacttttgggttgccatatcagggcaaaaataaaggaaatagtgcctagaaagggattgtgaaggcagtggcaccctctgcaaatggcacctgttgctacaggtgcaggatttctgggagaagaagaggatttcttcctgacaggcaggt

SEQ ID NO: 168311 - DNA, 348 bp, Homo Sapiens
cggggagacaatgagtaaactgaagtgattaggattgtccagtctagtcagaaagtatattactaaggtggccataaatgtagtacaacaagtagaccctaagatgaaccctaatctccgttttctggtattcacacagtagtgggttatatgtaggttctatcccttgccattctcactccacctgagaatttaggtagccccccactgtgtaccatagccttttgtacacccctttggtagtacttactacatagaggtgagatagcctacttctttttctacccttctagaacattgttagcttcttgaaatcaagagctgtattatttactcattgtctccccg

SEQ ID NO: 168312 - DNA, 307 bp, Homo Sapiens
aaagcgctttaatttccaaatccccatgtaacagggaataaacctgtctttcctcactaaataaaatgaggtaatttcaccctgacaagaacacagatgggtggaagacagtcaatattcataattgcaatatacaaaattttgtgttctacctggattctttgtagttccatattgagtaggccaataagaacatcctcttttctttagcaatttgcctaacatttgatacaagccatttccaaatacgtttttggtgtgtatcaaacttgagaaactaggagctctggaaattaagcctttgcaa

SEQ ID NO: 168313 - DNA, 375 bp, Homo Sapiens
  misc_feature (209)..(209): n is a, c, g, or t
ttgcaaaggcttaatttccagaattacaatgcccttaaaaagtgcatgcacaccaactacgattatgcatcctaccctgtgtattcagctagggtccgaatgaattgccatatacaaggagaaagctcagtgcctttggctggcttggtaacattttcctagtaaccaattgaaatttccaagataaaaactccggggaaatcctccanctaatgacatggagccttgttctatttctgccttagttacctatcaattttatctcctgaaagagttccaatctgctagaacatgtgtttttctgtgatttttccagcagaggagactctaatctaaatcctgtcatttacagaggaatggaaattaacgcctttg

SEQ ID NO: 168314 - DNA, 816 bp, Homo Sapiens
  misc_feature (92)..(92): n is a, c, g, or t
ctccccagctctgtggggtaccactgtctccttcaccccttgaggcgtttgcccctgccatcctggtggtacctatctctaccccacacttntctgttccccgctgttccatctctgtccagagcaaatcctctgtcctgcttattttctcttgcagagcagctcaagctttgcattcccatttagcatcttgggcccaaggtcttctctccctcaacgtattttcacaaacagttttctttataagaggaattctgctgtctgccctcaagatcatagacctttttaacttgtcagttgcactgagcagctgggcctcctgggtcttgggtcgcatccatcttggtcctataggagcgtgtcctgagcaactgcagcgctgcctccccctgcatcccttcccccttgtgttggaaattgcatttgcttcttttgtgggttatttcctgccagtcccagcttgctggctgcagatgctggcagaaagtggctgcagatgctggcagaaagtggctgcagctgacaaccttcttcaagttcacatctagtagttttctctgctccttggacaccccccaggcagctgcttgcggcctgaattgcagcctctggtgaccagggtcagtggctgtttcttgtacccacagagatctgacggatacagagatttagaagctcaaggccagaggccaactttttaccaaaattctctggtggcccacacccttctgtgtggtctgctatgcagtaaaggcttaaccttgcccaaagaaagatcgggccctttatcctcagctcctgggcattcatctctcc

SEQ ID NO: 168315 - DNA, 526 bp, Homo Sapiens
cttcttcaccagctaattgtgggctgacctatgtcctaaggacacactaatcgaactatgaactacaaagcttctatcccaggaggtggctatggccacccgttctgctggcctggatctccccactctaggggtcaggctccattaggatttgccccttcccatctcttcctacccaaccactcaaattaatctttctttacctgagaccagttgggagcactggagtgcagggaggagaggggaagggccagtctgggctgccgggttctagtctcctttgcactgagggccacactattaccatgagaagagggcctgtgggagcctgcaaactcactgctcaagaagacatggagactcctgccctgttgtgtatagatgcaagatatttatatatatttttggttgtcaatattaaatacagacactaagttatagtatatctggacaagccaacttgtaaatacaccacctcactcctgttacttacctaaacagatataaatggctggtttttaggaaa

SEQ ID NO: 168316 - DNA, 449 bp, Homo Sapiens
gttaattccaagtacttcatcatgtatgtaacctatccatgtttgcttctgataaatggaaatgtaggttcactgccacttcatgagatatctctgctcacgcttccaagtagtcctcaatgacattagcccaaagttgggtatacccattcatcccctaggcatggtaaatcttgtgttggtccctgctgtcctccgtattacgtgaccggcaaataaatctcatagcagttaatataaaacatctttggaggatgggagagaacaggagggaagatgggaaacaaaatagagaattcttaagattttgtttaaaccaaatgtttcatgtagaatgcaaaatgttggcacgtcaaaaatatgaatgtgtagacaactgtagttgtgctcagtttgtagtgatgggaagtgtattttactctgatcaaataaataatgctggaataccc

SEQ ID NO: 168317 - DNA, 1438 bp, Homo Sapiens
  misc_feature (1352)..(1352): n is a, c, g, or t
atttcagccaaagccatagaagaaaaagcaatagttgcttgaattatgatcatctaccaccaactctgctcagccctgtaacagggtagggagagggtataacaggaagagctttgacttgtccctgtctatacattctctgtatcttttgggggtaacttcttggcagtttttcagtgttcagccatgtcagttgaaactagatttttctgtagattttttacttacccatgtgagcctaacactatcctgtaattcattttctcaggctatgtgtaaatgtagaaccctaatttttctataaaaaaacaaactaactaactgtgtaaagaaagaaaaagggaagtaccaatgggtttttccaccttatttttacctttgatctacccttgcagatttaacctgtcttcttccctcccattattctcattttccttttacctttctccaccatccagagccacaaaagcaaaccttctacctcctacctacttttctctgggacaaggataaaggaatatgattttccagagccccagagccagctcatcttccaggtgctgaaaccactttccaaataaactaaagcctggatttgatattacaaattttgggaaatcttagaataaagaacgagaacaaggaagtcattggctagtataattaagaaaggtaggattcagtgcttaccgatgatgcagtacttgatagaagaaaacagtctgggaggatagcgctcatttttcagttaccctttaaggagtccctttgtctttgggaaagtagcagaatggtccgcttctttcccatgagtggaaaatgtggcttgtccaactctcctccaggttgcatttcagtttctttccaaaacttattacctcccctaatcctgagactttggaaaaggtggaaggaagaactgttgctttatctccccctccctgcatgtgtcaacattgtgatgtcagtatttactaatctacattcagtggctgtacaaataacagctgtagtaagaagagattcaggatgctagaggtgaatatttgggtcatttacatgtacactacatagcaagttgatactcatgttgcatgttcttttaaattagtgattttgtgtcttaagtctttaacttccaatacttcatcatgtatgtaaccttccatgtttgcttctgataaatggaaatgtaggttcactgccacttcatgagatatctctgctcacgcttccaagttgttctcaatgacattagccaaagttggggtttgccattcatcccctagggcatgggtaaatcttgtgttgtttccctgctgttcctccgtatttacgtggacccggcaaantaaattcttcataggcaggttaattataaaaacatctttgggagggtggggaggaggacaggaggggaaggtggggggaaccaaat

SEQ ID NO: 168318 - DNA, 633 bp, Homo Sapiens
ggtaagctacttggtagcaagcaagcttgtagttccctcttcttggtttccaaggggaagtaggcaaagaagttattacctttgaagtgtgcagtttaggcacaaggcacagtccaagcaaggttcatctgaatcttaagtcctcacttcttggccaccatcctccactgctaagaccatccctgtgagtcctgcccctctcctcccccggtccatattcactgctactcaatgaggccaaaggaagccaatggtcgtggccccaagaggatatatcttcccctcctaagaatctttctcatacatctcaattctgagatacagattgagaagcacctcagcaaatccactgcatggaaggcaaaacaaccttgatccacagcaatgaccacaagcaagggaagcctggctatgagcacagtcataatgtcgttcaagtttggagattcaaagcatagcatgtctacctgaacatcctcagatcctgctgacatcaccagtggaggtcctctgctgattgatataaatcattttcaaatccagcaatgcattgatgactgttaattccatgctcctcaaacttgcccagaaatgcctctaataggtaagagaaagagaagacacctcagtatg

SEQ ID NO: 168319 - DNA, 417 bp, Homo Sapiens
ttgcaaaggcttaatttccatgctctatctcctggtgtctttctagggcctcccagcctctgatgttttccgctttagccactgtgctcaccccctggacttgaccggattctgctttcctattttgattctgtgagccccatgttctcagtcttcagaaatttcctctgttagacattttattttggactcctcttagtatccacaccagctccaggtgttggatcccattcagcactgatgcttagctgccaccataccagaagagaacagcacaggggcgtatggaaagcaatcagagagtccttgggctttaatcctgactttgtccatttctagttgtatgattataggaaattgagtaatctttccatgactcggtttcttttctggattatgtggaaataagccttgcaa

SEQ ID NO: 168320 - DNA, 236 bp, Homo Sapiens
ttgcaaaggcttaatttccattcaaacaaatttccaaactaaagagcagaacaagattaagaatgacattaatactgtcattctccagtcccactaatttcttctcttttaaaactataaagattttcagaaagaaaatatttttaaaaacgcaatggaatagaatcctgccctgaaaccagagaaccagtccaagcacctggtctggtggaattaagccttgcagggtcctctag

SEQ ID NO: 168321 - DNA, 359 bp, Homo Sapiens
  misc_feature (255)..(255): n is a, c, g, or t
accctagaggatcctgcaaggcttaatttccaactaaagtcacattctgaggtttcaggtagacatgaagttttgggggacaccactcaacccattgcagaacccattagcagtcacttcccgttcctcaacgccccctaccccagggcaatcagtaatctactttctgtctgtttggatttgtctattctgaacatttcatataaatggaatcatagaatatgtggtcttttgtgactggcttctttcacttanacatgttttcaagatttatgttgtagcatgaatcagtactttattaactattttatgggcataacaaattccagttggcatcggacaattaaagcctttgccaa

SEQ ID NO: 168322 - DNA, 911 bp, Homo Sapiens
ggacgcgtgggtcggacgcgtgggtcgcggacgcgtgggtcgacccacgcgtccgaagaagttgagcaacttgaatgcagacagaaataaattagtgtccttaccaaaagagatcggcgggtgctgcagcctcactgtgttctgtgtacgtgacaacagactaactcggatacctgcagaggtgtcacaggcaacagaacttcatgtcctggatgtggcagggaacaggttgctgcatctacctttatccctgactgccttgaagttgaaggctctgtggctatctgacaaccagtcccagcccctgcttacattccagacagacacagactacaccacaggagagaagattttaacctgtgtcttacttcctcagctgccttctgaacctacttgtcaagagaatctgcctcgctgtggtgcactggagaacttggtaaatgatgtctctgatgaagcctggaacgagcgtgctgtcaacagagtcagtgcgatccgatttgtggaggatgagaaagatgaagaagacaatgagacgagaacacttctaaggcgagccactccacacccaggggagttaaagcacatgaaaaagacagtggagaatttacggaatgaccatgacatgctgctaacaggactggactcaaacaaaaaccgaggtcacatcatgccattgaccgagtgaccacttctgtgtacgagctttcacctccaagtttttacctcctgtggtctttcctctgctgttcgagaccgttccctgtctgcttcccgggagcctacacgtgctccttgtcctaaccagcccccgcgcgccatcttcccgtgaagtgtggggaacctagtgtctccccggtccgtgccttactcttccggcatccagtcgcgccccgtggtctccggcagta

SEQ ID NO: 168323 - DNA, 329 bp, Homo Sapiens
caggcccaagcagttcatcccgcttcattgtatctctcagataagctcacagcccaaggttcttcaactttggtacaagacctcacaagaagaggcaaattttgcatatgtagaaatctgtgttaaataaaatacaggatcaagccaaggagcatgaaatttggagttggtgctgacagcccctcattcctgtcacttattaattttatttccctcctcagcttgtgtcattgcctaaaaattatttaaacacaggttttcatatgctgtgatttaactctttataacctttagtaccacatgggaattagtaattactctcagtactg

SEQ ID NO: 168324 - DNA, 488 bp, Homo Sapiens
tcttctccgaagagcaacatctacagtatagatttcacccgcttcaaaattcgagatttggagacagggacagtactttttgagattgccaaaccttgcgtttcaggtaggcctctacgatgtggcgaccactagacagttttgagccaaaggtctttgaaactcaaatctttgtgtcccactgaatcctgtatcatggactccagtgtgtcccacttctgtgacctctccccgtggcctggtctgccaggcatggtggtttgaagctgcgttcagaggctgatgtttgttggatgtctattctgtgctggtcactgtgttccacgtctttgtgcacatcagtgtatgtaatcctcacacctctttgaggaattactgttatctctgtattacagcgaaggatctgaggcctacaattcccaggcgcctcttacctaaggcactgtgctggttcatcttaccatgttgcctttcggagaagatcttct

SEQ ID NO: 168325 - DNA, 728 bp, Homo Sapiens
ggcgtcatgctgaggcgactctcagaggatctcctcttctccgaaaggcaacattaatgcaaaagtccccagatggcaatacaaagtatcccctggtaccacatatattcatttgtgagtttggatatagagcacattatctaaaccattttgtagttccaaaaacccatctaaatttcttgagttcctgaattttgaacaggattacctggagcctggagccactttaagttgtacttctgactaaactggaattatgagtgaggaagagtgtttactaaataaatgactggggcaagcaaaattgaggaggaaattagaaactgtttgacaaactttaagagctacttgaaataacagaagtcttgattaatatgcaaataatggctagaaagtatggtttaactggaccctattatgccttttaaaaataatttcagtaacccataaatacatgttgtaaaaaattcaaatatacagaatggaataaaaaaatgatctccctttattaccctcccaaaggttaccagcgtttgaatttaataatgtatattctttcatgcttttttctgtgcacttacctaagtgtgaatatgtaaagggtttgttttgtatacaaatgggattatactaaaataagtaatgcctatttttaaggataggttaaatttgtgaatgatcatttcaaatatattgaataaaataagcaaaagctattgttatttaca

SEQ ID NO: 168326 - DNA, 242 bp, Homo Sapiens
gggtgatccgaggattactcttctcgaaaggcacattaaaatcttaggataaaataggaatacatgcccactggtcaggagttctcctgggagcaaatattttaatcacaatcaataattacaacagtaatagtgaaaactgaaaaaattatagtgaaaaaaatcttaacatttcctttatagtaaggtaggtagttggtgttttacttcagtggtactttcatgttgcctttcggagaaga

SEQ ID NO: 168327 - DNA, 322 bp, Homo Sapiens
tccctcttctccgaaaggcaacattgatagttagattcaggtccaggctgtaagtctagaatttagatatcctgatcccccagataccgctcttctggttatacacagaccagctataatttgctaaacataaaatattgcagtgtattagccagctgtggctccagagtctgtgccctttaccaccgtgcccaactgtttcacatgctgtgtttggtagtttttcctagtactctccttaataatggtggtgtttagcaaattgtattacataaataaatatttatttcatggattgagttatgttgcctttcggagaaga

SEQ ID NO: 168328 - DNA, 344 bp, Homo Sapiens
tcttctccgaaaggcaacatccaccatgcaggtgtcacacagccaggtccaggagccaggtggcgtcccccaggtgttcctgacagcatcatctgggacagtgcagatccctgtttcagcagttcagctccaccagatggctgtgatagggcagcaggccgggagcagcagcaacctcaccgagctacaggtggtgaacctggacaccgcccacagcaccaagagtgaatgatccgcccgccgcactggacagatggcccaagggatggcaccacttatttattgttgccttttcacgttttcatttacacacacgttgacgggccgaagaagggaggccggga

SEQ ID NO: 168329 - DNA, 390 bp, Homo Sapiens
aggattatcttctccgaaggcacactaaagataagaccctagaagtcagaacatctgtattccaaggccaccccttctccttttagtcatgtgactttgggcaggtcaccctccctgtctgtaaaatgaggttggactggataatctttatgtgccctttccttttggcttaaaattctgtgatttattcattcttaggaagatcagcatatttattgggatttctgcttcaaaaattctttctaacctcaaaaatccaagtccagaattttttgttttcttctggatttaaactgtttaatatgagcacatcaaggttgacttctcatccttttcgggaagtgaatttaatattgagggtaattgaatgatgttgcctttcggagaaga

SEQ ID NO: 168330 - DNA, 318 bp, Homo Sapiens
gggacagatggaagcacagttggaggagaagaatcaagaactgcagcgggcaaggcaaagagaaaaaatgaacgaagaacataataaacgtttatcagacactgttgacaagctgctttcagaatctaatgagaggcttcaacttcatcttaaagagagaatggctgctttggaagataagaactctcttttaagagaagttgaaagtgcaaaaaagcagttagaagaaacacaacacgataaggatcagcttgtcctaaacattgaagcactgagggctgaactagaccacatgtgccctttcggagagataagtcc

SEQ ID NO: 168331 - DNA, 246 bp, Homo Sapiens
cttcgaggattctcttctcgaaaggaacattcacagcacatcaagcccaaaatagtttacaccttctacactgaagcatggtttaaaatgtacctggctagatcacccttacaggagaggctaaataaggcatgctttagacagtcattgtggtgttgctcacttgaaaggggagagaaccaaagaggtccaagcagaaaattttagcaggtcatgttgcctttcggagaagagggtaccgagctc

SEQ ID NO: 168332 - DNA, 400 bp, Homo Sapiens
  misc_feature (148)..(160): n is a, c, g, or t
aagtgcagtaattgttataaaattaatcagtgcagccaacattatttatgaatcacatctttgaaactgtgcagtagcatatacatatatatttttaaataacatttttcacagttttccagagttactgttgaaatctgcatcaccnnnnnnnnnnnnngcaagatttttttaacaatgtagacactcttcagacccagtaatctgcgtgtgatttcctatttgtagattcccaagagactttagcagtcaccagccttaatgcatgtacaggatattattgtgacttaatttatctgcagtttttaatccatgtgaaattggaatttataaacggacttggattaaacatgtctgcctttctaaggttgcaaatgttacattaaatgatttatgttgt

SEQ ID NO: 168333 - DNA, 812 bp, Homo Sapiens
  misc_feature (781)..(781): n is a, c, g, or t
caacgatgccctgggctatgtgacccgctggaccgtgagcctcgtccggcgctgccaagaagaggctgctgctcttctcagatggcaactcgcagggcgccacgcccgctgccatcgagaaggccgtgcaggaagcccagcgggcaggcatcgagatcttcgtggtggtcgtgggccgccaggtgaatgagccccacatccgcgtcctggtcaccggcaagacggccgagtacgacgtggcctacggcgagagccacctgttccgtgtccccagctaccaggccctgctccgcggtgtcttccaccagacagtctccaggaaggtggcgctgggctagcccaccctgcacgccggcaccaaaccctgtcctcccacccctccccactcatcactaaacagagtaaaatgtgatgcgaattttcccgaccaacctgattcgctagactttttttaaggaaaagcttggaaagccaggacacaacgctgctgcctgctttgtgcagggtcctccggggctcagcctgagttggcatcacctgcgcagggccctctgggctcagcctgagctagtgtcacctgcacagggccctctgggctcagcctgagctggcgtcacctgtgcagggccctctgggcttcagcctgagctggcctcacctgggttccccaccccgggctctcctgccctgccctcctgcccgccctccctcctgcctgcgcagttccttccctaggcacctctgtgctggcgtcccaccagcctgagcaagacgccctctngggggcttgtggcgcactagcctccctcttc

SEQ ID NO: 168334 - DNA, 686 bp, Homo Sapiens
  misc_feature (13)..(13): n is a, c, g, or t
  misc_feature (96)..(96): n is a, c, g, or t
attcggcacaggnccggccctccctcctgcctgcgcatccttccctaggcacctctgtctgcgtcccaccagcctgagcaagacgccctctcgggnctgtgccgcactagcctccctctcctctgtccccatagctggtttatcccaccaatcctcacctaacagttacttaacaattaaactcaaagcaagctcttctcctcagcttggggcagccattggcctctgtctcgttttgggaaaccaaggtcaggaggccgttgcagacataaatctcggcgactcggccccgtctcctgagggtcctgctggtgaccggcctggaccttggccctacagccctggaggccgctgctgaccagcactgaccccgacctcagagagtactcgcaggggcgctggctgcactcaagaccctcgagattaacggtgctaaccccgtctgctcctccctcccgcagagactggggcctggactggacatgagagccccttggtgccacagagggctgtgtcttactagaaacaacgcaaacctctccttcctcagaatagtgatgtgttcgacgttttatcaaaggccccctttctatgttcatgttagttttgctccttctgtgtttttttctgaaccatatccatgttgctgacttttccaaataaaggttttcactcctcaaaaaaaa

SEQ ID NO: 168335 - DNA, 158 bp, Homo Sapiens
catccatacctaaggcacacaattaataagaaaaatacatttactgttagtgaaaaatacaaatggtaatccatacttcatggaactacgggcttcttccatggggaaaatggacttaacattcagatgtagcctttcggagaagaggtaccgagctc

SEQ ID NO: 168336 - DNA, 288 bp, Homo Sapiens
gtgctctagaggatctctcttctccgaaaggcaacattcctgcatccttcagtctttctatattcagtgcaggcatcttctcctccaacaaaccttcctcagtctgctgggatgctgcagtagctagcatccagcttctatttctaccataactgcatgatggttgttgattttcttggctgtctccctggctggtctctaaatcctttcagacaaaacccgtcttcctcaactatgtagttcatggttttcctcaactatgtagttcatgttgcctttcggagaaga

SEQ ID NO: 168337 - DNA, 248 bp, Homo Sapiens
ctgtattctccgaaaggcaacatagaaacatagttactcccagttcagaaactatactttgcctagaactgtttctctgaaaaactgagggcccttatgattccttagattacatgacaaccaccagaaaaatatattcatcttaccctaaagtccaagagacacttccagtcacatataaacccacatcagatggaaaagaaattaaggatgatgttgcctgttcggcagcaagagggtaccgcagc

SEQ ID NO: 168338 - DNA, 294 bp, Homo Sapiens
gaggatgactcttctccgaaaggcaacatcttcctttgtaacaatctacagagatgaagagcataatattaaggtgaggttttcttatctgcctgtataatattcaaatgagaattgggtaaacaccaactagctatttaacctgatcagtccaataatggcatacataattaatgctgggttcccatcagactgctggaagagaaataatggtcagaagcattcccaaataacaggaaatactttgagcttcacacataacactttaaaatgcatgttgcctttcggagaaga

SEQ ID NO: 168339 - DNA, 361 bp, Homo Sapiens
tcttctccgaaaggccacatgcaaaccttcagcctcagaaagatgtcattttgctgacatccggctgatgtcaatattagagtttttgcaagagaaaggtgtgtgagcatagaggtgatgataattatatactcaaagacacacccacaacagagcccataagactccctttggcaaaaaatgttgtattgaagacaaaaccagtggattcagaggttaaaagtaagaagtagttttgagacccacattttagttaccgtaatgtatgtagtatttgctgttgaaatgtctctattagacagacttacttttgtattttctaatttttattccttgtatcaatgttgcctttcggagaaga

SEQ ID NO: 168340 - DNA, 415 bp, Homo Sapiens
tagaggatcccgctaacgaagatgattacccgagaaacaactaaagaatgcataaatcaacgtggcacaaaaggcccctacattagatactatcctgaggtcccttttacttggagtcaaaatccttagtcagatggggggaaaaggggactggaagatcggcgtgcttactactaaccagtaaccaaacctcaaggttattaaggccttctgtgtgccagttcgaatggatgtttattgtgatctggcttctgccctttctccaagggcttcttcactcctccccctcccgggggtgtgttttgttgagggtacaccctgaagaaacttggactagcagcctttcagcagccagggtgcgctgctgcaccagggtgatgacaggctgtgaaatacggtaatcatcttcgtttag

SEQ ID NO: 168341 - DNA, 577 bp, Homo Sapiens
  misc_feature (166)..(222): n is a, c, g, or t
ctttacgaagatgattaccttactctttaaaaaaccacaaagttggagaatttttgggaaagagtggataccaaaatagcttttaggaagacgacagcttaatagtctcttaaattgctgaagagagcaaaagaaagcttaagatctggaggataaaagttatatnnnnnnnnnnnnnnnnnnnnnnnnnnnnnnnnnnnnnnnnnnnnnnnnnnnnnnnnnctatgccttagaagttaaatcctatcataaatgaacatcatttctaaaggactatggcccacttcaacactcaaacaaaaaaatcctcattgctaaaacagcttcaacattcctttggagtttgctgttaaagaatttatcctgcatatatggtagacacgaaacacatcctgaagagactcagaatatctgcaaacataaaactgcttctctaaattgcatttactggccttgaatccagtagagtagggttcagctatgacatgaagtgtgtcatcctggggagggggagcaatttgaagaaaaagggcactttgctacagttaattcacatggctataatggcggggtaccg

SEQ ID NO: 168342 - DNA, 216 bp, Homo Sapiens
tgattacgaaatttcgagcccgggtacccccctgggagtggcattataactcggcagtgagcacttatggttttataactctcttcacagactcaaatgactccaagaaagctacacttcctgttgtgagtatatggatatccatttccctacatagccactaacatcaggtttttacaattttatttatttcttgctactttaagaaatttttgt

SEQ ID NO: 168343 - DNA, 469 bp, Homo Sapiens
ctggagtggcatataactcaggaagacacttaacttgtaacgtacatgtaccagtttatgataaagaatattacaaagggtattgatgaaaagatgcctagggtaagagataaaaattagacgtggagcttttataccctcccaggcatgccaccctccaggaactttcatgagttcaactattcagaaacttcccacaccctgtcatttgcagtttttatagaagctttgttaggtaggcataattgattaaaccattgaccgctggtgatcaacttaaccttgagcccctttttcctctctaaaggatggggctagggccaaaagtcccaaccgtctaatcatttctggtgaccagcccccatcctgaagctacctaggagctgccagccatctggcaactcattagcacacaaaaagacatcactttggagatccaagagtcttaggagttatatgccactccagc

SEQ ID NO: 168344 - DNA, 482 bp, Homo Sapiens
cgacttagaggatcccgctggagtgcatataactcagcaaataggaaaacgaaattcttcaaaacattccatgaggttcaatacaggcaagcatgacaaaatagatttaaagggcaaaatcagccagccaaccaacctaacaaagagaatacaataaacaaacaaacaaaaagtcctaaccaatccaattcagagtgggaaaggccaggccactgtcagttttataggcaaagaatggcagattcctgccgcgcagaaaccataactggtcaaccctggagtgctgctatgaacacagtcatgatgcagggtcaagaaaccctccttccatgatattctgctttaatcagatgcaaggttgcctttgtgagtagcaaagatggggtctcctacctgttatgatttgaggccccctgggaaggacccaattccctagtcctcacctcctctgtatggtctgatggagttatatgccactccag

SEQ ID NO: 168345 - DNA, 1002 bp, Homo Sapiens
gagctccgcatcctcattctccactttagggttgcaggctgttcgtgttcagggttgctgctgagacttatgctggcagtggcatctgacttagagcgctgagttgagtccttttggagggagacagcactgtgtcaggggccgggctcaaggagggcagctccctcttcctgtgagctggctttagctcatctgagaggatcagcttccgtagctttggttccacgggagtgtcgttgagtgaaaatgtgcatgtctgaagaataggccccaagcaacagggcacactggagggaaaagttaatgctctggcggcaacggtggactatgtagggcttaatggcatcacccacgtcctcatccatgtggatgtacatgttaagcaactggggcagatagaagtccacgtcctcgttgcgaaagcagaagagccggttgccaatgtaggcttgtactccaggctccttggagttatacaggtatgaaatggccatggagatgtcaaacagttttgactcaaacagcctcagcagccaagactgtttagctgagttgttctgccgccgtcttcttgctcctttggctgtgcctgaggccacagcggcccccatctcatcttcctcctccctgatctgggcaggtggatcatctaggcaacggatctcactgtccacaccatccccattgaccaactccagtggggtgcctctgcttagagactgccacgcctccatgcaaaagcttgactttctccaacacctcctggcaggccttctgggccacctcagggtcaatcactgatagttccccgaccccctccgtgatgacacttagcagggaccccccattattccctggtgggccagaagtgggctcagaagttggcttcaagggggcaggctccactactgtatctcccatggccacagccagacttcgagcttccaagctctctctgaattgttcctccctactgcgagtcccaaatacacttggactggg

SEQ ID NO: 168346 - DNA, 373 bp, Homo Sapiens
actctccaggatttcgctggagtggcatgtgttgcttcttagtatgcttggcttgacagcctcaagctcagagttgatatgaaagtggccaatataatttggagctacaagtgcagaaatgaagatgctcagtacagctttatcagagcagtctgtagccgaataaactatctaaactagctgatggtgaaaagacaaccacagaagaatggcttgttctcttagaagaaggtacatggaacagcattcagcaacaggaaataaagaggttatccagtgaatctagcagccaatgggcattagtggtgcagttctgcaggctacacaatatgaaactaagcatatcttaccttagagttatatgccactccag

SEQ ID NO: 168347 - DNA, 1201 bp, Homo Sapiens
  misc_feature (792)..(792): n is a, c, g, or t
  misc_feature (828)..(828): n is a, c, g, or t
  misc_feature (837)..(837): n is a, c, g, or t
  misc_feature (905)..(905): n is a, c, g, or t
cgtgattgaattcacacaccacaatactatgctgaattgtattcttgactggtgccgattaatagcgatcgcgtattcatcggcaccagaatcacgtctacctgcagctgcaccacctacctccagagcagctggccacgcgcctgcctggcatttcagagacagccatgatcttcgctggcgtggacctcacgaaggagccgatccctgtcctccccaccgtgcattataacatgggcggcattcccaccaactacaaggggcaggtcctgaggcacgtgaatggccaggatcagattgtgcccggcctgtacgcctgtggggaggccgcctgtgcctcggtacatggtgccaaccgcctcggggcaaactcgctcttggacctggttgtctttggtcgggcatgtgccctgagcatcgaagagtcatgcaggcctggagataaagtccctccaattaaaccaaacgctggggaagaatctgtcatgaatcttgacaaattgagatttgctgatggaagcataagaacatcggaactgcgactcagcatgcagaagtcaatgcaaaatcatgctgccgtgttccgtgtgggaagcgtgttgcaagaaggttgtgggaaaatcagcaagctctatggagacctaaagcacctgaagacgttcgaccccgggaatggtctggaacacagacctggtgggagaccctggagctgcagaacctgatgctgtgtgcgctgcagaccatctacggagcagaggcacggaaagagtcacggcccgcgcatgccagggnaagactaaaaggttgcggattgaatgagtacgattnactccaagncccatccagggggcaacagaaagaagccctttgaggagcactggaggaagcccaccccgtcccatgtnggacgttggtcactgcgaaacgcccaccctggcaaatatatacccgcggaatcccacaaaccttttgacccgagggctggactggagcccaccggtccccggtcagccccctttctccccccacactgaacgcacacacagaatggagcgcggacggaacccaacacccgaggctctctcgccacagagcgcggcccacacagccgaccccatcctgacatgtgcccgcgccccaatgcgcaacaccaccaccgccccacctacccgatatttgtcgtttcttggcgccacgttga

SEQ ID NO: 168348 - DNA, 484 bp, Homo Sapiens
  misc_feature (338)..(377): n is a, c, g, or t
aacgcatgtgccgtccctttaatccagtgactgtcaggtcgatcatatgtcctgaggcacgtgaatggccaggatcagattgtgcccggcccgtacgcctgtggggaggccgcctgtgcctcggtacatggtgccaatcggctcggggcaaactcgctcgtggacttggttgtctttggtcaggcatgtgccctgagcatcgaagagtcatgcaggcctggagataaagtccctccaattaaaccaaacgctggggaagaatctgtcatgaatcttgacaaattgagatttgctgatggaagcataagaacatgagaactgcgactcagcatgcagannnnnnnnnnnnnnnnnnnnnnnnnnnnnnnnnnnnnnnnagcaagtggcgcccacacatgggggctcgaatccaggtcgaagggtcaccggagcggcggaagggtatcctaagagtcgagagcatactgatgtatcagtcgataga

SEQ ID NO: 168349 - DNA, 1819 bp, Homo Sapiens
  misc_feature (1741)..(1741): n is a, c, g, or t
agggactggcgggactgcgcggcggcaacagcagacatgtcgggggtccggggcctgtcgcggctgctgagcgctcggcgcctggcgctggccaaggcgtggccaacagtgttgcaaacaggaacccgaggttttcacttcactgttgatgggaacaagagggcatctgctaaagtttcagattccatttctgctcagtatccagtagtggatcatgaatttgatgcagtggtggtaggcgctggaggggcaggcttgcgagctgcatttggcctttctgaggcagggtttaatacagcatgtgttaccaagctgtttcctaccaggtcacacactgttgcagcacagggaggaatcaatgctgctctggggaacatggaggaggacaactggaggtggcatttctacgacaccgtgaagggctccgactggctgggggaccaggatgccatccactacatgacggagcaggcccccgccgccgtggtcgagctagaaaattatggcatgccgtttagcagaactgaagatgggaagatttatcagcgtgcatttggtggacagagcctcaagtttggaaagggcgggcaggcccatcggtgctgctgtgtggctgatcggactggccactcgctattgcacaccttatatggaaggtctctgcgatatgataccagctattttgtggagtattttgccttggatctcctgatggagaatggggagtgccgtggtgtcatcgcactgtgcatagaggacgggtccatccatcgcataagagcaaagaacactgttgttgccacaggaggctacgggcgcacctacttcagctgcacgtctgcccacaccagcactggcgacggcacggccatgatcaccagggcaggccttccttgccaggacctagagtttgttcagttccaccccacaggcatatatggtgctggttgtctcattacggaaggatgtcgtggagagggaggcattctcattaacagtcaaggcgaaaggtttatggagcgatacgcccctgtcgcgaaggacctggcgtctagagatgtggtgtctcggtccatgactctggagatccgagaaggaagaggctgtggccctgagaaagatcacgtctacctgcagctgcaccacctacctccagagcagctggccacgcgcctgcctggcatttcagagacagccatgatcttcgcctggcgtggacgtcacgaaagagccgatccctgtcctccccaccgtgcattataacatgggcgggcatccccaccaactacaaggggccaggtcctgaggcacgtgaatggccaggatcagattgtgcccggcctgtacgcctgtggggaggccgcctgtgcctcggtacatggtgccaaccgcctcggggcaaactcgctcttggacctggttgtctttggtcgggcatgtgccctgagcatcgaagagtcatgcaggcctggagataaagtccctccaattaaaccaaacgctggggaagaatctgtcatgaatcttgacaaattgagatttgctgatggaagcataagaacatcggaactgcgactcagcatgcagaagtcaatgcaaaatcatgctgccgtgttccgtgtgggaagcgtgttgcaagaagggtgtgggaaaatcagcaagctctatgaagacctaagcacctgaagacgttccgaccggggaatggtctggaacacgggacctgggtggagaccctggnaactgcagaaacctgatgctggtgtgcgcttgcagacccatctacgggagcaaaagggcaccggaaaggaattcacgg

SEQ ID NO: 168350 - DNA, 534 bp, Homo Sapiens
ggggagcagaggcacggaaggagtcacggggcgcgcatgccagggaagactacaaggtgcggattgatgagtacgattactccaagcccatccaggggcaacagaagaagccctttgaggagcactggaggaagcacaccctgtcctatgtggacgttggcactgggaaggtcactctggaatatagacccgtgatcgacaaaactttgaacgaggctgactgtgccaccgtcccgccagccattcgctcctactgatgagacaagatgtggtgatgacagaatcagcttttgtaattatgtataatagctcatgcatgtgtccatgtcataactgtcttcatacgcttctgcactctggggaagaaggagtacattgaagggagattggcacctagtggctgggagcttgccaggaacccagtggccagggagcgtggcacttacctttgtcccttgcttcattcttgtgagatgataaaactgggcacagctcttaaataaaatataaatgaacaaactttcttttatttcc

SEQ ID NO: 168351 - DNA, 1505 bp, Homo Sapiens
  misc_feature (538)..(754): n is a, c, g, or t
  misc_feature (929)..(1029): n is a, c, g, or t
  misc_feature (1084)..(1138): n is a, c, g, or t
aagaccaagttatgaacatggaccacatgcatgagctatttatacataagtaacaaaagctgattctgtcatcaccggcatcttgtctcatcagtaggagcgaatggctggggggacggtggcacagtcagcttcgttcaaagttttgtcgattacgggtctatatcccagggtgaccatgaaaagaagagtcagtggtaagttaagcacaaaaatgtacaaaaaaccatctcttgtgttccttttgaaaaattttaactataaaagtagatttacagcatgtgaacttaaaggtatttgctgcagtattttccaataacaaattcaaaaatgatctacatgcgcaacaggggactgtaaatgatggcagattcgtagagtggaacagagcaacgaaaatgacactgtaccagattctcagtgctttacaataatgctcccgtcatgagcagtgggagaacccttgtctataccaagacactttatgtttaaaccatctacttccagtttttctacttcaaagtttagtatttatatnnnnnnnnnnnnnnnnnnnnnnnnnnnnnnnnnnnnnnnnnnnnnnnnnnnnnnnnnnnnnnnnnnnnnnnnnnnnnnnnnnnnnnnnnnnnnnnnnnnnnnnnnnnnnnnnnnnnnnnnnnnnnnnnnnnnnnnnnnnnnnnnnnnnnnnnnnnnnnnnnnnnnnnnnnnnnnnnnnnnnnnnnnnnnnnnnnnnnnnnnnnnnnnnnnnnnnnnntgtattaaatatacacacacaggaaaaggtaggcacatatacaaagaaatttaaaccataatgggtcatctctggttagtgagctcttatgttcaatctctttgtactttctaaaatgagtatgtatttctgcaaaaatcactgaaactggctgggcgtgttggttcatgcctgnnnnnnnnnnnnnnnnnnnnnnnnnnnnnnnnnnnnnnnnnnnnnnnnnnnnnnnnnnnnnnnnnnnnnnnnnnnnnnnnnnnnnnnnnnnnnnnnnnnnnaggcatggtggcatgtgcccgggaggctgaggtgggaggatcacctgagccgagnnnnnnnnnnnnnnnnnnnnnnnnnnnnnnnnnnnnnnnnnnnnnnnnnnnnnnnaaagagatgagactctatctcagaacaacaaaaacataacaaaaaacctgaacccggaaacattaaaaatagacttgtgctaagcgagtgaagtgtgacctctctatactatcaggaaatggccttcatgataaattctgaaaatgacccactgcctgaatcacagacacactagatgatagtgagagtccaaaggtaacttccacagacacagctaagtgattatacgactctcccttacaagttatgaaaagcttaagggtaaaagctttctatcttcatgatttctgaatctcaatgcccagtggaaatgccacacaggtgaactgtgcttgtgtggaacaagctgcaaccccctaccacaccc

SEQ ID NO: 168352 - DNA, 1505 bp, Homo Sapiens; identical to SEQ ID NO: 168351
  misc_feature (538)..(754): n is a, c, g, or t
  misc_feature (929)..(1029): n is a, c, g, or t
  misc_feature (1084)..(1138): n is a, c, g, or t

SEQ ID NO: 168353 - DNA, 829 bp, Homo Sapiens
tgttcttcctgcccatgtcacaataatcaggtcatggagaccagggcaaccagtttccaaattcaggagaatcaggcagagagatacaaatatgctccaaatatttgttcaataggagtataataacttgttaaaagctgtcaatagctcaaaatgaaaagtttcttgactcctgtggcaacaacagtgttctttgctcttatgtgatggatggacccgtcctctatgcacagtgcaatgacaccacggcactccctgttctctatcaggagatccaaggcaaaatactccacaaaacagctggtatcatatctcagagacctcccatatgaggtgtgcaatattgagtggccggtccgatcagccacacagcagcaccgatgggcctgcctgccctttccaaacttgaggctctgtccaccaaatgcacgctgataaatcttcccatcttcagttctgctaaacggcatgccataattttctagctgcgctgcaacagtgtgtgacctggtaggaaacagcttggtaacacatgctgtatcaaactctgcctcggaaaggccaaatgcagctcgcaaagccggcccctccagcgcctaccaccactgcatcaaattcatgatccactactggatactgagcagaaatggaatctgaaactttagcagatgccctctcgttccttcaacagtgaagtgaacacctcgggttcctgtttgcaacactgttggccaagccttggccagcgccagcgccaggcgccgagcgcttagcagccgcgacaggctccggacccccgatacgtctgcagtcgcctccgcgcagtccc

SEQ ID NO: 168354 - DNA, 366 bp, Homo Sapiens
gaccatctttgatatcacttataacctctccattgtgatcctggctctgcgcccatctgacgagggcacatacgagtgtgttgttctgaagtatgaaaaagacgcttccaagcgggaacacctggctgaagtgacgttatcagtcaaagctgacttccctacacctagtatatctgactttgaaattccaacttctaatattagaaggataatttgctcaacctctggaggttttccagagcctcacctctcctggttggaaaatggagaagaattaaatgccatcaacacaacagtttcccaagatcctgaaactgagctctatgctgttagcagcaaactggatttcaatagaacaactacaag

SEQ ID NO: 168355 - DNA, 477 bp, Homo Sapiens
catagaggacccgctggagtggcatataactcgatgagaaactgccaattactagaacagctgttgggctaagttgcagtctaacatcacacagcaatatcatacacactctgtatgaagaagcaggagaggcaacaactttcataatcagtttttctgtttcccttcattttcttgtgaacccttaatggcatctttgaaggtgactgtggtcacaccaagtgtcaccaccagcctattcgagtcttgctgcagagccatggagttatatgccactccagcgctggagtggcatataagtcccgcatcccgtgttagagtctttagtcatatggttgggggtgtcaggcctcagggacaggcctctgaccttctcctgccttcctttcactctaatgtactcccacctttctgcctttctcattgtggatctgaagaccctcccatgagacagtcccaccctatatcctgggggaa

SEQ ID NO: 168356 - DNA, 751 bp, Homo Sapiens
tgcgacccgtaggagtggcatataactcgctcggagttttatctggctgactgcacagtcatcataggtctttttcaccaagatgtacctctccccttgttatcacaatctttctgtcctttgcttcatattcataatcatattccacctcaatatacacttgtcctggaataatcttcccacttctgtcaaccattgtcattcaataatattcacctctcaaaaaggatgttataccacattatggctttatggcttgtgggatgaatatagctcagaacaaggagatctacaccagtatcacatttaaacccttatctgttcagtggagctgctgctaagttcatcaccagattcagaatcttgatgtattctttcagagccttctcctgcggaatcacaagattgttcctgggagaagctagttttctctacatccaagaactctggaccgggaaaatgaccaaatgagcgtgtcctattctggctggaaactttaggagaatgtgagtcattgttaaactttccgttattatgggtcaggtccaggcttaggttgacagtctgaccttgattataactgggtccaaaattctgattggcatcacgaataagacctgttccttgacagatgacgatggctttccgaaacttgaaagctcaggcaatttgttcacattttctgttgatctctgaagatgcaaactctgcaaattttcgtggagttatatgccactccagcagagtcctg

SEQ ID NO: 168357 - DNA, 318 bp, Homo Sapiens
ctggagtggcatataactcaaaaaaagaagtcatttactgtagctatccattcctaacttccagctctgttattaaagattaagttgcctcacacttacttccatttctcccctttaatcgagaaaaacaacaattctcttgaaactcacactacaaatagttagtaagaagtgaggtttacaaaaacaattcatttctgtacttccttcctattgtgtgacacagaagaaccatactaagaaaaatgtgaagaaaaataaattatctaaattttaaaacatttaccaagacagcactatatattagtaacagagtta

SEQ ID NO: 168358 - DNA, 369 bp, Homo Sapiens
ccatagaggacccgctggagtggcatataactcacttctaacttcatatcaaactagatcaccagaaaactatttagtcctatatttagtattgtttcctcatattctgtcaatttttgttagatgcatttgtatgaagaatatgtctgcatctgcgatgaaactattgaatgcattgtctcttatgatactctgttccctttataagaattaatgtgataaattattcaagaatttagtttcagagaaaagtttctttccttatgatatggcatacttccttctatcagtcattaagaattatatattctgttgagtttttctgtttgctttggctgcaagaaagcttggagttatatgccactccag

SEQ ID NO: 168359 - DNA, 554 bp, Homo Sapiens
ctgacttagaggacccgctggagtggcatataactcccacagtccttgttagtcttttgttataatggtggggcactttaggcctcaggagacagaatctctctgtgaccttctcttatcttcctttcacttgcccaaggcaggactctaatctaattgtaagtctaaagacttttattccagagagttcctgccccatactctggaggaaggaatgctgtacagagaggccaagaaaaatctgaactgaagggtgttggttgatttagatcataccctttttgtccagtcacatttctacatggttgtcaatcttgcctacactatgaagtcttcataaaaggcccaagaggactgggtctccagagagcttctggatagctgagcatgtggaggttaagggagagtggtgtgcccaggagggcatggaagcaccacgccccttcccccatatctcaccttacacatctcttcatctgtgtgctttgtaatgtcctttacaataaaccgttaaacgttaagtaggtgtttccttgagttatatgccactccag

SEQ ID NO: 168360 - DNA, 460 bp, Homo Sapiens
ctctagaggagcccgctggagtggcatataactcccacagcccttgttacactcttttgttacaacattgggtgtgtcaggcctcaggagacaatcactctaacctcctgcccttccttttacctgcccaagacaggactctaatcttccctacctttctgatggtgggtcataaaactcattccagagacggtcccaccccatatcctgctagaaggaatgctgctgtcatgaagcttccataaaaaccaaggggactggattcagagagcttccagataactgaacatacagaggttctagaagggtggtgcgcccagggagggcacaggaagctccatgcccttccttcatacctcaccctatgcatctctttatctgtatcttttataatatcctttataataaaccagtaaatgtatttcccttagagttatatgccactccagcgggtacgagc

SEQ ID NO: 168361 - DNA, 432 bp, Homo Sapiens
  misc_feature (44)..(44): n is a, c, g, or t
  misc_feature (211)..(211): n is a, c, g, or t
aggatccgtgagtgatataactcccacagccttgtacactcttntgtacaacattgggtgtgtcaggcctcaggagaaatcactctaactctgccttctttttactgccagaaagatctaatctccctacctgtctgatggtgggtcataaaactcattccagagacggtcccaccccatatcctgctagaaggaatgctgctgtcatganagcttcccataaaaaccaaggggactggattcagagagcttccagataactgaacatacagaggttctagaagggtggtgcgcccagggagggcacaggaagctcccatgcccttccttcatacctcaccctatgcatctctttattctgtatcttttataactatcctttataataaaccagtaaatgtatttcccttagagttatatgccactccagcg

SEQ ID NO: 168362 - DNA, 247 bp, Homo Sapiens
cccttacaccttagaagttgtgggctcttggtggtatcgctcaatacgctatagtggagaccagattctaatacgcacaacgacgagatttatacatactttgtttataaaacccgaaatatggatatgaaacgtgcttatcatggttttggctgaagcttctcaatttgatcctcagtataataaagatgcaacaagcagaccaacggataatattctaataccacaacttctaaggttaggggtc

SEQ ID NO: 168363 - DNA, 352 bp, Homo Sapiens
tgtggtaggactagggctgctgattgctggagtgcttgtgctcatagactcaggccctgtgggtgtggtcagcattctgggcctggatgtaggtggagggacgggctttagtgttggtgggtttttttccattggaaatagtgcctttgtttggtttcagaactctccggctagaagggcattgctggaggccacacagagctcggctgttgggtttccttgtcacatcgcaagggtcatcatggttcttggcacatgtgaccctgcgaatccgcactcctccaccacagacaacagatcactcactccggttgccccctgtccacaacttctaaggtgaagggggatccta

SEQ ID NO: 168364 - DNA, 348 bp, Homo Sapiens
cataggtccgagaaattagaggagaataaatgcctcatggaatattcccagtgccccatcaggctcagaagagctcagtgagccagatagataagcatgaataatcagatgacaacagtattatagatattaaagataactacgcacaagaggaggaaattaagaagtcaacataagaatcagaatagtttcttctatctgaatctatgccaacatttctatgtcccactaaatatgagaacaaatggttacttacctgtgaccagggtggtaaacagctgtgttgattccatgaggataatgactactgaagctgaaacagtgactttcttggtagctctgatttgt

SEQ ID NO: 168365 - DNA, 357 bp, Homo Sapiens
attgatccgagataaagttgctcgcatagaggacctgacgtgttagacgcatattctgtacagaatcagcgcttgcatgctctgtgacaacaccggaccaagtatcgcgctcaccgatcgtctggatcctctatactcaacctgcctggcttgcgtatgtgccccgagtcgtagttttaaagtctcgagactgaaaaacccctggcgctagatattcatacatgcgagagcacactgagactgcatgtttatttggcataatgctagaaaaaagtccgcaaagaactgccagaaccaggcctgtgaccaagtttacagtcatctaatttctctcggaccaatggggtaccgagctcg

SEQ ID NO: 168366 - DNA, 907 bp, Homo Sapiens
atccccacagtgagcacgccccacttcagagggtaagagccaaaagcctcattgtgaaaggcactggacttggaccagggacaccatcagggccttggttttctcacgcataaaatggagagtggattaatcgccaaagattcttctgatctgacattttgaaattgtgagagaaattagatgactgtaaacttggtcacaggcctggttctggcagttctttgcggacttttttctagcattatgccaaataaacatgcagtctcagtgtgctctcgcatgtatgaatatctagtcctttctgtggttctcagccaagacataaaaactaggactcagagcacatacaaaaccagttatgtttcggaaagagggaaaagagtccccgagcccggatcttgtgctgcttttctcactgacgtgttgccttttttctttacaaaatctgctttgatacttaggacctctctggactaatttctcttcctagacagctcagcacagctattgatatgttagaggcagtatccttaatatgcattcgtaaatgagttaacgacttaacttgaaattgggcctaaggagtgagaactacaaaaatacaaaatgcttgtccaggactcagccatgcacaccttgagcagcgccggcaggaggcacggaaggaactgtgctccgttctcctcactgtcatggtgccaccagtgtctgatgaagggcagagtgacccagactgcaggcagtaactgacttcacacagtccctggcatttagtcatctgtgattgttttatcactctggactgtgcagagccacctgccaccgagatctgcattccgactgcctatgaacgggtgtgggggccgggggctggcttgctgaagtcttcaacttgtctggagtaggc

SEQ ID NO: 168367 - DNA, 258 bp, Homo Sapiens
ctattggtccgagagaaattagttgtcagctcagcaaagatacaacctggataaagaacttcaggagcttgggagatgacagatcagatgccacagaaaaggggtgccaccctgtaaataggtttgatttctgtaaaagtgttctctgagcctaaatgggaaagaagccttcctactgtgaggtaatactatgtgaatttttggaaaccatgcagtcagtgacattggtgaagatttctaatttctctcggaccaatg

SEQ ID NO: 168368 - DNA, 488 bp, Homo Sapiens
gggggaacttcctagacgccgtacgtgccagatggtgttacctggagcttaaaaagctgcacgcaagtgttaaacttctgtaggaggaatactgttggcgttcaaaagcattgctgtttcaacaatggccaagaacaaattaggagggccgaagtccaggaatgtatttcacatagccagccaaaaaaactttaaggctaaaaacaaagcaaaaccagttaccactaatcttaagaagataaacattatgaatgaggaaaaagttaacagagtaaataaagcttttgtaaatgtacaaaaggaacttgcacatttcgcaaaaagcatttcacttgaacctctgcagaaagaactgattcctcagcagcgtcatgaaagcaaaccagttaatgttgatgaagctacaagattaatggctctgttgtaatatactggtgatgcatctaattctccacaaagaccaataaattgaatgttttatacaaaaa

SEQ ID NO: 168369 - DNA, 1295 bp, Homo Sapiens; identical to SEQ ID NO: 15014
  misc_feature (452)..(587): n is a, c, g, or t
  misc_feature (742)..(804): n is a, c, g, or t
  misc_feature (898)..(908): n is a, c, g, or t
  misc_feature (1215)..(1225): n is a, c, g, or t

SEQ ID NO: 168370 - DNA, 493 bp, Homo Sapiens
gggacggctcgtgagcggaatcctgactggttcatcctccccggaacttcctagacgccgtacgtgccagatggtgttacctggagcttaaaaagctgcacgcaagtgttaaacttctgtaggaggaatactgttggcgttcaaaagcattgctgtttcagttaagtagttccttaattacttacaatgtagtaaggctacattgaaggaagatataaatttcagtcaagactacgactgagcaaagacaatggccaagaacaaattaagagggccgaagtccaggaatgtatttcacatagccagccaaaaaaactttaaggctaaaaacaaagcaaaaccagttaccactaatcttaagaagattcctcagcagcgtcatgaaagcaaaccagttaatgttgatgaagctacaagattaatggctctgttgtaatatactggtgatgcatctaattctccacaaagaccaataaattggaatgttttatac

SEQ ID NO: 168371 - DNA, 372 bp, Homo Sapiens
  misc_feature (183)..(192): n is a, c, g, or t
gccggccccatggtcgagagaaataggacaggtgtagatattactgaccagaagttactgctgcaaaatttctgctctctatttttatgtattaaagctggtaagatacaccagagagatagcagacaagcaatgtggatggttgtgaatcataaaccagaaaatttgaaagaaattatcttnnnnnnnnnncaagttcctggtgaaaatttacatatgtttatgactttgaatgcactttgtaataatactacttaacatcttttcttttttatttgataattagggtaaaactaacagcttattcttacagttggtcagtctgcgttttcttgtgaggccctcagataactcctggcgagattctctaat

SEQ ID NO: 168372 - DNA, 286 bp, Homo Sapiens
ggctcggtaccatttgtcgagagaaattagaaatgcctgtatagatgtcctcaaggaacttgtacttttgagtccccatgattttcttcatactctggttccctttctacaacacaaccattgtacttaccatcacagtaatataccaagtacgtatttatctagcacagtacttcaatatggttcgcatttaatcgttctgcacactgaagcatggagatttattttttccatttattcttactgtacacttttaatatcctaatttctctcggaccactgggat

SEQ ID NO: 168373 - DNA, 706 bp, Homo Sapiens
taatggcttggttaagtgttttaaatctattcttctggaaatctaacttgcataacaaaatcaagtagcaataatgtaaagcatcagaactggctcttaaaagattatttacatgttgattatttgggaaataaccaaccaaaaaatattaaaaagtgattttttttacacagtatgaagtcattgaagagattagacaatacaaaaagcaaaattctttcctgaataaatgaatacctgtggcactaagttcactcgctaatggactgtaacatggaactgccaaacatgcatttaagttatattaattacactttctgtttccaacttaggttgatcagcagctttgttctgttagaatccttcaaagagagaagctcaaacaggaaaaagaaggcatatataaaacagtaaacactgacctcctgaggttcctacaacataaaaatattcaagtagaaaatctacatcacttagcagcggctatttctgtagttgagcacactaacagcattttagtgtgtaaggagcagatgaagtaagccgtgctttaagcatgccaagaggcagaaacactggaatgtaacaaagacaaactcacaattttatagacattcagtcaacattcaaaactattaagactacaccacaagaatttagttgctttatatatatcccatgatgtattagattttatcagaataaa

SEQ ID NO: 168374 - DNA, 816 bp, Homo Sapiens
  misc_feature (651)..(651): n is a, c, g, or t
  misc_feature (654)..(654): n is a, c, g, or t
  misc_feature (667)..(667): n is a, c, g, or t
  misc_feature (693)..(693): n is a, c, g, or t
  misc_feature (696)..(696): n is a, c, g, or t
gctccggccggccctgcgcctcccgccgcgcccgggatgtattcgtccccgctctgcctcacccaggatgagttccacccgttcatcgaggccctgctgcctcacgtccgcgccttcgcctacacctggttcaacctgcaggcgcggaagcgcaagtacttcaagaagcacgagaagcggatgtcgaaggacgaggagcgtgcggtcaaggacgagctgctgggcgagaagcccgaggtcaagcagaagtgggcgtcgcggctgctggccaagctgcgcaaggacatccggcccgagtgccgcgaggacttcgtgctgagcatcaccggcaagaaggcgccgggctgcgtgctctccaaccccgaccagaagggcaagatccggcgcatcgactgcctccgccaggcggacaaggtgtggcggctggacctggtcatggtgaattttgtttaaggggatcccccctggaaagtactgatggggagcggctctacaagtcgcctcagtgctcgaaccccggcctgtgcgtccagccacatcacattggagtcacaatcaaagaactggatctttatctggcttactttgtccacactccggaatccggacaatcagatagttcaaaccagcaaggagatgcggacatcaaanccnatctccaacgggnacttaagtttccaggactgttttgtnacntccggggtctggaatgtgacggagctggtgagagtatcacagactcctgttgcaacagcatcagggcccaacttcctcctggcggacctggagagtcccagctactacaacatcaacctg

SEQ ID NO: 168375 - DNA, 439 bp, Homo Sapiens
  misc_feature (405)..(405): n is a, c, g, or t
  misc_feature (420)..(420): n is a, c, g, or t
cattggtccgagagaaattagtaacacggagcacaagaggggacctgaggtcacttcccaaggggttcagacttccagcccagcatgtaaacaagagaaagacgataaggaagagaagaaagacgcagctgagcaagttaggaaatcaacattgaatcccaatgcaaaggagttcaacccacgttccttctctcagccaaagccttctactaccccaacttcacctcggcctcaagcacaacctagcccatctatggcgggtcatcaacagccaactccagtttatactcagcctgtttgttttgcaccaaatatgatgtatccagtcccagtgagcccaggccgtgcaacctttatacccaatacctatgacgcccatgccagtgaatcaagcccagacatttngagcaggtaaaggtncccaatatgccccaacagg

SEQ ID NO: 168376 - DNA, 185 bp, Homo Sapiens
tctgaggatctcaataaattgttggtcattgatccaggactcattcttgactgatagtaccctggttataaacctcttcatatcttaagaatcgggggtatttctattttacagggccaagtaaccataaaattgtattgcatctttgggcaatgaaaatacaatcaatgaccaacaatttattg

SEQ ID NO: 168377 - DNA, 176 bp, Homo Sapiens
aaaaaagaacaaggcccagtggaaattaccccttggtttgggaaataaaaatatcttcttgcagaatagctctgaaagttgccttagggtcactgcaagccctcttgtggtcattaactttcccccttcttcaataactgatgagctatttctctcagacaaatggagccgagccc

SEQ ID NO: 168378 - DNA, 322 bp, Homo Sapiens
caggtgacctagacgatcctatggtccgagagaaattagaggtgtgctacttggtttctaacaatctccatacaaaggccttaaagacattttagtataagaaacataacatttctttctggcccacacctaatatagcttctgttgttaatactacttctctgctgccaccagccatcagcagtgatgagcagccatactaagcattttatattcattgtgttgaatactcaaaagaacccttcaccccttaaaattcagcgtggcttaattaatattgctaatttctctcggaccaatgcattgggccgagagaaattag

SEQ ID NO: 168379 - DNA, 298 bp, Homo Sapiens
ataggctccgacgagaaagttagattgatgtgctcagctcgctgcctattcgaattccatgcgaaggactggcagatcttctctattattctgagcagtaggcctttcagactgtgccgtggcccattatgtcatctaccgtcgttgatgggaaaaccctgggggcaccagccatcagcagtgatgagcagccatactaagcattttatattcattgtgttgaatactcaaaagaacccttcaccccttaaaattcagcgtggcttaattaatattgctaatttctctcggaccaatg

SEQ ID NO: 168380 - DNA, 320 bp, Homo Sapiens
catggatccgagagaaataggaaaaggtgttgtgttagatctgtagcaaatcctccacgagcaaccagattctgacgacggagatgtgttttgccaagataatgtgcattcaacaagttttcttctgaacactgaaaaccacaaagatcacaggaaaagaccttctgtggcccatgtgcttgtttgatatgcatatgtagtgctgagctgctctctgctttgtggctgcagtgacaacaggtatgttccttaggctgctgcatgtgagactcagcatgtttttccaagtcagagcaagaagaaaacaaatgcccacagat

SEQ ID NO: 168381 - DNA, 377 bp, Homo Sapiens
cattggtcgagagaaattagcggagcagtatggtgactacatctcatctctcaaaagacagcagcaataggatgctgatctcaggaggaagcagagcttagaaaacacaatctgtcttcaaggctcattcaaatgcaaacattatggtcaggggcaagatgtccactgcctaatgaggtgcccatataactacggattaggacaatctccttacatgaactcaaacagccagcccagcaggcactcctaaacagacccaaattgctgaagcatctgaaagtaggaagccccggcacctaagaattggtggcaggaaggaattagatgtctaatccatgtatttttgtttcaccagactaatttctctcggaccaatg

SEQ ID NO: 168382 - DNA, 259 bp, Homo Sapiens
cattggtccgagagaaattagtgcctcttaatttatgttactgctaaaacaaaggcaacttggcaaatatccagtaataagcagcaatataccaggtgctcctaaaatcctgccatgtgctaaaagtaagaggcattttgatctcagaatctaaggatggacttcggggacatcaataattccaaggagcacacataaaactttgcaagttgtataagtacatcattctggtaagattctaatttctctcggaccaatg

SEQ ID NO: 168383 - DNA, 439 bp, Homo Sapiens
cataggtccgagagaaatagacatggtggacaagtgaccaaaaaggcctacgtgtttactgaacacttaagaacacacattatgtctttaggatctagcctattctataatgtgtagtacagtcttaattaaataaatcaccaaaatgaaccgatcactttacacactgccaggaacaatcagattcaagtggagaaagaagacttaaggtctacaatccgaagactccagtatctgtgaacccaaactgttatttttaaagacttgtatatcttagatattatagattttacttagctttgtttagagtccactaattacacatctagatgtaaattccaaatgtgtacaaccttctcagcaactctccatatagaaatctgtatggttttaatctactggttaaaagaaaatgctatttctctcgaccaatgggtgg

SEQ ID NO: 168384 - DNA, 279 bp, Homo Sapiens
cattggtccgagagaaattagaaaagggaaatattatttcctacttggcaatttgaaaaatattttggagaggaagaggtatttgaaataagaacttgaaggcctgtcattttagacattcagagattgctattaaatattgattatgatgttgaaggcggcatttcaaataatcttctactttagctgctctgcaatagatgaagcccttctctagataaatatcatcttcctattttgagcactgtctctgatatcctaatttctctcggaccaatg

SEQ ID NO: 168385 - DNA, 268 bp, Homo Sapiens
cattggtccgagagaaattagagaggggaaactcaggaatgacaacaaactgaattttgcgccccatttttggagtgatattcagttaagccaaatgagatgctctgcatgtagtcgggatgctggtttaatatgcagtggatataaaccaacatcagaaataaaataaaaggctgtaaaggaaagaacaaggaacttgagcatggcagagtcattttgtctgttaacttttcatttgcctattctctcgaccatgggccgagccgcc

SEQ ID NO: 168386 - DNA, 612 bp, Homo Sapiens
acgaaagggaaatgggggcacatagccaagatgacaaacactgggctgcctggtcctgccactcctgcttactcatatgcaaaaaccaatggccattgtgacccagagatacaaactaccagggagctgactgcaggcaacaatgtagaaaaccaagtgcctccacgggaaaaatctgtggcattggcccaagagaaaccagtggagaatggtgggtgtcctgtggggattgagactccagtcccaatgcccagtcccctctcttccagtgggagctcactgtctcccagcagcactgcctcctcctctctaacatcctctccttgctcttcgccggtactcactaagcgtttattggggtcatcagctagcagccctggctaccagtcatcgtaccaagtagggatcaaccaacggttccatgcagctcgccacaaatttcagtcccaagcagatcaggaccaacaagccagtggcctacagagccctccacccagggatttatcccccaacctcatagacaactctgccgccaagcagctggcccgaaacacagtcactcaggtgctctccagattcactagccaacaagggccaatcaagccagtctta

SEQ ID NO: 168387 - DNA, 236 bp, Homo Sapiens
cattggtccgagagaaattagcgtgagaacccacttggacccagccatgcacccttatcttcagttcagtaaccttttcatagactttggtggaagcagtgacatttcagggtccttctttaaaacaaaggttctaagggaatagcagggaatagctgcctggtcaaggaacgtttgatgtgaatttccatctttgttaaatgaatgatgcctttctaatttctctcggaccaatg

SEQ ID NO: 168388 - DNA, 260 bp, Homo Sapiens
catgttcgagagaaattaggtatcactgtgaccatgcggtggatgtagttactttccatcaaaatgtggttattcttcagcaaataagtgtaattgtttggctatagtatatgggcaaaatttttttgttacataatgctgaaaaagaaggtataattcatattctgacttatttttctgaatcataccttttattcttctcagttaggttagatattaattgaggaagagcttaatagctaatttctctcggaccaatg

SEQ ID NO: 168389 - DNA, 556 bp, Homo Sapiens
  misc_feature (279)..(306): n is a, c, g, or t
cagatatttctcacagttctggagactggaagtgcaagatcaaagtgttggcaaattgtgtatataaaagagggcctgcttcctagaatggaaatggctatcttctctcggtatcctcacatggtagggagaaaagcagctctagtgtctcttcttataaaggaagtaatgccaccataggggctctattctcatgacctcatctaaacctaattctctcctaaaggccacgcctcccagtatcctcaccttggggggtgagggcttcatcatatgaannnnnnnnnnnnnnnnnnnnnnnnnnnnggaaacagagtctcgctctgtctgccacccaggcgggattgcggggacacaatcccggctctcaacaagccccgcctccggggtcacaggccgtactccggcgtcagccccctcagtagcgggaactagggcgcccgcaacggcgccggagaaatatttggtataaccagaaaagagggggttaaccaggtcagccaggatgaccccgatcccgtgactcatgaccaccgcccggcaccaaagggtggat

SEQ ID NO: 168390 - DNA, 338 bp, Homo Sapiens
  misc_feature (141)..(186): n is a, c, g, or t
cacagaagcatgacccagtcccacatctctcaccctgtcccctccgtccccagattcccaatcccaccgcaatgttaggcaagcctaggactgataagtagctctgatagaggagctggtggcttctatacttcttcctgnnnnnnnnnnnnnnnnnnnnnnnnnnnnnnnnnnnnnnnnnnnnnngtagggtgggggaagtatggtcttctacgtgtgctattttcagtagcagagtaagcacaaggttttaatcgagtggcataagacaccttggcttagctatttaatggcccaaggtaaaactttaatgccatttctaatgcttttattcattt

SEQ ID NO: 168391 - DNA, 572 bp, Homo Sapiens
  misc_feature (384)..(444): n is a, c, g, or t
ttcgcaggtgacctagaggatccccacagaacatgacccagtccagttcacccatcaagtgcacagcaaaggaagagaggcccatttaataaacataatgtttccaacacccttgaggaccatggacagttttgcaagaaacatggtaaggcaactagaagcataactttctgctgaaaagagtctctgggggtcttgtctacgataacatacattctttgtccctacaaactcatacttcaaaaatgaataaaagcattagaaatggcattaaagttttacattgggcaattaaatagctatgcaaaggtgtcttatgcaactcgattaaaaccttgtgcttactctgctactgaaaatagcacacgtagaagacaatacttnnnnnnnnnnnnnnnnnnnnnnnnnnnnnnnnnnnnnnnnnnnnnnnnnnnnnnnnnnnnngaagaagtataaaagccaccagctcctctatcagagctacttatcagtcctaggcttgccaaacattgcggtgggattgggaatctggggaggaggggacgggtgagagatgtggactggtcatgtta

SEQ ID NO: 168392 - DNA, 530 bp, Homo Sapiens
  misc_feature (102)..(180): n is a, c, g, or t
ctcttcgtgatcatccaaacgtgcagagtcttctttttccgtggagatttctggttcctctttttcttggcttttagcaccatctggatctttttctacatnnnnnnnnnnnnnnnnnnnnnnnnnnnnnnnnnnnnnnnnnnnnnnnnnnnnnnnnnnnnnnnnnnnnnnnnnnnnnnnaggtttgatgagatcatcttctggtttttcacctggtgatgtgtttggacttacaggggcacatgtttcttcccttctgttttcctcttgaggcaacagggcttccccagtttccttgacctcctcctcaatcctgatgggactggggctggcttttccttctgaagtctccttctgttcttccactgttacctgctcgtcaggctccatgggtgtttctggcggggtgtacaaattcagtttaaatccggtcttcctctctttgttttgcctccacttagatagaccgcgctttgttccttttggccacacttgtttgcactttagaggttcgggattgtctttactgc

SEQ ID NO: 168393 - DNA, 459 bp, Homo Sapiens
  misc_feature (316)..(395): n is a, c, g, or t
cacagaacatgacccagtccattaagacctctgggttcgagtgaccaggctgcacattaaggtctaaaaaagtctcctggttttccagtactcctttgaagctttctctgggcagctcttccttctccacttcggcagactccatgtggctgtcatcctcgtcatcggcatcatggtcctcgttgtgggatggctcttcatcctcttcctcctcctcttcgtgatcatccaaacgtgcagagtcttcttgttccgtggagatttctggttcctctttttcttggctgttagcaccatctggatctttttctacagnnnnnnnnnnnnnnnnnnnnnnnnnnnnnnnnnnnnnnnnnnnnnnnnnnnnnnnnnnnnnnnnnnnnnnnnnnnnnnnnggtttgatgagatcatcttctggtttttcacctggtgatgtgtttggactgggtcatgttctgt

SEQ ID NO: 168394 - DNA, 987 bp, Homo Sapiens
ctgctggtttcgaggtcggtgggcctttgcttcccacagaactcgccaatgttcttcccgttggcatagatctgtagctggtcatagggccagtgtacttgctggtggtcatcaatatcaaaaggctccaggaacttgaggtgcagggtaaggccccgctccacccggatgctgtagttgcagcgcagtcaggggggtaggaccgagggtactccaggctgaagatgtagcctgatgcctccgtgtacagctcgctgctgcactcagcctggcaggaatgcctgtcttcctgaagctcatagcctggacggcaggaacagaagtagcctccaacgtagttgtgacacaggtgctggcactggggctggggatcctcctcccctgatttgctccgggaagcacattcatcaaggtccacagcttggtagtaggccaggaagcccttgtagaacatgatggtcccattctcctcgttggagaagtctgtgtggaaggtcagcagcatcttgttcccttgggacataaattccttctttcccggggggttgcccagtggagaacccagttgcccacagaacctccccaggcttttcttatcagcagagatcttgacataatcatagaagcagccttcagaaggctccaggtcaaactgctggaagacgagcttcaccctgtatcccgtggggactgtgatcacagtggttgtttcaaagttgttggggtaaggcttggggaacagaggggaagtcacctccccaaataacttctgagggatgggaatggagcctcctgccctgcagaacagggccggcaccaggaggtacaagagccacatttctcaaggcccgtgttgaatcctgggctctcccgacagcgtcttcgtgcactgtgtgcagagggagcccgcgtcatgcacagcagggaggggagggttttctgtggagtggaggggggaccattcccggaggaatgttggagggaatg

SEQ ID NO: 168395 - DNA, 540 bp, Homo Sapiens
cacagaacatgaccagtccgggtgcgatcacataacatgtgacactaacgtagaaaagcaagaggctatgggaggcaaaagaacatgatcataaatgccatattcttgtaactaaagtccaaagggtctatagtacacagaggccaacatgaagagaaggcagagagccaaatatgtagtcaaccaggagcagcccagcaggaggtagcagggagacttgtgcaggatcagttggataggctcaccccaggctgagtagtctccattggctgctttcctggaccttgcctgccttctttttcctttcctttctctacacgagccccttcactcaaaaggtagaactgcaagggattgggccacaattcttcgttgattatctccacaatcttgtcagactcaatggagctgtggtttgaaaaccacccaaagaaactacggttgttttctgggtttcctggcttagggactggagatcatgcctgggagccactggattggagtagaacgagacaccacctggccagaacgaccacaccc

SEQ ID NO: 168396 - DNA, 790 bp, Homo Sapiens
ggctctgggcagcacacagagttgcccactccaccctgtacccatcatgcccactgcaggcacaactccagatgaagactatgaatatatgaatcggcaacgagatggaggtggtcctgggggtgattatgcagccatgggggcctgcccagcatctgagcaagggtatgaagagatgagagctttccaggggcctggacatcaggccccccatgtccattatgcccgcctaaaaactctacgtagcttagaggctacagactctgcctttgataaccctgattactggcatagcaggcttttccccaaggctaatgcccagagaacgtaactcctgctccctgtggcactcagggagcatttaatggcagctagtgcctttagagggtaccgtcttctccctattccctctctctcccaggtcccagccccttttccccagtcccagacaattccattcaatctttggaggcttttaaacattttgacacaaaattcttatggtatgtagccagctgtgcactttcttctctttcccaaccccaggaaaaggtttcccttattttgtgtgcctttccccgttcccattccttccgctttcttcaaagggcactccctgggagaatatgaaaggaattacctcctcccatatcccctttcctcctcaaggcctccttggacctactttgtggaaactaaaggcctcctttaagggggtggcccctttgggtttttcccccattcccaaaactttgtgcccagggaaaggaaagggacaaaacgggggaga

SEQ ID NO: 168397 - DNA, 434 bp, Homo Sapiens
gcagtaaacagacccagtccttgaatttctgctagtaggtaaaatgcgagctaccgtttacccttgctaaggctacctctgcagggtctctccctttataccttcatacccagtcccccaccaagatgaatgctggctggtggagcagggctgcctacaggtgaaagtagtcaccagctctggtggctttggactccaggagccacaatcgtgtgtaggcactaggcttctgttgggtgtttggatggtgcatatatatttacccacggtaaatataaatttacctttataaattaggtcaagcttcatgccttgaaaaataataggggtgactatatgaggacagaatactatatagtgagccattcaagtgccacttaagtgcagatgttcaagaagatacataaagtgatgaaaatgaatataacttgaag

SEQ ID NO: 168398 - DNA, 518 bp, Homo Sapiens
tgcgtctttcaactccggttgtcagctcttggacctcatgcaagtaggcgctggtacttttgctggggtgtctccttcactcccagaccctctccaagcatctcatattctccagattcatatccggtcctcttggtttttccaatacgatctgagaaatcaagtccctttgtccctactctcttgtccttgaacttgtcataggcagcattaggattgacaatgatgtgttccacatttgtgcttgtcagctcctcctgcaagaacaggtagtttaggccagggacacactcattcccactctagaacttactctaccccacaaaatccccaaaccattaggtgactgggccctacttgtccaaggggaaagaagggtggctctactccaaggcgcctacccaggcttaacctaggaaactgaagcttcctggtaaatttggagcctcagttgtataaatattaacaccctcattcaactgggagcagagggagttctagagtcggaatgggtgcat

SEQ ID NO: 168399 - DNA, 1519 bp, Homo Sapiens
ccagttacaacagctgatcaagcggagttcgatgcggaggagctgacaagcacaagtgtggaacacatcattgtcaatcctaatgctgcctatgacaagttcaaggacaagagagtggggacaaagggacttgatttctcagatcgtattggaaaaaccaagaggacaggatatgaatctggagaatatgagatgcttggagagggtctgggagtgaaggagacaccccagcaaaagtaccagcgcctactgcatgaggtccaagagctgacaactgaagttgaaaaaatcaagacgacagtgaaggagtcagccacagaggagaagctgacccctgtgttgctggctaaacagctggcagccctgaagcagcagctggttgcttcccacctggagaagctgctgggaccagatgctgcaatcaaccttaccgaccccgatggcgccctggctaagcgcctactactgcagctggaagcaacaaagaacagcaaagggggatcagggggaaaaaccactgggacccccccagatagcagccttgtcacttatgaactacattctcggcctgagcaggacaagttctctcaagctgccaaagtcgcagaacttgaaaagcgcctgacagagctggagacagctgtacgttgtgatcaggatgctcagaatcccctttctgcaggtctacagggagcctgtctcatggagactgtagagctgttgcaagcaaaggtgagcgccctagaccttgcagttttggatcaagtggaggctcggctacagagtgtcctgggaaaggtgaacgagattgccaagcataaagcctctgtagaagatgcagatacacaaagcaaggtgcaccagctatatgaaactatacagcgctggagccccattgcctccaccctccctgagctggtgcagagacttgtcaccatcaagcagctgcacgagcaagccatgcagtttggtcagctcctgacacacttggataccacccagcagatgattgctaattccttgaaggacaataccaccctcttgacccaggtgcagacaaccatgcgtgaaaacctggccacagttgaggggaactttgccagcattgatgaacggatgaagaagctgggaaagtgagcacatttgggagctggagaacaggggttatccctacccctgtgaactctgttaacagcttacatagggtttcccctttactataactctagcatccccatcccatttgacactgggggcaagggttcttcttgcatgtggggtttatacccctcccctgatgaatacagagtggtagctaggggttggttatcatcagaaggtggtctcccctcaggcctgggggataaggacgtgggcccagccacatgccaactcatgtccaatactgctttgcctggtgtggggaaggattgggtcttgtcccccaacacagcttctgtggctgactgtaatactgtacaactgtttctgaccattaaatgctgttgtactctgaaaa

SEQ ID NO: 168400 - DNA, 403 bp, Homo Sapiens
  misc_feature (324)..(358): n is a, c, g, or t
ccctcagaacatgacccagtccagtctgaaatgaaaggggacagaagtcttgctgtccatggtggtgtaggaatttctgtgcaacacctcaccacgtctggttaatccttgcacacttcagtgtttctctcctgttcaataaaatgccctgttaaggatataatttgaagtgagaagatacatggaaattgccctcttatgacatgttgatgttataagcacaatagatggggcatctttggattgatgttcacagctttatacttcagaacctaagtctcttcactttgctggcacctgctatactggagtattgctatgtcnnnnnnnnnnnnnnnnnnnnnnnnnnnnnnnnnnngagacagggtcttgatatttatttgggactgggtcatgttctgtg

SEQ ID NO: 168401 - DNA, 535 bp, Homo Sapiens
gctccacagaacatgacccagtccaagtacagaaattacagaaggaactacagagataccttactcggaagattggctttgaggcagtcatgaggattcggtgcaccaaaggtctttccattcatactttccatggaaacttctttgttaggtcaaccgacttactgtctttgcctaacgtcaacccagacgctgggtatgcagtacagatgtcagtggaagagagtcttactgacactcagttggtttcttttcagtcagcactcttgtatacatccagcaaaggcgaaagaagaattcgtgttcatactttgtgtttgccagtagtttcgactctgaatgatgtctttcttggagctgatgttcaagcaatttcagggttattggccaatatggctgttgacagatctatgactgccagtctgagtgacgctcgggatgctctagtgaatgcagtcattgactccctctcagcttaccgttcttcagtcttaagtaaccagcagcctggactcatggttcctttttctttgcg

SEQ ID NO: 168402 - DNA, 754 bp, Homo Sapiens
  misc_feature (630)..(630): n is a, c, g, or t
  misc_feature (727)..(727): n is a, c, g, or t
gggaaatttgtgactgagatgtgacatttgggattccccatcacttgtcatgccctcagcacccagcttgtgccattgggcattgatggcattgaactagagcgagtgcctgcctcggctgtggcacttccaggttcgactgaatcaagcatctgaagactgggtttttttgttgttgttgttccccttatagacaaaatgaagactatcatgtgcaatcttttacagtggggttgatgatacatttggaaggatttgcttgtttaatatgtacattttttgtgttaacagctttttgacacaattactgggtaatttctaatataggcagcagactgttttacgggttgctgttttaacatgggtttttgtcagatccatggtcttaggacttgactgatgagctttcagtgaagaatcctctaagataaaacttctatttaaagactttaactagaaagtgtttattttggctacattgttcaccttctgctgtattggtatttgtctgttgggatttcaagggagtgtagagaagacagaaggaaagctgagagctggcccgacatggactgggacacagagttggagctggcactgaagatctccaggggacttcagagaccaatnaaagcccatagggaaagagagagaggatataagggaaacagaatcagatgtggtaatatacttggccacagcggaaaaaatgggatttaaaagaacnaaaaattggaaggcccagggttaaatg

SEQ ID NO: 168403 - DNA, 487 bp, Homo Sapiens
gattcattccttcttcattcttgcaaaacagtggtacagacatggagtctagaattgacccagatggaaagtaattggtattcttaatatcctgggtgactaatatccaggcagagaagctcctggaaccataactgtaagttcctagctggctagggattgaagtcctggacagtgacagaggataccacagtagttcaagacttagcacaagtcaccaactgcttcagggatacctggaggggccagcaagtagagtgttggtggcccaagcaaaccagtgttgccaataccattgccaaaagggcctttggatcctggacaaagcttggctgccggcttcatttattcctgctgatggctgagaagcatctgtcttccatcccacttgcctgtcccaagttttgttccattttttaaaaatttgttgtaaactgcatgttttataaaataaaaataaaatatagtttgttatttatctcattag

SEQ ID NO: 168404 - DNA, 1053 bp, Homo Sapiens
  misc_feature (651)..(651): n is a, c, g, or t
ggggaagcgtcggcgacgcatcgcgcgatggcgcgggcgggacagtgcttgtgaaactgaacacaacaaaagtatggatatgggaaaccaacatccttctattagtaggcttcaggaaatccaaaaccaagtaaaaagtgtagaacagcaagttatcggcttcagtggtctgtcagatgacaagaattacaagaaactggagaggattctaacaaaacagctttttgaaatagactctgtagatactgaaggaaaaggagatattcagcaagctaggaagcgggcagcacaggagacagaacgtcttctcaaagagttggagcagaatgcaaaccacccacaccggattgaaatacagaacatttttgaggaagcccagtccctcgtgagagagaaaattgtgccattttataatggaggcaactgcgtaactgatgaggttgaagaaggcatccaagatatcattctgaggctgacacatgttaaaaactgaagaaaaaatcttccttgcggaaagcaaggtaatcacactttaaccaaaatctgtgcggtgcaagagataatcgaagactgcatgaaaaagcagccttccctgccgctttccgaggatgcacatcccttcgttgccaaaatcaacttcgtgatgtgtgnaggtgaacaggccccgaggggtcctgattgcacttctgatgggtgtggacaacaatgagacctgcaggcacttatcctgtgtgctctcggggctgatcgctgacctggatgccctagatgtgggcggccggacagaaatcagaaattatcggagggaggtagtagaagatatcaacaaattattgaaatatctggatttcgcagaggtaccagacacaaatcatgcatttgacctgagcacagaatcattcccatttaaacatagaaaaggtcctcaagagaatgcgagacataacacatgaacttctccacagcacaaaacccctctctgaacttgtacctgagctccaacacagcattgcagggctttaattggacagttggacctgggtcatttctctg

SEQ ID NO: 168405 - DNA, 649 bp, Homo Sapiens
cagtcagttgtaaggtctcaaaacctggacaactttggaacgtagcaatcggatgaacgatcttggaaacatctctcgggactcctgggctgtgtacttgaaatagttctggggatgggccaggacatcaaacagagccttgataagtttcttatccttaagtatttcctgatggttctcagatgcatagagcctgccatctcgaactatgtcttcaatgagttcctggtagtcctcatcatatgtcacgtatgggacctggaaccctctagcgctgttcccttcattggacttgaactgaatccacagcttctttgacctggaggtgaaggcgatggggcgttcgtaggtctggcaggtttcatatgttgtcacagaattggatgaagaggttttccgcatcaccagatagtccccacagtcgtcctctatgggcaggaagatctcagggaccacgatcaggatgcggcgcttgggttgcccaggacgggaaagtccaaggaaggggcctggtggtgctccacttgcagttctttaaagaatgctgctttttattctcctaaccctttcaagtgggtgcagacttctcgttagcagctggaagacattcctcccacacttttcccttcctgggccaagagagcatcag

SEQ ID NO: 168406 - DNA, 773 bp, Homo Sapiens
cagtgagcccccggctcccagtacctgaaaaaccaggtcctactgccttctggatgctctcttgggccaggaagggaaaagtgtgggaggaatgtcttccagctgctaacgagaagtctgcacccacttgaaagggttaggagaataaaaagcagcattctttaaagaactgcaagtggagcaccaccaggccccttccttggactttcccgtcctgggcagcctcagagcctgcacactgaagctgggttcaaatcctgggtccttcctgcctgacagactgacccctggaaacatgagtctctggtttttcttcactgggctagcctcaagcaaatcttgggagctcttgagtatcttcggcatgtgccttttccagcacttgctactgattttgcagagctcccagaaccgtgctccccaactggctccagctctgccagcctggattctcttcactcccaaccagcaggggaccactcagtgacaacactggcctggtcattcagggactgcctgggctctgaagtttcgtcccaaactgtctgcgcctatgctggggaaacaccttgcccggtagagctgccctgctcccttgactcctcctcctctgccaaggcaggaaaataatcctctggtcatggatggatggggtcactcacataagtgggaacaaacagtgccccttggtggcagctggatatatgcctccaggcatccctgaccactgtcctgtagacaactgaggccagaaatggagagccaggaacaaa

SEQ ID NO: 168407 - DNA, 1498 bp, Homo Sapiens
  misc_feature (464)..(464): n is a, c, g, or t
gggctgactttaaaactgaactaagtcaatctgatatgtttgatcagaggttacaatcaaaagttttaaaattagttgatatatcctatggtggtgaaaatggattcaaccaagctattgagttatctactgaagtcctctccaacgtgaaattcattcaagagaagaaattaataggacgatactttgatgaaatcagccaggacacgggcaagtactgttttggcgttgaagatacactaaaggctttggaaatgggagctgtagaaattctaatagtctatgaaaatctggatataatgagatatgttcttcattgccaaggcacagaagaggagaaaattctctatctaactccagagcaagaaaaggataaatctcatttcacagacaaagagaccggacaggaacatgagcttatcgagagcatgcccctgttgggatggtttgctaacaactataanaaatttggagctacgttggaaattgtcacagataaatcacaagaagggtctcagtttgtgaaaggatttggtggaaattggaagtatcttgcggtaccgagtagatttccagggaatggaataccaaggaggagacgatgaattttttgaccttgatgactactaggtagtcgacatgggtccggcaaaacgtgcctgcaccctccagcatccaacccaaggagcatacccatggtggaatccaaacagatccctgccttacaattggaacatttccagaacttaatccatgagcattggatattgaaaagaaaaccgaaacaaaaccagacccagccctacactttggttcgtcatggtgtcagcgcagcagcctacaactaagttcctaaacgccactttggactaatttaaaaaagaatcccagtttttacttttactggatggtgaaattggttgctcttgtattttatgaaaaaaaatgatttttttaaccttcatacatagaagcaaaaatactttaactgctgtaaaccttcaaaagttaatagaagtgagatcatactggtttgtctcttactttgattggagaaaaattaaattgctgcatttcgcagtgacccatttacatggcattctcagcttagactgcgtaagaagaaatatatgtggtgaaatgttggaaccatttctctcttggtctctgtttaatgttgaaagggtgagctaataggaggcactttcaacttcactccctcacgctaccccgtccccctccagactggcagtttcaaggatgcaaattgcattgcaaaatcaaactgactcatgaagcatttgggccagtgcactgtttacttccatctgtttgcagacacatttgtgcccggcgtttgggagccctttgtatcaatgttctgacaagggtccctataaccttaacctactcgaaaccggtttgggatggatatgatggggcttctgtgctattgctgggactgggagaaataaaacatgcaatttaagtggaagcg

SEQ ID NO: 168408 - DNA, 554 bp, Homo Sapiens
atacatgaccagccaggggggcgcggtgacaggaatgctcctagcacttcgtccacagactttctgaagcgcaacacggggaaaatatatccaattccttgatcaggtaatatcaatactaggatataatcttaagaaaacattctaagatgtgtgtaaaaatttggcaaccataccgttaaatggaaaagacgagagtaacccaaacaccctacaatggtggtgaaatcaatgtttttcaagcagggacctctatgcaaacataactgacgcgccgcgatacttcccttgagaagggatctgacttggaggaagcccaggctgtaactgccccacacagggcgacacgacgcccgctctacccactctccacaaccagagcgggagccgcaggctagaaggggccgagctgaagtcctgagcctggtgtgtaacagagccatgcagggagctggggaaacatgagttctcggcctcacctggagacacagagtctctagaagggagtggtcctgtgccctccacaggtgctggggactgggtcatgttctgtg

SEQ ID NO: 168409 - DNA, 1245 bp, Homo Sapiens
cacagtaacatagatcagtcctgtttttgaaaacggtggaaaggagtgccgctaggaaaatgccttccaaaagtctagaaggacatttcatcagattcatcaaatcaagcaaaagtagataatcagccagaagaattagtgcgtagtgctgaagatgtttccacagtgcctacacaacctgataatccattttctcaccctgacaaactcaaaaggatgagcaagtctgttccagcatttctccaagatgagagtgatgacagagaaacagatacagcatcagaaagcagttaccagctcagcagacacaagaagagcccgagctctttaaccaatcttagcagctcctctggcatgacgtccttgtcttctgtgagtggcagtgtgatgagtgtttatagtggagactttggcaatctggaagttaaaggaaatattcagtttgcaattgaatatgtggagtcactgaaggagttgcatgttttggtggcccagtgtaaggacttagcagcagcggatgtaaaaaaacagcgttcagacccatatgtaaaggcctatttgctgccagacaaaggcaaaatgggcaagaagaaaacactcgtagtgaagaaaaccttgaatcctgtgtataacgaaatactgcggtataaaattgaaaaacaaatcttaaagacacagaaattgaacctgtccatttggcatcgggatacatttaagcgcaatagtttcctaggggaggtggaacttgatttggaaacatgggactgggataacaaacagaataaacaattgagatggtaccctctgaagcggaagacagcaccagttgcccttgaagcagaaaacagaggtgaaatgaaactagctctccagtatgtcccagagccagtccctggtaaaaagcttcctacaactggagaagtgcacatctgggtgaaggaatgccttgatctaccactgctaaggggaagtcatctaaattcttttgttaaatgtaccatccttccagatacaagtaggaaaagtcgccagaagacaagagctgtagggaaaaccaccaaccctatcttcaaccacactatggtgtatgatgggttcaggcctgaagatctgatggaagcctgtgtagagcttaccgtctgggaccattacaaattaaccaaccaattatagggaggtcttcgtattggctttggaacaggtaaaagttatgggactgaagtggactggatggactctacttca

SEQ ID NO: 168410 - DNA, 389 bp, Homo Sapiens
ggctgaggggatagtctcttagaaagtggtgatttcttttcaggagtgcttctagcaaaaggaatgtaaattgtattatccaaattatgctcatcttctattaaagccatagtttcactcccttcatcagaatcctgttttgaaagggcagaaataattccaggtgcagatgcttcctccatgcccctagtgttactattttgagggcctctggaggacagaacattttcataggttttctctggctctatggcttcctcatttttaattgtagaaagtggctctgaatgtgtaaaactgtaatctgtttcgtaacttactctagatagctcatgtatggaagtgtgagcaggactgggtcatgttctgtgggggatcctactagagtc

SEQ ID NO: 168411 - DNA, 461 bp, Homo Sapiens
catatggaagcactgataaccttccccatagggcgaaacgactcacaaacacaggactccgtaagtagtttctgcagagaaacttaaaatcatgaaaagggtcatcaatcaacagatctcagaagtcactgtgcagggactactgagggccgcgagaggaagtgcaaacctcagctgaaaagcaactcagggtggctgagtgagccctcacttcccgaaacacccgcacggttgcagccaacacctcccaactacttgggccaagtcggctcttcgcctccaagtggaggctgctggatctcttcggtctcctcctcgcccaagtcctgtttctccctctgggcgtcgatccacctctgcggtgcgatcattttcttcggcccatggggcggcgggccaatgagagcctcaatgtcctcatagtttatcacttccttttccagaagggcgtttgccagcgc

SEQ ID NO: 168412 - DNA, 962 bp, Homo Sapiens
  misc_feature (70)..(70): n is a, c, g, or t
atttctcggttgggttctgtagggccttgggccacccagcaggtcttgctttcaaggttccatcatctgntgcagggcctgtggctgaaaggggcggccgccccgatgccccatgaggcccctcctggcccctcagggaaggaagatggggcccgatgcccaggtgccatcccaaaactgcttcaccatggagtagccgatgcgggtgacctccctcaggtcgtcctgtggccccagaagtgacctcgttgaaggacagtgcttccgaggcccgtcctcccagggccatgcacatccgctcaaacagctgctccttggtgaagaggtgctggtctctggggagcatctgagcaaagcccagggcggcgtttgcccgaggggttatggagaccttcatcacggcctccgtgtgctccagcatccagcccaccaaggcgtggcccgactcatgaaacgcaaccactttctgttcttccttggacaggatcttgctctttttggcagtccctgcgaggacgcgctccacggcgtactcgaagttgagagtgtgcacggaagtgtgtccctcccgcgccgcgtgcagcgcagcctcattgcagatgttggcgatgtcagccccactgaatcctggtgtcagctctgccagacgctgggagtaaaaggtgctggactgggtcagcttcaggctcttcaggtgctgctcaaaaatctcccgcctctcctgcagcgtggggagatcaatgaagacgtgccggtccagtcggcctggcctcatcagagcaccgtccaaaatgtcagctcggttcgtggacgccaggacgatgacatggtctgtggtacccattccatccatttctaccagaagctggttgagcgtctgctcctcctccgtgttggagaagccggacatggtggtggagcgcttcttgcccaccgcgtcgatctcatcgatgtagacgatg

SEQ ID NO: 168413 - DNA, 871 bp, Homo Sapiens
cgcccggatgccccaggaggccctttcctgcgccctcaaggaaaggagatggggccccgattgcccaggtcccatcccaaaactggcttcaccatggagtaggccgatgcggggtgaccttcctcagggtcgtccctgtgccccagaagtgacctcgttgaaggacagtgcttccgaggcccgtcctcccagggccatgcacatccgctcaaacagctgctccttggtgaagaggtgctggtctctggggagcatctgagcaaagcccagggcggcgtttgcccgaggggttatggagaccttcatcacggcctccgtgtgctccagcatccagcccaccaaggcgtggcccgactcatgaaacgcaaccactttctgttcttccttggacaggatcttgctctttttggcagtccctgcgaggacgcgctccacggcgtactcgaagttgagagtgtgcacggaagtgtgtccctcccgcgccgcgtgcagcgcagcctcattgcagatgttggcgatgtcagccccactgaatcctggtgtcagctctgccagacgctgggagtaaaaggtgctggactgggtcagcttcaggctcttcaggtgctgctcaaaaatctcccgcctctcctgcagcgtggggagatcaatgaagacgtgccggtccagtcggcctggcctcatcagagcaccgtccaaaatgtcagctcggttcgtggacgccaggacgatgacatggtctgtggtacccattccatccatttctaccagaagctggttgagcgtctgctcctcctccgtgttggagaagccggacatggtggtggagcgcttcttgcccaccgcgtcgatctcatcgatgtagacgatg

SEQ ID NO: 168414 - DNA, 437 bp, Homo Sapiens
  misc_feature (36)..(36): n is a, c, g, or t
  misc_feature (44)..(44): n is a, c, g, or t
  misc_feature (98)..(98): n is a, c, g, or t
  misc_feature (151)..(151): n is a, c, g, or t
  misc_feature (245)..(245): n is a, c, g, or t
acctcccaaactaacttggggccaaagtggctcctntccctccnaagtggaaggctgctgggtctcttcggtctcctcctcgccccaagtcctgtttnctccctctgggcgtcggatcccacctctgcggtgcggatcattttcctttcgnccatggggcggcgggccaatgagagcctcaatgtcctcatagtttatcacttccttttccagaaggacgtttgccagcgcctgcaacttgtccnaggttgtcctgcagcaccttctcggtgtgtctgtaggccttggccaccagcagtcttgcttcatggtccatcatctgctgcaggccttggctgaaaggcgccgcccgatgcccatgaggccctcctgcgcctcagggaaggagatgggcccgatgccaggtgccatccaaaactgcttcaccatggagtagg

SEQ ID NO: 168415 - DNA, 563 bp, Homo Sapiens
ggtggaacaccagccatggtcagtcaccgggtcttcttggaaacacatcaggcccagttcccctttcttgtgggtccgggagcccaaacaatagtgttgaaaacttttctggggccgcagcgggccgacaagagttaagtcttcaggtgaggagatttgattgcactcagcctttccagttgtccatttccagctactcttttccagagacttcgatatgtttatattatagatataatacataaaacatctagagtgagactctacgttctccccaaaagaagagaaccaagccgtccttccctgctcccagccccagtgatgcgttggcgggaggcacctcccttcccgaccaggagccagggcctctgggggacaagccttgtgggcagcccaggccggaggggctggggaaagctgagggcaaaggagaacccccctcacctcattggtcccccaggatcaaaagtaatcccaaaaccaaaaggaaagagagtctcagacccttcccccagctgccgacggagagttttcattttgggcaagtttttcgagcaaaacca

SEQ ID NO: 168416 - DNA, 943 bp, Homo Sapiens
gaggctggtacggccggaattccgggatatcgtcgaccacgcgtccgagtacatcttgagtattttcaaataatgatgtgaagtttgaggtaggtatctttccaatgttctaactttactagaattaggttattaagcttctctagtgcccttaactttgttacatagagatttaaagaaaaagaaagtagtaccttagtatgtaccgcatccttcttttcctcagccaccctatcataacagaagttatttcccttccattctttatttggctttgttttttccctgtctgccttctccattttctcagttatctctaccagtggttctcaaactttagactttttgagaatcacctggtgggttgctaaaagatgcagattagccctttcccagagactgataaacaggggccagaaacctgcatttttaacatggagcccaagtgattttgatccaggtggcccccaaatccagttatataaacactactttagcttctctcctgaagccttaagtaaactggtttaattcttaatctgtagtcagttttcatattcctttgggctttctatcaagtggtagtatccatttagtgccttaaaatacagacaataccaaggagatttcattctagacaagtctagaaatggccattaacttctaagtgtccttgtgttcaatgaatatcctttacctatggcgaaatagaaggtaattagtaagagaactgggtgtatagctttgtgggaccataggggataatttgctgagagttggctatattcatggaccaagtcccttagtagctctttaatattcattagtgatcagaaaaaattgctgggataggagattaggtaggttgggctcatggggtcaagaaaataaaccaaggaaagattgagaaagaatttaaaaaattaagaaacgagggattagg

SEQ ID NO: 168417 - DNA, 845 bp, Homo Sapiens
gcagcggtacggtcgaatacgaatcgtaccagcgtcggatagccctttccagagacgataacagggccagaaacgcattttaacatggagcccaagtgatttggatccaggtggcccccaaatccagtatataaacactacttgagcttctctcctgaagccttaagtaaactggtttaattcttaatctgtagtcagttttcatattcctttgggctttctaccaagtggtagtatccatttagtgccttaaaatacagacaataccaaggagatttcattctagacaagtctagaaatggccattaacttctaagtgtccttgtgttcaatgaatatcctttacctatcgggaaatagaaggtaaattagtaagagaactggtgtatagctctgtggaccatagggcttattttgctgagagttgtctagagtcatgcacccagtcccctaagtagcctcttttaatacttcatttagctgattcagaaaaaaactccctgggaattaggagatctaaggttcagtcttgcttctcctacttgtggcttcactgagctagtcagtttcctcaggcttaggtttctggatttgaagtggaatcttttcaagaatgaaacttttatagctgaaataaactttggagcttatctttcattggaaaaaccagggtggttcagtgagttaaggacaatatagcatggactgggctgccagtctagcatttgtttccaaattcattcatgttcttttggagtatcttcatctcctctcattctcccatcttctgccctttactattctgggaacagtggcacaaaaggttccatgtgtcaccaattgga

SEQ ID NO: 168418 - DNA, 584 bp, Homo Sapiens
acagaacatgacccagtccacccaaaggaatgccaaacccagcagagaaaaggtcaagtccagcaaaggaacgcgagagaggaaacgtcaatccaaggaggaaacgtcaatccaaggaggaagcgtcaatccaagagaccaacgccaagccaagcaaagaatgcaaagccaagccaagcggctacatgccagccaagccgttaacgcgcgtgcagcatgcacgtgcaagccgttacagggcagccaagccgttacgcgcgtgcggcgtgcgcctgcaagccgttacaggccagtctgacggttatgcgggggcggcgtgcgcgtgcaagccgttacaagccagccaagccgctgccgcgcgtgcaacgtgcgcgtgcggcgtgcacatctcagggggcgtcagtgtacgtggcacagacactggccgatgcgtgcaacccacgtgcttaagtcttggcgccaggaatgtcactgacagccctgtgttcccggcaaactttgtgggagtcagctgagctttcaggccattgagaagccgctggtgaaaaaaataagcctcttgaaggagactgggtatgttcagt

SEQ ID NO: 168419 - DNA, 439 bp, Homo Sapiens
  misc_feature (339)..(371): n is a, c, g, or t
cacagaacatgaccagtccacccaagggaatgccaaacccagcagagaaaaggtcaagcccagcaaaggaacacgagagagaaaacgtcaatccaagcaggaaacgtcaatccaagctaccaacgccaagccaagccaagaacgcaaagccaagccaagccgctacaggccagccaagccgttaaagcgcgtgcagcatgcgcgtgcaagccattacaggccagccaagccgttacgcgcgtgcggcgtgcgcgtgcaagccgttacaggccggccaaaccgttatgcgcgtgcgtcgtgcgcgtgcaagccgttacaagccagccaagctgctgccgnnnnnnnnnnnnnnnnnnnnnnnnnnnnnnnnngtgtgcttatctcaggtggcgtcagggcacgtggcacagacactggccgatgcatgcaacgcgcctgc

SEQ ID NO: 168420 - DNA, 776 bp, Homo Sapiens
  misc_feature (88)..(88): n is a, c, g, or t
cgacggatagcggatctgcttcagaacattatcaacattaagaatgaatgcagccccgtttccctgaacacagttcaagttagctggntgaaccccgtggtggtccctcagagctcccccgcagagcagtgtcaggacttccatggagggcaggtcttttctccacctcagaaatgccaaccattccaagtcaggggctcccaacaaatgatagaccaggcttccctgtaccagtattctccacagaaccagcatgtagagcagcagccacactacacccacaaaccaactctggaatacagtccttttcccatacctccccagtcccccgcttatgaaccaaacctctttgatggtccagaatcacagttttgcccaaaccaaagcttagtttcccttcttggtgatcaaagggaatctgagaatattgctaatcccatgcagacttcctccagtgttcagcagcaaaatgatgctcacttgcacagcttcagcatgatgcccagcagcgcctgtgaggccatggtggggcacgagatggcctctgactcttcaaacacttcactgccattctcaaacatgggaaatccaatgaacaccacacagttagggaaatcactttttcagtggcaggtggagcaggaagaaagcaaattggcaaatatttcccaagaccagtttctttcaaaggatgcagatggtgacacgtgagtattcttttatctcatgttcttaattaggtaagccacacttgttggactgggtcatgttctgtg

SEQ ID NO: 168421 - DNA, 498 bp, Homo Sapiens
cacagaacatgacccagtccagctctggagcttgtttattgctcatgggaccaggcgaggccacctccaccagctcaactggggtcaactcattgattaaatgagtgacctgaattcctttgattcttaatttactggtctttaagtcaagatgaaaccccctccctctccagtggtttgtggaaggagtatacagagcttgtaaatgggctgagtcaatgcctgcccgcagatgggtggtcagctggaatgaaatgcacagtgaagaccatccatgactgtcccaggcacacctgggtggagggtcctgaaagcccccatcctagcaggcaggacttcagtgaaatgggagcaaggcactggtgggctgtgtgcccacctgcgccagtgccggctacacctctcggtttcctggattgtcagcttctcctagaaactcactcagacccctcctgagtcagacagagcatccctggaccaggactgggtctgttctgt

SEQ ID NO: 168422 - DNA, 167 bp, Homo Sapiens
  misc_feature (107)..(118): n is a, c, g, or t
acagaacatgacccagtccttgtgaactttctgaattcattttcttgtcccctttgaaagtacagaacgatagtcaccactttctatctcccccagcaaatagttcnnnnnnnnnnnngggtattggatcaaaatttctggatatgggtcaatggggcaattggaag

SEQ ID NO: 168423 - DNA, 439 bp, Homo Sapiens
cacagaacatgacccagtccaaccccagatgaagggattttccgagcagctatcttgatccggcgcacaggcccctgttctgaccagggctgaacgcttggcccaggaaaaggacaagtcctagtatctaaaaatgatgacaaagacaaggcgcagagatgatggtgctgatgccactgggcactggaaccatcacatcacagggactggcaccaacatcccagcagggcaagccaacagtgtgagaaggcaggaatcaagagcacacagagggagctgggctgcaaagaggaggctagaacagatcctcagagaaaggcagagatgagtgtccacgtggccgcagaggaacagaggaggcacttccaatggccgtggacctgagatatgctttgttgctctctgacactgctcccgctccatgggactgggttgttct

SEQ ID NO: 168424 - DNA, 757 bp, Homo Sapiens
gcactgtagcaatgacatgattgcaggatctcagctcataactgtgagcagtacggggaagcaacagggccagtcctagccattagggaaacttgggctgctgtttggagaggcagagtgtgagtaggggcggagatggggtggctctgcctggtgtgggatgcagccaccaccagtgctagaagcaaacaccacccccaggatttgagcacgattaattgccctggaggcttaagtcttgagctggatggggcttatatgacccgaccctgggatgatttagggactaggcaagaactgctgagttctgactgaacagcagggacaagaggaaggaactccgcctggactggggcatgaaaggaacacaaatcactcctgggaccaaggccaaatttccccatggcaggatctcagcagtggcactcatccctcacccaagcattctgccagcagcctgaagatcattccaccccgcctatcatgacaattacaccactgtggggggcctgagtgcaagctttcccagtccagctccaccaggctttgacctggctgagaaacagtgacggatccaggttaccaggggattccacaaacaaaaccaatacctgaaacaatctgaaacaccagagtattctcccggggacagagtcaggatacaccctaacatacggctcagtgctcatgctgaataccacttatggctgatttattgtaccgtgcaacaacatggggtcggtcgatcgatgctgga

SEQ ID NO: 168425 - DNA, 600 bp, Homo Sapiens
  misc_feature (363)..(454): n is a, c, g, or t
  misc_feature (482)..(482): n is a, c, g, or t
  misc_feature (548)..(548): n is a, c, g, or t
  misc_feature (563)..(563): n is a, c, g, or t
  misc_feature (569)..(569): n is a, c, g, or t
  misc_feature (590)..(590): n is a, c, g, or t
cccacagtaacatgaccagtccgaggcatttgtccattatggggatgaatacgtgctctcagaagagaatcctgtcattgaggttttgtttcaatagtcctctacttttactccagagaactgttgtctcattgttaataatagcagcgtggctttttcagatgctggttggtggctgctgtacattttaaaaatggaatctcatggttgtgtctcttaaggaagcttttcaagaactttactggcaccagaggttatcagagtttgaagtttgggtgcctagtgtctcacagtgtttaagcactaatgttctgggtcagttaggtgtgagtacaaatcccatctcagctcattctgagaggnnnnnnnnnnnnnnnnnnnnnnnnnnnnnnnnnnnnnnnnnnnnnnnnnnnnnnnnnnnnnnnnnnnnnnnnnnnnnnnnnnnnnnnnnnnntttcaatggaactcggaatgcgggcttnagtgcctggaggagcacctgtttgctgttggggtatccatcaccctgtgtgtttttctgtctttcntcatcccacttttcntttgtngcagtcttgcaaaacacaccnttaaagggcg

SEQ ID NO: 168426 - DNA, 332 bp, Homo Sapiens
caataacatgaccagtccagctctaccaggcaagtcctcctctcctacttaagcacagaccaagagctgacatggcgattaggtgatatgtggggcctggttcctgccattgcagagcatgacagacagggagagggtgtggcttgaaacctgggaaccttgtttctggggatgagcaggatgtaggaagtcaggaaggcagggagcttttctggagtccctctcaaagcagccactccctttactggtctgcaggaccaggcagagtgggaagtgggaggtggctgctcagcactttgctacctgtagtctttctgaactgaagactcaga

SEQ ID NO: 168427 - DNA, 535 bp, Homo Sapiens
cacagaacatgaccagtccctaagacagagtggtcctcgtttctgatttttccacactttcatctgcctgatttgttgtaaatgcccctaaagtttgagcagaacatcaagggttccgttttcaaagtgacctcaactgcctccagcgtttcaggtgttgagctctagaagccaggatggaagttttcaggcagatacaactcccaggctttcattcagcttctataaaacaacagtgcacacaggcacatgcctcatcaccagtgtctgctgtgtgcacccaaaaaagaaagcagacgcagaaagatgattgaaaatgtattccatagggctctagggttgtcttgaaatgctctgttctgaaacactctataaaaattcctcacagattttcagtgactagaggcatggggctgtgggagggggtgctcagctgcactcttttattattgagctgattcaaaggaacagattttatgttgataaatgtacctgatactgactttaatgttcatggactgggtcctgttctgtg

SEQ ID NO: 168428 - DNA, 537 bp, Homo Sapiens
cacagaaagacccagtccactgtaggattaaacatctatgtcaatttgcttcaagttgtgccactaagtacttgagtgtggccagggatgagagaacaaaacctatacttttcaatgccttcagcaatattaagctctgtcttagggtgttagacaggctctaaaaagccctcccttccttatcttatggccttgttaggaggacaaaataagtcagaggtggtaaagtgctttgaaaaagggaaagctctgaaattcaaaatagtattattatttgttgtaaggtgctttccctccaaccaaaaaaagaaaatctggcagtctatgagtgataagcagaaagtgattcagctttggttctaattctccatctctaaccccaacgagttgagtttgctgggtcacctgactaaatccgtgacctccgaaaggtggcacttctagcgctctgcttttccaaagtcccataaattcttggattacactaattaaactataatttagaaagctcctttctaggactggtcatgttctgtg

SEQ ID NO: 168429 - DNA, 588 bp, Homo Sapiens
cggtcccacttaacatgaccagtcctttcaataactgttgtggtagtgataatttatacagcacaacaaatgggggcaacatgaatgaacgtaccaggtgaatatcagaatagctggataaaaagagtttaaggacatactgaaatttaacatctttatgcagttgcaagcagagtacagaatgttaaaataatatttaagcagctaggctatttatgggttttaatagtctctcttgcatgtcgtttccaagttggcaacagcaaaaccatggcaacaggaaattcttccctgcagtggagtttatgaatgcttttctgttttcatgactcaactccttatttaatttcctgtacagaaaatcagagagattactatagactgcaatacagatgtgctaatcccaagaccctctcaaagaaaaacaggtcacaggtgtctatggatgaatttaaagataaaatttaaaactgctttcacacagacacatagcaaaagtcaacacactctctgattagtcccagctaaccaaaataggcatttgagaatgttaactattttactgacaacttggggactgggtcatgt

SEQ ID NO: 168430 - DNA, 340 bp, Homo Sapiens
catagaatgatccagtccgccgagtccagttcatctcgtccctcgtcccataatccatcatacgcactgagagagatccagccgaaggctctctgcgggcctttcgtatacctatccaaacaccacttagagctggtctgaattacagtataaaaagccggtaatctgcatcaacattaccaatcagttgccaatgttaccaatcaatgttaccaacaggtctgaccatgtctgcaggattgtgcttattgggcagtaggaagaccctggagctgtggagtgtgaatgaggcctagagctaagtcatgttctcccaaacacatggtttcacctgcaggct

SEQ ID NO: 168431 - DNA, 455 bp, Homo Sapiens
tgagctcggccccagattacatgaccagtccaacgccgagggaatagtgaccatccaaaagcggaaccttcgcctcagaaaaagggtgcgggacccctcctcaccgtgcggtcacggtacggacagggtagatcacaggctgagggacagagcaaagacccctgaggccggacacctggggtcctgccgggcccctccccacgagagttccctgtgtctgtgccaatcgttttcgtctttctttgccgcagtttcttttcctgtaaatcatggttaataacattaaccttcttaccatcaggggttagttgtggttgtgataaataattactaccgttattaagcaattgcaatttgcagtgtgccaggcactgtgccaagtattttgcttcgatgatttcacgtcatcttcaaaacaacctcatgaggtaggtactgtttttaaccccatttta

SEQ ID NO: 168432 - DNA, 474 bp, Homo Sapiens
  misc_feature (19)..(19): n is a, c, g, or t
  misc_feature (30)..(30): n is a, c, g, or t
  misc_feature (37)..(37): n is a, c, g, or t
  misc_feature (112)..(112): n is a, c, g, or t
  misc_feature (232)..(232): n is a, c, g, or t
aaaggacaagaatcagaancaccaaacctncaaccanccatacacctcattaaccccaacaccctcaaataagggtgaacatcagagaagctccatggcctggctgctgganagggtccacgctgcaggaacaaagggggacagcatcaagcagagcctgaggggttgcaaccaggtctctagtttgtttaggttctaactgacccagccctgtccatctttctattagacncctggtagacaaggatcgtatgtatttctcttggtactgaagtgtccaatataatgccccagtagttgctcaaagaattatctcatgaggttgttttgaagatgacgtgaaatcatcgaagcaaaatacttgccacagtccctggcacactgaaaagacaagactaaatgttttgacctcgccaggagcggcccctggactcgtctttccgtaggggtcgggaaaagggctggcaatctgcg

SEQ ID NO: 168433 - DNA, 262 bp, Homo Sapiens
ctgttgcgaggaatgctgagagggacaggagggtcagtggcagggccagtctctgtttagagatagtcaagctatttagttcctcagagtcagagggaaaaaggggactaggagacattgtcaatgaggcaaggagcttgaggatctaaccaggaggaagcgtcctccagccatcaggacacaaaggggccctcagaacactgcatttccttcaactcagaatgtagctgcactaatctcgcctcagcattcctcgcaacag

SEQ ID NO: 168434 - DNA, 729 bp, Homo Sapiens
cattttatctgaaggctgcacaggtactatccagtcttcaggtacattttccagcaaattccaagtggacaacaacaaccgcctgttactgcagcaggtatcattgccagagctgcctggggaatcacgcatgaaagtgacaggagaaagatgtgtatacctcaagacatccttgaaatacaatattctcccagaaaaggaagagttcccctgtgctttaggagtgcagactctgcctcaaacttgtgatgaacccaaagcccacaccagcttccaaatctccctaagtgtcagttacacagggagccgctctgcctccaacatggcgatcgttgatgtgaagatggtctctggcttcattcccctgaagccaacagtgaaaatgcttgaaagatctaaccatgtgagccggacagaagtcagcagcaaccatgtcttgatttaccttgataaggtgtcaaatcagacactgagcttgttcttcacggttctgcaagatgtcccagtaagagatctgaaaccagccatagtgaaagtctatgattactacgagacggatgagtttgcaattgctgagtacaatgctccttgcagcaaagatcttggaaatgcttgaagaccacaaggctgaaaagtgctttgctggagtcctgttctcagagctccacagaagacacgtgtttttgtatctttaaagacttgatgaataaacactttttctggtcaaaa

SEQ ID NO: 168435 - DNA, 754 bp, Homo Sapiens
  misc_feature (679)..(679): n is a, c, g, or t
  misc_feature (699)..(699): n is a, c, g, or t
  misc_feature (733)..(733): n is a, c, g, or t
  misc_feature (738)..(738): n is a, c, g, or t
ggaccctctccgcctatatcaccatcgccctgctggagatgcctctcacagtcactcaccctgttgtccgcaatgccctgttttgcctggagtcagcctggaagacagcacaagaaggggaccatggcagccatgtatataccaaagcactgctggcctatgcttttgccctggcaggtaaccagtacaagaggaaggaagtactcaagtcacttaatgaggaagctgtgaagaaagacaactctgtccattgggagcgccctcagaaacccaaggcaccagtggggcatttttacgataccccaggctccctctgctgaggtggagatgacatcctatgtgctcctcgcttatctcacggcccagccagccccaacctcggaggacctgacctctgcaaccaacatcgtgaagtggatcacgaagcagcagaatgcccagggcggtttctcctccacccaggacacagtggtggctctccatgctctgtccaaatatggagcagccacatttaccaggactgggaaggctgcacaggtgactatccagtcttcagggacattttcccagcaaatttccaagttggacaacaacaaccgcctgttactgcagcaggtctcattgccagagctgcctgggggaatacagcattgaaagtgacaggagaaggatgtgtttnacctccagacatccttgaantacaatatttttcccagaaaagggaagatttccntttgntttagggattgcagat

SEQ ID NO: 168436 - DNA, 619 bp, Homo Sapiens
  misc_feature (97)..(97): n is a, c, g, or t
ctgcctggggattacagcatgaaatgcaaggagaagatgtgtctacttccagacatccttgaaatccaatattctccagaaaaagaaagagttcccnttggcttaaggaagtgcagactctgcctcaaaacttgtgatgaacccaaagcccacaccagcttccaaatctccctaagtgtcagttacacagggagccgctctgcctccaacatggcgatcgttgatgtgaagatggtctctggcttcattcccctgaagccaacagtgaaaatgcttgaaagatctaaccatgtgagccggacagaagtcagcagcaaccatgtcttgatttaccttgataaggtgtcaaatcagacactgagcttgttcttcacggttctgcaagatgtcccagtaagagatctgaaaccagccatagtgaaagtctatgattactacgagacggatgagtttgcaattgctgagtacaatgctccttgcagcaaagatcttggaaatgcttgaagaccacaaggctgaaaagtgctttgctggagtcctgttctcagagctccacagaagacacgtgtttttgtatctttaaagacttgatgaataaacactttttctggtcaatgtc

SEQ ID NO: 168437 - DNA, 1430 bp, Homo Sapiens
ggggtcagtggcgctagcggcggacccggctgggcagttccttccccagaaggagagattcctctgccatggagtcctacgatgtgatcgccaaccagcctgtcgtgatcgacaacggatccggtgtgattaaagctggttttgctggtgatcagatccccaaatactgctttccaaactatgtgggccgacccaagcacgttcgtgtcatggcaggagcccttgaaggcgacatcttcattggccccaaagctgaggagcaccgagggctgctttcaatccgctatcccatggagcatggcatcgtcaaggattggaacgacatggaacgcatttggcaatatgtctattctaaggaccagctgcagactttctcagaggagcatcctgtgctcctgactgaggcgcctttaaacccacgaaaaaaccgggaacgagctgccgaagttttcttcgagaccttcaatgtgcccgctcttttcatctccatgcaagctgtactcagcctttacgctacaggcaggaccacaggggtggtgctggattctggggatggagtcacccatgctgtgcccatctatgagggctttgccatgccccactccatcatgcgcatcgacatcgcgggccgggacgtctctcgcttcctgcgcctctacctgcgtaaggagggctacgacttccactcatcctctgagtttgagattgtcaaggccataaaagaaagagcctgttacctatccataaacccccaaaaggatgagacgctagagacagagaaagctcagtactacctgcctgatggcagcaccattgagattggtccttcccgattccgggcccctgagttgctcttcaggccagatttgattggagaggagagtgaaggcatccacgaggtcctggtgttcgccattcagaagtcagacatggacctgcggcgcacgcttttctctaacattgtcctctcaggaggctctaccctgttcaaaggttttggtgacaggctcctgagtgaagtgaagaaactagctccaaaagatgtgaagatcaggatatctgcacctcaggagagactgtattccacgtggattgggggctccatccttgcctccctggacacctttaagaagatgtgggtctccaaaaggaatatgaggaagacggtgccccgatccatccacagaaaaaccttctaatgtggggacatcatcttcacctctctctgaagttaactccactttaaaactcgcctttcttgagtcggagtgtttgccaggaactgcccttggtgggaatgcgtggtgtggaatatgagtgtgttgtgcacatgccaagtggccgtttggcccctgggaacccctggggcccaagaaagggacgaatggaactaacctgcaagtgggggaagggccttggagggccttggc

SEQ ID NO: 168438 - DNA, 340 bp, Homo Sapiens
ctgttgcgaggaatgctgagtacaactttggttaagaaacactgaggtcatggataaagagtcacagatgccgatgccaagggtacagacactgacaaaagtagccccaataagatggcaggatttgggggtggtgtctttccttcaataacaaatgcgttcagaaggttcaggagcatgatccacaagggttttccaagtcagaacatcctgaagaatcttctcccacaaggccggatgcgaccagagaaactgatcgcaattctcaagcatgcgtttgtatgcaaggcacaatctgcagtttctcagcaattcatcagcaagcatggatactcgtagc

SEQ ID NO: 168439 - DNA, 731 bp, Homo Sapiens
  misc_feature (709)..(709): n is a, c, g, or t
  misc_feature (717)..(717): n is a, c, g, or t
gctgctatgaatatgagtatacaaatatgtcttccagacactgctttcagttctttcgggtatatacctgaaagtggaattctggaatcatatgggccttgatacaaagcatgcttgaaaaatgcgatcggtttctctggtcccagcaggcctagtgggagaagattcagcaggatgtcatgacattttgagaaaaactaaatcatgctcctgaaccttctgaacgcatttgttattgaaggaaagacaccacccccaaatcctgccatcttattggggctacttttgtcagtgtctgtacccttggcatcggcatctgtgactctttatccatgacctcagtgtttcttaaccaaagttgtactcagcatttcttaaccaaagttgaattttgaaaagagtcagtccttgtttgctggaattagaatgttaatgtcctagtattattccgaactacagtattaactgcttgttgctagtggattagacagattcttttcttactgtggcttccatgttgggagcagaagcttttcatcctggtcacatgaagacagatggtattattgactggagttgaattatttttatatcttgtctggcacaatatggaaattaatgaaataagacggtgtataatggaattaacacccaaaataagtagaacactgaagatttgaatttgatatttaagtaaaatgggactggntgcagtgncttaagcctgtaat

SEQ ID NO: 168440 - DNA, 899 bp, Homo Sapiens
tattgtacaaccagcaccaccaatacaaatgcgttcagaaggttcaggagcatgatttagtttttctcaaaatgtcatgacatcctgctgaatcttctcccactaggcctgctgggaccagagaaaccgatcgcattttttcaagcatgctttgtatcaaggccctctgccttttctcagcaatcctcaggatatcgcaggttctggtaaacttctctgacaactcaagggccagaccacattcctgtagcagtgaccaagcccgatctgggcccatggccttagctaacagaagtgccacattctccacattgatgggggaaggcccatcactgaggctcccatttagtgactcctggggggctggcctcgtgctcttgctctgtatgagatgaaggagaagcttccattcctccacggtctctgggatccaaccattgtccccttccatcaggctcatatcattcagatacacaatattggtgaaggcctctcttcttctctccagctccaacagagaattagatatccaggccagaaaccacaagacctgcagatgtctgtcattttctctttggttataaaatctgcaggaagtttaattagatgaaggatcagctgactgtaaccccaggaaagcaagtgtgaatgaggcctgggataaccttcatcatccattgtgctggtgcttggtggagcatcaagggacactgccaaagcagccatccaccttaaagactctggttgcagaagggactcaagaaaagatgaccgctgatcttcaggccttgatttcaccagactgtctaaataggccaaaactcagcaggatgatgatgacaagttgtatgatatccgatggcaaatggatggaaagaacttgattaaggatcgaagag

SEQ ID NO: 168441 - DNA, 355 bp, Homo Sapiens
taattaggttgcagaagcacagctgaccagaaatttgctcttaaagataaatctctaaagatagaactcagtgctttatactgagtaatggctcaagaaattcgccttcagccacaagctgtatggtacacagctgatagaatttgctgttgcggctccagctcactgatgctatgaactacgggctagaaacagagggacttaacagggcttgagactagcatttctctagactcagcatccttagctccaaaggttcaaaagagaaattggtaacaactaaccactcaagcaattcctcagcattaacaccaaaaattctccttaatttttcttttcttaaaaattaaatggg

SEQ ID NO: 168442 - DNA, 344 bp, Homo Sapiens
ctgttgcgaggaatgctgaggagttcgatgcagcagctctcggggcggtcggcctggccttagctctttgccacctcgtggccctcaccatctggacaacagcagccctggcccaggttctgaggcccgtggtatcaatggaggccctccccgcatgtccccaaaggcacagcggcctctgagaggtgcacaagactctgtcttcgcccagtaataggccttctggagaaacttctgttccacctcctcctgcagtgggccggatgtatcccccgcgttctcccaagtctgctagccctgccccaatctcagcattcctcgcaacaggggccgagctcgatcta

SEQ ID NO: 168443 - DNA, 467 bp, Homo Sapiens
  misc_feature (69)..(69): n is a, c, g, or t
  misc_feature (133)..(133): n is a, c, g, or t
  misc_feature (141)..(141): n is a, c, g, or t
  misc_feature (143)..(143): n is a, c, g, or t
aaggtggtccccggggagaagtttcgatgcagcagcctcctcggggcggtcggccctgcccttagctcntttgcccaccctcgtggcccctcacccatctgaccaacagcagccctggcccaggtttctgagncccgtggntntcaatggaggcccttcccgcatgtccccaaagcacagcggcctctgagaggtgccaagactctgtcttcgcccagtaatagccttctggagaaacttctgttccacctcctcctgcagtgggccggatgtatcccccgcgttctcccaagtctgctgcccctgccccaatctcagcttcctgtccagagcctcccatcggctcggcagtgccaacctctccagcctccatccctgtgacctcatcagtctcagatcctggagtgggctccatttctccagcttctccaaagatctccctggcccccacagatgtaaaagaactc

SEQ ID NO: 168444 - DNA, 978 bp, Homo Sapiens
tagcgctgggaggggggtgacagcaacagcgacgactatgacctcgagtcttacatgtccaatggatgggaccccaatgaaatgttcaagttcaatgaggagaactacggtgtgaagactacctatgatagcagtctttcttcttatacggtgcccttgagaaaaggacaactcagaagagtttcgtcagcgagagctgcgtgcggaccagttggctcgagagattgaatcaagcccccagtaccgcctacggatcgccatggagaacgacgatgggcgcactgaagaggagaagcacagtgcagtccagcggcagggctcagggcgggagagccccagcttggcatccagggaggggaagtatatccctctgcctcaacgagtccgggaaggtccccggggaggagttcgatgcagcagctctcggggcggtcggcctggccttagctctttgccacctcgtggccctcaccatctggacaacagcagccctggcccaggttctgaggcccgtggtatcaatggaggcccttccccgcatgtccccaaaggcacagcggccttctgagaaggtgccaagactctgtcttcgcccagtaataggccttctggagaaacttctgttccacctcctcctgcagctcccccttttcttccagtgggccggatgtatcccccgcgtctcccaagtctgctgcccctgccccaatctcagcttcctgtccagagcctcccatcggctcggcagtgccaacctcttcagcctccatccctgtgacctcatcagtctcagatcctggagttgggctccatttctccagcttctccaaagatctccctggccccaaagatgtcaaagaactctctaccaaggaacctgggagaactcttggagcccaggagctggctcggatagctgggaaagtccctggtcttcagaatgaacagaaaacgattccacttggaagaactgagata

SEQ ID NO: 168445 - DNA, 974 bp, Homo Sapiens
  misc_feature (552)..(576): n is a, c, g, or t
  misc_feature (604)..(604): n is a, c, g, or t
  misc_feature (903)..(903): n is a, c, g, or t
cctacgtactggcctacacccagagctaccgggcaaagctgaccccaggctgtgaggctgaggctgagacggaggccatatgcttcttcgtgcagcagttcacggacatggagcacaacagggtgctggaggcgctgctgccgctgaagggcctagaggagcgtgtggcagccgccgtggacctgatcatcaagagccaccagggcctggaccgccaggagctgagctttgcggcccggtccttctactacaagctgcgtgccgctgagcagtacacacccaaggccaagtaccatggcaacgtgatgctactgcgcgccaagacgggtggcgcctacggcgaggacctgggcgcggactacaacctctcccaggtatgcgacgggaaagtatccgtccacgtcatcgagggtgaccaccgcacgctgctggagggcagcggcctggagtccatcatcagcatcatccacagctccctggctgagccacgcgtgagcgtgcgggagggctaggcccgtgcccccgcctgccaccggaggtcactccaccatnnnnnnnnnnnnnnnnnnnnnnnnngccatggcaacggggatttgaagggtcnctgcccggtgggacccctgttccggccccagtgccactgccccccccgagggcttgctaagatgtaaggtgtttagggcatgttcccaacccaccccgcccggcctccccaagggaacccttcgggggaacacccagaagcttgccccgaccttgggaagcacttccctgggtccttgtgaaaaaaaccggtggggcccctgcccgcaaggaattgggctggggccctcgggccgcccgtggggggcttgcgcctttggtccttttctggggcttggcatttttgcatattttttggcnctttgctggggaaaaaaacccccccagggcctgtgtctcccccttggcacaagaacccccttccgggcccg

SEQ ID NO: 168446 - DNA, 1218 bp, Homo Sapiens
taagagaggggcggtggtgggggtgatcataatctggtgcatcgtcgggtctggtatttgcgcactggggaggtggtgagcgggatttagggggcgttaaagggaaattggagtagagaactataagtgtggggtgctgagctactataaaatgggggtgttgtttttggcgtggtgagtgtggtcggcagtgaatatatggccggtagcacgggtaggcggccaaccagggagttattttaaccaagagccccagcgaaattattcctcaaacgtataggcaaagcttgcgtgggttctaccccgagagagtctcacataggaaagcgcgccgggtcgagggtgggaacaaatgcctgtaaccccgtaccatgtaaggcagccggtcgggcgggcagtgggtatcgggccggagacatggataccccaaggacaggacccgtgtgagcaattggacgtggcgtgggagaagggggggtaaaagatagggagatggtggagtagacctccggtgggcaggcgggggcacggccctagccctcccgcacgctcacgcgtgggtcagccagggagctgtggatgatgctgatgatggactccaggccgctgccctccagcagcgtgcggtggtcaccctcgatgacgtggacggatactttcccgtcgcatacctgggagaggttgtagtccgcgcccaggtcctcgccgtaggcgccacccgtcttggcgcgcagtagcatcacgttgccatggtacttggccttgggtgtgtactgctcagcggcacgcagcttgtagtagaaggaccgggccgcaaagctcagctcctggcggtccaggccctggtggctcttgatgatcaggtccacggcggctgccacacgctcctctaggcccttcagcggcagcagcgcctccagcaccctgttgtgctccatgtccgtgaactgctgcacgaagaagcatatggcctccgtctcagcctcagcctcacagcctggggtcagctttgcccggtagctctgggtgtaggccagtacgtaggtgggcgagccgtcgaacaggaagaggctgttgtgggtgggggctgggctctgctgggcctgcagctgggagcacatttcaaaggccacgcaggccccgtaggagtagccggccacgcggtaggggccctcgggctgcacctgcctgatgcagtcgatgtagtaggcagccagg

SEQ ID NO: 168447 - DNA, 1077 bp, Homo Sapiens
  misc_feature (549)..(678): n is a, c, g, or t
  misc_feature (686)..(702): n is a, c, g, or t
  misc_feature (741)..(781): n is a, c, g, or t
  misc_feature (817)..(826): n is a, c, g, or t
  misc_feature (1024)..(1033): n is a, c, g, or t
gggaactgggctgggcctcgtgcgcccgtggggtctgcgcttggtctttctgtgcttggatttgcatatttattgcattgctggtagagacccccaggcctgtccaccctgccaagactcctcaggcagcgtgtgggtcccgcactctgcccccatttccccgatgtcccctgcgggcgcgggcagccacccaagcctgctggctgcggccccctctcggccaggcattggctcagcccgctgagtggggggtcgtgggccagtccccgaggagctgggcccctgcacaggcacacagggcccggccacacccagcggccccccgcacagccacccgtggggtgctgcccttatgcccggcgccgggcaccaactccatgtttggtgtttgtctgtgtttgtttttcaagaaatgattcaaattgctgcttggattttgaaatttactgtaactgtcagtgtacacgtctggaccccgtttcatttttacaccaatttggtaaaaatgctgctctcagcctcccacaattaaaccgcatgtgatctccnnnnnnnnnnnnnnnnnnnnnnnnnnnnnnnnnnnnnnnnnnnnnnnnnnnnnnnnnnnnnnnnnnnnnnnnnnnnnnnnnnnnnnnnnnnnnnnnnnnnnnnnnnnnnnnnnnnnnnnnnnnnnnnnnnccttttgnnnnnnnnnnnnnnnnnaaaaaatttttaaaaacttttttttgggcgccggccccnnnnnnnnnnnnnnnnnnnnnnnnnnnnnnnnnnnnnnnnnacccgggcccagccaaaggcgtctgatttccccccnnnnnnnnnnccccccgggggacaacagacgttttttaaaaaaaccaaaagggaatttctggggcccttttttgggattttatcaaagggggtccccacgggagcccctctaatttaaaattatcgccccgcccccttgggccatttttttagaaaaaagggggggaaaattcccataaaaaactttcccgccccccaaatggggaannnnnnnnnnaaaaacgggggttttgtaaaaacccccttataacccccgccgcg

SEQ ID NO: 168448 - DNA, 672 bp, Homo Sapiens
agctgaccccaggctgtgaggctgaggctgagacggaggccatatgcttcttcgtgcagcagttcacggacatggagcacaacagggtgctggaggcgctgctgccgctgaagggcctagaggagcgtgtggcagccgccgtggacctgatcatcaagagccaccagggcctggaccgccagagctgagctttgcggcccggtccttctactacaagctgcgtgccgctgagcagtacacacccaaggccaagtaccatggcaacgtgatgctactgcgcgccaagacgggtggccctacggagaggacctgggcgcggactacaacctctcccaggtatgcgacgggaaagtatccgtccacgtcatcgagggtgaccaccgcacgctgctggagggcagcggcctgggagtccatcatcagcatcatccacagctccctggctgagccacgcgtgagcgtgcgggagggctaggcccgtgcgcctcgcctgtcaccggaggtcactccgaccagttcccatcgctagctgagtgacacattggcggcgcatgccgtgaggcgtagcaggcgatggaagccgagtcaacaggagtcacacgacgagagtcgcgggtggatgcataggtgagacatgagaagtgataggcagatgggagaggggaggacaaa

SEQ ID NO: 168449 - DNA, 749 bp, Homo Sapiens
ttgaggttccctaggaatgggaaataggggtggaaatggggagagaggaagaggagcgagtaggcaagaggggcaaaccgggactttcggatggacggagagccaaatggtgggagcagggctttggtttgctgtgaggggcgtgggagagggaatcgcgggtgaggagggggctgcgtgtggggaggaggcttgtgtgaggggcaggtgggccctggtctagccctgggcgcaaccgccagccggctgggcggggagagagcttggagtccagccccggctgggagctgagggccaagcaattgggcagggcagtcccagatgaaaggagtaccactgaatctgcctccagctgaataaaccatggagaggaaaaacccatccagagagagccccagaagactctctgccaaagtaggcaaaggcccagagatgaagaaagtggctcgtcaagcttgggatggctgctgctggagtcagacaaggactctgcgttttcaggatgggagctcggaatgtctgagctctgcagagcagatggggtccgggacatgctgagcgccttaggctggagcagagaagacaggccgaggcagaactccagaactgcaaagaatgccttccctaccctggtctcccatggtcgtcatgaagaatgtgcttgtcaaacaggggcagcagctcatcccagctccagtcgtggactgtccagccctcctttgaagtgatctcagcattcctcgcaacag

SEQ ID NO: 168450 - DNA, 336 bp, Homo Sapiens
gagctcggtacccctgttgcgaggaatgctgagtaaggtgtgagctgcgactgaagccctttccacattcataacatttatagggtctgtctccagtgtgggtcttctgatgtcgattaaggtctgagatctgactgaaggcctttccacaatgagaacatatatgatagcggatgcctgtgtggacttctttgtggacaagtagatcagtgactggttggagaggatagcttacccactcttctgctgttaaatctccccattgtctttctgacctatctccgctttcaaagccctcttcactttcaggattttcctcagcattcctcgcaacag

SEQ ID NO: 168451 - DNA, 453 bp, Homo Sapiens
ctgttgcgaggaatgctgaggcaaaggaacgtttaaacactgttagtgggaatgtagacttgtacaaccgttatggagaagagtatggaggttcctgaacaaactaaaaatagaactaccatatgattcagcagtcccactactgggtatatatccaaaagaaaatccatatatggagacatctgcacctgccatgctcgttccagcactattcacagtacccaagattggaatcaacctgtgtctatcagcaaatgaacagataaaatgtggtatatataccccgtggaatactatttggccattaaaaaaacaaaattctgttattctcagcaacatgtatgatcttagaagacattatgttaagtaagccaggcacagaaagataaatactccatgtactgtacttatgtggaaggtaaaaaagatctcatagaagtagagagtgctcat

SEQ ID NO: 168452 - DNA, 649 bp, Homo Sapiens
agacggtgctggtgactcgtccacactgctcgctccggatactccaggcgtctcccgttgcggccgctccctgccttagaagccagccttggacacttgctgcccctttccagcccggattctgggatccttccctctgagccaacatctgggtcctgccttcgacaccaccccaaggcttcctaccttgcgtgcctggagtctgccccaggggcccttgtcctgggccatggcccagaagggggtcctggggcctgggcagctgggggctgtggccattctgctctatcttggattactccggtcggggacaggagcggaaggggcagaagctccctgcggtgtggccccccaagcacgcatcacaggtggcagcagtgcagtcgccggtcagtggccctggcaggtcagcatcacctatgaaggcgtccatgtgtgtggtggctctctcgtgtctgagcagtgggtgctgtcaactgctcactgcttccccagcgagcaccacaaggaagcctatgaggtcaagctgggggcccaccagctagactcctactccgaggacgccaaggtcaagcaccctgaaggacatcatcccccaccccagctacctccaggagggctcccagggcgacattgcactccttcaact

SEQ ID NO: 168453 - DNA, 313 bp, Homo Sapiens
aaatagactttgcccccgtaggggccgtggccggcagcagtccgggcccgcacctggaaactatagatgtggccagggctcagctgtgtcacggtggcagtgttggtctcgctggtcagggtgaaggagtgggattcgtcttctgcctggtcatagtagcggagctgatagtccaggatgttcccattggtctggtcgggctgcggccaggacaccgtgatgctgttggatgcccggctacacctggtgcaccatcagggacagcagagggcacttcatggctgtgctgacatgatgctgcagctacgaggct

SEQ ID NO: 168454 - DNA, 728 bp, Homo Sapiens
  misc_feature (24)..(24): n is a, c, g, or t
gtcttccacaatgctgtgtccgcntactttgctggaaccagaaacagctggagcagaccctgcagcagttcacatccaagctgcggcttccaggagctgagaaaccctcctggctagaggagcagtgagctgctcccagcccaacttggctatcaagaaagacattgggaagggcagccccaggctgtgggagattggacatggtacatcctttgtcacttgccctctggcttgggctcctttttctggctggggcctgacaccagttttgcccacattgctatggtgggaagagggcctggaggcccagaagttgctgccctgtctatcttcctggccacagggcttcattcccagatcttttccttccacttcacagccaacggctatgacaaaaccactccctggccaatggcatcactcttcaggctggggtgtgctccctgaccaatgacagagcctgaaaatgccctgtcagccaatggcagctcttctcggactcccctgggccaatgatgttgcgtctaataccctttgtctctcctctatgcgtgcccattgcagagaaggggactgggaccaaaggggtggggataatggggagccccattgctggccttgcatctgaataggcctaccctcacccacccacccagtttaattgtgcttagagcccaagaagattgggatctagcactaggaataaacctttcataaaagcaaaaaaa

SEQ ID NO: 168455 - DNA, 619 bp, Homo Sapiens
tcgtcttttgtttcaatgggcgcggtccctgcctccctcatctcccagctgttcttcatgcgcctggtggggaagacgcccattgagacactgatcagagacatgctgctgtcggggagtaccttcaactggccctacggctcgggccagtgaccatgacggggccacgtgtgctgtggccaggcctgcagacagacctcaagggacagggaatgctgaggcctcgaggggcctcccggggcccaggactctggcttctctcctcagacttctattttttaaagactgtgaaatgtttgtcttttctgttttttaaatgatcatgaaaccaaaaagagactgatcatcccaggcctaagcctcatcctccccaggacccctgtccaggatggagggtccaatcctaggacagccttgttcctcagcacccctagcatgaacttgtgggatggtggggttggcttccctggcatgatggacaaaggccggcgtcggccagaggggctgctccagtgggcaggggtagctagcgtgtgccaggcagatcctctggacacgtaacctatgtcagacactacatgatgactcaaggccaataataaagacatttcctacctgc

SEQ ID NO: 168456 - DNA, 366 bp, Homo Sapiens
cgatccatccctttccccacgtgatatcatggaccgtgtgtgacttattttctacggttttcctggatagtattctatggatagtgggtgttcagtgtgcattgtcaagtgacagtgtagatggatgagcatgtgcacagatgaataaatgagtgggtaggcaggcaagctgtgtctgacagactgtgatgagaagactgacatttgtatagggtgcaataatgtttaagattggggagattgttagagacagagagtttacagtactaggctgtaagaaattactgggtagttaagagcaagagaatgacttgatgaaactggaatacaaggaataataatttggggaaagggatgaacggtagg

SEQ ID NO: 168457 - DNA, 306 bp, Homo Sapiens
gcttccccacataataggcttactctgctgtaaacctaccatcttaaatcatttcttttaacatttcacagtgtaggtctgccatatcatagcagccttattgctcatattttgagaatggtcagaaccttcaaattacctattgccacaaactccaaatcacaatcactgggcttttccctttacagcaatgtatctcagagtgtattccatggaaccatggcatttctgggcagcttctagagaggttcacaggcaggacggccattttggggagagagaagcataggggaaagggatggatcg

SEQ ID NO: 168458 - DNA, 413 bp, Homo Sapiens
ctacatggggagtctccctcagaaacagccctaaagcctcctacacattccaacctcaaaagccctcagggaatgagtattactgtaaagttatggctctcctgtccctggtgaccggtagtgctcaggtgccaggtatataagcgtagcgtggagaaaagaaaaggtgtaaagcagggaagatttgggcgacgcaagggtacgggagactagttagccggcgacatgactgggctggcatttgaaagatctgggttctcatcctccctctgctccttgcaggccacgtgcccgtagtaaatagatactcatccactgtgggttttggtttcgccgtcaccccactgcctcactggattgtgaggatcatatgcgacaatgtatttgaaaacgactagaacattatcggggaa

SEQ ID NO: 168459 - DNA, 299 bp, Homo Sapiens
agaactgaaatgtctcctcacccagggtggttattgggcccaacttggaatggggttgagtacgaaggttaaaaaacatatactttggtattatattggtcattgtaatagcagttgtaaaatatggggggaaagggatggatcgtaaaaaaaactcttacagtctctgagtgatgagtgtctttcatatgtctaatgatacaattggtgaattggtgcccctctaaatagcttcaggatggaagctggtcacctagaaagaccatgcatgaatagatcctgtggaaggggaatgaatc

SEQ ID NO: 168460 - DNA, 495 bp, Homo Sapiens
  misc_feature (449)..(449): n is a, c, g, or t
  misc_feature (471)..(471): n is a, c, g, or t
gcaactgaatggattacattccaggtcaaacgtgtaaagaaacccaaaggagatcataagaaaactcctgggaaaaaagtagaaacaggtctagtatagaaaatggacatcgttaccaagcaaacctagagatcactggccaccaaggtggcatctcctgggccacaagggctactagactggaagaccaggaaagtgccatagacataatgtaactggatttcagcaaggcatttaacagagcctcttatgatatccttgtgaaccagatggagagatgtgggcttgaagccttcccattgcctacaggataaaattcaaacttcctagtgtggtgtacaagaccctttacagcccgcctctgtgtacccttcaacaccattctctgaaccaaccatgctcatgtttttaccttcagtgcctttggcacatggtatttccctctggcnggggattgccctgttgcccccnttttgcccttttgccgtggttaaa

SEQ ID NO: 168461 - DNA, 128 bp, Homo Sapiens
ggaaacaacaatctgagcaattgtccttgtcttttgtaagaaaatcacatgattaaaaaaatagatgactagcaatattgttgtcacttggtactgcagagtagggagaggccattcagtgcaataca

SEQ ID NO: 168462 - DNA, 466 bp, Homo Sapiens
acctgcacctctacctccctccccaccacacagagaaagagcatctacaagccaggaagagaagcctcacacagaaaccaaccctagacagatctgtgagaaaattctgtcattataaggcactcagtctggtattctgttatgggagccccagcagcctgataccccaggttcctgtaactccctgcctcctcctctcttctgctgttctgctcctcccagacagagcctttccctcaccccctgaccccctgggctgaccaaaatgtgctttctactgtgagtccctatcccaagatcctggggaaaggagagaccatggtgtgaatgtagagatgccacctccctctctctgaggcaggcctgtggatgaaggaggagggtcagggctggccttcctctgtgcatcactctgctaggttgggggcccccgacccaccatacctacgcctagggagcccgtcct

SEQ ID NO: 168463 - DNA, 1009 bp, Homo Sapiens
  misc_feature (26)..(26): n is a, c, g, or t
  misc_feature (35)..(35): n is a, c, g, or t
  misc_feature (53)..(53): n is a, c, g, or t
  misc_feature (86)..(86): n is a, c, g, or t
  misc_feature (94)..(94): n is a, c, g, or t
  misc_feature (151)..(151): n is a, c, g, or t
  misc_feature (175)..(175): n is a, c, g, or t
  misc_feature (230)..(230): n is a, c, g, or t
attccacaccatgatctctcctttcnccccaggancttgggataggaactcanagttagaaagcaaaattttggtcaagccccagngggtcagngggtgagggaaaggctctgtctgggaggagcagaacagcaagaagagaggaggaggnagggagttaccggaacctggggtnccaggctgctgggaagatgcagattatgacagagcttgcacgatgctggcacccnatgccaaccactctacgtggctttcctcttcggaaaagatggtgggctcccttcttcactgtgcccctccctactctggccactaggggtgggaaatacgagtgagaatccttccagatttacttccgccaatccagaggtacaggcttttaggcaaagggcagagaactgcccaatttgctgcaggaaggccaaggaaacccagggggaaaggagctgcatgggaatggggaagggaggctcagagcaagagaagcccgcagagggaggaaagagcacagataggcactcagaaaccaaacctggtaactgaggctctgcagacactggcctgaaaggatgctcatcgcatggtgggagaggaagggagggaaggaacaatcaccagagaagagtggaaactccccagcaacctgatacccttcccatcaccgggacccatcagccactggcagccattctcttcctacccacaggcaaaggattcagaaattaatagtgatttttcccaaatttagggcctatatgggtagggaacagggagtggggctggggaggagaacagtttccatttttaaccacagaggtactgcagaagaaaccagtgagctgtccctcccttccccttctccacacctccaaatcacaggggtgagaaaggaactccagccgagggcaggaccaacccctcccccaaccctcgatgttaaataaatagaagtggtgggggaagggggtggagatgaatggggaaaacagaggtgggggttatagttccc

SEQ ID NO: 168464 - DNA, 1329 bp, Homo Sapiens
  misc_feature (806)..(818): n is a, c, g, or t
  misc_feature (831)..(916): n is a, c, g, or t
  misc_feature (923)..(923): n is a, c, g, or t
  misc_feature (1053)..(1061): n is a, c, g, or t
aaagaggcacttcagaaacacacatttcttaaaaggaaagtgcggcttcaagatattgtgtaaatactgagccaagacatttctggagctgtgctctgtctccaaaaacctcaatgcctttagggctttcctcagtggtccagctagccttctctttggaggaggatgaagccgcattgcacattctctgcttcctgtcgtagcctctgttgtcaatggaaatgcggaagcccatctggtgcccgtcagtgagaagcaacgttctgcgctctctccgttagacctccatgctgtccccagtcttgtccattccatgctgctgtgttacaaactctcagaggtagtttgcaggggaggaaggggaatatgattttaaaaacaaaatatttacaactactaaaattcttaggatcacctgacctttgtaatgttatttatgttggggagggaggggggctgagaaggggaaatcagcagtgtgcaacatctttataatttgtactttaattactaatcacaaggtaaccaataagttgaaatcctatataacaggtttatatatatagaatatgtatatttgaagccctctacagactgagtctatgttttactaattctttgttcactgtgttacccatcttggaataagttgtgaatgtcagctccctctctctgaggcctccagacttagctcctcaggagggtaatgagccaaggttgagtgtttccatacaatgcttttacctttgatcccaggagaatcagaaactccaacattttggaatcttcaagggcacatactgagnnnnnnnnnnnnnttgtttatgagcnnnnnnnnnnnnnnnnnnnnnnnnnnnnnnnnnnnnnnnnnnnnnnnnnnnnnnnnnnnnnnnnnnnnnnnnnnnnnnnnnnnnnngaccttngggacgcttcggcccccaaaaaatttttcaaaacaacccatttggcacggggccccggcaggaacgggacccgggaaaaacctgtttctaaggaaagctgggtttcgcccagggctaaaaatccccgccnnnnnnnnncccccggggccaacccaagagggggaccaaagcccattggggttccaagcgcatgaaggccatccgaccccgaaatcaaatgaagcccgatcttaaattaccccccgccctggtattaattcaataagggttggtgctaaattgaaaatttctcgccaacggggaagcccaaacccaaaatggcctggggggacacttgaaatcccttgggcgggcattggccaaactatgaatggcccccggggtataaaaaattggggccgaaggg

SEQ ID NO: 168465 - DNA, 353 bp, Homo Sapiens
cgagatcgtaaatcgtagactaggagaagtcttctgagtctcctaattaatacctatcatctatcagagtataaggaaacaatccatgcaagagagagccctatctacaactgtagactagtgtcccaataagagagtcacagcttcagagtgtttgctgaatccaggtctgagatcacaatcccacctaaggacaggatccgcatataagagtcgcacattggtataattgattagtggtagagctgagattagaatccagattcctagtctagtatccttcccactgtacctcattatctcttttcagggggaaaaaggagcagctcttaagaaacaaaatgaaccaagtg

SEQ ID NO: 168466 - DNA, 439 bp, Homo Sapiens
cggagcacatggctaggtgctgcaggttgtcccgtcactggggtccatctgtcttctttgcgccttccgcggctgctgcctggggccctttcctgctctcccgtccgctgtgggtggccccagcactcctctgtgggttttaccgggaaaggtggccccagctgttgacttccagtcactgtcccagacggcacaaggttttctgtaggaaagctgccagttgccccggccccttttcttcctttgtcccgttgtcgaggttttttcaaatagcgtgttgttcagtatgcaaatcaattattttaagaatcgcttttgtaaatatctttgtgaatattttagtatcgtctttgataatattcaacattttcatgacctggttatagcctttgctggtgtttttaaaatacctggactcaatgacaaagaccgagtcttc

SEQ ID NO: 168467 - DNA, 1172 bp, Homo Sapiens
  misc_feature (73)..(83): n is a, c, g, or t
  misc_feature (438)..(530): n is a, c, g, or t
  misc_feature (701)..(710): n is a, c, g, or t
  misc_feature (876)..(888): n is a, c, g, or t
ccaataagctgggtgtctaaaaggacagcttctcttccactcaatattgccatttttccaaagaaacatgttnnnnnnnnnnnttataagacatggactagtcctcattagcatgtttgcatagcaaccagtcaagagcatttacactatttctgctgatatactcaccttagaactgctcagaaccctggtgctttatttttgttttaatcttttgttgccagtgatgattttcctattctgcaaatagtgtatttcctggattacacatagtatggtttcctgaagtattctgataaatgtgttttttaaaacctcaatatactttttagaaaaggagcatctggttatgcataaagcagagctaaaactaaatttctttcatgtcctccctacttcctcagtgtcaatcagattaaagtgtgtaatcctaaaaannnnnnnnnnnnnnnnnnnnnnnnnnnnnnnnnnnnnnnnnnnnnnnnnnnnnnnnnnnnnnnnnnnnnnnnnnnnnnnnnnnnnnnnnnnnnaaccctgggcggcccccctcgggcctcttaaaaaaatttttcaaaaacctttccttttgggggccccggcccccccaaggggtaaaggggcccttgggccccaatcgtttctcccaagaaaaaaacctcgggctattggaacaacggcggttgggacttccccccccaatnnnnnnnnnnccgccccggggcgggtacacccagggcctgtttcttgataacaaaatccccccaaaaaggggggcctctcttcaggggcctccctttcccggggaagtcccccctcacacgcgggggggtgtttccctgcgggggcggcccttcctattattttaccatcattttnnnnnnnnnnnnntccctcggtgggtcccctatacccttcaccaaaaaaagtggcgtggggggaattcccttatttcgcaccactatatcttctcgcccccccctgttgtgggggaaaaacctttccccttcaaccaccaggcggtgtgtactgtataaagcacaccacatccatatcttcctctgcccccgccgtgcgtataataactacaaacacactggatcctcagggtagcttcatgcgtaaacgaataaataatattttccaccccccctgtgtcggctatgacacaaaca

SEQ ID NO: 168468 - DNA, 797 bp, Homo Sapiens
gtcctcagaatggttggaatgaccctccagctttgaacagagtacccaaaaagaagaagatgcctgaaaacttcatgcctcctgttcccatcacatcaccaatcatgaacccgttgggtgacccccagtcacaaatgctgcagcaacagccttcagctccagtaccactgtcaagccagtcttcattcccacagccacatcttccaggtggccagcccttccatggcgtacagcaacctcttggtcaaacaggcatgccaccatctttttcaaagcccaatattgaaggtgccccaggggctcctattggaaataccttccagcatgtgcagtctttgccaacaaaaaaaattaccaagaaacctattccagatgagcacctcattctaaagaccacatttgaggatcttattcagcgctgcctttcttcagcaacagaccctcaaaccaagaggaagctagatgatgccagcaaacgtttggagtttctgtatgataaacttagggaacagacactttcaccaacaatcaaccagtggtttacacaacattgcaaggagcattgaaactcgaaactactcagaaggattgaccatgcatacccacatagttagcaccagcaacttcagtgagacctctgctttcatgccagttctcaaagttgttctcacccaggccaataagctggggtgtctaaaaggacagcttctcttccactcaatattgccatttttccaaagaaaacatgttaacacctcactcacaacttatcagacatggacctagttctcattagc

SEQ ID NO: 168469 - DNA, 593 bp, Homo Sapiens
gggcactcagtccccagtcacccaaggggcagcttgcagcttgcagtaacaaaatgtcctttctcttcagagctgaggagggactccacaacttattatacctaaccaaaatccatttctgaagccaacggggagagcacctcagcagacagcctttaatccattcagcttaggttttcttcttctgagaatcttttaatgtcatttatatacaaaagaaattctcaaatgttaaaataaaggaatagtttattgcttaatataacttatcatcactttgcttctttactgaatcttctacactcttgcctgatacctaaatataatgtttgtttttaactcaaaaaatgtactgtagtatggaaaatggatagcagtagaataaagtcttaagattatttttataattacaaatccatatgtgtatcagaagtgttccactctttaattttctaatgagaatggattatcattttagttatagtatatttagagaactaaagacttttcacatatcatatagtttccttagataccaatagtttcctttatgaataccatcaacatcattcagaaacaaaatgaaccaagtg

SEQ ID NO: 168470 - DNA, 1409 bp, Homo Sapiens
tccccggatcagtatgtgaagttcgacgccgtgagcggtgactactatcccatcatctacttcaatgactactggaacctgcagaaggactactaccccatcaacgagagcctggccagcctgccgctccgcgtctccttctgcccactctcgctttggcgctaacagctctatcctgcccagagcacacaagtcgccctggaacttcctgggtgatgagttgtacgagcagtcagatgaggagcaggactcggtaaaggtggccctgctggagaccaacccatacctgctggcgctcaccatcatcgtgtctatcgttcacagtgtcttcgagttcctggccttcaagaatgatatccagttctggaacagccggcagtccctggagggcctgtccgtgcgctcggtcttcttcggcgttttccagtcattcgtggtcctcctatacatcgtggacaacaagaccaacttcgtggtccaggtcagcgtcttcattggggtcctcatcgacctctggaagatcaccaaggtcatggacgtccggctggaccgagagcacagggtggcaggaatcttcccccgcctatccttcaaggacaagtccacgtatatcgagtcctcgaccaaagtgtatgatgatatggcattccggtacctgtcctggatcctcttcccgctcctgggctgctatgccgtctacagtcttctgtacctggagcacaagggctggtactcctgggtgctcagcatgctctacggcttcctgctgaccttcggcttcatcaccatgacgccccagctcttcatcaactacaagctcaagtctgtggcccaccttccctggcgcatgctcacctacaaggccctcaacacattcatcgacgacctgttcgcctttgtcatcaagatgcccgttatgtaccggatcggctgcctgcgggacgatgtggttttcttcatctacctctaccaacggtggatctaccgcgtcgaccccaccccgagtcaacgagtttgggatgagtggagaagaccccaccagctgccgccccccgtggccgaggttcccaccgcaggcagggggccttcacggccccaccccctggcacccacccacggaccaacccggccaccaggggagggagggccctccaacggacctggtccaccaaggccccacccagggggggcccgcctcctggccaaggtaggccccaggaaaagcccccttccccaacgcccggtcaggaggaacaatgaaaaaaagggattcaggtccgagaaactgggtccctccacccttgggttccggggattccctggagggaccaaactatcccccttggcggtgtcccggggaccctccatccgtccctcccccacttccccagtgtcggccccctttttcc

SEQ ID NO: 168471 - DNA, 957 bp, Homo Sapiens
  misc_feature (19)..(19): n is a, c, g, or t
gtctaggtagcgagcctgngtggcgaattccgcacgagggtgaccagcaatggcagcatcgggagggacccgccagcggagacccagcctcagaacccaccggcccagccggcacccaatgcctggcaggtcatcaaaggtgtgctgtttaggatcttcatcatctgggccatcagcagttggttccgccgagggccggcccctcaggaccaggcgggccccggaggagccccacgcgtcgccagccgcaacctgttccccaaagacactttaatgaacctgcatgtgtacatctcagagcacgagcactttacagacttcaacgccacgtcggcactcttctgggaacagcacgatcttgtgtatggcgactggactagcggcgagaactcagacggctgctacgagcactttgctgagctcgatatcccacagagctgtccagcagaacggctccatctacatccacgtttacttcaccaagagtggcttccacccagacccccggcagaaggccctgtaccgccggcttgccacagtccacatgtcccggatgatcaacaaatacaagcgcagacgatttcagaaaaccaagaacctgctgacaggagagacagaagcggacccagaaatgatcaagagggctgaggactatgggcctgtggaggtgatctcccattggcaccccaacatcaccatcaacatcgtggacgaccacacgccgtgggtgaaagggcagtgtgccccctcccctggatcaatatgtgaagttcgaccccgtgagcggtgactactatcccatcatctacttcaatgactactgggaacctgccgaaggactactacccccatcaaccaaaagcctggccagcctggcgcttccgggtctcttcctgcccacttctggcttttggcgcctggcaagcttctatgctggcccgaaaacccaaagtcccc

SEQ ID NO: 168472 - DNA, 343 bp, Homo Sapiens
atctgaaggctgcttgtgattggctggggttgtcttatttctaacataagcatttaccagaaatgatccaagttaagttttgcttatgcttgtatgtaatatgaccccgtgaagtttagctggtgtttgtagtttaagacaaagattaaagctatttctaagggccaggtggttttgtttgctaaggattattccagtctcaatttaaattttgcaattaacaaaggcaaaaagagaggaaacaggagagatagggacaaggcaggaagaaaaggagatgagctagggataactcatctcaaaattgggcagccttcagataaaatggggatccgtgtatgaa

SEQ ID NO: 168473 - DNA, 848 bp, Homo Sapiens
catttaatctgaaggctgctatactcgtgctcagctggaatctaacgaaatttttaatgttattataaatccctttaccctcttcgattgcagacattatggtttgaaaatcatcatccactaggatcatgtctgctgcctctttgcaaacatctgtaccagtctggcccatcgcaactccaatgtctgcagccttcagataaaatgcattttatctgaaggctgcccaatttgagccacctggacgtcaaatgattgccatcagaaagagacaacttgaagaaaccaacaatgactataaaacagctgacggcggctacatgactctgaaccccagggcacctactgacgatgataaaaacatctacctgactcttcctcccaacgaccatgtcaacagtaataactaaagagtaacgttatgccatgtggtcatactctcagcttgctgagtggatgacaaaaagaggggaattgttaaaggaaaatttaaatggagactggaaaaatcctgagcaaacaaaaccacctggcccttagaaatagctttaactttgcttaaactacaaacacaagcaaaacttcacggggtcatactacatacaagcataagcaaaacttaacttggatcatttctggtaaatgcttatgttagaaataagacaacccctagccaatcacaagcagcctactaacatataattaggtgactagggactttctaagaagatacctacccccaaaaaacaattatgtaattgaaaaccaaccgattgcctttattttgcttccacattttcccaataaatacttgcctgtgacattttgccactggaacactaaacttc

SEQ ID NO: 168474 - DNA, 557 bp, Homo Sapiens
cagtcagttagagccgctataaacgttgatctccggagggcaagatgctgctccgggatgggcgttttattgatcagatgtgccttagagtagctagaaagactcatccctaccaaaaagtttttaacagaaggctgctaggaggctttttgtattccctgaggatcatcacatcggccatttcattgttgaaatagcttatgccaaactgcttacccaaattcaacttggcactgcctgtgctttttgccaaatatggattatgaaccatgactctcactttttaaaaatgtgctttggctagcaggaagtagcctttaggaacgcagaggaattagtctccggcagtacagcgtgctgcagcgatgtgggatgccaaaactacatttataagtaaaacagaatcctgtattatgtccttccctgaatagatactagaaatcaactttttaatctgttaatagaattagtccttagtcacttggcagcgtattaacatttcttccttctcccagtcgtgggctttgtcgtcatttccagtatctgctcccctaaga

SEQ ID NO: 168475 - DNA, 364 bp, Homo Sapiens
  misc_feature (108)..(108): n is a, c, g, or t
ctggtcgtctctagcaggatccccttttatctgaaggctgccccaatcacagagcctgggtaaggtggaacaggaggcagccccactcggcttttctgattgcatccnacctgtttctgagtgtgttggtttggtttaattcttttcaagggttggagttggaaagtgaaaaccctagacacttgctgtggaatgtttgcctggttgtattggtgtgtccctcttcttcactggcatgtcgctttcaagtgtaccaaaggacattttgttctgttgaaagccacaggaccaaaaggaaaatattgcaactatttgcaaacatacttcccaacctatacaagcagccttcagataaaatggggta

SEQ ID NO: 168476 - DNA, 829 bp, Homo Sapiens
  misc_feature (765)..(765): n is a, c, g, or t
  misc_feature (779)..(780): n is a, c, g, or t
  misc_feature (783)..(784): n is a, c, g, or t
  misc_feature (789)..(789): n is a, c, g, or t
ggacgtgcggctcccctcggcctcctcgccatggacgcggacgactcccgggcccccaagggctccttgcggaagttcctggagcacctctccggggccggcaaggccatcggcgtgctgaccagcggcggggatgctcaaggtatgaacgctgccgtccgtgccgtggtgcgcatgggtatctacgtgggggccaaggtgtacttcatctacgagggctaccagggcatggtggacggaggctcaaacatcgcagaggccgactgggagagtgtctccagcatcctgcaagtgggcgggacgatcattggcagtgcgcggtgccaggccttccgcacgcgggaaggccgcctgaaggctgcttgcaacctgctgcagcgcggcatcaccaacctgtgtgtgatcggcggggacgggagcctcaccggggccaacctcttccggaaggagtggagtgggctgctggaggagctggccaggaacggccagatcgataaggaggccgtgcagaagtacgcctacctcaacgtggtgggcatagtgggctccatcgacaatgatttctgcggcaccgacatgaccatcggcacggactccgccctgcacaggatcatcgaggtcgtcgacgccatcatgaccacggcccagagccaccagaggaccttcgttctgggaggtgatgggacgacactgtgggtacctggccctggtgagtgccttggcctgccgtgcgggactgagtgttccttccagaatctccaccanaagaaaagctgggnnagnnaacanaatgtgtgttcaaactcctcggaagaacccgtgccccggg

SEQ ID NO: 168477 - DNA, 535 bp, Homo Sapiens
tcggacagatatgtattttttatttcccagaacctatcacaatgcctggcacagagcaaatactcaggaaatctataacaaataacattacccaatcaataaattgtcagtactgtaggaattgagaggaagaagtagtcacatgcatttggggctgtaagagaaagatttaatagaaagatggcagtggcatttaagatgcacaaattattaaaattttaactattacagtgtagaagtctaggtagagggaatgatttgtacagtaaagtagaagtggacagagtaatgctttttgtttttgtctgtctggacagtagttggctgtaacaaagtttgtgtctaactaaaaagtacctgttgactcagatagccacagtaagagactagaacgtgatggcataatggtgacaaaaatgagttcaaatctacagtccaccacttcctagttggctcaccacttattacctacacttaatttttgctacctaatctgtaaagtggaaataaaaaaatacatatcggtaccgagctc

SEQ ID NO: 168478 - DNA, 383 bp, Homo Sapiens
gcacgatatactggctatgacctctagtataacgtgaatagaagtggttagagtggacatctttgcctttttcctgattttcggggtaacatgttcaagtatttcacaatgtaagtacaatctatctgtagctctttcatacatgcacttcctctatttataacatctgaatattttcattcttatattaagaattttgataagtagattgaatttagtatgagtactattttcttatatataccacaatggcaaacatgtattataaatcatatttttgtcttaccaattttaatatatgaggggtcttagaaatttgttgtaagttatttttatattccttgtcttttgcatattttttggccaaaatcttcaatacatat

SEQ ID NO: 168479 - DNA, 1092 bp, Homo Sapiens
  misc_feature (161)..(221): n is a, c, g, or t
ggggaacgcagcaagcccaggcggcggtggaaaggctggaggacacacctaaacatgtggaatcccaatgccgggcagccagggccaaatccatatccccccaatattgggtgccctggaggttccaatcctgcccacccaccacctattaatccaccctnnnnnnnnnnnnnnnnnnnnnnnnnnnnnnnnnnnnnnnnnnnnnnnnnnnnnnnnnnnnnaggtgggccccctcatcctgtgccacagccagggtatccaggatgccaaccgttgggtccctaccctcctccatacccaccgcctgcccctggaatccctcctgtgaatcccttggctcctggcatggttggaccagcagtgatagtagacaagaagatgcagaagaaaatgaagaaagctcataaaaagatgcacaagcaccaaaagcaccacaagtaccacaagcatggcaagcattcctcctcttcctcctcctcttccagcagtgattctgactgaatacaggccctggacccttccctcaagtctcaccagttctgctctcccatcaagcttcagatgccatgttgtactgggggaatgtagcccttgtgctccccaccccctacctccacctgagcctcaccctgctgttgagccctgagtggctaggggaaatgggaagaggattgccatggcctggccatcttgttgctgcttggttagatcatatagctaatgaattaggcaggggagctattttttgaagatgatgaactaaatgttgaagacaagtttgagatctgtaaaatgtgattttttacttccacttataatacttgtgattggggaggtttgtggaaattcaattatgatgaaaaacctatcttttttgtaatgttggcatacttggggaatttagtggcaaatacattccccagcaggccttttgttggttgcactaactgcaaggttgctgggaagtagagtccatttggttgatgagctttgactgcggttttggaaccttacctctcctccttagcccaatatgctgtcttgggtcctattcaaataaagttatttctcctggaaataaaaaatacatat

SEQ ID NO: 168480 - DNA, 1012 bp, Homo Sapiens
  misc_feature (846)..(847): n is a, c, g, or t
  misc_feature (961)..(961): n is a, c, g, or t
ccaccgctcctggcgaaggagaacgcagcaagcccaggcggcggtggaaaggctggaggacacacctaaacatgtggaatcccaatgccgggcagccagggccaaatccatatccccccaatattgggtgccctggaggttccaatcctgcccacccaccacctattaatccaccctttcccccaggcccctgtcctcctcccccaggagctccccatggcaatccagctttccccccaggtgggccccctcatcctgtgccacagccagggtatccaggatgccaaccgttgggtccctaccctcctccatacccaccgcctgcccctggaatccctcctgtgaatcccttggctcctggcatggttggaccagcagtgatagtagacaagaagatgcagaagaaaatgaagaaagctcataaaaagatgcacaagcaccaaaagcaccacaagtaccacaagcatggcaagcattcctcctcttcctcctcctcttccagcagtgattctgactgaatacaggccctggacccttccctcaagtctcaccagttctgctctcccatcaagcttcagatgccatgttgtactgggggaatgtagcccttgtgctccccaccccctacctccacctgagcctcaccctgctgttgagccctgagtggctaggggaaatgggaagaggattgccatggcctggccatcttgttgctgcttggttagatcatatagctaatgaattacgcaggggagctatttttttgagatgatgaactaaatggttgaagacaagtttgaagatctgtaaaatgtgaattttttacttccactttataatacttgnntgatggggggaaggtttgtgggaatttccattatggatgaaaaacctattctttttttgtaatggttgggcaatacttggggaaaatttaagtggggaaaataacatttccccnacaaaggggcccttttggtttgggttggcacctaaacctgccaaagggtga

SEQ ID NO: 168481 - DNA, 901 bp, Homo Sapiens
gaaaggtgatggggctggaggacacacctaaacatgtggaatcccaatgccgggcagccagggccaaatccatatccccccaatattgggtgccctggaggttccaatcctgcccacccaccacctattaatccaccctttcccccaggcccctgtcctcctcccccaggagctccccatggcaatccagctttccccccaggtgggccccctcatcctgtgccacagccagggtatccaggatgccaaccgttgggtccctaccctcctccatacccaccgcctgcccctggaatccctcctgtgaatcccttggctcctggcatggttggaccagcagtgatagtagacaagaagatgcagaagaaaatgaagaaagctcataaaaagatgcacaagcaccaaaagcaccacaagtaccacaagcatggcaagcattcctcctcttcctcctcctcttccagcagtgattctgactgaatacaggccctggacccttccctcaagtctcaccagttctgctctcccatcaagcttcagatgccatgttgtactgggggaatgtagcccttgtgctccccaccccctacctccacctgagcctcaccctgctgttgagccctgagtggctaggggaaatgggaagaggattgccatggcctggccatcttgttgctgcttggttagatcatatagctaatgaattaggcaggggagctatttttttgaagatgatgaactaaatgctgaagacaagtttgagatctgaaaaaggtgattttttacttccacttataaaattggggatattggcggaagggttttcgggaaattccaatttgggaaggaaaaaacccaatcttttctttggaaaggctgggcaataactgggggcgaatat

SEQ ID NO: 168482 - DNA, 948 bp, Homo Sapiens
  misc_feature (854)..(862): n is a, c, g, or t
ggggcgaaggagaacgcagcaagcccaggcggcggtggaaaggctggaggacacacctaaacatgtggaatcccaatgccgggcagccagggccaaatccatatccccccaatattgggtgccctggaggttccaatcctgcccacccaccacctattaatccaccctttcccccaggcccctgtcctcctcccccaggagctccccatggcaatccagctttccccccaggtgggccccctcatcctgtgccacagccagggtatccaggatgccaaccgttgggtccctaccctcctccatacccaccgcctgcccctggaatccctcctgtgaatcccttggctcctggcatggttggaccagcagtgatagtagacaagaagatgcagaagaaaatgaagaaagctcataaaaagatgcacaagcaccaaaagcaccacaagtaccacaagcatggcaagcattcctcctcttcctcctcctcttccagcagtgattctgactgaatacaggccctggacccctccctcaagtctcaccagttctgctctcccatcaagcttcagatgccatgttgtactgggggaatgtagcccttgtgctccccaccccctacctgcacctgagcctcacccggctgttgagccctgaaggggctaagggaaaatggcgaaaaaggattgcccatggccctggcccattcttgtttgctggcttggttaagatcataataggctaaatgaatttaggccagggggaagcctaattttttttgaaaggaatgattgaaacttaaaattgttggaaagaacaaaagtttttggggaatcctggttaaaaaatggtgaaannnnnnnnnaacctttcccaaccttaaattaataaccctttgggggaaattgggggggaaagggttttttggttggggaaaaaattccaaatttt

SEQ ID NO: 168483 - DNA, 874 bp, Homo Sapiens
ggtgtattttttaaaggttggagaggttaaaaaaatttcccccatttttaccaggtttttccaaactttttttcttccaaccattttaggttcatccatctttcaaaaaaataagctccccctgcctaatttcattagctaatatgatctaaaccaggcagcaaaaagatgggccagggccatgggcaatcctcttccccatttcccctagccactcagggctcaacagcagggtgaggctcaggtgcaggtagggggtggggagcacaagggctacattcccccagtacaacatggcatctgaagcttgatgggagagcagaactggtgagacttgagggaagggtccagggcctgtattcagtcagaatcactgctggaagaggaggaggaagaggaggaatgcttgccatgcttgtggtacttgtggtgcttttggtgcttgtgcatctttttatgagctttcttcattttcttctgcatcttcttgtctactatcactgctggtccaaccatgccaggagccaagggattcacaggagggattccaggggcaggcggtgggtatggaggagggtagggacccaacggttggcatcctggataccctggctgtggcacaggatgagggggcccacctggggggaaagctggattgccatggggagctcctgggggaggaggacaggggcctgggggaaagggtggattaataggtggtgggtgggcaggattggaacctccagggcacccaatattggggggatatggatttggccctggctgcccggcattgggattccacatgtttaggtgtgtcctccagcctttccaccgccgcctgggcttgctgcgttctcccttcgcagtcccc

SEQ ID NO: 168484 - DNA, 797 bp, Homo Sapiens; identical to SEQ ID NO: 74207
  misc_feature (779)..(779): n is a, c, g, or t

SEQ ID NO: 168485 - DNA, 858 bp, Homo Sapiens; identical to SEQ ID NO: 74208

SEQ ID NO: 168486 - DNA, 464 bp, Homo Sapiens
  misc_feature (292)..(292): n is a, c, g, or t
gggaggaagagccgagactgcgaaggagaacgcagcaagcccaggcggcggtggaaaggctggaggacacacctaaacatgtggaatcccaatgccggtgggccccctcatcctgtgccacagccagggtatccaggatgccaaccgttgggtccctaccctcctccatacccaccgcctgcccctggaatccctcctgtgaatcccttggctcctggcatggttggaccagcagtgatagtagacaagaagatgcagaagaaaatgaagaaagctcataaaaagatgcacnaggcaccaaaagcaccacagtaccccaagcatggcaagcattcctccctcttcctcctcctctcccagcaggggattctgactgaatacagggccctggaacccttcccctcaagttcttacccaagttcttgctccccccttcaaagcttccaaatgcccctggtttggaa

SEQ ID NO: 168487 - DNA, 820 bp, Homo Sapiens; identical to SEQ ID NO: 74206
  misc_feature (731)..(731): n is a, c, g, or t

SEQ ID NO: 168488 - DNA, 439 bp, Homo Sapiens
gtaccgatatgtattttttatttccatgttctaagaaggtgttggtactctgtttccctgaatgttgttctctagactggattgacttgttttccttgtgtcttcagtgtggctttcttcctcagtgttgtaggttgagcgaatgctaccagagtgtgagagaccattgtctcgttggctggcgctcacggacatgcagtcacggtagcgggagcaatcacaaaactgtaatttacttaccaaatctcttcctttccgtagcctcgcctgcctgacttagagaaagaaaagcaataattttacaggcattttgaggtgtctctttgggttctttctgtttgaaaggatatttgtcgaaaaaaagagcaaaaccgttttaaataaactccccctggaaaaaaacccaaaacactggcatctgagtaggaaataaaaaata

SEQ ID NO: 168489 - DNA, 254 bp, Homo Sapiens
tgatttggattctgaagatgtgattggctgaatttgctgttgctgctgttgtaatatcagctgatgatgggaaactttggaaggtggtgaatgaagaggaatctgctgatgttttattagagaatgaggctgaattggagaatatgaagctgtgagagaaaaaaatgacaattagtactgatttcaaaaatacagaaatttttaaatcactctaaaggaaaaagtgttcatcttcagaatccaaatcagggacc

SEQ ID NO: 168490 - DNA, 778 bp, Homo Sapiens
cggtacctgatttggattctgaagatgaggaagaagaggagatacatagctctgattctgattatgagcaggctaaagcaaagtacagtgacatgagctctgtctacagagacagatctggcagtggaccaacccaagatcttaatacaatactcctcacctcagcccaattatcctctgatgttgcagtggagactcccaaacaggagtttgatgtatttggcgctgtccccttctttgcagtgcgtgctcaacagccccagcaagaaaagaatgaaaagaacctccctcaacacaggtttcctgctgcaggactggagcaggaggaatttgatgtattcacaaaggcgccttttagcaagaaggtgaatgtacaagaatgccatgcagtggggcctgaggcacatactatccctggttatcccaaaagtgtagatgtatttggctccactccatttcagcccttcctcacatcaacaagtaaaagtgaaagcaatgaggacctttttgggcttgtgccctttgatgaaataacggggagccagcagcaaaaagtcaaacagcgcagcttacagaaactgtcctctcgccaaaggcgcacaaagcaggatatgtccaaaagtaatgggaagcggcatcatggcacgccaactagcacaaagaagactttgaagcctacctatcgcactccagagagggctcgcaggcacaaaaaagtggccgccgagactctcaaagtagcaatgaattttaaccatcttcagaatccaaattatgt

SEQ ID NO: 168491 - DNA, 376 bp, Homo Sapiens
atatgtattttttatttccaaagattctgagacacctagctcttaccaatgttctgccttccccattctaggaagaaactccacttaatgtggagcatgaagtgactgaggagtcacagaattgtgtcattcttggccactgatgttggggaatatttaataatgctacacaagaagtttgctgggggaacacagagggagactaagcaggaaagattatttcctaccaaaaaagcttagaaacatttctcaatttaagcagcatgtcagctagtgtgcagttgttagcagagagacctgcttccctccaacagactgcaaacatatagtcacacagccatttctgggcactggaaataaaaaatacatatcgtga

SEQ ID NO: 168492 - DNA, 332 bp, Homo Sapiens
taccgatatgtattttttatttccccgtgaacatttggcagagttaaaattttagccatcatacattttattccctgaaatgtatcagtcacagttcccacagactctagatacacatttccttgtgggtgtatgtgtaaaactaccataacaaaacattttctatttcctcattttgattaaaaggaaagaagaaatgctaaactgcacttacataagtgacagtgcaatagtgacacaccatctgtgtacacaatttgtattctgtttaaatttaaagttataatgatcaggtgagaaatgctaagagctaggaaataaaaaatacatat

SEQ ID NO: 168493 - DNA, 342 bp, Homo Sapiens
ctaccgatatgtatttttatttcctcgagggtgaaaagcaacctggtctacttgcctgataggaaccaagacagcaaggactactccttcttttctgttttctgcctagcggtagacaagcctcgtttttcctgttcataaaaagacaaactgcctattctgatctgttaactcggaaaacaaatacttgttctgtctttttaaaagaaagtggctgaaaaatataacatatcaattatcatgtttctacttcatgttaatatagtttcagtgttcttctctgagaggaacaaggttagatttacttccttccctccttcatgggaaataaaaaatacatat

SEQ ID NO: 168494 - DNA, 491 bp, Homo Sapiens
ttcagcggggaacggagtgggtcgaggaggtgatctactttaactggcctctgcgcatgctcctccggcagccactcggcctcctggctatgtctcctgggggaccacctgcatgagcttctgacacaggacggtcgtggagaagatgccctggaggagccacttgggcttgtttttccaccagaccccgaagaagtagacgggcagcccgctgaagatgatggtgaagccgatgccacactccacgggtgtcttccagaaggagacggcgatcaggaagaggcaggccaggatgaagaacacaggcaggcccaggttcaccttgaatgggccgctcaagctcaggctttcttgtggcgcaagccagatcatgccgatgatggcccaggtcccacgcagagccagtggaaaagctgacgaagtcgctgacggcgaagatgtccttggagaagggcgtagagcagcgtcatcacacacggtcaacccgaggg

SEQ ID NO: 168495 - DNA, 334 bp, Homo Sapiens
aacatcatcttcagcgggcagggtggtgcaggctgggcaggctgtgtggactgcacaggctgaggaggctgcaggggctcaccttcaggaggagggccctgagcagcgtgtcttggtccgggaaggcaggccaacagaggaagcggcgggaaactgagtgtgtgtgagctgggccggggggatggtaggtgcggatgtcgccgtaccggtactcttgaaacagctccccgctggagtgcacaatctgcaccccatgggtcaccaccacaggaaggggtcagaggcagcacctggagttggttattgggggtaactgtgagaatacggcctacca

SEQ ID NO: 168496 - DNA, 788 bp, Homo Sapiens
  misc_feature (688)..(688): n is a, c, g, or t
  misc_feature (730)..(730): n is a, c, g, or t
gggaggggaagtagcacagaggaagaggcaatactacccgagactagatgcggaccgtctctggcaaccaggaaaaggcaaatacaaagagaggtctgctggtcacagcggggcacctcgaggagaggacgactaggagcacacggcccggaaaggtccagaataactgtgcttgaagaagaaaattcccaacatggacaaaccacgcaaagaaaatgaagaagagccgcagagcgcgcccaagaccgatgaggagaggcctccggtggagcactctcccgaaaagcagtcccccgaggagcagtcttcggaggagcagtcctcggaggaggagttctttcctgaggagctcttgcctgagctcctgcctgagatgctcctctcggaggagcgccctccgacaggaggctctattccaggaaggacctgtttgaggggcgccctcccaatggagcagcctccattgtggagtaggaaaacataagcttgaagaaggaagctttaaagaaaggttggctcgttctcgcccgcaatttagaggggacatacatggcagaaatttaagcaatgaggagatgatacaggcagcagatgagctagaagagatgaaaagagtaagaaacaaactgatgataatgcactggaaggcaaaacggagccgtccttatcctatttaatgtgttcggcnctttaattctgttttgcctgctaatagtattgccattgccancctgggactttctggtttgcattttcctaatggccttttcccatatttctgaaatttt

SEQ ID NO: 168497 - DNA, 249 bp, Homo Sapiens
ttcgcgggtgagctcagaccttcctgagtcagcagggagtatgagtgagactctgtccttgtcttgcggcaggagtggtggggttgctaagtcagctgcccgctgttttatggggagtaggatgctctcgcccctgacattggttagttcttgcctgatttatgcatgaagtggctgggagctcagcagtgagcttctgcccagaagaatccacagggcatgttcagcaggcccgctgaagatgatgtt

SEQ ID NO: 168498 - DNA, 675 bp, Homo Sapiens
ggctcggccctgatttgattctgaagatgcttcttctcacttaatgcagtccttgacgctgttgagcacagccttgtcttgcgggcggcttggtgataggccgcttggtgctcaccaccttcacggggtgctgctcgttcccggccttgctgtacttgctcttgttcaaacttgggctttggcacgccatacttcctcaggatctgggtgagctgatcctccagcacctttttgggcggccggacattggtgaagaagaggtggaggaggttgcctggggtctgggagttgatctgctctttgctaagataaatgtcagagactctgatgggcttcgctggtgtcaggctcagcgtctgctctgaatgggcacaactcttaaatatctccgtcagaacctctctggctccgggcaccagcttctcccctttaattgacttatcattgaaataatcttctaaccctgggctcccttgagtatcaaagagactctgatgaactacagacacggttagaatctcttctgtcgacatttccatcaattcatcttcaccatccaaacttgacgaaccaatcaagtcattattgttaaataaacttgctcgaattttctcaattttggctcgggatcttatcgccacggctcgcgaagcctgtatacgcgcggtgcagcgt

SEQ ID NO: 168499 - DNA, 436 bp, Homo Sapiens
gctcggtacctgatttggattctgaagatgatatggggtctgttcagagggacctgaactttctggaagacaacccttcccttaaggacatcatgttagccaatcagccttcaccccgcatgacatctcccttcataagcctgagacctaccaacccagccatgcaggctctgagctcccagaaacgagaggtccacaacaggtctccagtgagcttcagagagggccgcagagcatcagatacctccctcacccagggtgagcacttcctcctctgctttttgaaactcgcgtcgtaggagagcagtttcttgccatgttggtgtggtcacctgtggtcactgaaaggccttgtattttagttaaactgtttggtcttggtgctttctttcaggaattgtagcatttagacaacatcttcagaatccaaatcagg

SEQ ID NO: 168500 - DNA, 842 bp, Homo Sapiens
gggacagaatggaggtgctgccggactcggaaatggggtccaagggtagccaaggatggctgcagcttcatatgatcagttgttaaagcaagttgaggcactgaagatggagaactcaaatcttcgacaagagctagaagataattccaatcatcttacaaaactggaaactgaggcatctaatatgaaggaagtacttaaacaactacaaggaagtattgaagatgaagctatggcttcttctggacagattgatttattagagcgtcttaaagagcttaacttagatagcagtaatttccctggagtaaaactgcggtcaaaaatgtccctccgttcttatggaagccgggaaggatctgtatcaagccgttctggagagtgcagtcctgttcctatgggttcatttccaagaagagggtttgtaaatggaaacaaagaaagtactggatatttagaagaacttgagaaagagaggtcattgcttcctgctgatcttgacaaggaaacaataaacactcccgttcaatatatgaatctgtgtggccgccctcggcccctcaaaaagcttttcaaaaccattcctttggattcggggggcccataagggacatagaacacgggtcctaaaccgcctcctagggaaaacagggccgacaatacaggccttggaattctcccccgtacaaatatcgcccggtagcaattcagcacgtgccgtaccaacacccgtcattggtcagcctccggagctatatgggggcctgaataccgcagtggaaggcttcgtgcacggccgactaatcacatctatccccccctcgccttgtaccgttacggcc

SEQ ID NO: 168501 - DNA, 757 bp, Homo Sapiens
  misc_feature (61)..(116): n is a, c, g, or t
gggttcgctctgcacttcttctcgctgctgccacgtgagaaaggatgtgtttgcttccccnnnnnnnnnnnnnnnnnnnnnnnnnnnnnnnnnnnnnnnnnnnnnnnnnnnnnnnnccagctgccattgaagaaatgcgcggtggtgggaaatggtgggattctgaagaagagcggctgtggccgtcaaatagatgaagcaaattttgtcatgcgatgcaatctccctccttagtcaagtgaatacactaaggatgttggatccaaaagtcagttagtgacagctaatcccagcataattcggcaaaggtttcagaaccttctgtggtccagaaagacatttgtggacaacatgaaaatctataaccacagttacatctacatgcctgcctcttctatgaagacaggaacagagccatctttgagggtttattatacactgtcagatgttggtcccaatcaaacagtgctgtttgccaaccccaactttctgcgtagcattggaaagttctggaaaagtagaggaatccatgccaagcgcctgtccacaggactttttctggtgagcgcagctctgggtctctgtgaagaggtggccatctatggcttctggcccttctctgtgaatatgcatgagcagcccatcagccaccactactatgacaaacgtcttaccctttttctggcttccatgccatgccccgaggaattttctccaacctctgggtatctttcataaaatccgggtgccactgaat

SEQ ID NO: 168502 - DNA, 1162 bp, Homo Sapiens
tgttctgaggtccccgccggatgcaagtgtcagtcttaagtttcagcaacaccagggaaaacagaggaaatggataacctgtggatttccagcaaactccttagccatgatcttccacactatgtggcattgtgcttggagaagtgcgtatcagaacggacctacagaaagtttctgacctgtctgccccattctcccagagcgctggggtggatcaaaaggaactgtccttcagcccatccttattgaagatcttctgccaactattctccattcatgtagatgctataaacatcatggttctcaaggtggatacctctgagtccttatggcatattcagatcagtagaagcagatttcttttggatagtgatgggaaaaggctaatctgtgaggtgagcttatgtaagatcaacagcaaagttctaaagagtggtcagctggaggacacctgcctagtggagctttcactggccctggacctgtgtctaaaggtgggcattagcagtcggcatctcactgctatcactgtggatgtgtggacactccatgctgaactgcatgagggcctcttccagagccaactgctgtgccagggcccaagcctagcatctaagcctgttccctgttcagaggtgacagaaaacttagttgagccaactctgcctggcctattccttctccagcagctgccagaccaggtcaaggttaagatggagaacacaagcgtggtattgtccatgaatagtcaaaagaggcacctgacttggactctgaagctgctgcagttcctgtaccaccgtgatgaggatcagctgccccttcgaagcttcacagcaaactctgatatggcacagatgagcactgaactgctgctggaagatgggttgttgttgtcccagagtcgccaacgcattgtctgcctcaactccctcaaggctagtgtgcaggtgaccaccattgacctctcagcctccctagttctgaacacttgcatcattcactaccggcaccaggaattctctcactggctgcacctgctagcactggaaacccaagggtctagttcacctgttctaaagcaaaggaaaaaaagaaccttcccccaaatcctgctcccatcattaccctacgccccaccataccctaccccactcaaccc

SEQ ID NO: 168503 - DNA, 697 bp, Homo Sapiens
gaatccagcaaaacatcccataactcaaattagaagggacagacacctttggaaataattttttgagaacttctttagcctccaactcaacagcttccacctggtgctgcctttccctggaagtcttgttcactttgtcctgcagcaatttttcagttgatgccaatgcttccattgcttcccagtttttctcccgaaggtcaatgtttttcttcctctggtgttcaactgcatccttcaaagaatctaactcattccagagaccacttatttctttctctctttctgaaattacttttaataattcttcatgagggggaaaagaagatgcctgttggtagttttgttgtttaagctgctcaatttgggacttaaacaatttgttttcatcttgtacatcctgtaacagctgtgttttgctagaaagatcactctccctctcttttagcatggcttctaacctcttcaattcattttccttttctttcaacacaatctcaagttcttcaaactgtgatgcagaagaggcctctttcaagttatgttgtgctacttcctgaacatgtgcttttaaagattcattttcttcttgaagatcctgtaaccacttccctgtattggctaggtctttctctttctcttccaaaacagccttcatggtattcatctgttcctcttttccttttaataagttccc

SEQ ID NO: 168504 - DNA, 848 bp, Homo Sapiens
gcctgatttggattctgaagatgtaacagaagaggaaatgggcctggtacagggacaattggcctgttagaggatggtgcctgggtgattacagtacttgaggttggtgaaggtactgcctgctgaataattacacttgagtcagaacttgtaagcagcacattgggaacctgtaatgatgctggacgaacaatagctgatgtgggctgtgcagtttgtgccaatggtacttccttctcatcactggtagtagactctgggtgaggtaaaggactatcctggtgagttgtttctacaacagaaggctcctcaattttgcttcttatgataggtgttgcaagaggggataaatctagaggcatttttttaatgtcatcttctgaagctttcttgaattcattctcaaatggactcgccaactcattaaacaaacccacttcttcacagtttttcaagaatcttgttggtgttggggtctgatctggccacatccaggcgcagtacatagaaagggtttgtcatcactcatattccacaggtccttgtattgcctggcagaattcacatgtaacttgaatttcataagttgaataacttatcacattctttttctcatggcaagaatactttctagctggtgggccatgagctttatttactctgcttccaggaataccttagctgttatcaataagcagtcctttctcaagtttccatctagtaccctttccaggtcactagttcatgatcctttcggtcacccgcgagccctgagcacagccgtgtttacaaagcacccctggaggaaaaggctgaacggcactttaaaggccacgggctcccacccc

SEQ ID NO: 168505 - DNA, 892 bp, Homo Sapiens
  misc_feature (648)..(648): n is a, c, g, or t
ccaccccaagatgggcatgctgaagagacgaatcatgcccgaggatataatcatcaacggtagcaaagatgccaaggttccttctcctcctccaggacataagtggaaagaagtccggcatgataacaaggttacttggctggtttcctggacagagaacatccaaggttccattaaatacatcatgcttaaccctagttcacgaatcaagggtgagaaggactggcagaaatacgagactgctcggcggctgaaaaaatgtgtggacaagatccggaaccagtatcgagaagactggaagtccaaagagatgaaagtccggcagagagctgtagccctgtacttcatcgacaagcttgctctgagagcaggcaatgaaaaggaggaaggagaaacagcggacactgtgggctgctgctcacttcgtgtggagcacatcaatctacacccagagttggatggtcaggaatatgtggtagagtttgacttcctcgggaaggactccatcagatactataacaaggtccctgttgagaaacgagtttttaagaacctacaactatttatggagaacaagcagcccgaggatgatctttttgatagactcaatactggtattctgaataagcatcttcaggatctcatggnagggcttgacagccaaaggtattcccgtacatacaatgccctccatcacggctacaggcagccagctaaaaagaactggacaggcccccgggatgaaaaacattccccagcgaaaggatcccttttccttaataacccgtggcccaaattccgagcctggtttgcaaatttcctttggtaaaccccttcaacaagggggcacccaccccacaaaaaccttttttgaagaaaaatctttaattgt

SEQ ID NO: 168506 - DNA, 406 bp, Homo Sapiens
gaagtaaaacaatcagtactgagaaacctggtttgccacagaacaaagacaagaagtatacactaacttgtataaatttatctaggaaaaaaatccttcagaattctaagatgaatttaccaggtgagaatgaataagctatgcaaggtattttgtaatatactgtggacacaacttgcttctgcctcatcctgccttagtgtgcaatctcatttgactatacgataaagtttgcacagtcttacttctgtagaacactggccataggaaatgctgtttttttgtattggactttaccttgatatatgtatatggatgtatgcataaaatcataggacatatgtacttgtggaacaagttggattttttatacaatattaaaattcaccacttcagagaaaaaaaa

SEQ ID NO: 168507 - DNA, 475 bp, Homo Sapiens
gatcccttcgattggcgggcaacttagttgtctgagaggtgagagtcacaggagatgtcatcaccacagtttgtggcagagaagtagctgaaggtgtagttcggatctgatatgtttgcatatctcctgatgcagtttgtacgaccacctgattgctgggcacaagtatctgctgtccatcagaggtctgtgcatactgaagaatagttgtaccttgctgagtactgcctgaatttgtcatggttaatgtctgaagtccctgtactccatctgtgcctggacttgccaactgtaaggctccatttggggcaatggcaatatactgtccgctgctagtctgatagatgggagttggaacagacatagaagtgacagcagcagaaactccagaattttctccgtctccttttctgccccgtgtatcttcagaagataagtctttcaaaatttttctgtaagttgcccgccaatcgaa

SEQ ID NO: 168508 - DNA, 464 bp, Homo Sapiens
ggctcggtacctgatttggattctgaagatgcttgtttgtttgaagaatttccttcacaggaagctaaggaagcactactagtctgtaatttagactaaattttttatctcctcctgtatatgctcacagtttttccaaagttccgaatcagtctttccactgttttgtagctcttgcattaaagaagttaggacttcaactgtaccttgaattacagatggtctggtcttccctgagaaagaggataccccatttgtactaaggtggggactacttctatcagtatttaagttcagtccaagagaatgaagagaattttcatcagatcctacagaagatgaagttttgtgtaaggttttcaccaagtcaaactcttccatagtgtacagaaattgttatattctcttattggaaaatacaaggttcttgggctgtttgagaaaaatgaatccgtgtcatcttc

SEQ ID NO: 168509 - DNA, 856 bp, Homo Sapiens
  misc_feature (13)..(13): n is a, c, g, or t
  misc_feature (29)..(29): n is a, c, g, or t
  misc_feature (32)..(32): n is a, c, g, or t
  misc_feature (67)..(67): n is a, c, g, or t
aatttcccggggncttaaccaagaatttncanttccaggttgacccaggctggtcattttggaaggncttttacaagtattttgagaagatctggggatggacattcattcgtagtgtgggtctggattttcaggatcagggtcttccataagttcactgaaagaagggactgggcccttagcttgcaactggggtatgtgatttgaatgagatgaaggtgaagactgaacatgactcggtgaacatgagacacatggtgattctcccccactatctttatcttttcggtgatcactgagaagtaaagctctctgataactcctttctctgacttgttccactgaagttgaggcagtccattgaacttctggttcattcttctcactagcagtagcatccttaacagggcagttattgctagtttcttcagaagtggcattataaactgtagctggtgttggtaaaggtaggctagcagtgtggtccacctgctccccattgtcattactgctggcacagccatcaccattgttgctcaagcttccacttgcatggggtgatacactaatgagtggaaagttctctgtcttagagaccacttatcctagcttcacgttgtctcttacggtattctaatagagaaacctttttcttttgtggtggattctggggtgtgcaattcccgtcgatcaaattgtcattaacagtccgtccgaaaccagatacaagcccatcttcggaagtacaaaacacagttgtttccataaacatgcctctagtatcatcctgcatcaggcactttgactcactattcggaagcctcctccaacacaccaggaagtccggagcggctga

SEQ ID NO: 168510 - DNA, 560 bp, Homo Sapiens
gccggtaccctggtgtgttgatagtctcctgaagatgtgtgggaacgtgaaacatctgatacaagtggactttggagtgcttgcagtaagacactcacaagacctcagcagtaaaagattaaatgacaccatgacagtgagactgtccacctcctcgaactcgcagagggcaacgcattaccacctgagctcccaggtccaagaaatggctgggaagatagacttgctcagagacagccacatcttccagctcttctggcgggaagccgcagagccgctgagtgagcctaaggaggaccaggaagccgcagagttgctgagtgagcccgaagaagaatcagaaaggcacatccttgagcttcaagaggtgtatgactatttgtatcagccttcttacagaaagttcattaagttgcaccaggatctaaagtcaggagaggtcacccttgcagagaatgatgtcatcttcaaggactttgtgaataaatacacggcctggattcagaacctaagatcatgtgcaccgtggaccaccagggccaaagagattggatcaagga

SEQ ID NO: 168511 - DNA, 585 bp, Homo Sapiens
agctcggtccattctgaagattagtgctcacaaatctagtagtggcagtcaattggagcctctattacttttcactgttacactgctggtgtttacaggctgaggttttgtaggctttaggtatagtggctgaaagtttctttgttgctagcagaactctcatctttgacttgtagaggttttctaaatgaattaatcttagactgaacaatctggccacgataagatccaagcacagtgtttcttgggcatgttagcatcttgcttttgtttttctgtagtcatttgtttctttttactattgtttttaaggtgaaatgcctggcttaatgtcatatgttgactttggggatcatcttcagttagtaacaaatgcggagtttgattactatccttaggtttatgtgtgtcaattactacagttgaattggttagttcatttgaaggttttaaaggaatacaatgtttccccaccactgtattatttttgctctctgcaggtctcttcatgttttctttatcagccatttttgttttaagtttcagcactttagtcccttcttgaacttgatcctctagagtcga

SEQ ID NO: 168512 - DNA, 481 bp, Homo Sapiens
tggagctcgcgacccagcggcagacgatgtagtaggcagccaggctgtggatgctgtcaaggggcgcagctcgggtgcactgcaggccataggtggggatgctgagccgggaggccaggctgtggaacacggtggtggagccctcgattgggtgcaccaggaacaggggccgctccgagctctgcacggagttgagccgcatcagggtggggccctccgggttcaccagcagggagcgcaggttcagctgagtctgctgctgggccagaccatcctccttgggcgtggggcatgccagctcgctggcctcatccgcctttgaggacagctcctgcagtttccggagcgtgagttgccgcacctcgcgcacggacagcaccaggttgagctcacgctccatcgtctggcgcacctccacgctcatgagcgagtccaggcccaggtccgccagtgagctgtccaggttgacagcagccaagtc

SEQ ID NO: 168513 - DNA, 971 bp, Homo Sapiens
aggaagcgaggcctgggtggcgattctcgacgagggcggcaccctgaacctggacagggtgacccgagaggcgtgccctgagctggactactttgtggtcttctcctctgtgagctgcgggcgtggcaatgcgggacagagcaactacggctttgccaattccgccatggagcgtatctgtgagaaacgccggcacgaaggcctcccaggcctggccgtgcagtggggcgccatcggcgacgtgggcattttggtggagacgatgagcaccaacgacacgatcgtcagtggcacgctgccccagcgcatggcgtcctgcctggaggggctggacctcttcctgaaccagccccacatggtcctgagcagctttgtgctggctgagaaggctgcggcctatagggacagggacagccagcgggacctggtggaggccgtggcacacatcctgggcatccgcgacttggctgctgtcaacctggacagctcactggcggacctgggcctggactcgctcatgagcgtggaggtgcgccagacgctggagcgtgagctcaacctggtgctgtccgtgcgcgaggtgcggcaactcacgctccggaaactgcaggagctgtcctcaaaggcggatgaggccagcgagccggcatgccccacgcccaaggaggatggtctggcccagcagcagactcagctgaacctgcgctccctgctggggaacccggagggccccaccctgatgcggctcaactccgtgcagagctcggagcggcccctgttcctggtgcacccaatcgagggctccaccaccgtgttccacagcctggcctccccggcttcacatcccccacctatggcctgcagtggacccgaagctgcgcccccttgacagcatccccggcctgggctggcctacttacttcgaacctgcataagggcaggtgcaaccccaagggccccctacccgcggg

SEQ ID NO: 168514 - DNA, 809 bp, Homo Sapiens
ggtaccggtccggaatttcgggatatcgtcgaccacgcgtccgaagaacgtgacattccacggggtcctactggatgcgttcttcaacgagagcagtgctgactggcgggaggtgtgggcgcttgtgcaggccggcatccgggatggggtggtacggcccctcgagtgcacggtgttccatggggcccaggtggaggacgccttccgctacatggcccaagggaagcacattggcaaagtcgtcgtgcaggtgcttgcggaggagccggaggcagtgctgaagggggccaaacccaagctgatgtcggccatctccaagaccttctgcccggcccacaagagctacatcatcgctggtggtctgggtggcttcggcctggagttggcgcagtggctgatacagcgtggggtgcagaagctcgtgttgacttctcgctccgggatccggacaggctaccaggccaagcaggtccgccggtggaggcgccagggcgtacaggtgcaggtgtccaccagcaacatcagctcactggagggggcccggggcctcattgccgaggcggcgcagcttgggcccgtgggcggcgtcttcaacctggccgtggtcttgagagatggcttgctggagaaccagaccccagagttcttccaggacgtctgcaagcccaagtacagcggcaccctgaaacctggacagggtgaccgagaggcgtgcctgagctggactacttgtggtcttctcctctgtgactggggcgtggatgcgggacaaaacaataccgtttgcaattcgcaagagcgtttgggaa

SEQ ID NO: 168515 - DNA, 1056 bp, Homo Sapiens
ggcctgggtggcgaattcggcacgaggcagcatccccttgggccaggcagacccctcgctggccccttacattattgacctccccagctggacccagttccgccaggacaccggcaccatgcgagctgtgcggagacacctgttcccccagcactcagcccctggccgaggtgtcgtctgggagtggctgagcgacgatggctcctggaccgcctatgaagccggcgtctgtgacgatctggagcagcaggtggccaggggcaaccagcttgtggacttggcccccctggggtacaactacactgtcaactacaccacccacacgcagaccaacaagacttccagcttctgctgcagcgtgcggcgccaagcagggccgccttacccagtgaccaccatcatcgctccgccgggccacacaggcgtcgcctgctcttgccaccagtgcctcagtggcagcagaactggccccgtgtcaggccgctaccgccactccatgaccaacctccctgcataccccgtcccccagcaccccccacacaggaccgcttctgtgtttgggacccaccaggcctttgcaccgtacaacaaaccctcactctccggggcccggtctgcgcccaggctgaacaccaccaacgcctggggcgcagctccctccttccctggggagccagcccctctaccgctccagcctctcccacctgggaccgcagcacctgccccccagatcctcacctcccgtgcagtccgtgcctcccctccccagcggtccctcaaggcagcccagggagtggtccctggccactgtggcccatgcagatggccaaaagccccaacaggagtccagccaggcggctcgcacaaaaccgacccccgaaagcccgaagcccgaagcccgaagccggggtcctaaaaaaaccttcacgggaagaacctgaaagtggccccccagaaggaggaacgtggctcattctgaaagggaaaaaactggttccccaccgttctggggataccgcccaatgttgactggacacccagaggcaatttcggggt

SEQ ID NO: 168516 - DNA, 563 bp, Homo Sapiens
agccggtccacataattgctcaccgctccccatgtttattagcttgaaatggatttccaccgtgacgaagtaacagctttactatatctctgtgcccactactagcagaatcatggggtggagtgtcatcatctaatccttgtgtgttaacatctgctccagctgctataagtatcttagcaacatcgtaatatccaacattgcaagcttcatgcagtggtgtccaacctgcaaaatctttcacattcacatttgcccctaaacttattaattctttaacttgtttcacatctcctcgaatagcagccatgtgtaaaggagtttcaccacgttcttttcttttattaactttatctttctgtcgagatgaagaactgggagttttcttttgggcaggcgttgtttgtgatggatgatttggtgtggaatctggactgttgtctcttgctgtcatctgcaaaagaagaagacaaaaaaggaagctggaaataagaaatccacaccagttagcattctttttggtatccactctctgagcgaaaacagatgcacttctattcagg

SEQ ID NO: 168517 - DNA, 457 bp, Homo Sapiens
gagctcgcgaccccagcgcagacgatgtaacatacagaacacataaccgcagcgacacgatcccaattcctgctgcaccagctccagtttggtttggcactggaagcaccgacgtcgactcttctgtttagatcgactggtttcctcggaccgttccgtattctcaagtagtcgtggccgttttactggtgaagcctcattctcagactgtgaatactgtaccacaggatctcggtgaaggtacgattaagttcagacagaagcggctgtctgtgcagggaccaagactcctctttactcggtgaagttacattcagttctgtcggaagcggctgctggctgggactaagagttggcgtggttatcgaggtattgttgttgtcactggtggtctcttcggaaaacaaatctgattggctgttacttgtacttggagcggaatcatcgtctgccgctg

SEQ ID NO: 168518 - DNA, 396 bp, Homo Sapiens
tcttgaggaaaaacagcggcagacgatggcgtccaggctgggacaggggcctttcaagtctccccagggaccggtgttttctacaacagacaggcgctcccagaccgttggggtacaggccaggccgtctacaccacagtattgagggagctgcggctgtggcggccaccccctggcagtgcctctgcagctggggtgctcccgctctgggcagggtcagggggcacgagcagggcgctgctgctgtcggcagagtcttccaggtctgccagagaggcccccgcagtgggcagaggctgctccaggcgccggagtaatgcaccttcactcccaccatccccaggggctggcaggctgacctccacaggctcaaaagcatcatcgtctgccgctggg

SEQ ID NO: 168519 - DNA, 419 bp, Homo Sapiens
cacgccgactcttgaggatcaacagcggcagacgatgtggctgtggctgaggagctactggaccccgaggaggcacagcggggcagcaggttccgcctggactacctccccaacccacagttctctacggccaagagggagaagtggatcaagcaccaccccggggagcctctcaccctcgttatccacaaggagcaggacagcctggggctccagagtcacgagtaccgggtcaagataggccaagtaagctgcgacatccagattgtctctgacagaatcatccactgctcggtcaacgagtccctgggcgcggccgtggggcagctgcccatcacaatccaggtagggaacttcaaccagaccatcgccacactgcagctggggggcagcgagacggccatcatcgtgtccatcgt

SEQ ID NO: 168520 - DNA, 571 bp, Homo Sapiens
acagcggcagacgatggacacgatgatggccgactcgctgccccccagctgcagtgtggcgatggtctggttgaagttccctacctggatttggcctatcttgacccggtactcgtgactctggagccccaggctgtcctgctccttgtggataacgagggtgagaggctccccggggtggtgcttgatccacttctccctcttggccgtagagaactgtgggttggggaggtagtccaggcggaacctgctgccccgctgtgcctcctcggggtccagtagctcctcagccacagccaccttgtctgcgtaggcccgcccattgatgaagaagtccactggcgctgatgcgttgctcagggccccgggggacgggcaggtgatgagggtggagttgagaaccttgcagagcgtgggctcccggccaatgtggtggacggcaatggacacattctgcacatgtggaaacgctcaccagccactgtgatggcctgccgccactgacagggctgcggcggggactgatggccgtgatgaccgagttctgcatgtaccagaagtagggcggcac

SEQ ID NO: 168521 - DNA, 397 bp, Homo Sapiens
cgccgactcttgaggaaacaccagcggcagacgatgcgtaaaatcaaatgggaagcactgatggctaaagagagcttgtgccacttgtcatcagccaaaatgtaaggaaacacttctgtgtgagggcggtgactgcctgagcggtaatgcagtctgacttcattccgatggccactactttccagttccaggtacctgtgatacaagtgatgaattgagagaataactcctgaatttaagtgggtctgttttagggtcaccaaaatagtaaattcatgtttatttctcagcttctgaaaaaactgttcagctgtagcagtggatgcttttatgcttctgggagtatcttgaaagagaaaggctttcgtcccattatgcagccccgggacctgacgca

SEQ ID NO: 168522 - DNA, 248 bp, Homo Sapiens
cagcggcagacgatgatgagaaggagcccgaggttgattaccggacagagacaatcaatactgaacaaaaagtatctgacttctacgacattgaggagagattaggatccgtgtcaggaggggagctgtttgagcgcatcattgacgaggactttgagctgacggagcgtgagtgcatcaagtacatgcggcagatctcggagggagtggagtacatccacaagcagggcatcgtctgcgactggggt

SEQ ID NO: 168523 - DNA, 385 bp, Homo Sapiens
aaaccagcggcagacgatggcgacggagggtgacatgtatgtgtttcagctctttgactactatgcagctagcggtgtatgccttttgtgggttgcattctttgaatgttttgttattgcctggatatatggaggtgataacctttatgatggtattgaggacatgattggctatcggcccgggccctggatgaagtacagctgggctgtgatcactccagttctctgtgttggatgtttcatcttctcgctcgtcaagtacgtacccctgacctacaacaaaacatacgtgtaccccaactgggccattgggctgggctggagcctggccctttcctccatgctctgcgttcccttggtcatcgtctgccgctgtttatcctca

SEQ ID NO: 168524 - DNA, 335 bp, Homo Sapiens
atgagacaccagcggcagacgatgtaaagagagaacatctcacacacccagctcgccatgcctactcattcctgaatttcaggtgccatcactgctctttctttcttctttggcatttgagaaaggatgcaggaggacaattcccacagataatctgaggaatgcagaaaaaccagggcaggacagttatcgacaatgcattagaacttggtgagcatcctctgtagagggaccccacccctgctcaacagcttggcttccaggcaagaccaaccacatctggtctctgccttcggtggcccacacacctaagcgtcatcagctgccgctggtgg

SEQ ID NO: 168525 - DNA, 584 bp, Homo Sapiens
gactcctgaggaaacaccagcggcagacgatgtggtaataccatccccgatgatgacaaccaggtggtgtcattatcaccaggctcaagatatgtcgtccttcctcggccggtgtgctttgagaagggaacaaactacacggtgaggttggagctgcctcagtacacctcctctgatagcgacgtggagagcccctacacgctgatcgattctcttgttctcatgccatactgtaaatcactggacatcttcaccgtgggaggttcaggagatggggtggtcaccaacagtgcctgggaaacctttcagagataccgatgtctagagaacagcagaagcgttgtgaaaacaccgatgacagatgtttgcagaaacatcatctttagcatttctgccctgttacaccagacaggcctggcttgtgaatgcgaccctcagggttcgttaagttccgtgtgtgatcccaacggaggccagtgccagtgccggcccaacgtggttggaagaacctgcaacagatgtgcacctggaacttttggctttggccccagtggatgcaaaccctgtgagtgccatctgcagga

SEQ ID NO: 168526 - DNA, 648 bp, Homo Sapiens
  misc_feature (294)..(294): n is a, c, g, or t
ttggtgaccaccccatctcctgaacctcccacggtgaagatgtccagtgatttacagtatggcatgagaacaagagaatcgatcagcgtgtaggggctctccacgtcgctatcagaggaggtgtactgaggcagctccaacctcaccgtgtagttcttgaggctggggatgctcagccccgagggcacctgcaaggccttcgacacagcggggaatgggtactgccgctcggagggtgtggtggccgtcctgctgaccaagaagtccctggcccggcgggtgtacgccaccatnctgaacgccggcaccaatacagatggcttcaaggagcaaggcgtgaccttcccctcaggggatatccaggagcagctcatccgctcgttgtaccagtcggccggagtggcccctgagtcatttgaatacatcgaagcccacggcacaggcaccaaggtgggcgacccccaggagctgaatggcatcacccgagccctgtgcgccacccgccaggagccgctgctcatcggctccaccaagtccaacatggggcacccggagccagcctcggggctggcagccctggccaaggtgctgctgtccctggagcacgggctctgggcccccaacctgcacttccatagcccaaccctg

SEQ ID NO: 168527 - DNA, 778 bp, Homo Sapiens
tcctggcttccaggtcctcccaagctctccctgtgttctgaaagaggatcttcatcttctcggcaaggtgctctgtgttctcacggatggcctgcgacagctgggacaccgggttcagcatcaggttatcgaagatcacctcctctcggttccgaggccgcgtcttgttggccagggcgtcctcacagctgtcgttcatgttctggtcaaagtcccgagagttcagcgagccgggcggcaccttctggaagttgaggctggcctcggggatgcgctgcaccagctcctcccgggcagagatggtcgaggcgggggtgctgggcatgttgctgagggaggcgctgtgggcaggctccgaggagcccagtgtgtcaccgtccccagccacatcgtggatctcctgggctaggatggccacgtccttcaccagcgtctggctcagcctggcaatctccgcaatctctgccgtctgcacgatgaaaccataagggtcaggctcctcctcatcgtcgtccgtgtcccgggggccgggggcccgggaacgagcccggctggagctgccagccctcggggtctgagtggctgttgaggtgtgggagcgtgtgtgtttgggggagccgtggcgggagccgtactcctcctcagaggtggacgtgtaatccgagccctgctgccggcgcctcgtgttggaggtgtatcgggcactgcccgagcgggccactgctgaagggctggcggacccgtggtggtggctgtgttgcagccatcctgaagacag

SEQ ID NO: 168528 - DNA, 399 bp, Homo Sapiens
cccgactctataggatccacagcggccgacgatgtcctgtgggagccaccggtctcctggggcggggaccctcacttcttctggggtgtgctcagcttctgcatgccccggatcttgtccagcaggccagaaatgaaggcctctgtgggtttgtaacagtcaaccagcagctccttgaccctggcagcccgggcatcgtcactctccatgtccaggagctcatccacgtcaatctccagttctgggatctcctcttcctggcagtcgtagaggcgcgtgagctgctccaggatccactcctctaggttgaggcgcttccgtagctccttgcggtcatacttgacggtgaccttcccttggcgcctcactgggccctcatcgtccaccccgtcgggtgga

SEQ ID NO: 168529 - DNA, 888 bp, Homo Sapiens
cgccgcgcggagcggatcccgcaagctaacccgagcaggccggcgggcgtcccggaggcggtggcgcagggaggggcccgacgctagcacgcggccccggcggccgccatggcggacagcggcaccgcggggggcgcggcgttggcggccccggcccccgggccgggcagtggcggaccaggcaccacgcgtctactttcagagcccccccggggccgcaggagagggcccgggcgaggcggacgatgagggcccagtgaggcgccaagggaaggtcaccgtcaagtatgaccgcaaggagctacggaagcgcctcaacctagaggagtggatcctggagcagctcacgcgcctctacgactgccaggaagaggagatcccagaactggagattgacgtggatgagctcctggacatggagagtgacgatgcccgggctgccagggtcaaggagctgctggttgactgtcacaacccacagaggccttcatcttctggcctgctggacaagatccggggcatgcagaaactgagcacaccccagaagaactgtagggcccccgacccaggagaacggtggctcccacaggacactcgctgcccccccagcctcgcaggaacagcaatcccggggggaccctgccgttccggcctggtgccatgaaccaggctccctcctgccccctggacccaaggggcttttttaccctgccccgctcagagatttcacttttcgcggggtttccatacttgttaattaaacctgcatggggcctttttttgcggcctctccatatttgcccccccgcggtgccccgtttgcccccctcaaataaaaacctaagtgattacccccattttgggtttggccgcctaaaccttacttgg

SEQ ID NO: 168530 - DNA, 1176 bp, Homo Sapiens
  misc_feature (96)..(96): n is a, c, g, or t
  misc_feature (154)..(154): n is a, c, g, or t
  misc_feature (418)..(418): n is a, c, g, or t
  misc_feature (446)..(446): n is a, c, g, or t
cgatatcaacaactcataccacaaggtgtgccaagtaaacaagtatatatcttcgtcccccgcgttgtggccaggcacaaactatccaatgcgcgncagctgcgaataaggcgggagtgagaccgccgccaatatactattgcacggtgtcgantggtaaaacaaaagcatcttgtttgctccaaggaggacaccccgccgtaagataacaagaaagacgagccgtgtgcacccataaccagctcattgttgtgttggtggcgaaaggggtgtgacgctagaaaaaccatactcaggaggatagattgcactcaaatgacatatagacgaggaagaagaacgattggacgagaaagagcgaaagcgagacccattggtgtctctgagtttatgtgcaaaccaggccctagtttagggnggagaaaaaggtcgcccattccaaggtngtaaattaaccgaattaaagaaaacacccccccaaaaatgtggaaaaaacctgaagggggcccaaggggaaaagaagaacccccttggggccagggggccaccgaagggagacccctgcctcatgggccccaagggctaggccgccagggtacccccgggtattgctgttgctacgagggttggggggcacggattgtccatgtgggagccaccgttctcctgggtcggggaccctcacttcattgtggggtggtgctcagcttctgcatgccccggatcttgtccagcagaccagaaatgaaggcctctgtgggtttgtaacagtcaaccagcagctcattgaccctggcagcccgggcatcgtcactctccatgtccaggagctcatccacgtcaatctccagttctgggatctcctcttcctggcagtcgtagaggcgcgtgagctgctccaggatccactcctctaggttgaggcgcttccgtagctccttgcggtcatacctgacggtgaccttcccttggcgcctcactgggccctcatcgtccgccccgcccgggccctactcctgccgccccgggggggctctgaaagtagacgcgtggtcctgggccgacactgcccggcccgggggccggggccgccaacgccgcgccccccgcggtgccgctgtccgccatggcggcagccggggccacgtgcgcctcgtctcgaaaagccacccaggc

SEQ ID NO: 168531 - DNA, 1079 bp, Homo Sapiens
  misc_feature (99)..(159): n is a, c, g, or t
  misc_feature (952)..(952): n is a, c, g, or t
gcgagctaacccgagccagccggcgggcgtcccggaggcggtggcgcagggaggggcccgacgctcgcacgtggccccggcggccgccatggcggacannnnnnnnnnnnnnnnnnnnnnnnnnnnnnnnnnnnnnnnnnnnnnnnnnnnnnnnnnnnnaggaccacgcgtctactttcagagcccccccggggccgcaagagatggcccgggcggggcggacgatgagggcccagtgaggcgccaagggaaggccaccgccaagtatgaccgccaggagctacggaagcgcctcaacctagaggagtggatcctgcagcagctcacgcgcctctacgactgccaggaagaggacatcccataactggagatcgacgtggatgagctcctggacatggagagtgaccatgcccgggctgccagggtcaaggagctgctggttgactgttcccaacccacagaggccttcatttctggcctgctggacaagatccggggcatgcataacctgagccccccccataagaattgaggggtcccccgacccaagaaaacggtggcttctcaagggacaatcgccctgccctctcaacctcagtagcaaacacctaatacccgggtggacccccggcggcccacgcccttgttgcccatgccactatgtgctcccttcgcgggcccttgtttctttcgcgcccgttcttttcccctggtcctccttcagcgcttttccaacctttttcgggcggctctctcttttttgcgctattcacaacctgacatgggggaccttcttctggtggcatcttgaatattttcgcactcaccgccccgccttgtgttaccccctttttacctaaccagcccttgggcataccgacgctcccgcgttgctttgtatttgccccgtttcgcgcctaacattggtgtacgccgcattgtccgaagggcnactgagcgttagttgcctcttctcattgcgcgcgtcgtcggaaagaatacccctcttttacagactttggacgcggacaatctataagatattccatactaacgtgtggcgccatctctttttcgcc

SEQ ID NO: 168532 - DNA, 577 bp, Homo Sapiens
ggggaaggtcaccgtcaagtatgaccgcaaggagctacggaagcgcctcaacctagaggagtggatcctggagcagctcacgcgcctctacgactgccaggaagaggagatcccagaactggagattgacgtggatgagctcctggacatggagagtgacgatgcccgggctgccagggtcaaggagctgctggttgactgttacaaacccacagaggccttcatttctggcctgctggacaagatccggggcatgcagaagctgagcacaccccagaagaagtgagggtccccgacccaggagaacggtggctcccacaggacaatcgctgccccccaacctcgtagcaacagcaataccgggggaccctgcggccaggcctggtgccatgagcagggctcctcgtgcccctggcccaagggtctcttcccctgccccctcagttttccacttttggggtttttttattgttattaaactgatgggacttttcgtgtttttatattgactctgcggcgcgggccctttaataaagctaggatacgccttgtggtgcagctaaaaaaacaaacaagc

SEQ ID NO: 168533 - DNA, 659 bp, Homo Sapiens
ccagggtccagacggcggtgataatgggcaggtgaccaagtcgatggctggtgtggttaagtcgatggatgcgacattgaagaccatgaatctggagaagatttctgctttgatggacaaattcgagcaccagtttgagactctggacgtccagacgcagcaaatggaagacacgatgagcagcacgacgacgctcaccactccccagaaccaagtggataatgctgctccaggaaatggcagatgaggcgggcctcgacctcaacatggagctgccgcagggccagaccggctccgtgggcacgagcgtggctttcggcggagcaaggatgaactgtctcagagactggcccgcccttcgggatcaagtgtgacggcagaacccgctctgaggtttcctggccatagccaccctttgaaatgctctctgtgtgttagagaggatctataccctagaaaactctgaacacgccagaatgctgaaatgcccttctacctttgggtatacaagccccctccacataaattaagacattcagtatttctgcactctatagcttggattctaaagttctgtatagctcgtaatgaatggtatataataggcagccttttaacagaactattaattcgtgttttgatcttccgagacctgacca

SEQ ID NO: 168534 - DNA, 386 bp, Homo Sapiens
cgagctaccccagcggcagacgatgagaggactacattttgaccccagtaagatgtgacgagtaatagttggaccccacagcagttacttttgtagagaggaaaattatgctccttggcttcaggtgaagacccccagatccaggccagtggatttacaagtgaaagtcagcagcactgggcattttgagcaatagctccgaacaagccctttaccacgcgggtaggtaaaccccagaatatacagatgccccttacaacacgcgggtagggagggtatgtggccgagagagcatgagcttaggaaatagactgggcttgaattccaccaagtttttggctatggacccatggggatgtggcatcgtctgccgctgggggatcctc

SEQ ID NO: 168535 - DNA, 304 bp, Homo Sapiens
cgacccagcgtcagacgatgaggtggacgacccggcggtggagctcaagcagtttggcgtggcccctttcacgatcgccaggaacacagaccaggaggagctggtgaagatcccgctgagccccgaatatgtgttctcggtgagcaccttccgggagctgcccagcctggagcagaaactgctgacgcccatcacgaccctgacctcagagcagatccagaagctcttagccagcactcgctatccacctccagcagttgagagtgatgctgcagacatcgtctgcgctgggtgcgagctccac

SEQ ID NO: 168536 - DNA, 424 bp, Homo Sapiens
ggaccattggcagatggccccggcccattgtcccgaggtggctgaggccgtggtgggcggtgggagtgcaggacgcgctctctcggggcctcatttctctcctccatttctcatcaggtctggcaaaccacggacagaccaggcacatgggaccaagccggaacctcctgctcaacgggaagtcctaccccaccaaagtgcgcctgatccggaggggctccctgcccccagtcaagcggcggcggatgaactggatcgacgccccggatgacgtgttctacatggccacagaggagaccaggaagatccgcaagccgctctcatcctcggaaaccaagcgtgctgcccgccggccctacaagcccatcgccctgcgccagagccaggccctgccgccgcgccaccgccacctgcgcccgtcaac

SEQ ID NO: 168537 - DNA, 610 bp, Homo Sapiens
  misc_feature (390)..(390): n is a, c, g, or t
  misc_feature (503)..(515): n is a, c, g, or t
  misc_feature (551)..(551): n is a, c, g, or t
  misc_feature (553)..(553): n is a, c, g, or t
atagcgattgcgcgggggctcgtctttgactttcgcaggtggcggtggccgcggcggcagggcctggctctggcgcagggcgatgggcttgtagggccggcgggcagcacgcttggtttccgaggatgagagcagcttgcggatcttcctggtctcctctgtggccatgtagaacacgtcatccggggcgtcgatccagttcatccgccgccgcttgactgggggcagggagcccccccggatcaggcgcactttggtggggtaggacttcccgttgagcaggaggttccggcttggtcccatgtgcctggtctgtccgtggtttgccagacccctactgggcatcaagaggcgcttcttcatgttgccgtccaccccgttgtgctgctncgcaactgcgcttgcccaggatggtgggggagccgttgttgatgaccgaggccaccttggcgggcgtcaggctgctgagcaagctggacaagcttttcaccgggtcaggcttnnnnnnnnnnnnntgggtctcaagataccgaagcacgcttccagcggcntngtaccgcctgcttcagcaccagcgggctctgggaggcttcgggcagccgcgccgtgc

SEQ ID NO: 168538 - DNA, 383 bp, Homo Sapiens
  misc_feature (183)..(183): n is a, c, g, or t
atccttgggcaaacgcaagcttacgagcagcaacaaggggtggacggcaaacatgaaaaaagcgccctctttgatgccccagtaggggtctggaaaaccacggacagacccaggcacatgggaccaagccggaacctcctgctcaacgggaagtcctaccccaccaaagtgcgcctgatccgnggggctccctgcccccagtcaagcggcggcggatgaactggatcgacgccccggatgacgtgttctacatggccacagaggagaccaggaagattccgcaagctgctctcatcctcggaaaccaagcgtgctgcccgccggccctacaagcccattgccctgcgccagagccaggccctgccgccgcggccaccgccacc

SEQ ID NO: 168539 - DNA, 348 bp, Homo Sapiens
cagacgatggtcatgagtatggcacaacccgccatgccagcgaggcctatgaggtgcagggtccgccggcctgctcgctccaccacaaacagcgacacgacatgtgaaggccgtgttgacgataccggagccaatggtggcatacacaggctgctgcacccccgccttctcgaagatgctcgtggagtaatagaagacagcgttgatgccagacagctgctgggacagctgcagcaccacagcgatgaggatgggctggcggtaggcgggggagcggaacagctccaggatggtgaccttcttctaccgcatcatctgccgactctcttccttcatctcctgcaggtc

SEQ ID NO: 168540 - DNA, 759 bp, Homo Sapiens
  misc_feature (69)..(69): n is a, c, g, or t
  misc_feature (599)..(599): n is a, c, g, or t
  misc_feature (682)..(706): n is a, c, g, or t
tcatacgaggcgagtcctcgcattacatgtgtctcacgcacctctctcgtctctcacgccagtattgcnttatctctctccgtctgctgtactctccacccctcatccccacgtgtcccaacgctacaacaccgcgttattgacctgccgtcgcacggttctattaccttctcgtgtcacacgtgccatggcaacgctggtggctagtcaccgcgctcaagtcgaccacatgcagatgtagatgctagcttcctcaccccaccggctctcactcagcatgtttggggcaccctgttgaggaccccttgagcttgcgtaccgtgctgtggggaacatcgggcaagcatgcagacaaggcatctgccagcggctcaggagcacaggtgggcggacccatctcctctggctcttatgcttccagtgtcacggtcactcgcagctaccacagtgtggggggcagtgggggtggcagcttcggggccaatctggtcatccgctcctacctcctgggcaactccagcccccgaacccagagcccccagaactgcagcatcatgtaatctgggacctgccaggcaggggtgggggtggaggcttcntgcgtcctcctcacctcatgcccaccccctgccctgcacgtcatgggagggggcttgaagccaaagaaaaataaccctttggnnnnnnnnnnnnnnnnnnnnnnnnntaagagaagttattttctacagtggttttatactgaaggaaaaacacaagcaa

SEQ ID NO: 168541 - DNA, 482 bp, Homo Sapiens
  misc_feature (408)..(432): n is a, c, g, or t
gcagcagctcggggaccccgcagcataacaaacatgctcgagcaccgtgctgtgcgggacctgcgggcagcctgccgacaaggcatctgccagcggctcaggagcccaggtgggcggacccatctcctctggctcttctgcctccagtgtcacggtcactcgtcagtaccgcagtgtggggggcagtgggggtggcagcttcggggacaatctggtcacccgctcctacctcctgggcaactccagcccccgaacccagagcccccagaactgcagcatcatgtaatctgggacctgccaggcaggggtgggggtggaggcttcctgcgtcctcctcacctcatgcccaccccctgccctgcacctcatgggagggggcttgaagccaaagaaaaataaccctttggnnnnnnnnnnnnnnnnnnnnnnnnntaagagaagttattttctacagtggttttatactgaaggaaaaacacaag

SEQ ID NO: 168542 - DNA, 911 bp, Homo Sapiens
  misc_feature (80)..(80): n is a, c, g, or t
  misc_feature (890)..(890): n is a, c, g, or t
taggatgacggtgatttaataaaggttagtgtgatgcagtgagagtattatcgtcaccgcgacgttggtgttgtgccggnatggcccggtggtaccggactgtcacacaataggtgggttctgatccccgaacggggcgaatagacacgggaccacaagggcgcccggcacggacagggggattgtccggtatgtaagtttagcgggttttccgtggaaaagtttgagccggggaagggggtgccccgcttgggaaaattgtgtcctacaggaaggtgtggggtagcagcaggcccccgttccgagctgtgtggaaggcacagaacgcctgggggtgcgggaacagcctgcgtacggctctcatcaactccactggggaagaagtggccatgcgcaagctggtgcgctcagtgactgtggttgaggacgacgaggatgaggatggagatgacctgctccatcaccaccatggctcccactgcagcaagctcgggggaccccgctgagtacaacctgcgctcgcgcaccgtgctgtgcgggacctgcgggcagcctgccgacaaggcatctgccagcggctcaggagcccaggtgggcggacccatctcctctggctcttctgcctccagtgtcacggtcactcgcagctaccgcagtgtggggggcagtgggggtggcagcttcggggacaatctggtcacccgctcctacctcctgggcaactccagcccccgaacccagagcccccagaactgcagcatcatgtaatctgggacctgccaggcaggggtgggggtggaggcttcctgcgtcctcctcacctcatgcccaccccctgccctgcacgtcatgggagggggcttgaagccaaagaaaaataaccctttggnttttttcctctgtaatttttt

SEQ ID NO: 168543 - DNA, 1044 bp, Homo Sapiens
aggaggccgcactgagcactgctctcagtgagaagcgcacgctggagggcgagctgcatgatctgcggggccaggtggccaagcttgaggcagccctaggtgaggccaagaagcaacttcaggatgagatgctgcggcgggtggatgctgagaacaggctgcagaccatgaaggaggaactggacttccagaagaacatctacagtgaggagctgcgtgagaccaagcgccgtcatgagacccgactggtggagattgacaatgggaagcagcgtgagtttgagagccggctggcggatgcgctgcaggaactgcgggcccagcatgaggaccaggtggagcagtataagaaggagctggagaagacttattctgccaagctggacaatgccaggcagtctgctgagaggaacagcaacctggtgggggctgcccacgaggagctgcagcagtcgcgcatccgcatcgacagcctctctgcccagctcagccagctccagaagcagctggcagccaaagaggcgaagcttccaagacctggaggactcactgggcccgtgagcgggcacaccacccgggcggctggctggccggaaaaggcacgccggcacatgggccccaagatgccgggcccaagggatggccagtcacccaaggcttggggacgcaaccaccccagggcgaaccctttccctggggaacacttccataggccttgggcgcccctctcgttaacaactgcggcagaaatccccacccgacccataaccccgacaaacgcccctccttttgggcaagggccccaaaggctaaaggaaccaaagcctttaacgaccccatgttaccgcccccaaaatcccttatacacttcctacacccccgcaacgcccacgtgggacccggcggggccttttcccctcttcacacctccattcccccaaaacaacacccgcgcgtgggggggtggcaaaaccgcttgccgccaaaaatcaccgcccacataaccgggacaacttcacacccggcaaaagccctctatcaccc

SEQ ID NO: 168544 - DNA, 1115 bp, Homo Sapiens
  misc_feature (785)..(785): n is a, c, g, or t
  misc_feature (843)..(843): n is a, c, g, or t
  misc_feature (905)..(905): n is a, c, g, or t
  misc_feature (946)..(946): n is a, c, g, or t
  misc_feature (990)..(990): n is a, c, g, or t
  misc_feature (1017)..(1017): n is a, c, g, or t
  misc_feature (1031)..(1031): n is a, c, g, or t
  misc_feature (1052)..(1052): n is a, c, g, or t
  misc_feature (1079)..(1079): n is a, c, g, or t
  misc_feature (1090)..(1090): n is a, c, g, or t
  misc_feature (1098)..(1098): n is a, c, g, or t
ccaggctgggtacggtccggaattccgggatatcgtcgacccacgcgtccgcgactggtggagattgacaatgggaagcagcgtgagtttggagagccggctggcggatgcgctgcaggaactgcgggcccagcatgaggaccaggtggagcagtataagaaggagctggagaagacttattctgccaagctggacaatgccaggcagtctgctgagaggaacagcaacctggtgggggctgcccacgaggagctgcagcagtcgcgcatccgcatcgacagcctctctgcccagctcagccagctccagaagcagctggcagccaaggaggcgaagcttcgagacctggaggactcactggcccgtgagcgggacaccagccggcggctgctggcggaaaaggagcgggagatggccgagatgcgggcaaggatgcagcagcagctggacgagtaccaggagcttctggacatcaagctggccctggacatggagatccacgcctaccgcaagctcttggagggcgatgaggagaggctacgcctgtcccccatgccctaccttcgcagcgcagccgtggccagtgcttcctctcactcatcccagacacagggtgggggcagcgtcaccaaaaagcgcaaactggagtccaatgaggaccagtccatgggcaattggcagatcaagcgccagaatggagatgatcccttgctgacttaccggttcccaccaaagttcaccctgaaggctgggcaggtggtgacgatctgggctgcaggagctngggccacccacagcccccctaccgacctggtgtggaaggcacagaacacctggggctncgggaacagcctgcgttacggctctcatcaactccactggggaagaagtggccatgcgcaantgggtgcgcttcagtgactgtggttgaggacgacgaggatnaggatggagatgacctgctccatcaccaccacgtgagtgttagnccgccgctgaggccgaagcttgcactnggggccacccagcncagggcctgggggcaagcctntccccaggcttccccgttgccaaaatntttttcatttnaaagaatntttttggaactttaatt

SEQ ID NO: 168545 - DNA, 909 bp, Homo Sapiens
tgctggtacaggtccggaatcttgggatatgtcgacccacgcgctcggccgcacctacaccagccaacccagatcccgaggtccgacagcgcccggcccagatccccacggcctgccaggagcaagccgagagccagccggccggcgcactccgactccgagcagtctctgtccttcgacccgagccccgcgccctttccgggacccctgccccgcgggcagcgctgccaacctgccggccatggatgaccccgtcccagcggcgcgccacccgcagcggggcgcaggccagctccactccgctgtcgcccacccgcatcacccggctgcaggagaaggaggacctgcaggagctcaatgatcgcttggcggtctacatcgaccgtgtgcgctcgctggaaacggagaacgcagggctgcgccttcgcatcaccgagtctgaagaggtggtcagccgcgaggtgtccggcatcaaggccgcctacgaggccgagctcggggatgcccgcaagacccttgactcagtagccaaggagcgcgcccgcctgcagctggagctgagcaaagtgcgtgaggagtttaaggagctgaaagcgcgcaataccaagaaggagggtgacctgatagctgctcaggctcggctgaaggacctggaggctctgcttgaactccaaggaggccgcactgagcactgctctcagttgagaagcgcacgctggagggcgagctgcattgatctgcggggccaggtggcaagcttgaggcagccctaggtgaggccaagaagcaacttcaggatgagatgcttgcggcgggtggatgctgagaacagggctgcagaccctgcagggagggactgggacttccagaaagaaccttctacacggaaggaagctgcggtgagaacca

SEQ ID NO: 168546 - DNA, 1218 bp, Homo Sapiens
  misc_feature (21)..(21): n is a, c, g, or t
ggacgcgtgggtcgacccacngcgtcgagaccaagcgccgtcatgagacccgactggtggagattgacaatgggaagcagcgtgagtttgagagccggctggcggatgcgctgcaggaactgctgggcccagctatgaggaccaggtggagcagtataagaaggagctggagaagacttattctgccaagctggacaatgccaggcagtctgctgagaggaacagcaacctggtgggggctgcccacgaggagctgcagcagtcgcgcatccgcatcgacagcctctctgcccagctcagccagctccagaagcagctggcagccaaggaggcgaagcttcgagacctggaggactcactggcccgtgagcgggacaccagccggcggctgctggcggaaaaggagcgggagatggccgagatgcgggcaaggatgcagcagcagctggacgagtaccaggagcttctggacatcaagctggccctggacatggagatccacgcctaccgcaagctcttggagggcgaggaggagaggctacgcctgtcccccagccctacctcgcagcgcagccgtggccgtgcttcctctcactcatcccagacacagggtgggggcagcgtcaccaaaaagcgcaaactggagtccactgagagccgcagcagcttctcacagcacgcacgcactagcgggcgcgtggccgtggaggaggtggatgaggagggcaagtttgtccggctgcgcaacaagtccaatgaggaccagtccatgggcaattggcagatcaagcgccagaatggagatgatcccttgctgacttaccggttcccaccaaagttcaccctgaaggctgggcaggtggtgacgatctgggctgcaggagctggggccacccacagcccccctaccgacctggtgtggaaggcacagaacacctggggctgcgggaacagcctgcgtacggctctcatcaactccactggggaagaagtggccatgcgcaagctggtgcgctcagtgactgtggttgaggacgacgaggatgaggatggagatgacctgctccatcaccaccacgtgagtggtagccgccgctgaggccgagcctgcactggggccacccagccaggcctgggggcagcctctccccagcctccccgtgccaaaaatcttttcattaaagaatgttttggaacttttaaaacaccacaaccaaa

SEQ ID NO: 168547 - DNA, 473 bp, Homo Sapiens
cgcgacccagcgtcagacgatgatttgggcaccgtccctgactataaccagctgaagaagcaggagctgcagccaggcacagcctataagtttcgtgttcccggaatcaatgcctgtggccgggggcccttcagcgaaatctcagcctttaagacgtgcctgccaggtttcccaggggccccttgtgccattaaaatcagcaaaagtccggatggtgctcacctcacctgggagccaccctctgtgacctccggcaagattatcgagtactccgtgtacctggccatccagagctcacaggctgggggcgagctcaagagctccaccccggcccagctggccttcatgcgggtgtactgcgggcccagcccctcctgcctggtgcagtcctccagcctttccaacgcccacatcgactacaccaccaagcccgccatcatcttccgcatcgtcttcaatgggtccgagctgca

SEQ ID NO: 168548 - DNA, 325 bp, Homo Sapiens
ctccaacccagcgcagacgatgacacggaatgcagtctgggccctgtcaaatctctgccgagggaaaaacccacccccagagtttgcaaaggtctctccttgtttgcctgtactgtctcgcctactcttcagcagcgactcggacttgctggcagatgcttgctgggccctttcttatctgtctgatggccccaatgagaagatccaggcagtcatagactccggagtctgccggagattggtagagctgctgatgcacaatgattacaaagtggcttctcctgccctgagagccgtgggtaacatcgtctgcgactgggtccgg

SEQ ID NO: 168549 - DNA, 1217 bp, Homo Sapiens
caacgagctggagacaggcatggagaagaccctgccacccacggactgccgcctgcgccctgacatccgcggcatggagaatggcaacatggatctggccagccaggacaaggagcggctggaggagaagcagagagaagcacggagggagcgggccaaggagaaggcagagtggcagacgaggtggttctacccaggcaataacccctacactgggacccccgactggttgtatgcaggggattactttgagcggaatttctccgactgcccagatatctactgagggcctggaggggcctggggcccgggaccggaggctgacgaggctggacttcctcgagtggccactgtgagcctcgtcacagcagaaaccaacttttctaacgactgagttcgcggagatagcatcatccctgatcaaggatgtaattctaattaactgttgattgccaaacatttcactctgctgtgccgtctcttcataaagcttcacttgggatcatcgtcttcattaaggtttcaacagggaaattcttcacggcgcccttttatgtggcagaaatcagctggggcttgtttagcttccagcacactctcagtcatagcatgtgtagctaaaggaagtaatgggaaggggttcatgttctctttataatgcagtggcaaaaggttctgaaagccttttaaactcgaaccagtgggggaaagatggatcttgaagctaatcctgcagagagttttatagaggccagggattgccttctaaattatgataaaacagaagtgaagagtttcagagcatcagattgagtgaaaagttgtcagattctgtattttttaacaatcttcaataatgtaaagattacttttaaaatagttaagttaaaactacttgaatagtattttgctgaagagcaagatatgcattaatcaccggttttatactgtccaaaatgaaacatccccgtgacaaaccagaatggggcaaaagcatcgagagcgtgacaggaaatcccaagactgctttcgccctcagaagcgttcccggctgcgattcccctgccccggttgtcagtgaaggcctgtcctgtcaccgcacaaccgcgtccgtgggtcccccaggggggttccttttcctccccacaagttcgccggggaccccataagcaccccctggggggtttctgcgtttttcccacaaaaggcatgtgttt

SEQ ID NO: 168550 - DNA, 506 bp, Homo Sapiens
tgcaagcccgacccagcgcagacgatgagatggtgcccacccacacggagggggggtctccgtcacccagtccaccgactcaaaagtcagtctcctctggcaacaccctcacagacacacttaaccagccagaaacaaaactttaccagccatctaggcatccttcagtccaatcaggttgacacctcatattcaccatcatggtggcagggcagggcttatacctgcagcctctgtcctggcctgtttgcttaggaagcaggtcccttaaagtcgggcctccccacccgtccacctgggtgtgtgcgacggcagagtgtgggggcaggggcggggatgtgcgcctgtggcttgctgccccttgcaaatcagtggctctccctctttaaaccaagttggacgccagatgggtaagtgcgacccgccggcctcttgctcctggagcctttccgtcctcccttgccctggctcaagcacccccatctaaccatcgtctgcccgctggg

SEQ ID NO: 168551 - DNA, 437 bp, Homo Sapiens
  misc_feature (65)..(144): n is a, c, g, or t
ccagggtgagccccgcgtcccggcgccactcggcccagggcagggaccccgccacggccgggacnnnnnnnnnnnnnnnnnnnnnnnnnnnnnnnnnnnnnnnnnnnnnnnnnnnnnnnnnnnnnnnnnnnnnnnnnnnnnnnnggccggaccgggcagccagaaaaatcatttttcttctctgggaaggtgaacatttgtagcattgatttcccggatctggtaacatggcaaaagatacttttaaagcgtctgaagcgggatgaaggtgaaagatggaaggatctgatctctgaagctgcggtcaccacccacaagttgtggccttggataccacactgcagttgggtggtgatggggtggtgccttctgactttttccttatctttaccgactgtgttaattgataattttaaataaacgccttaattaaattg

SEQ ID NO: 168552 - DNA, 657 bp, Homo Sapiens
gcccgcgcggccggaccgggcagccagaaaaatcatttttcttctctgggaaggtgaacatttgtagcattgatttcccggatctggtaacatggcaaaagatgccggtctaattgaagccaacggagaactcaaggtcttcatagaccagaaccttagtcccgggaaaggcgtggtgtccctcgtggccgttcacccctccaccgtcaacccgctcgggaagcagctcttgccaaaaacctttggacagtccaatgtcaacattgcccagcaagtggtaattggtacgcctcagagaccggcagcgtcaaacaccctggtggtaggaagcccacacacccccagcactcactttgcctctcagaaccagccttccgactcctcaccttggtctgccgggaagcgcaacaggaaaggagagaagaatggcaagggcctacggcatttctccatgaaggtctgcgagaaggtgcagaggaaagggaccacttcctacaacgaagtggcagacgagctggttgcggagttcagtgctgcccgacaaccacattcttacccaacgagtctgctttattgacacaaaaaacctaagaacggcggcggcctacgaatgcccttaaacgggcttacggcccatgaaacatccatctcccaagg

SEQ ID NO: 168553 - DNA, 784 bp, Homo Sapiens
gcctcagagaccggcagcgtcaaacaccctggtggtaggaagcccacacacccccagtcactcactttgcctctcagaaccagccttccgactcctcaccttggtctgccgggaagcgcaacaggaaaggagagaagaatggcaagggcctacggcatttctccatgaaggtctgcgagaaggtgcagaggaaagggaccacttcctacaacgaagtggcagacgagctggttgcggagttcagtgctgccgacaaccacatcttaccaaacgagtcagcttatgaccagaaaaacataagacggcgcgtctacgatgccttaaacgtgctaatggccatgaacatcatctccaaggagaagaaggagatcaagtggattggtctgcccaccaactcggctcaggaatgtcagaacttagaggtggaaagacagaggagacttgaaagaataaaacagaaacagtctcaacttcaagaacttattctacagcaaattgccttcaagaacctggtgcagagaaaccggcatgcggagcagcaggccagccggccaccgccacccaactcagtcatccacctgcccttcatcatcgtcaacaccagcaagaagacggtcatcgactgcagcatctccaatgacaaatttgagtatctgtttaattttgacaacacatttgaaatccacgatgacatagaagtgctgaagcggatgggcatggcttgcgggctggagtcggggagctgctctgccgaagaccttaaaatggccagaagtctggtccc

SEQ ID NO: 168554 - DNA, 534 bp, Homo Sapiens
accccgcggcagacgatgcctggttctgggtaggcggggctactacggggcggtgcctgctgtggaaatgcctgcccgcgcgcttctgcccaggcgcatggggcatcgtactctagcctccactcctgccctgtgggcctacatcccgtgccctcgctctgagctgcgcctggacctggttctgccttctggacaatctttccggtggagggagcaaagtcctgcacactggagtggtgtactagcggatcaagtatggacactgactcacactgaggagcagctccactgcactgtgtaccgaggagacaagagccaggctagcaggcccacaccacacgagctggaggccgtgcgcaagtacttccagctagatgttaccctggctcaactgtatcaccactggggctccgtggactcccacttccaagaggtggctcagaaattccaaggtgtgcgactgctgcgacaagaccccatcgaatgccttttctcttttatctgttcctccaacaacaacatcgtctgccgctg

SEQ ID NO: 168555 - DNA, 1129 bp, Homo Sapiens
  misc_feature (121)..(121): n is a, c, g, or t
  misc_feature (1033)..(1033): n is a, c, g, or t
  misc_feature (1053)..(1053): n is a, c, g, or t
  misc_feature (1061)..(1061): n is a, c, g, or t
  misc_feature (1079)..(1079): n is a, c, g, or t
  misc_feature (1086)..(1086): n is a, c, g, or t
  misc_feature (1090)..(1090): n is a, c, g, or t
  misc_feature (1095)..(1095): n is a, c, g, or t
ggcctggtccgggccatgtccgcgtgaggaccccgccgctgtcgccgctcccgttccggccctggcccctctgcccggcagcgcggcgcaccatgggctccattctcagccgccgcatcgngggggtggaggacatcgacatccaggcgaactcggcctatcgctaccctccgaagtccggaaactactttgcttcgcactttttcatgggaggagagaaattcgacaccccccaccctgaaggttacctctttggagagaacatggatctgaacttcctgggcagccgaccggtccagtttccctacgtcactcctgccccccacgagcccgtgaagacgctgcggagcctggtgaacatccgcaaagactccctgcggatggtgaggtacaaagacgatgccgacagccccaccgaggacggcgacaagccccgggtgctctacagcctggagttcaccttcaacgccgatgcccgcgtggccatcaccatctactgccaggcatcggaggagttcctgaacggcagggcagtatacagccccaagagcccctcgctacagtccgagaccgtccactacaagagaggggtgagccagcagttctccctgccctccttcaagattgacttctcggaatgggaggatgacgagctgaactttgacctggaccggggcgtgtttccagtagtcatccaggctgtggtggacgaaggagatgtggtggaagtgactggccacgcccacgtgctcttggctgcctttgaaaagcacatggacggcagcttctctgtgaagcctttaaagcagaagcaaattgtggaccgggtcagctacctcctgcaggagatctatggcattgagaacaagaacaaccaggagaccaagccctcggacgacgagaacagcgacaacagcaacgagtgtgtggtgtgcctgtccgacctgcgggacacgctgatcctgccctgccgccacctgtgcctctgtacctcctgcgccgacacgatgcgctaccaggccaacaactgtcncatctgcggatggctttacnggccctcntgcaagatccggcggtgnggaaganctanaagcntgtccccgtgtcttcactcccgtcctggccagag

SEQ ID NO: 168556 - DNA, 1033 bp, Homo Sapiens
  misc_feature (20)..(20): n is a, c, g, or t
  misc_feature (870)..(870): n is a, c, g, or t
  misc_feature (872)..(872): n is a, c, g, or t
  misc_feature (881)..(881): n is a, c, g, or t
  misc_feature (921)..(921): n is a, c, g, or t
  misc_feature (930)..(930): n is a, c, g, or t
  misc_feature (940)..(940): n is a, c, g, or t
  misc_feature (964)..(964): n is a, c, g, or t
  misc_feature (966)..(966): n is a, c, g, or t
  misc_feature (968)..(968): n is a, c, g, or t
  misc_feature (1002)..(1002): n is a, c, g, or t
  misc_feature (1006)..(1006): n is a, c, g, or t
gcgtcgtgacttgaggatanagagccaagagctggaggtgaagaatgcagcagccaatgacaagctgaaaaagatggtgaaagaccagcaggaggctgaaaagaagaaggttatgagccaagaaatccaggaacagctgcataagcagcaggaggtaattgcagacaaacagatgagtgtcaaagaagatcttgataaggtggaacctgccgtcattgaggcacagaatgctgtgaagtcgatcaagaagcagcacctggtggaggtgaggtccatggccaaccctcctgctgctgtgaagctggcgctggagtccatctgcctgctgctgggggaaagcaccacagactggaagcagatccgctccatcatcatgcgggagaacttcatccccaccatcgtcaacttctctgcagaggagatcagtgacgccataagggagaagatgaagaaaaattacatgtccaatccaagttacaattatgaaattgtgaatcgggcttacctggcttgcggccctatggtgaaatgggcaattgcacagcttaactatgcagacatgttaaagagagtggagcccctacgcaatgagctgcagaagctggaagatgacgccaaggacaaccagcagaaggccaacgaggtgggagcagatgatccgagacctggaagccagcatcgcccgctacaaggaggaatacgccgtcctgatctcagaggcccaggccatcaaggcagacctggcagctgtcgaggcaaaagtaaaccggagcactgctcttttgaagagcttgtctgctgaacgtgaacgatgggaaaaaacaagtgaaactttcaaaaaccagatgtccaccattgctggggactgtntnttgtcagcntgcgttcatttgcctaccccgggttacttttgcccagcanatgcgtcanaactttgttnattacctgggcccatcacctaaangnangccaaaattccagttcccgtaccaatatttgccnggcnggaaaccctttccaaaggttggagaag

SEQ ID NO: 168557 - DNA, 1045 bp, Homo Sapiens
  misc_feature (635)..(653): n is a, c, g, or t
ctctttgagagaatctggtgtgggaaacgtcttcatcaagaacctggacacatctatagatatcaaggcactttatgatacttttccctgagatgggggctcagagggggaaggcctgtggcctgcatgcttcccgatggcccacggcaggaggtgtgtggaagtgtaaggcctaagatgctcacagaggtccctcatgacctcccttccccaactcccgaatcctctcttgagtgtggacctcaacaccttgagccctagtaaaggaactatgcaaatgcaggccactctccccaccacgtctgtgccccgcactgtccccacagccttccacaccctgtgcataggcagccctctcacgtcttgaggtccgaagctggggtgggggtgtccgtcagttattagtggatggagattcccacagcaaggctgcatttgaatgatttccttaggatgaatggtccctacacaaagaggccttgtgggcaaacctggagaaccctcctaaatccatagagttttcaaaatgtgaatctttggaagccttgagttcagaatctgctgctctggaatatttcccttcgatcttatctcagtcacttcgtttttgagaagagtgatgccttgggcatgcnnnnnnnnnnnnnnnnnnnagaaaacagggagttgaagtccaacctaatttaaaaaccccaccattgggagaattacaagggtttggtcctgaatggtagtgttggcaagcccaagccactcgtgctaactgcttttggtctcggtggctattccaagaacagaaggaggaagtgggccaatacagcgtgtgtgcatggatgtgtgtggggggcgtgcctctcagaaacgcggccagaagacaagcagggaaagtgaaaggtcccaggcacacacccctgcccatgtgcaggttggctcttacaagctctctggtgccagccacgggatcccttgaagtgacctcaagccaggcagacatgagacatggccggagttgtcccaaatggatcctttatgggtggtaagagcc

SEQ ID NO: 168558 - DNA, 419 bp, Homo Sapiens
agcaggcttgggccccagattaagatgtcatgctggatgctgccttagcgctggcggccgagatttccagcaagagccccgtggcggtgcagagcaccaaggtcaacctgctgtattcccgcgaccattcggtggccgagagcctcaactacgtggcgtcctggaacatgagcatgctgcagacccaagacctcgtgaagtcggtccaggccacgactgagaacaaggaactgaaaaccgtcaccttctccaagctctgagagccctcgcgtcccaggccccagccagggggccggccttgtcccgcctcatccacagaaagggaggatgggcgatgacagttgtttctatgccttctgacccagtttcccacttataacttcatgacatcttatctgggcccagcctgctggtccgct

SEQ ID NO: 168559 - DNA, 435 bp, Homo Sapiens
gagccggtaccagcaggctgggccccagattaagatgtcatgctggatgctgccttagcgctggcggccgagatttccagcaagagccccgcggcggtgcagagcaccaaggtcaacctgctgtattcccgcgaccattcggtggccgagagcctcaactacgtggcgtcctggaacatgagcatgctgcagacccaagacctcgtgaagtcggtccaggccacgactgagaacaaggaactgaaaaccgtcaccttctccaagctctgagagccctcgcgtcccaggccccagccagggggccggccttgtcccgcctcatccacagaaagggaggatgggcgatgacagttgtttctatgccttctgacccagtttcccagttttataactttatgacatcttaatctggggcccaagcctgctgtaccgcca

SEQ ID NO: 168560 - DNA, 1031 bp, Homo Sapiens
  misc_feature (202)..(202): n is a, c, g, or t
  misc_feature (964)..(981): n is a, c, g, or t
gcggggtttccaattcccccagttttgttgttgaaccagccagcttggaagcccctccccgctttgcctttggtccatccaacccctgtgcaggggtgatctctggtggcaggaaaaaatgtccattgcagggtatgcccctgatgaacatggcttcgggacatcctgcagcccaaaagaagatgatgtggcccggatcagntggtactcccgtgacatcatcactcgataccaggagacctccaacgtcatcgagaggtgccccaagccccgtgattgctgccgtccatggggggctgcattggcggaggtgtggaccttgtcaccgcctgtgacatccggtactgtgcccaggatgctttcttccaggtgaaggaggtggacgtgggtttggctgccgatgtaggaacactgcagcgcctgcccaaggtcatcgggaaccagagcctggtcaacgagctggccttcaccgcccgcaagatgatggctgacgaggccctgggcagtgggctggtcagccgggtgttcccagacaaagaggtcatgctggatgctgccttagcgctggcggccgagatttccagcaagagccccgtggcggtgcagagcaccaaggtcaacctgctgtattcccgcgaccattcggtggccgagagcctcaactacgtggcgtcctggaacatgagcatgctgcagacccaagacctcgtgaagtcggtccaggccacgactgagaacaaggaactgaaaaccgtcaccttctccaagctctgagagccctcgcgtcccaggccccagccagggggccggccttgtcccgcctcatccacagaaagggaggatgggcgatgacagttgtttctatgccttctgacccagtttcccagtttataactttatgacaatgagtttctcaagcccaaggccttatcttcaccccacaaacaataaagcaaagtaaagnnnnnnnnnnnnnnnnnnctcgagactagttctctcctcgtgccgaattcgccacccaggcctcgctc

SEQ ID NO: 168561 - DNA, 936 bp, Homo Sapiens
  misc_feature (868)..(868): n is a, c, g, or t
gggtggcgaattcgcgacgaggctgtgcccgccccctccgctaacgggcacgttactccgtccgaacgcagtagacgaaggcggcggcgatggcggcggggatagtggcttctcgcagactccgcgacctactgacccggcgactgacaggctccaactacccgggactcagtattagccttcgcctcactggctcctctgcacaagaggcggcttccggagtagccctcggtgaagccccagaccacagctatgagtcccttcgtgtgacgtctgcgcagaaacatgttctgcatgtccagctcaaccggcccaacaagaggaatgccatgaacaaggtcttctggagagagatggtagagtgcttcaacaagatttcgagagacgctgactgtcgggcggtggtgatctctggtgcaggaaaaatgttcactgcaggtattgacctgatggacatggcttcggacatcctgcagcccaaaggagatgatgtggcccggatcagctggtacctccgtgacatcatcactcgataccaggagaccttcaacgtcatcgagaggtgccccaagcccgtgattgctgccgtccatgggggctgcattggcggaggtgtggaccttgtcaccgcctgtgacatccggtactgtgcccaggatgctttcttccaggtgaaggaggtggaacgtgggtttggctgccgatgtaggaacactgcagcgcctgcccaaggtcatcgggaaaccgaagcctggtcaacgagctggccctcaccgcccgcaagatgatggctgaccaggccctgggccagtgggctgggcagccgggggtccccagacaaaaaggcctggctgaatgctgccttaancgctggcggcccgaaatttccagcaagagcccccggggcgggggaaagaacccagggtcacactgctt

SEQ ID NO: 168562 - DNA, 883 bp, Homo Sapiens
ggggcagtagacgaaggcggcggcgatggcggcggggatagtggcttctcgcagactccgcgacctactgacccggcgactgacaggctccaactacccgggactcagtattagccttcgcctcactggctcctctgcacaagaggcggcttccggagtagccctcggtgaagccccagaccacagctatgagtcccttcgtgtgacgtctgcgcagaaacatgttctgcatgtccagctcaaccggcccaacaagaggaatgccatgaacaaggtcttctggagagagatggtagagtgcttcaacaagatttcgagagacgctgactgtcgggcggtggtgatctctggtgcaggaaaaatgttcactgcaggtattgacctgatggacatggcttcggacatcctgcagcccaaaggagatgatgtggcccggatcagctggtacctccgtgacatcatcactcgataccaggagaccttcaacgtcatcgagaggtgccccaagcccgtgattgctgccgtccatgggggctgcattggcggaggtgtggaccttgtcaccgcctgtgacatccggtactgtgcccaggatgctttcttccaggtgaaggaggtggacgtgggtttggctgccgatgtaggaacactgcagcgcctgcccaaggtcatcgggaaccagagcctggtcaacgagctggccttcaccgcccgcaagatgatggctgacgagggccctgggccagtgggctggtcagccgggttgttccccagacaaagaggtcatgctggatgctgccttagccgctgtgcggcgagatttccagcaagagcccgtggcggttgcaaagcaccaaggtccaacctgctgtattccgggaac

SEQ ID NO: 168563 - DNA, 652 bp, Homo Sapiens
tgctgatctcacgagtctagtattctagtcaggatgagaaagcagtgaatcagtggcatagagcaacagcataaagggccgcggcctgcagtgtgagtaacaacagcataaagggccgcggactgaaatgtgagtggctgaccggcgagtgccggtccagtcagttctgagtcacatatctcaggtcaccgtaaatttataaaataccttcagaggcgagccagggaggcaaggcatgcattccctgcacacaggagaagactcaattggaaagaaaatctcctcttttttatgtgtatttgataaccagtctttataatctaaaagtacaaataaggcacgcattataaatctcacttattgtcctaatgagttagccaacctcaagtataaacatttgtcccctgctgtgtctcgatggcctgagccacacatcgacacagtatctgttaagtaagtatttgataaacaaatgaggcagtgaatgaatcagttaaaccaagagtcaggatttccttcgctttcctaaaactatgtagcttttattctttacagaaaatggtatatttgcaacactatttagttattcttttgaagctcaaattctgctttgaattattaaactttactcacgttgagatcaggcatgttc

SEQ ID NO: 168564 - DNA, 461 bp, Homo Sapiens
tcagtatactgtgcctttagatgaggggatgtatcctttggaaggatcacggagctattgtctggacagctcttctcccatggaagtctctgcggttcctcctcaagtgggagggcgcgctttccccgaggatgagagtcaggtagaccaggacctagttgtcaccccagagatcttcgtggatcagtccgtgaatggcttgttgattggcaccacgggagtcatgttgcagagcccgagagcgggtcacgatgatgtccctccactctcaccattgctacctccaatgcagaataatcaaatccaaaggaacttcagtggactcactggcacagaagcccacgtggctgaaaatatgctgctgtcatgtgaattatgatccgcactctgctcctggggttgcaagagtgtatgatctcagtgtcaaaagtagtggtcccagtgaattccgaacaagcctg

SEQ ID NO: 168565 - DNA, 936 bp, Homo Sapiens
  misc_feature (98)..(158): n is a, c, g, or t
  misc_feature (865)..(865): n is a, c, g, or t
gacgccgccggtaactgcgacagtcggggtcggtgcggtttgctaagtggtcggttcctggagctgcggtcttctgctagcctgatccgcagcttcannnnnnnnnnnnnnnnnnnnnnnnnnnnnnnnnnnnnnnnnnnnnnnnnnnnnnnnnnnnnagagcccatgagggcgcgggcaccgccgccgcctccgcggcgtcgccgtcgtcccggagcgccccgagctggcgcgggcatggccgcggcatgagcgtggagccgccgccggagctggaggagaaggcggcgtcggagcccgaggcgggagccatgccggagaagcgcgcgggcgcgcaggccgcggggagcacctggctacaaggctttggcccaccaagtgtgtaccatgctgctattgtcatcttccttgaattctttgcgtggggccttttgacaactccaatgttgactgttctacatgaaacattttctcaacacacattcctcatgaatggtctcattcaaggtgtaaagggcctgctctcttttttgagtgccccactcattggtgccctgtctgatgtgtgggggaggaagccctttctcctcggcactgtattctttacctgcttcccaatcccactgatgaggatcagcccatgggtagggtcttgctctgttaccaagctggagagcagtggaacaatcatggctcactgcagcctctacctcccgggctgtagccattttcccacctcagcctcccaagtagctaggactatagtcaatagtcctggctgggagtgcaatggccgcaaatctcagcctcacctgcagccctccggcctccctggggttcaagcggatttctccctggcctcaanttctcccggatttagactgggggatttacagggccttggcacccacccacaaacccaaggttaaataattg

SEQ ID NO: 168566 - DNA, 293 bp, Homo Sapiens
cggaatgcgactcaagcacgcagagacggtggagatggtgtcatcgccacggagacgggctccctgagcctggtgactgtcgtgggcaacatcctggtgatgctgtccatcaaagtcaacaggcagctgcagacggtcaacaactacttcctcttcagccgtggcgtgcgccgacctctatcatcgcgcgctttctccatgtaacctcatacaccgtgttacctcactcaacgggctcctgcgcctctcgggcgccgtggctctgtgaccctcgcttgagactcaggcactgt

SEQ ID NO: 168567 - DNA, 397 bp, Homo Sapiens
  misc_feature (110)..(168): n is a, c, g, or t
tcgccatcaggtacaaagctgaaattctaactaaactataccctgcaaccaaaatcaagcattccattcgtatgcaaaccaaaacgccaagtacttaattactatctttnnnnnnnnnnnnnnnnnnnnnnnnnnnnnnnnnnnnnnnnnnnnnnnnnnnnnnnnnnntaaccattaaaaacaaaaaatttaatatattatagccctatgtacgtcgtgcattaactgctagtccccatgcatataagcatgtacatattattattaatattacatagtacatattattattgatcgtacatagcacatatcatgtcacataattccagtcaacatgcgtatcaccaccattagatcgcgagcttaatctccaggacgcgttaagacaacaattcgc

SEQ ID NO: 168568 - DNA, 800 bp, Homo Sapiens
accgtaggtatatgtcgtgcaaccaaaacgccaagtacttaattactatctttaaaacaaaaaaacccataaaaattgcgcacaaacatacaaatatgtgaccccaaaaatttaaccattgaaaaccaaaaaatctaatatactataaccctatgtacgtcgtgcattaactgctagtccccatgcatataagcatgtacatattattattaatattacatagtacatattattattgatcgtacatagcacatatcatgtcaaataactccagtcaacatgcatatcaccaccactagatcacgagcttaattaccatgccgcgtgaaaccagcaacccgcttggcagggatccctcttctcgctccgggcccataaaccgtgggggtttctattgatgaactttaacaggcatctggttcttacttcaggaccatctcacctaaaatcgcccactctttccccttaaataagacatctcgatggactaatgactaatcagcccatgctcacacataactgaggtttcatacatttggtattttttaatttttggggatgcttagactcagccatggccgtcaaaggccctaacacagtcaaatcaattgtagctggacttcatggaactcatgatccggcacgacaatccaaacaaggtgctattcagtcaatggttacgggacataacgtacatacacgtgcgtacacgtgcgtacacgtgcgtacacgtgcgtacacgtgcgttcacatgcgtacacgttcgtacacttgcgtacacttgcgtacacttacgtacg

SEQ ID NO: 168569 - DNA, 692 bp, Homo Sapiens
ctgctcaaagtgttgcagctgactgtgtgacaacagctgacatttaggagggcatttcatgttctgatctgttagaacatttaaatacttagaaataaaaaatattcagctttgaagttttcaatactggaaaactttcaagtctaggatttacagccaggaagcgctgctctgtgttccttaaattggactctgtttcccacaaagttaatcttcagctttggcttccatttcttctgcatcatcatctccatccacttcggcattttctctttcaagcctctccatctgcctcgcaagttcagtctcatctgtatctgtgaccactttgggctccatttgaacattgaacacacccctcttttcctcaatcttctctttgataacagccatagcttgactgaggacagaaaggccttctgttctctccagggttgtcgtagtcattacataccgaggaggagctattagattaatcttaatgggcatgttttctgtagaacaattcaaacctgctcttagggcttcttttacagcatcaatgccttcataaccatcacaagccacttcaatatctgcttgtattttgacagcctgtggggtcaagcgcctattaatattattatatgagtacttcccagtgcatctgtcatctctaatctacactatctccattatagatgtgctggtga

SEQ ID NO: 168570 - DNA, 667 bp, Homo Sapiens
  misc_feature (74)..(74): n is a, c, g, or t
aacagaagccttctgcctcagtcagctatgctgtatcaaagagagattgaggaaaagagggtgtgttcaatgtncaaatggagcccaaagtggtcacagatccagatgagactgaacttgcgaggcagattgagaggcttgaaagagaaaatgccgaagtggatggagatgatgatgcagaagaaatggaagccaaagctgaagattaactttgtgggaaacagagtccaattcaaggaacacagagcagcgcttcctggctgtaaatcctagacttgaaagtgtaccagtattagaacaacttcaaagctgaagtattttttattcactaatgtatttaaatgttctaatcagcatcagaacagctgaaatgccctcctacaatgtcagctgtatgtcacacgagtagctccaacactttgagcatttctaagggagctggcctcatgatcactagagacaaagtctttaaagaactagttctaaaattgggcttgtgatttccatttctgatgtctccagataaggcaccccttctctagattcaatgcctcacgagatctgccaggggcatccaaggcaaacaatacccaatctttctatatcaaaatgtattcaagcaaacatcaaataaatttctgggatatgtaaataagaaaaaaaccat

SEQ ID NO: 168571 - DNA, 762 bp, Homo Sapiens
  misc_feature (17)..(17): n is a, c, g, or t
tctaggagcgagcctgngtggcgaattctccacgagggttcaatgttcaaatggagcccaaagtggtcacagatacagatgagactgaacttgcgaggcagatggagaggcttgaaagagaaaatgccgaagtggatggagatgatgatgcagaagaaatggaagccaaagctgaagattaactttgtgggaaacagagtccaatttaaggaacacagagcagcgcttcctggctgtaaatcctagacttgaaagttttccagtattgaaaacttcaaagctgaatattttttatttctaagtatttaaatgttctaacagatcagaacatgaaatgccctcctaaatgtcagctgttgtcacacagtagctccaacactttgagcatttttaagggagtggcctcatttcactagagacaaatctttaagaatagttctaaaattgggcttgtgatttccatttctgatgtctccagattggcacccctttctagttcaatgcctcacgagatttgccaggggcatccaaggcaaacaatcccaatctttctatataaaatgtattcaaagcaaacaatcaacataaaattatcttgggaataatactacaacaacaacaacaaaaacaaagggacgagacacgacctatagacagttatcgccctcagaggaaggccccaaacgactataccggacgttacccaagaagttaactatgctaacaaaagtaggaaccactaatagtgaagatcgaataatt

SEQ ID NO: 168572 - DNA, 701 bp, Homo Sapiens
ctcgtctacagctattcctagatcagctcgctgtaatggtgtcctggaaggatccgaatctgtcgccaggatttccctaaccgaatagttttccaggaattcagacagagatatgagatcctaactccaaatgctattcctaaaggttttatggatggtaaacaggcctgtgaacgaatgatccgggctttagaattggacccaaacttgtacagaattggacagagcaagatatatttcagagctggagttctggcacacttagaggaagaaagagatttaaaaatcaccgatatcattatcttcttccaggccgtttgcagaggttacctggccagaaaggcctttgccaagaagcagcagcaactaagtgccttaaaggtcttgcagcggaactgtgccgcgtacctgaaattacggcactggcagctggtggcgagtcttcacaaaggtgaagccgcttctacaagtgactcgccaggaggaagaacttcaggccaaagatgaagagctgttgaaggtgaaggagaagcagacgaaggtggaaggagagctggaggagatggagcggaagcgaccagcagcttttagaagagaagaatatccttgcagaacaactacaagcagagactgagctctttgctgaagcagaagagatgagggcaagacttgctgctaaaaagccggaagaagaaaatgat

SEQ ID NO: 168573 - DNA, 555 bp, Homo Sapiens
atcattttcttcttccggatggatctgtggaagatggtgccatcgtaataatgcttcttgcaaagcctgatgaagttttcgcaggtttttggtgtcaggtcgcagtgcagctccaggttgaggtcgcccttgttggtgtgcagccgcacgtagcccttcttcttcacaaactggtagcgcagcacatcctcgtcgatggcagctgcttcatgtgtggtctccgggaccatcgcggtggaggtgaaggaagcgctgaccttccctgtggaatagtgggcagcgttcagcttgtccactttcttcttctccggggccttcatggtggctgccagaatctcgtcccctttgaactccttgtagagctcctgcagggtctctcgggtctcggcatttgtatttttcagatatataagacgggtcctgtttggccttctcttcatctgggtctattattttcatgttattcttcacatgatagaagttagagacattgaacttgtccaaattggtggggtcctggagggtgatgatgtcctgccggaagaagaaaatgat

SEQ ID NO: 168574 - DNA, 414 bp, Homo Sapiens
agatggcagcagctcactgcagagcagcgcgagctgtcgctgcaagcggtgatcgcctgggaaatccagaacctgcccgaagagcagcgcaccggctacatggggccgcaggaatgcgcgtcgaagtcggcgccggtgccgaacatcctgttcaagtcggatgcgatccattgatagaaatcaggccttgcttgttcctgcattaggggaaagttggggacatgctgctacaatacggctaatctttcattgggaccgaaagcaaaggttggcaacattgtacaagtcacccggccagaaggaatgcacagtactgtttcaaatcaaacctcagggatttagagatactgttgttacttctgcatgttcattgcaaacagaaggttccttgagcacccggaagaagaaaatgat

SEQ ID NO: 168575 - DNA, 937 bp, Homo Sapiens
tccccgaattttcaaaacattacagctatgttattcatgccaaaataaaagctgtgcagagggagtggctgcaatgaggtcacaacggtggtggatgtaaaagagatcttcaagtcctcatcacccatccctcgaactcaagtcccgctcattacaaattcttcttgccagtgtccacacatcctgccccatcaagatgtcctcatcatgtgttacgagtggcgttcaaggatgatgcttcttgaaaattgcttagttgaaaaatggagagatcagcttagtaaaagatccatacagtgggaagagaggctgcaggaacagcggagaacagttcaggacaagaagaaaacagccgggcgcaccagtcgtagtaatccccccaaaccaaagggaaagcctcctgctcccaaaccagccagtcccaagaagaacattaaaactaggagtgcccagaagagaacaaacccgaaaagagtgtgagctaactagtttccaaagcggagacttccgacttccttacaggatgaggctgggcattgcctgggacagcctatgtaaggccatgtgccccttgccctaacaactcactgcagtgctcttcatagacacatcttgcagcatttttcttaaggctatgcttcagtttttctttgtaagccatcacaagccatagtggtaggtttgccctttggtacagaaggtgagttaaagctggtggaaaaggcttattgcattgcattcagagtaacctgtgtgcatactctagaagagtagggaaaataatgcttgttacaattcgacctaatatgtgcattgtaaaataaatgccatatttcaaacaaaacacgtaatttttttacagtatgttttattaccttttgatatctgttgttgcaatgttagtaatgttttgctggattcggggatcgtctagagc

SEQ ID NO: 168576 - DNA, 203 bp, Homo Sapiens
gcctactactatacggctgcgagaagacgacagaagggggagggggagtgggactgagcgtccgcagaggtgaccgaaaagccgtatgatgatgttcccgatttctctgttggtcggagtcggccagttgcctgaagtagggaagctgagtgtgtcgctccctggtccactgtttctcctataaatgtaaatgggtcacgctt

SEQ ID NO: 168577 - DNA, 1030 bp, Homo Sapiens
  misc_feature (447)..(464): n is a, c, g, or t
  misc_feature (473)..(511): n is a, c, g, or t
  misc_feature (558)..(630): n is a, c, g, or t
  misc_feature (669)..(677): n is a, c, g, or t
cctgggtggcgaattcggcacgaggatcctctgcctccttcggacacaatctactcctacgtcaggccagagaggctaagtcctatcagccatggaaacaccattgctctcttcttccggtcactgttgccaaactataccatggagggggagaggcccgaggaaggagtggctgggggtctgaaccgcaaccagggcctgaacaggctgatgctggctgtgcgcgacatgatggccaacttccacctcaacgacctggaggcgccgcacgaggacgacgctgagggggagggggagtgggactgagcgtccgcagaggtgaccgaaaagccgtatgatgatgttcccgatttctctgttggtcggagtcggccagttgcctgaagtagggaagctgagtgtgtcgctccctggtccactgtttctcctataaatgtaaatgggtcnnnnnnnnnnnnnnnnnnctcgaggcnnnnnnnnnnnnnnnnnnnnnnnnnnnnnnnnnnnnnnncatggtcatagctgtttcctgacccagctttcttgtacaaagtggtnnnnnnnnnnnnnnnnnnnnnnnnnnnnnnnnnnnnnnnnnnnnnnnnnnnnnnnnnnnnnnnnnnnnnnnnntgcagtacccgggaatttaacccgcctaatgaccgggcnnnnnnnnngtgatccaaaggatcttcttgagaatcctttttttcctgcaaataatcctgcctgctttgcaaccaaaaaaaccaccgcttaccagccggggggtttggtttgcccgggatccagaagcctacccaactcctttttttccgaaggggaaactggggctttcccgcccaaagcgccacaaatccccacaataccgggttcctttcctaaaggggaaacccccctacattataaggccccacccaccctttcaaaggaaaactctcggggtaaacccacccgccccctatacaataaaccccttccaacttccctggggattaaaaatccccccgggtgttaaaacccccccaga

SEQ ID NO: 168578 - DNA, 931 bp, Homo Sapiens
ggagtcctcctgcccctgctcgagtcttgcagtgtgcggcccgacgccagcgtttccagtcaccgcttctttggacccaatgctgaaataagccagccccctgccctgagccagctggtgaacctgtaccttgggaggtcacactttctctggaaagagcccgccaccatgagctggctggaggagaacgtccacgaggttctgcaagcagtggacgccggggacccagccgtggaagcctgtgagaaccggcggaaggtgctctaccagcgtgcacccaggaatatccaccgccatgtgatcctctctgagatcaaggaagccgtcgcttgccctgcccccggacgtgaccacgcagcctgtgatggggtttgatcctctgcctccttcggacacaatctactcctacgtcaggccagagaggctaagtcctatcagccatggaaacaccattgctctcttcttccggtcactgttgccaaactataccatggagggggagcaggcccgaggaaggagtggctgggggtctgaaccgcaaccagggcctgaacaggctgatgctggctgtgcgcgaacatgatggccaacttccacctcaacgacctggaggcgccgcacgaggacgacgctgagggggaggggggagtgcgactgagcgtccgcagaggtgaccgaaaagccgtatgatgatgttccccgatttctctgtttggtcggagtccgccagctggcctgaagtagggaaagctgaagtgtggtccctcccctggtcccactggtttcctcctataaaacgtaaaacgcggtccaaaaaacaaacgagctcctccctcctgttcccgctctctttcctccgaagggctcccttatttcccggggcggcgcgggaccaactaggaccgtatattcgcaactcgcccatcttatc

SEQ ID NO: 168579 - DNA, 1311 bp, Homo Sapiens
  misc_feature (18)..(18): n is a, c, g, or t
  misc_feature (1294)..(1294): n is a, c, g, or t
ctgggcgggggaatattnctggggtgcaccggctggtagagccacctcccgccggttcctcacaggcttcccacggctgggtccccggcgtccactgcttgcagaacctcgtggacgttctcctccagccagctcatggtggcgggctctttccagagaaagtgtgacctcccaaggtacaggttcaccagctggctcagggcagggggctggcttatttcagcattgggtccaaagaagcggtgactggaaacgctggcgtcgggccgcacactgcaagactcgagcaggggcaggaggactccagggaacatggtgagcgcctgctgtatcaggagagaggccttctgcctggcagagctctgctcacactcagggaggtctgtctgctggctcagcaggaaataccgccagtggaaccagagaagggcaaaattagggagctgggacaggttccggatgagccctcccactcctggaaagaggcggatcaggtactcgtagttccggggcccgcaagcccaggtggtcgatgagcagcagcatgcagagggggtcctcatccggctcgagactcaggatgagcttgcagtactccagcgccgtgcgcgggcagcctcgcttctccaggaagctcatctgcttgtagagggccaggtagaagctcctgttctcgggtctgcggtaatccagccggcaggccccactggtgagactgaacagggggtggaacgcacattccatgctgtacagcgctctctctacgaggtctcgagccatctcctgatcctcttgaaagcggcaggcatcgctgagctgcaggagtgagtcaacgtggtaagggctcgtctggagcagaaccacgatgttgttcggctccatagactccacggccaccaggaacttgtgctgagcctgctggtactcctcactgtgctcaaacgcaaagaaggagaggcctttttttgattccagcagccgcatggacagacctggtttgctgtagcggggccaggtgcttttaggggtggtcagccatgtgcacttggggtacacacgttgtctctgccgtggcctttgctcccccaggattgcccgggcaccaaaataccttttcagttctgtgtctggattcaagtgtctgtgctccacgtagagaacgtgcttcctggagctcaggggagctgggccgggacggttcaacccagtgctgtcctcaatcctctctaggatgcgatcgaatcttctagtccgtttccgatgttctcccgtgcctcgtgcggaattcgccacncaggctcgctcttagac

SEQ ID NO: 168580 - DNA, 1493 bp, Homo Sapiens
  misc_feature (49)..(49): n is a, c, g, or t
  misc_feature (1065)..(1346): n is a, c, g, or t
  misc_feature (1351)..(1389): n is a, c, g, or t
  misc_feature (1412)..(1412): n is a, c, g, or t
  misc_feature (1414)..(1414): n is a, c, g, or t
gggaaatcatctctaaatcccatcctctttcgaggtgttgggatggtgnccgatcctgataaccctttggtgctggacatcctgacgggctcttccacctcttactccttcttcccggacaagcctatcacccagtatccacatgcgctggggaagaacaccctcctcattgctgggctccaggccaggaacaatgcccgcgtcatcttcagcggctccctcgacttcttcagcgactccttcttcaactcagcagtgcagaaggcggcgcccggctcccagaggtattcccagacaggcaactatgaactagctgtggccctctcccgctgggtgttcaaggaggagggtgtcctccgtgtggggcctgtgtcccatcatcgggtgggcgagacagccccacccaatgcctacactgtcactgacctagtggagtatagcatcgtgatccagcagctctcaaatggcaaatgggtcccctttgatggcgatgacattcagctggagtttgtccgcattgatccttttgtgaggaccttcctgaagaagaaaggtggcaaatacagtgttcagttcaagttgcccgacgtgtatggtgtattccagtttaaagtggattacaaccggctaggctacacacaccctgtactcttccactcaggtatccgtgcggccactccagcacacgcagtatgagcgcttcatcccctcggcctacccctactacgccagcgccttctccatgatgctggggctcttcatcttcagcatcgtcttcttgcacatgaaggagaaggagaagtccgactgacgggctagagccctcttcccacagcgtggagacggggcagggaggggggttattaggattggtggttttgttttgctttgtttaaagccgtgggaaaatggcacaactttacctctgtgggagatgcaacactgagagccaaggggtgggagttgggataatttttatataaaagaagtttttccactttgaattgctaaaagtggcatttttcctatgtgcagtcactcctctcatttctaaaatagggacgnnnnnnnnnnnnnnnnnnnnnnnnnnnnnnnnnnnnnnnnnnnnnnnnnnnnnnnnnnnnnnnnnnnnnnnnnnnnnnnnnnnnnnnnnnnnnnnnnnnnnnnnnnnnnnnnnnnnnnnnnnnnnnnnnnnnnnnnnnnnnnnnnnnnnnnnnnnnnnnnnnnnnnnnnnnnnnnnnnnnnnnnnnnnnnnnnnnnnnnnnnnnnnnnnnnnnnnnnnnnnnnnnnnnnnnnnnnnnnnnnnnnnnnnnnnnnnnnnnnnnnnnnnnnnnnnnnnnnnnnnncctcnnnnnnnnnnnnnnnnnnnnnnnnnnnnnnnnnnnnnnngccgagaaggtttgccccctttncnaaacagacaaaaatcgcacaccgaaaaaaagagaaatccctttgttccggggccccgccccttcgggcaccccctccaa

SEQ ID NO: 168581 - DNA, 993 bp, Homo Sapiens
ccagcctgtctctcataaagtatggggaattcctctatgacaatctcatcattttctccccttcggtagaagatttggaggcaacatcaacgtggagaccatcagtgcctttattgacggcggaggcagtgtgctggtagctgccagctccgacattggtgaccctcttcgagagctgggcagtgagtgcgggattgagtttgacgaggagaaaacggctgtcattgaccatcacaactatgacatctcagaccttggccagcatacgctcatcgtggctgacactgagaacctgctgaaggccccaaccatcgttgggaaatcatctctaaatcccatcctctttcgaggtgttgggatggtggccgatcctgataaccctttggtgctggacatcctgacgggctcttccacctcttactccttcttcccggacaagcctatcacccagtatccacatgcggtggggaagaacaccctcctcattgctgggctccaggccaggaacaatgcccgcgtcatcttcagcggctccctcgacttcttcagcgactccttcttcaactcagcagtgcagaaggcggcgcccggctcccagaggtattcccagacaggcaactatgaactagctgtggccctctcccgctgggtgttcaaggaggagggtgtcctccgtgtggggcctgtgtcccatcatcgggtgggcgagacagcccccaccaatgcctacactgtcactgacctagtggagtatagcatcgtgatccagcagctctccaatggcaaatgggtcccctctgatggcgatgacattccccgggagttggcccccattgacccccttgcggacgaccttccccgaacaacaaaggcgggccaccacaggggctccaggacccacattcccccgaagtgtgcattgggtgcaaattccccgtccaaaccgtgtgctttcacacaaccccccctctgggccctaggcacgccccactc

SEQ ID NO: 168582 - DNA, 864 bp, Homo Sapiens
gggggtgtgcaggtgctgggtccttcggcaggaggaggaagatggagcccagcaccgcggcccgggcttgggccctcttttggttgctgctgcccttgcttggcgcggtttgcgccagcggaccccgcaccttagtgctgctggacaacctcaacgtgcgggagactcattcgcttttcttccggagcctgaaggaccggggctttgagctcacattcaagaccgctgatgaccccagcctgtctctcataaagtatggggaattcctctatgacaatctcatcattttctccccttcggtagaagattttggaggcaacatcaacgtggagaccatcagtgcctttattgacggtggaggcagtgtgctggtagctgccagctccgacattggtgaccctcttcgagagctgggcagtgagtgcgggattgagtttgacgaggagaaaacggctgtcattgaccatcacaactatgacatctcagaccttggccagcatacgctcatcgtggctgacactgagaacctgctgaaggccccaaccatcgttgggaaatcatctctaaatcccatcctctttcgaggtgttgggatggtggccgatcctgataaccctttggttgctggacatcctgaaggggctcctccacctcctactccttcttccccggacaagcctatcacccagtatccacatggcggtgggggaagacccccctcctcattgctggggctccagggccaggaaaaatgccccgcggtatcttccagcgggttcctccgacttcttcaggggactccctcgttcaactcagcaatggcaaaaggggggggccccggctcccccaagggatttcccagaa

SEQ ID NO: 168583 - DNA, 351 bp, Homo Sapiens
tctagtccgaactatcttgttttcccagtagattcgctgagattccagctggcttgttagtaaatatgagtactctaactgtaaggcatctattttctcttccgggcaagtatccccctcacattcatactgtactatttttccatctgtttgacttgcaaccagtcgatgaacatagttatctccagcatagtcccagactcgatggttggtaagctgcatggcatacgtgtgctgcgtttcctcaaagtgcttataagcatgtcgactgacataccgtccacatcctatgtggccgcatattaaacaaatccaaagattttcctgaacaccacactcaaaacacttatt

SEQ ID NO: 168584 - DNA, 313 bp, Homo Sapiens
  misc_feature (126)..(153): n is a, c, g, or t
ctattcttctccggggactcagcccaggacactcgctgattcctgcccccttcacacctgcaagcagagatgccggcatcagaagaatgtttcgtgtacgaaattgtttggggggtttgggtttannnnnnnnnnnnnnnnnnnnnnnnnnnngcttacgtgggcatccttcagcttttaataatctgaaaaattgtatttacccattgtcaatgtgtataaattaatctcagtcgattttatacaataaaaggtgaacttttatccatcaaacaataatttaacaaaaaatgtaccggaagaagaaaatgat

SEQ ID NO: 168585 - DNA, 629 bp, Homo Sapiens
atcattttcttcttccggtggctcaccatccacgtcgtccctctcagagttgtccctcaggaggctctcggactcagcaggggcttctccctccctagttcctaccagttcctcttcgccttgttctgagggaggtttggaagtttcagggaattctgcttgaagttcctcatcactaatcacactttgcacttcaatgaaacttccatcagattcactttcttccgagtcaatttccattggttccacggcctttggaatggaaattaaatcctggcctgcagattcagtggtctgctgttcttggatggtttccagaaaattctcatgctctttagcattaaatgacaccacattttccacattatctactgcctctgaagggacacttactatgctacttgtttcttgcaaactgacagggccaatgacttcagaagcagaattcggtttacattttgtttcatcatcacttgaaagaagagaagaatcgaatttactctcatatgggcaaagttcgttctgctgctcaagcacttcagcatgtgtttcattctttgacacagaatttgtacaagttggagatgccggtgtcagttcccttccattcgggagcggcacatgcgttg

SEQ ID NO: 168586 - DNA, 239 bp, Homo Sapiens
aggatatttcttcttccggaagtacgtctgattcgaggagagaccttggaaattgggaactactccttctatgccttggacaaccagaacctaaggcagctctgggactggagcaaacacaacctcaccatcactcaggagaaactcttcttccactataaccccaaactctgcttgtcagaaatccacaagatggaagaagtttcaggaaccaaggggcgccggaagaagaaaatgat

SEQ ID NO: 168587 - DNA, 505 bp, Homo Sapiens
  misc_feature (435)..(453): n is a, c, g, or t
atcattttcttcttccgggtaaattttatgggggagacaagtgagtcacaaacattctgttgaagggaaatctagtcagttgcttgaaagagcacagcccaaataaaacaaggactgactaggtgtaatgaaataacctgtgatttaaaagaagagctgcagctttgacagtgcttatttaaaggaaaatactgctggaaaatttccaatttctactacgttcaccatctctagtaagatctgacatatgctgaagttatgttttgatttggcacacagcatgttcaatgatggttactcgcctagtacaagacatggagaagaaacctttggacacagagcagatgacacctccttctgttttgtagtgtatcctggtgtcattttctgtgaatgtggttcaggtagagttgtttttgttgttgttgttgggcnnnnnnnnnnnnnnnnnnngggtctcttttggtggggtgggggtgggctaaagccggaagaagaaaatgat

SEQ ID NO: 168588 - DNA, 536 bp, Homo Sapiens
ccccggatcattttcttcttccggccacaaggggatcttatgagctttaaatgatgttccccttatgtagaccccttcttgtttttcttccaccattcagctacctactgtcgacatgtgcagtggtcacaagtagagggcaaacacaggtcagaaaaaaagacatcccggaagaagaaaatgatccggatcattttcttcttccggtgggaaaggcctctcctggctgtggtgagaggggatggtctggaaatttctctccaggtgagaaaggcccctcttggctgtggtatgaggggctggtctggaagtttctctccaggtgggaaaggcccctcctggctgtggtgtgtgaagggctggtctggaagcttctctccagatgggaaaggcctcttctgggtgtggtgagagggctggtctggaagtttctggatgctctcagcatctatcagggagagcaggtgcccccatgacatctctctgcacgggcagggtgtctactgtccggaagaagaaatattccggaccgctag

SEQ ID NO: 168589 - DNA, 622 bp, Homo Sapiens
atcattttcttcttccggtgttggccttcacgaaagatgggtaaagtggagtgacctgcagagtagtggtccaagtctgggtccccctttaacaaagggtttcgtggagggcccgtgtgcacagcacgtagccgccggggggatgaaaagatgtgtcactctttgctcttgaatgattatgaaaatgtcagatggttttatggatctgtgatctcaggattgtaattaccaatccacaatcgcattgctcactgggaattgcttcaagcgtattttccaggtagtgaatgatgagctacttaattcctcttcccttgaattcatcagatttggacttggactttagttctttctagatgcaatcctgatccacacaggaattagaaagtaattcttcctcccctcccacctaaagcaggagcaaggcagaggctcaaagaggaggaaaatgctgtcgtgactcacatcccctcctccccactttgaaaggcatttcaggccaagctgaaagttctgggggaacttccccctggtacttttaattccttctgtgttaagctcctcaactacctgatgacttggcaaaggcagtttttaaagcattaataataatcgtgcctaa

SEQ ID NO: 168590 - DNA, 827 bp, Homo Sapiens
  misc_feature (24)..(24): n is a, c, g, or t
tacacatactgacttctgaagtanacggtcgggtgacttctttccggtgtgataacttttttgggttgtgcgatgggaaggtatcgagtatctgtagctactgctcttttcgttgcaacaaaaaacgcagcagaacagagctcctccaacaatcagcaccagtgccgtggtccatcctaagtagagagcttctccaagctcacgtttttgggcaacattcactattgggttatagaaatctctgatgatggcattggcaacccagctcacagggatgagcaccaccatgcccgtgatgatgaagatgattccagccgtcagcagaatgtgagccttcaccttctcattgtcccccgtgcacctggtgcatttcatgccaaggatggccatcatgaaagccaagaagggcatcacggaagcagcacacatcagtcctctggctgcctgtaggtccggagaaagagccagcagggaatcatagattttgcactgcatcctgatgttagcctgcctcacgcaattcatccacagtccttcccagaagttttcaaaaaccacgatgttgttttcaatgaaggccgacactctccactgaggcatgacagtgacagccactgtgcccaccattccaacaccaccaagaaacagcccagcgatttctaaggcatgggttgccattatcctctgggatgagttttagccagctggactccggaactgctacttctgctttgaagcagggttctctgtgccacagaagagaacagtttttcctgtagtaatgaactcggaacccagtggtttttcaaataagagctgctttgctt

SEQ ID NO: 168591 - DNA, 370 bp, Homo Sapiens
ctattcttctcaggagaggagttgggggcttctctctttgcatgtcttcctgtcacgtattacctattatgattctggtgaagagcggactgtcttgcatctaaaggtaatgaacgaccatctacttcagaagtcttgattaagttctgcgctaaaacatttatctcccatttctgttatacctgtaaaggggagcaaagaatttgtgtcttcagagagaagtccactatcctagtcctttcagcccccttgaggtttggtgcaggcctgcctgggagttccacaaatgggagtgtgctctagggccccctgcctgaaccagtggccagcgactccctttggagagaatatcccggaagaagaaaatgat

SEQ ID NO: 168592 - DNA, 305 bp, Homo Sapiens
ccactgtgcattcaagatcttgatctatatccatagattggacatattggtcgggccagcaatcctcagacgcctcacttaggacaaatgaggaaactgaggcttggtgaagttacgaaacttgtccaaaatcacacaacttgtaaagggcacagccaagattcagagccaggctgtaaaaattaaaatgaacaaattacggcaaagttttaggagaaagaaggatgtttatgttccagaggccagtcgtccacatcagtggcagacagatgaagaaggcgttcgcaccggaagaagaaaatgat

SEQ ID NO: 168593 - DNA, 1182 bp, Homo Sapiens
  misc_feature (1031)..(1040): n is a, c, g, or t
  misc_feature (1142)..(1142): n is a, c, g, or t
ggggcatccggctccggacgcttccggtcttagctggacccgtctgggagggtgtactacagacctccacatgttggacagtaggattcagcagagaatgagtcccacatcctcttttcatccataagccactcttcccaactactcttccgccttccattgtccctatgtctactttactgctcaatctggattttggggaacctcctcccaaaaaggcattagaaggaaatgccaagcaccgaaattttgtcaagaagcggaggctcttagaacggagaggctttctgagtaaaaagaaccaaccccctagcaaggcgcctaagttgcactctgaaccttcaaagaaaggggaaactcctacggtcgatggcacttggaagaccccttccttcccaaaaaagaagacagctgcttccagcaatgggtcaggacagcccctggacaagaaagctgcagtgtcttggttgacccctgccccttcaaaaaaggctgattctgttgctgctaaagtagatttgctggggggagttccagagtgcccctccaaagatcaatagccaccaaacccgctctcagaagaagagctcccagaagaaatcctccaaaaagaaccatcctcagaagaatgccccacagaactccacccaagctcattcagaaaataaatgctcccggagcatcccaaaagttgccacggaagaatgggggcaattgactgtgagatggtgggcacaggaccaaaggggcatgttagttccttggctcgatgtagcattgtcaactacaacggagatgtgctttatgacgagtacattcttcccccctgccacattgtggactaccgaaccaggtggagtggtatccggaagcagcacatggtgaatgccacacccttcaagattgctcgaggccagatcttgaagatactcacagggaagatagtggtgggggcatgccatccacaacgacttcaaagcccttcaatactttcaccccaagtccctcaccccgtgacaccctcccatatnnnnnnnnnnttcaaccgggaaagcctggacttgcccgggaaaaaggcccacccttgctcctcctggaaagcattctttcacccaagaaaagcctggcttaaaaccccgggnaacaatcccaggggtttggggaaaaataaaccggggaccc

SEQ ID NO: 168594 - DNA, 606 bp, Homo Sapiens
atccccgcttacacctcagtagtaccttcttcagtgttttgagcttgagagttcaggtggcaatttcttcagcccagtattttctccctatggaaaaggatttctttgcccctagaaactttccttgccttctggaaggattcttttttccatttatatatttcctcataaagagaaaagctgtactatgcaacactaaggttagtcaaataggaaggaaaagaacatcagctttcacagttagcattagggagtatttcctagtagaaatattttcagtttcccgcacctccgtacctccactaatctgttctcactctgcctccaacttctttcaggatgtcttggctgtgctgctgtttgggggacagtgttttactctgacgggcagtttgagttcttgcagaaagtaggctcagcctttccaaactaaaccttgggtttcctcccaaagatgaagcaagatggctgctagcacagtcactgcggcacctgcaggctgcctgagagcaggctctgtatctaatgccgtgttttacctggtgggagatgcctgttaattgtgagacacactgttcagtttgtactactgaggtgtaagcgggg

SEQ ID NO: 168595 - DNA, 512 bp, Homo Sapiens
ccccgcttacacctcagtagtactagatgctgcagtgccagagttgctgactgcaggctgggcaagaacaggttcttttttaacagagtcagaagtttgcggaggagcctggggaagctgggctgactgttgctcctctagaagtgaggctgctgatgctgagacctcactgtcacctggcttctcaggcaaagctgatgaagtggcctcttctgtgcttctgccagcggacataggcagggagggggtagttgctgaactcaggaggctaccaaatgacaatgtggggaatgatgttggaaggggagtggcagctgtagttggtggtggggcagatgggggcactgtgctattggtctgttggcttccaaatgaaaaactagtcttgccagcacttagagatgtcccaccaaaactgatgaccccagaggatcctgcactggtgactggcagactgccaaaaacggcagttgaggaagtgctggtggctgctggtggtactactgaggtgt

SEQ ID NO: 168596 - DNA, 380 bp, Homo Sapiens
ggtacccgcttacacctcagtagtacctggcccagcagagccacccagtcgaggctcggatctgtgaaccaatagacggaattgatgctgtcctcattgcaacgtggttgagacttgaccccacccaatttagagttcatcattatcataaagatgaagagaatgatgctctacttggtggcccagcacagctcactgatgaagagaaatacagggactgtgaaagattcaaatgtccatgccctacatgtggaactgagaatatttatgataatgtctttgatggttcgggaacagatatggagcccagcttgtatcgttgcagtaacatcgattgtaaggcttcacctctgacctttacagtactactgaggtgtaag

SEQ ID NO: 168597 - DNA, 728 bp, Homo Sapiens
cttacacctcagtagtactgattatcgactacctatttgcacagggattatctgatctcagctttccacaacacataggaagctctgagccatcttccccaaaggtgcggaatttttcttaataatctgcattcttattagcaatatattccatcaatgtcctttataaaatatattattacagaattcacagaaattatgtatgcacaacattgggtgagcaatgccatttctcatgcctgattatggagggttatacagagatacacacagaaggcctgtgctcaaaggctcaggaaagtgaagcagacacatcacaagggtaactgctgggtggtaaaggacacatgaaggagagctagccagacaagaacgaagacagggatggagagctgaataattaataagaataaccaaaaaaacatgccctaggaaggatcagacagaaaagtcacatgaatgtgaaagcattttcttggttaaaaatcaccctgtaattttgcttgagcagtgattactacaagagaagtcactcaccttctcccttaaatataaaactacgcctccctcttatccagctcatgttttcaaatcccagcaatgtgatatcgacgcgcagtttggcaccacatttccagatgcgacagacatcatttgggcatattctagaaaccaagggcactggaggagagaagtgtactactcaggtgtaagcggggatactctag

SEQ ID NO: 168598 - DNA, 764 bp, Homo Sapiens
cttacacctcagtagtactttcataagattaaatagtctggcttcaactttactgaaaagatttaagtaatcttgcgcagagaggagaaagcatttgatcaatacctaagaccctttttaaatagtttgtaaattgtggatctttaataccaaagggtaagatgtcttcccttcgggtgaaggaataagggggcacagggaaactaggaggacaagtgaggtaatagtaacataatgttgttttctattttcaggtcaagtactgatttgtgcaagtgatgaccgaacatgttcccagctaagagactatatcactcttggagcggagggccttcttattgaggctctacaggaaaacctttgagaaggatagcaaagctgaagaagtctggatgaaatttaggaaggaagacagttcaaagagaattaggaaatctcacaaaagacctaaagacccccaaaacaaagaacgggcttctaccaaagaaagaaccctcaaaaagaaaaaacggaagttgaccttaactcaaatggtaggaaaacctgaagaactggaagaggaaggagatgtcgaggaaggatatcgtcgagaaataagcagtagcccagaaagctgcccggaagaaattaagcatgaagaatttgatgtaaatttgtcatcggatgctgctttcggaatcctgaaagaacccctcactatcatccatccgcttctaggttgcagcgacccctatgctctgacaagggtactactgaggtgtaag

SEQ ID NO: 168599 - DNA, 630 bp, Homo Sapiens
  misc_feature (525)..(525): n is a, c, g, or t
  misc_feature (555)..(555): n is a, c, g, or t
  misc_feature (594)..(594): n is a, c, g, or t
gctcgctctagaggatccaccgtaggtatatgacgcgctgaggggatgagtcccagcaccgctgcccagcactggatggcagcaggacagccagggctagcttaggcttggcctgggacagccatggggtggcatggaaccttgcagctgccctctgccgaggagcaggcctgctcccctggaacccccagatgttggccaaattgctgctttcttctcagtgttggggccttccatgggcccctgtcctttggctctccatttgtccctttgcaagaggaaggatggaagggacaccctccccatttcatgccttgcattttgcccgtcctcctccccacaatgccccagcctgggacctaaggcctctttttcctcccatactcccactccagggcctagtctggggcctgaatctctgtcctgtatcagggccccagttctctttgggctgtccctggctgccatcactgcccattccagtcagccagggatggatgggggtatgagattttgggggttggncagctggtgccagacttttggtgctaaggnctgcaaggggcctgggggcagtgcgtattttattccctntgacctgtgctcaggggtgggtttttagcaatgcgg

SEQ ID NO: 168600 - DNA, 1022 bp, Homo Sapiens
taatgaggatccggtgtaaccggatcaggttctgtcttggggtgcctgtgagtcactgggtgaggaattagatcaggcctgggctcctcagctggtacatccagtgtgtccagcaaaggagggtgccccgtgcctgtcagcaccactcccttctcttcgcagactcggggatcttccgccgcatcctccacgtgctctacacagactgcatccggcagtgcagcgggccgctctacgtggaccgcatggtgctgctggtcatgggcaacgtcatcaactggtcgctggctgcctatgggcttatcatgcgccccaatgatttcgcttcctacttgttggccattggcatctgcaacctgctcctttacttcgccttctacatcatcatgaagaaaacccctgcagagtcgagggagcacaaccgggactgcatcctcctcgacttctttgacgaccacgacatctggcacttcctctcctccatcgccatgttcgggtccttcctggtgttgctgacactggatgacgacctggatactgtgcagcgggacaagatctatgtcttctagcaggagctgggcccttcgcttcacctcaaggggccctgagctcctttgtgtcatagaccggtcactctgtcgtgctgtggggatgagtcccagcaccgctgcccagcactggatggcagcaggacagccaggtctagcttaggcttggcctgggacagccatggggtggcatggaaccttgcagctgccctctgccgaggagcaggcctgctcccctggaacccccagatgttggccaaattgctgctttcttcttcagtgttggggccttccatgggcccctgtcctttggctctccatttgtccctttgcaagaagaaaggatggaagggacaccctccccatttcatgccttgcattttgcccgtcctcctccccacaatgccccagcctggggacctaagggccctcttttttcctcccataactccccactcaaggggcctaagttcc

SEQ ID NO: 168601 - DNA, 505 bp, Homo Sapiens
cttacacctcagtagtaccaggaaattaatgacatggaatacatctctctaataagttactgcttatagctaggatacgtttgtttccaaaactgttaccagaccagcgtttcccaatttatcttcttccaacttctcaccttattaaccatctcaagtttggccttcctcacctatgaaactcacagaaactataataaattcaggctaattcaactgctaaattcaactgttcagccacatgggatcaccagtcccctagattcaatgaatcctaatgttacgtccttggggattaaatgcatttttgtgtacaaggggagaaaagttcggaagctttacaggtaatgtgaattgagacaatagcttttaaaaagaacatttgtttgattatgaaaaataagtacttcatattcttgccttgctggcctaattctcagttgttttatgttgaaaatcatgcattttcagttttcagtactactgaggtgtaagcgggtaccga

SEQ ID NO: 168602 - DNA, 680 bp, Homo Sapiens
cgctctagaggatccccgcttacacctcagtagtactacaccaacagcacttgtacatacaagtccatcaacggcaggttcagctttgttacagccttcaaatattacacagacttcaagttcccacagtgcactgagtcatcaagtaactgctgccaattctgcaacaactcaggttctgattgggaacaacattcgattaactgtaccttcatcagttgccactgtaaactctattgccccaataaatgcacgacatatacctaggactttaagtgctgttccatcatctgccttaaagctggccgctgcagcaaactgtcaagtttccaaggtcccatcttcatcctctgtagattcagttccaagggaaaatcatgaatcagaaaagccagcactgaacaacatagcagacaacacagtagcgatggaggtgacgtagcttcctccgagtggaactgcagcctggggacttgattaggtgctatgcatcagtagcattttgaatgcaagggatgatggaaagcagcacatgcgtttctgtggcagctgtggggacttgacagcaatgctcatctctcatgcttcaatttttcttttcttcctgttaataggaaaaaaatcaacatctgtaaattaagaatacagcaattatctgtacagtactactgaggtgtaag

SEQ ID NO: 168603 - DNA, 856 bp, Homo Sapiens
cttacacctcagtagtacacactgcacctccacatccgttctcctctttctgtaagaagatatgattggaagtcaggtgggcgccttgtgagtggtgtcctgaaggaatgagccatgccccttcctccttggggatgcagccagtcagaagtgtgggcctgtaatggggcagccgcctcctgtgctgggcaggggcacttgcacggctattgttttgggtctcttgcacagcaactagacctgtatccctacctcacaggataccccaacttcaggcccaaatgccacccccaaacagtaccatgaatacacaaccaacagtggggctgaggctgctggaggtgcaacagatgccatgcccttggtagagctgtgccctaggtgggaggagctggacactcaaaatgtggcctgcacagtcttttgccagcaaggtccctccagcatagtgaagggcagagaaaggtagacacgtacttttcatcctattaagatgcaagtgctatttaaaacgaaagcaaagagactaggaccatctatgaattaaattctagtataacaaactttgaataactacatttttagtcaaaaggcttttagaattcgtttacaacatatacacagtccaatgtactctgtcttatttaaaaggggtatttgtcagtttttctttttatgctggaatcctaatctactaaatgatgagaactcatggaccactggtagcctttctcgtatgaagcagtttggatgtgagggtatcttctgtaatggaatacagcctgctgttttaatctgatactccaacaagatacgagcgcttgtactactgaggtgtaagcggggagcctctaga

SEQ ID NO: 168604 - DNA, 425 bp, Homo Sapiens
gctctagagtaccccgcttacacctgagagactcttcagtctccctgtggattaaggagatgtgcagtatttaaagtggcttcaggaaggcatggaagaggactgagtggggaaagctttttgtgcatgctgctggctacctccagcggctgcccccagcctccatcagctgcactctggggaagaggaggctgccttctacctcccagcatctctggatttcatgttcctgtcagcacagaggagctaaatggcctgtagaggctgaaggtctgaggctcctaaagctggaagaaaaggctgggccagtcaggccaagcaagaacacagtgtaacttgtctctgagtgcttcatggttaagggggctaagcaggcacaagggcatgaggatggttatatgtactactgaggtgtaagcgggtac

SEQ ID NO: 168605 - DNA, 777 bp, Homo Sapiens
  misc_feature (87)..(213): n is a, c, g, or t
  misc_feature (220)..(250): n is a, c, g, or t
  misc_feature (657)..(657): n is a, c, g, or t
ggtaatgtgtaaagaattgatgcgagccaggaacatgtctgtagtcccagctacttgggcacacgcctgtagtccaggccactcgannnnnnnnnnnnnnnnnnnnnnnnnnnnnnnnnnnnnnnnnnnnnnnnnnnnnnnnnnnnnnnnnnnnnnnnnnnnnnnnnnnnnnnnnnnnnnnnnnnnnnnnnnnnnnnnnnnnnnnnnnnnnnnccatcgnnnnnnnnnnnnnnnnnnnnnnnnnnnnnnntggggaggacagcctcactggtatcagacttacaggaccagatagacaagatgggtataaggggagctgaagtctgtgttcatatgaggaagagaagaccaagccctgggactttggctgaattcctccgtggggctggacggcagtgatctcctgttccctatgtgtaaacaaagattccagggcgtggttttgcactcctgttgtactcttttagaggtggaaaagaggtggatactgagatctaagaggaaaggatagtcattcacgttctgagatatgcgctctctctattgttctcgtacacaaagggatagtctcttttctggagctgatgtccctgcttggaggttagccccaaaacatggctcttgtattgttctaagagaaaaggctttcattttggntcttctgattggtgttacctactgccctaatatgtgttcatttttttgacagagaggcagactattgaaaaagtctgtgtgaaccaaagaacagtttctttaagccccattgcttttcca

SEQ ID NO: 168606 - DNA, 416 bp, Homo Sapiens
tctagaggataaaccctaggcatagtgacgcgcaaaagaaatagcaaagtaccgtagaaacaaaatagtaagagcacagctagatggataaagatacagatgtgaaaatatagatgccctttgcatgaaaattcagctttcctcagcactagagacccagatactcctaaattagcattataataaaatcgtcactagctaaccatctgcctttcctccaatccacggacgtggtcctcaaaataacattttatcttgtgagaaaccttcattaattacacctaacaacaccatgacgcaggttcatgaggatactactgaaggcaaaaggaaatccctatttctctgaccctttccctaatttccacttagcacaaataagactactggacagtctgattttaaaaaatcactgt

SEQ ID NO: 168607 - DNA, 628 bp, Homo Sapiens
ttctagaggctccccgcttacacctcagtagtacacatttcatctgagaaatctcactcacatacaaacatttacctataaatcaatgacttttcaatcttgtacttcagatctctgctgggctttatattgttctctctactagaatgttcttccccattttctatgcttaagagaagggatcccagaccaaacatcaccattataaggacattcacgtttgattatatgcattttatagcaattactataattatttatttataatacaatattatttttctttgtattttcattttcaacttgtgaaatactgtaaacatgcaaatgaaataagacaatatgattaatacccttatacccatgactcagcttaatttgatcatctgtttacactaaatggtgaaacaaggtgtattaatttgttatgcttcaagtatatgaaacacattatataccatgtttgtgaaataacttacttgaggattaaaaagtatactaaccataaaaagctacaattgcatatggaacttgaaaaccaacagctttagaaaagtaagagaatttaagctgtcgcatatgtaaaaatatgtttctcctactcttccatgtactactcaggtgtaag

SEQ ID NO: 168608 - DNA, 484 bp, Homo Sapiens
cctaggtatatgtcgtgccatcctgcttcgtcccacctgggataggaatcatcccttggtccagtgtatccacgcccctatgctacccacccactagtgtcttggttatcagatctaaaaatcatagtatatgtagggttcagtactatccatggtttcacgcatccactgggaggctgggaatgtaaccccacagattaagcaggaaactatattgccaaatccaaaggatactttttggttctcctcttcttgacttctcggtgatatcaaccaactgactgcttcatgagcgagactcttccagccgtctctgacccatgctgccctactgctgcttcttagcctgcctattatgcaatcttttctattcagcctctcactgttgattttttcccagaccttgaccctggccgtcttctcactctgtgttctctgactggactctgccttccccatctgcagcacgacatatacctagggt

SEQ ID NO: 168609 - DNA, 420 bp, Homo Sapiens
cctaggtatatgtcgtgcacacgatatgagtttttggggtggatttgtttattcctctcttctcctccccccatttttaaggacagcggcctatataagtgcacagttaattttcatcggctgcccatatcgcttgagttttctacttcttgtgttcggaacacttatctatagttaagttttgaggcttaaaagtcagtcatttatttagcacctactgtatgcccaacaggttgtaactaactggtgaacataggtaaaatggaggcattttctcacccacaaactgcttgcaatgaagatgtatttataggggaggggaaacaatggctgaaggtaacataggagattgttttggctgttaaggaaagagatatgacacacacacacgcacgacatatacctagggggtaccgagct

SEQ ID NO: 168610 - DNA, 822 bp, Homo Sapiens
cctaggtatatgtcgtgcactggggagacccgaggtaggaacagcagcgccatcctttcgaggctccacctgaggtgagcaatcagaggacacccctcgagtcactgggagttcgagaacaaaggacattgctgggggatcccgagtgagccaaagaaggaaacagtttgcccaatgaagtaggaggtggatgggaggagggacgggacagacacagcaggacctgcacacttctgccaagagagtggacgctgtcctcagagccccctggttccacactgcctggctgcccctgcttcaggcaccctgcacctttcttcccaagcccaatcctacctctgactctgcccaagcaatccgccagcctgtggtgacctcccccaaccccctcaagctaggagtggtccagagcagtgcttaagagccggagccacagaaccggtgcaccctgactgtcccaggcagggtctgcctgcagctggatggaacagggtctcaagtaagaccacctgtgaagcaccgcatccttcccaacaggacctccacttacttcggactcgaaccccctgcctttccacgctcaactctgctcagcttggtcctcctgggggcacgcctaggtcagccctcaaattccactgaagctctgctcccctcttcctgtcctcctcccaggccagcccgcaccgcaggccccgccgtgcccaggtggcccttctttacatcccgtggggcccagcacagggaccaggcatacctgctcccgtccccagtgaccaggccgcaggtgggcagcacaggagagcacgacatatacctagg

SEQ ID NO: 168611 - DNA, 518 bp, Homo Sapiens
gctcggtcccccctaggtatatgtcgtgccaagcaaagtacaaagtgctgtgggcttatttgatgataagactgttctgttctcagtaaaccaagtacaggttggacaaaactgctaatggaaatgccagtgcattttaatccttactcaacatgttgaactcttgcaacactgacgtgtcctgaaagagagagcaactcttttgctgacttctaagttcatattggaacaaatattgtgttatctgatgctaaaaatgggattgcaaatattatagaatgtttagtgtcccatctgggaaagaaagagagtgaatacacatgcttggcattataatcaagttaccatatcctgtctcttgaaacacacaaaaagttatgcaaaataattatctgggtgaatttatgatctgagaaatttcttataagtctgtatatttgtatttctttaaaaatagacatactaagatttaataattgttagcacgacatatacctaggggggatactctagagcgg

SEQ ID NO: 168612 - DNA, 509 bp, Homo Sapiens
ccctactctagagcatcccccctaggtatatgtcgtgccaaggaaagaacatagcagcaaatggccactcctcaccttggtatttctgggaattttatgaggctactgtagaaaaatggtttgatgaaatgaagcctgtgatcacctagtaaattgtagagaaatggcttccacatgtgaggttgtcctttcccgaatacatgaccttaaggtgaaatggataaaacttctggcttggaaaggtagttagtataattaggaccatatttatttttcaaatacagagttgaggacccctgtcgttttctgcaatgcaagtctaagtgggctcggagggactgtgaactctggtcctggaactgatttcataacctggggcacgttcatggaaatatacggttggaagggagcttggacaggtctctacagatcccactgctgattggccttcatagaagaaatcacttacgtgcctctgtagttgaccccattttaataagacagcgcag

SEQ ID NO: 168613 - DNA, 300 bp, Homo Sapiens
cttacacctcagtagtacatagaacttaacttcttttgtcaatttaggctcatgattactatttggtgctctgtcatcaggggaagaacagaagtatgtaaacccagatcactgtgcttttatagtatactttcttctgctgctgctaacagcaaacacttcttgctgtatcaggttgtcctagctgtcttacttggatgagacagcttcagctatggccatgaggccatgactctgtcttttctattcaaccaagcacatggggtttgtgatagtcattgctgcctagaggccatttat

SEQ ID NO: 168614 - DNA, 442 bp, Homo Sapiens
  misc_feature (339)..(356): n is a, c, g, or t
cttacacctcagtagtacatgaacagcgggaggcacctaatttcttcttaacctacatttcctgttgggaagcaaaaactattttacttaactctagttttataagaatgaagtcaatgagtgtatgacataatatatatgaagatagtccagtgtcagtggaatggatttgcaagatcttcaaccatgatgtcttagttgtcagtggctaagaataaagcaaagataatatatttgtcaggtattcaaactccattcctgttctcattagcctcagatcctctaagctgatgagctaatctggttctgtgattgctttatctttcaatagtagattgnnnnnnnnnnnnnnnnnnaggtggcggtgtctaggaattttgggttgaatgctgaacgttgcatatattaagtagaacagtactactgaggtgtaagcgggtac

SEQ ID NO: 168615 - DNA, 1072 bp, Homo Sapiens
acatcacagactcacatcctggcactgttgtgtctgatcatgcccgccaccgtagcaacctggcaacaggacaaggctgtgaatgaaaaccttcaggatacagtagagaagatttgtataaaagaaataggaacaaagcaaagcttctctctgactatgtctattgagatgccgtatgtgagtgaattcattttcagtgatacacatgaactgaaacaaaagcgcacagactgcaaagctgtcattagcaccatggaaggcagctccttagacagcagtggattttctctccacatcggtttgtctgctgcctatctcccaagaatgtgggttgaaaaacatccagaaaaagaaagcgaggcttgcatgcttgtctttcaacccgatctcgatgtcgacctccctgacctagccagtgagagcgaagtgattatttgtcttgactgctccagttccatggagggtgtgacattcttgcaagccaagcaaatcgccttgcatgcgctgtccttggtgggtgagaagcagaaagtaaatattatccagttcggcacaggttacaaggagctattttcgtatcctaagcatatcacaagcaatacccacggcagcagagttcatcatgtctgccacacctaccatgggggaacacagacttctgggaaaacactccgatatcttagcttattgtaccctgctcgagggtcacggaacatcctcctggtgtctgatgggcacctccaggatgagagcctgacattacagctcgtgaagaggagccgccgcacaccaggttattcgcctgcggtatcggttctacagcaaatcgtcacgtcttaaggatttgtcccagtgtggtgccggagtattcgaatattttaatgcaaaatccaagcatagttgggagaaaacagatacgaagaccaaatgaccaggctatgttctccgagttgccactctgtctccgttcaaatggcagaactcaatccaagatgccccggaggacctgcaggccccagccaggtggcatccttggtatggaaggacgaatcttggtaaggatacttcttaa

SEQ ID NO: 168616 - DNA, 922 bp, Homo Sapiens
tacagggaagcttacttgaaagagtgttgcccattggtgcagaaagccttaaatgaacatcatgttaatgcaaccctggacctgatcgaaggcagcatgactgtttgtactacaaagaagacttttgatccatatatcatcatgagggccagagatctgataaaactgttagcaaggagtgtttcatttgaacaggcagtacgaattcttcaggatgatgttgcatgtgacatcattaaaataggttctttagtaaggaataaagagagatttgtaaaacgaagacaacggcttattggtcccaaaggatatacattgaaggcattggaactcttaactaattgttacattatggttcagggaaacacagtttcagccaattggaccttttagtggcttaagagaggttagaaaagtagtccttgatactatgaagaatattcatccaatttataacattaaaagcttaatgattaagagagagttggcaaaagattctgaattacgatcacaaagttgggagagatttttgccacagttcaaacacaaaaatgtgaataaacgcaaggaaccaaagaaaaaaactgttaagaaagaatatacgccattcccaccaccacaaccagaaagtcagatcgataaagaattggctagtggtgaatactttttgaaggcaaatcagaagaagcggcagaaaatggaagcaataaaggctaaacaagcagaagccatcagtaagagacaagaggaaagaaacaaagcatttattccacctaaggaaaaacaattgtgaaacctaaggaagcttctactgaaactaaaattgatgtggccagcatcaagggaaaggttaagaaagcaaagaataagaaactgcgagctcttacagctgaaagaattgcacttaagatggaggcagatt

SEQ ID NO: 168617 - DNA, 387 bp, Homo Sapiens
tataacataactcggttccaaatcactgcctctcctggtcatgcctaaacttctataagaaactgagttatgcccagaaaataccagagcagtaacccacttaagaaacatcttctcactttttcctgcttcatccttcagcaatcaaaacttacctgttctgttttctgcacctatgggtcaatgttccttaagccaactcatacatacccaaataagattaaagtattcataattaatcagtgacttccagtcctgcattacatgtagaatgcacatggatttggaagccagagagacctgggtattatatttgatggtgataaactttatgagaaaactttctttaccctttaatttaaaaatgaggaaccaagttatgttata

SEQ ID NO: 168618 - DNA, 565 bp, Homo Sapiens
tgtctcctacagatagatcctctttacattctagtatgtcatatcgtgacagttcggttgaataacagcagacaagcctaggccaggtggcagagtatctgtgtctgcattttgatgacacctgtcatcagagaatctaggcacacaggctggggcagcatccatggacgaggcagaggaagtgggtagcctagaaactccaccagctgaggagttgtttcgtggtctcaacagcttgtagagtgttgatgtaattttgcaggtagacccaaacctttaagcaacttgcattttaccaagagttgctcatcatttcaacctctcactcgctattctcaccatcagatgcagaatcctgttgcaataaaatcataaatgaaataaaagcacagtcaaaactgtgccatccctctgattaaccaatgttgttagctcagggtctagagtattaggtaatatttttgttactttatggagcctaagcttgctgctacatgggaaggagctctacttgctttacttcctgacaaaacacaagatgcactttatgactatacttatttgg

SEQ ID NO: 168619 - DNA, 559 bp, Homo Sapiens
attcagcacagaaacacattgcaaccagtgtaatagaaacagatgaggaggagagccaatgctgaacagagagtaacagcgagccacgtacaatactaagccctatatgtaactaccaatagaagaactcctaataatccatataagggtagagaacctacagatgtcataataacatcatataaacagtgcagctctcatatacctaatactctagaccctgagctaacaacattggttaatcagagggatggcacagtatagactgtgcttttatttcatttatgattttatagcacacaggcattctgcatctgcatggtgagaatacgcgcagtgagaggtcccaaatgatgagcaactcttggtaaacatgcaagttgcttaaaggtttgggtctacctgcaaaattacatcaacactctacaagctgttgagaccacgaaacaactcctcagctggtggagtatctaggctacccacttcctctgcctcgtccatggatgctgccccagcctgtgtgcctagattctctgattacaggttcatcaaaatgcag

SEQ ID NO: 168620 - DNA, 465 bp, Homo Sapiens
tataacataacttggttccctgtgcccaagtagtaggtatgctcaacctagatctgaggccatgacagcaggaatatggctcagtcacagttgtgggtaaatgtagcttccctatgtcctctccccaagccccacttaggactcatcaaatttatgcagcagactcgagagttaaggagaacctggctctctcctcccaactgcctcagtgtgccctcaagagacaagcttttaaagttgaagccaaatgggaggggagcttagagtaccagcacacacacccaccctcccattcattgtgtactagttaccatctaatgctaaggttagctctagagagatacattgcaagactaagttgcaggagcttgtgtaagccaaggctacgttgaaaaattagtctaagatggcactgtgattagccgtttccagatatatggctgaatggggcagttcatccgactc

SEQ ID NO: 168621 - DNA, 428 bp, Homo Sapiens
atggtcttcttactaactagcatgctatatcagtgtgatgtgagaacgggcaagtattaattacgttaggataacatgctaatgtgggcattgtaacactcctgctatttaaagcaaggaagaccctgagtttgagtcttattcagaactgaagcctttttctagaatttttgttctctccaaattccatatctatgctaagctgacttgccttttgcctccctatggttgcatacttttctcctttcattatatttttcctttcagtctcggacccttgagatctagtcttctacatccatgacattctcaaaccacagaaaggaattttcccactataataataggtgtgcattacactttctttcttcgcagcaataagtgccattacttcattcaagtgttgagtacctgtgatgtgctgggca

SEQ ID NO: 168622 - DNA, 513 bp, Homo Sapiens
acccctgttccttaagtgttaatgttaaaaacaagcaggatgatgagttaaagtgggaaccttggtctccccagtatataactccagaaccagtctctaaacgcctgctgaaacagtgtctggtgatccagcacctggtgatctggatgacggagatccagcctccggagatactggcctctggtgattccaactcgggtgatcccacctctagcgagccctcctctagtgatgctgcctctggtgatgcaacctctggtgatgccccttctggtgatgtgtcccctggtgatgccacctctggtgatgccactgctgatgatctctcctctggtgatcccacctctagtgatcccatcccaggtgaaccggtccctgttgaacccatttctggtgattgtgccgctgatgatatagcctctgagtgcaatgacttctgttgatctggtcttctggagctaccagcttccgctgatcctgcctctgtatgatctggcctctggtgctctggtc

SEQ ID NO: 168623 - DNA, 405 bp, Homo Sapiens
gccgactctagagggtcccaggcaaatcagcagaaatgggttcaacagggaccggttcacctgggatgggatcactagaggtgggatcacatcagccttactaaacataggagagccagagccagacatcctgtttctccagatgggaggcaatacacagtttacagtaacacctaaagagccaaaaaacttgaacctaaatctagtcaaggcatttaaagctaacttccatttaacaaaataatgaaaacaacgaacagattaaataagaggtttcctgactctcggccagtgaataaatctttccactataccactactaacctctctgaccctcaggacaaatagaagctgcaaccttaagactgattttcctttttctgagacggagtcttgctctgtctc

SEQ ID NO: 168624 - DNA, 217 bp, Homo Sapiens
tataacatgaacttggttccggacacaggaagtgaactgatggtgaaacataagatatctgccacacccaacagcccaaagaagaaatacatggtgaaatgatgccagcccatggagttgattccagtgatccttcgtttatagtcatataacatctagatggggccctccaggaataaactgctccccagtcatgccagttaaagccatgccaacc

SEQ ID NO: 168625 - DNA, 856 bp, Homo Sapiens
ggtttaacctgaatatgtgttcccgggcctgcgatctaactccggaaaatctttagaccatgtgcccgagttgatcgggctaccagattgctccggtagatatggtatagaagacataagatatcatatcaatacatgtaagatgtacattggatatcagtcgagaaaggtgggacaattcagcagtgggggtagtcaggcgcctctagatcctcaaaggctggttgagaacaacatcactgggtgtccacaccctcacatcccttcagaccacttctcactgttaacacaacttgaactccaccctccactcctgcctcttgtcaatggtgttcacttgcctaatcggaggtagtggagtactgccccgccaagacggggatctgttgctatggacctgtacagttgtaaatcaaagtatgtaggagtgaagtatggccatccttaagctgcttcttcaggtttctttcattatgtgtttgctgtaagactttgtacattttggtgcatatgggtatcatttggcagtagggctggaaccaaagtattactccctttacaaaattttaacttaacatgtatttaaatgggaccttctttatatggtattaacagccagcattcaaaatggataaattaccaatttgaggcccaataacagtgtatttgtttttccaaaacaaatactttctttggaatggtttcagtgagccaaccattttataaaaggcaatttttaaaaactataaatacagtatttttaaactgaatgatgatatgccttccagggaaaaccttgaatttttcctttataactgacttttggatccaaagtatttgcacatcaccgagtatt

SEQ ID NO: 168626 - DNA, 668 bp, Homo Sapiens
gtctgtagaggatcccctgggcgactcgccaaccactacgtgtgtgaggtggacgggcagaatgttatcgggctgaaggacaaaaagatcatggagattctggccacggctgggaacgttgtcaccctgaccatcatccccagtgtgatctacgagcacatggtcaaaaagttgcctccagtcctgctccaccacaccatggaccactccatcccagatgcctgaagccactgcagggcagggcaggcagggggggcttcccgccctcctgcagcaaagggcaaccaccctcggatgatgggttgcagccggcctgctgcttaaggtgggggctgccatgaggggggcgtgtccaggagggtgaccatgggatggcttatacacacaggcctccttggagcctcagactccaagctaggctgaggctcaggcagggcccacaggcagccgattctcttgtgctgatttaaatgctggacacggaggcaggctgtttaaacgctgcttaaagtcgcaactgggcccctttcaagaaattttgctctaccaggaaaacagttacacattttaagagaacagagctacgttctttgtgagagctttttccttggcttgacttgctctttgtcacagactgcataagttgtcagccttgactatcttttgaa

SEQ ID NO: 168627 - DNA, 413 bp, Homo Sapiens
  misc_feature (304)..(304): n is a, c, g, or t
  misc_feature (319)..(319): n is a, c, g, or t
  misc_feature (328)..(328): n is a, c, g, or t
  misc_feature (349)..(349): n is a, c, g, or t
  misc_feature (379)..(379): n is a, c, g, or t
  misc_feature (388)..(388): n is a, c, g, or t
acgtcggcttcgtgatcaagaaggggaagattgtctctctggtcaaagggagttctgcggcctgcaacgggctcctcaccaaccactacgtgtgtgaggtggacgggcagaatgttatcgggctgaaggacaaaaagatcatggagattctggccacggctgggaacgttgtcaccctgaccatcatccccagtgtgatctacgagcacatggtcaaaaagttgcctccagtcctgctccaccacaccatggaccactccatcccagatgcctgaagccactgcagggcaggagcaggcagggngggcttcccgccctncctatcagncaaagggcaaccacccttggnattgatgggttggcagccgggcctgctgantttaaggtngggggtttgtccttgagggggggtg

SEQ ID NO: 168628 - DNA, 677 bp, Homo Sapiens
catctcgtgggcagttggacctatctccataccccgagagcatttgcctgcctgtcctggacggactcctacactgggcagtttgcccttcagctgaagcccaggaccccttttccaccctgggccccaatgccgtcctttccccgcagagactggtcttggaaaccctcagcaaactcagcatccaggacaacaatgtggacctgattctggccacaccccccttcagccgcctggagaagttgtatagcactatggtgcgcttcctcagtgaccgaaagaacccggtgtgccgggagatggctgtggtactgctggccaacctggctcagggggacagcctggcagctcgtgccattgcagtgcagaagggcagtatcggcaacctcctgggcttcctagaggacagccttgccgccacacagttccagcagagccaggccagcctcctccacatgcagaacccaccctttgagccaactagtgtggacatgatgcggcgggctgcccgcgcgctgcttgccttggccaaggtggacgagaaccactcagagtttactctgtacgaatcacggctgttggacatctcggtatcaccgttgatgaactcattggtttcacaagtcatttgtgatgtactgtttttgattggcgagtcgccacggaatcctctaggg

SEQ ID NO: 168629 - DNA, 326 bp, Homo Sapiens
ggcaaaaggggagaaggcggcgccgtccgcccgtcctcctcgcctctggccagccccgtccatcctgccgcctccccaccccgccaagacgctgtggggacccgagtttcatgggtgcagcaaaccggggcttctagcttttccccgggcaggacggggtagcactggctcctgtccttcctgggccccggcccggccgtgcagagctcactgggagggctggaacgagccggccacagagggacagcagggaggggccagaggataccgtggcgggggcgggcggaggacgtgcacgcacactgggtggaggcgcagggctcaca

SEQ ID NO: 168630 - DNA, 911 bp, Homo Sapiens
  misc_feature (850)..(850): n is a, c, g, or t
ttttcaccttctctccaagaccgtctactttgactttcaagtgggcgatgagcctcccattctcccagacatggggaacagggtcacagctctcacccagatggagtccgcctgcgtgaccatccatgaggctctgaaaacggtgattgactcccagacgcattaccggctgcgggaggcccaggaccgggcccgagcggaagaccttaatagccgagtctcttactggtctgttggcgagacgattgccctgttcgtggtcagcttcagtcaggtgctactgttgaaaagcttcttcacagaaaaacgacccatcagcagggcagtccactcctagccccggcatcctgctctagggcccctcatgccccaggctggagcagctctcctaggtcacagcctgctgggctgggtcgcgtagcccagggtggaggcagaacgatgctgctgtggtagccctttgcctttcatgcccatgcttgattcttgcacctcagcagctgaaggtctcagagaccagtaatcagaaggcatccgactgcattaagtgtgcagcgctgaaaagacatttacaactaggccagggattagccactgtgggagggtggacaggcaatggttcagtggcctggctgttggcaggaactccaagtgccccaggcctcttgggcagcttaaggccctgcctctgtttcatgatgcatgggtcatttgtcttggggggcctatccccatatggagaaaaaaaggggctccaaagttctgggctcttctttccttggggggtcctcctgggaccctgaagaaaaccaaggccccggggggggacttttgccaaaacctgccttanccccttcggggggaaccaaaacaggggctcaaccccattgccaaggccggggaacaaaaat

SEQ ID NO: 168631 - DNA, 920 bp, Homo Sapiens
gggtggcgattccgcgacgaggctccgctggtgccacgtttatccccttacatcctcctaggacccggtcggtagtcgtcgccccagcccgccgggggcgcagcgcccgagccgcggccctcgagacgggaccgagagcatcatgggcagcactgtcccgcgctccgcctccgtgctgcttctgctgctgctcctgcgccgggccgagcagccctgcggggccgagctcaccttcgagctgccggacaacgccaagcagtgcttccacgaggaggtggagcagggcgtgaagttctccctggattaccaggtcatcactggaggccactacgatgttgactgctatgtagaggaccccccaggggaacaccatctacagagaaacgaagaagcagtacgaccagcttcaccgtaccgggctgaagtccaagggcgtttattcagttttgcttcagtaatggaagttttcccaccttctctcacaagaaccgtctacctttgactttttcaagtgggccgatgagcctccccattctccccagacatggggaacagggtcccagctctcaccccacatggagtccgcctgcgtgaccatccatgaggctctgaaaacggtgattgactcccagacgcattaccggctgcgggagggccaggaccgggcccgagcggaagaccttaatacccgagtctcttactggtctgttggcgagaccattgccccgcttcgtggccaccttcattcaggcgcctactgcggaaaagcttccttccccaaaaaaccacccccttaagcagggcagttccactcccaccccccggaattcttggtctagggccccctcatgtgccccgcgccggcaccaagttcttcctagggctacaaccctgctgggccctgggtccccctaacccca

SEQ ID NO: 168632 - DNA, 867 bp, Homo Sapiens
cccgagccgcggccctcgagacgggaccgagagcatcatgggcagcactgtcccgcgctccgcctccgtgctgcttctgctgctgctcctgcgccgggccgagcagccctgcggggccgagctcaccttcgagctgccggacaacgccaagcagtgcttccacgaggaggtggagcagggcgtgaagttctccctggattaccaggtcatcactggaggccactacgatgttgactgctatgtagaggacccccaggggaacaccatctacagagaaacgaagaagcagtacgacagcttcacgtaccgggctgaagtcaagggcgtttatcagttttgcttcagtaatgagttttccaccttctctcacaagaccgtctactttgactttcaagtgggcgatgagcctcccattctcccagacatggggaacagggtcacagctctcacccagatggagtccgcctgcgtgaccatccatgaggctctgaaaacggtgattgactcccagacgcattaccggctgcgggaggcccaggaccgggcccgagcggaagaccttaatagccgagtctcttactggtctgttggcgagacgattgccctgttcgtggtcagcttcagtcaggtgctactgttgaaaagcttcttcacagaaaaacgaccccatcagcagggcagtccactcctagccccggcatcctgctctagggcccctcatgccccaggcctggagcagctctccctaggtcacagccctgctgggcctgggtcgcgtagccccagggttggaggccagaacgatgctgcctgtggtagcccctttgccttttcatgccccatgccttgattcttggcacctcagcc

SEQ ID NO: 168633 - DNA, 909 bp, Homo Sapiens
  misc_feature (731)..(731): n is a, c, g, or t
gacgattgccctgttcgtggtcagcttcagtcaggtgctactgttgaaaagcttcttcacagaaaaacgacccatcagcagggcagtccactcctagccccggcatcctgctctagggcccctcatgccccaggctggagcagctctcctaggtcacagcctgctgggctgggtcgcgtagcccagggtggaggcagaacgatgctgctgtggtagccctttgcctttcatgcccatgcttgattcttgcacctcagcagctgaaggtctcagagaccagtaatcagaaggcatccgactgcattaagtgtgcagcgctgaaaagacatttacaactaggccagggattagccactgtgggagggtggacaggcaatggttcagtggcctggctgttggcaggaactccaagtgcccaggcctcttgggcagcttagggccctgcctctgtttcatgatgcatgggtcatttgtcttgggtgtcctatcccatatggagaagaaaggggctctaagttctggctcttctttctttggggttctctgtacctgaggaaaccaggccctgggtgactttgcagatctgctcaccctcggtgagcaacagtgtcagccatgcaagcaggacagaatggtgactgggtgcccttggtgagctgtgtatttcctaggaggtagaaaactgtgggaaactgtggctaataaaaactaagtgtgagcgttcctttccnttaacatcatctacccaacctctaccctcgaaggcatcctatgtccgggcgcgggaacaaagagggaaatggaaatgggcacaatgggcaataggcttgggtttccttgaacccaatccttttcctttggaaacaaagagtgggcacaatattcttggcccggggctcctccccctaa

SEQ ID NO: 168634 - DNA, 722 bp, Homo Sapiens
tctagaggatttgggcgactcgcatgtatgcgctgataggctgaagccaagctgtgaaacttcagaacacagttaagggcagcaatcaagcccgtgccaggctgacgcgcagggcgttcttacatcacatcccggggtgccagctcaaccccggcacgtcagcacctgggtgaagggagtgccgggcactgatgggatcaatacaagacacagaccccttccgtcgggagctggctagtctctacagtgccccacaccactgatttctatcaggctccagggcctcccatggaggagaagggctgtggcccctctgattcttggggacgtggtattcaggcaaaggcgcagttatttttcacaagcctcctctgacaagaactggacatcaatccactgccacccggggcttccaggttccactcgaagacccagagagattttaaactttctgggaagtcttgctgtcccgctgtacacctttttgggtttttctccattttaatgttttcccacggccaaagcagggtgtcggctgcagactgtgctgcaggggccggccaccaggctctccaggtgcgttttgctttttgaccttggcgaggtcggcctccatgccgcttgagtattccgaacgtaggatttcagcgaggctgtgtttactctgggtcttcttatgaaggtcaggccttttcacgtgtgctttcctcttctttctagcc

SEQ ID NO: 168635 - DNA, 1087 bp, Homo Sapiens
tctcacccccacactcatcctgcgacaaccgggatgaggaaagagaccagcacaacaggagatttccgcacgagggacgtggacgccaacgggaagccgctcggccgcgtggtgctggagctgaaggcagatgtcgtcccaaagacagctgagaacttcagagccctgtgcactggtgagaagggctttggctacaaaggctccaccttccacagggtgatcccttccttcatgtgccaggcgggcgacttcaccaaccacaatggcacaggcgggaagtccatctacggaagccgctttcctgacgagaactttacactgaagcacgtggggccaggtgtcctgtccatggctaaatgctggtcctaacaccaacggctcccagttcttcatctgcaccataaagacagactggttggatggcaagcatgttgtgttcggtcacgtcaaagagggcatggacgtcgtgaaagaaaatacaatctttcggctctaagagtgggaggacatccaagaagattgtcatcacagactgtggccagttgagctaatctgtggccagggtgctggcatggtggcagctgcaaatgtccatgcaccccaggtggccgcgttgggctgtcagcccaaggtgcctgaaaagatacgtgtgcccactccactgtcacagtgtcgcctgaagaaagctgctaaggatgttatacctcgggccaggaacccaccacatttgctttccctaataccccaccccttccttccagaccttcatttcagggggatctttgggggacttgatggtcaccccacctcctttggtcaaagcatctgcctggtgatttgccccaccccccagactcattcctgtgcccttggcaaatggcagattggagaaaaggcctcccccctcccaagttgaaaaagtcccttttcccttgggaccaaggggggcacaggccaacccttttcccaaatagggactctccaaaaacccccggggtctaataatcggcctttcccccaagttggcgcaatacacctttcactttaacacacataagttgaaccttacaaaatccgtgacactttg

SEQ ID NO: 168636 - DNA, 1157 bp, Homo Sapiens
cagtagcttaacagcccaccttctgttaccagcaccaggaattcacaattgtctaaggcacaggctcaaattgaggtttgttcccaggtttcaactgctcctaccccccatggcccctcctcgagaaacgacagcagcaaaacccaacaggcttccacagtaaacccaggaggaaagatctcagcgggggaaccgtcactaagccctgagttgtgtttcaaaagccaagctctggggtctgtggcctgtgtcaccaactcaggtcacaccacagcacggggaagttagtgttgcagtttcacttctagtcaatcttgttaattaaattatcccaattaggaagacaatattaaacaggtattagagtccttttgcaaaactgactgtcccccttggtcaaggaaaagactttcacttggatggcaacccatcaccatcaccatgtccaaggcacagatgaatctgggctgggcaatcacaggcaatgcttgacaaggggtgggtgacatcatgtccacaaagatgcccagaaatgaggtcgtgaggaagggtgggtattaggaagcaatgtggtgggtcctggccgaggtctaacatccctagcagccttcctcaggcacactgtgacagtggagtgggcacacgtatcgtttcaggcaccttggctgacagcccaacgcggccacctgggtgcatggacatttgcagctgccaccatgccagcaccctggccacagattagctcaactggccacagtctgtgatgacaatcttcttggatgtcctcccactcttagagccgaaagattctattttcttcacgacgtccatgccctctttgacgtgaccgaacacaacatgcttgccatccaaccagtctgtctttatggtgcagatgaagaactgggagccgttggtgttaggaccagcattagccatggacaggacacctggccccacgtgcttcagtgtaaagttctcgtcaggaaagcggcttccgtagatggacttcccgcctgtgccattgtggttggtgaagtcgcccgcctggcacatgaaggaagggatcaccctgtggaaggtggagcctttgtagccgaagcccttctcaccagtgcacagggctctgaagttctcagctgtctttgggacgaccc

SEQ ID NO: 168637 - DNA, 2106 bp, Homo Sapiens
  misc_feature (1489)..(1511): n is a, c, g, or t
  misc_feature (1667)..(1693): n is a, c, g, or t
  misc_feature (1799)..(1807): n is a, c, g, or t
  misc_feature (1853)..(1872): n is a, c, g, or t
gggaaggggtcactcaagggacagcccggagacatctaccaccagacctgggccagatactttgtgaagttcctggatgcctatgctgagcacaagttacagttctgggcagtgacagctgaaaatgagccttctgctgggctgttgagcggataccccttccagtgcctgggcttcacccctgaacatcagcgagactgcattgcccgtgacctaggtcctaccctcgccaacagtactcaccacaatgtccgcctactcatgctggatgaccaacgcttgctgctgccccactgggcaaaggtggtactgacagacccagaagcagctaaatatgttcatggcattgctgtacattggtacctggactttctggctccagccaaagccaccctaggggagacacaccgcctgttccccaacaccatgctctttgcctcagaggcctgtgtgggctccaagttctgggagcagagtgtgcggctaggctcctgggatcgagggatgcagtacagccacagcatcatcacgaacctcctgtaccatgtggtcggctggaccgactggaaccttgccctgaaccccgaaggaggacccaattgggtgcgtaactttgtcgacagtcccatcattgtagacatcaccaaggacacgttttacaaacagcccatgttctaccaccttggccacttcagcaagttcattcctgagggctcccagagagtggggctggttgccagtcagaagaacgacctggacgcagtggcactgatgcatcccgatggctctgctgttgtggtcgtgctaaaccgctcctctaaggatgtgcctcttaccatcaaggatcctgctgtgggcttcctggagacaatctcacctggctactccattcacacctacctgtggcgtcgccagtgatggagcagatactcaaggaggcactgggctcagcctgggcattaaagggacagagtcagctcacacgctgtctgtgactaaagagggcacagcagggccagtgtgagcttacagcgacgtaagcccaggggcaatggtttgggtgactcactttcccctctaggtggtgccaggggctggaggcccctagaaaaagatcagtaagccccagtgtccccccagcccccatgcttatgtgaacatgcgctgtgtgctgcttgctttggaaactgggcctgggtccaggcctagggtgagctcactgtccgtacaaacacaagatcagggctgagggtaaggaaaagaagagactaggaaagctgggcccaaaactggagactgtttgtctttcctggagatgcagaactgggcccgtggagcagcagtgtcagcatcagggcggaagccttaaagcagcagcgggtgtgcccaggcacccagatgattcctatggcaccagccaggaaaaatggcagctcttaaaggagaaaatgtttgagcccaaaaataaaatacataaagacaacaaagnnnnnnnnnnnnnnnnnnnnnnncttggtcggccgccttcggcccctcaaaaagcttttcataaaccattccgttgtggcggcgcgggccccagtaagggtaagtggacacatggcccactaccctgttttccctaagaaaaacccctgggcccatggaactagatgctttgggtattnnnnnnnnnnnnnnnnnnnnnnnnnnngggggggtacaacccggaagcggtttcttgaaaaacaatttcccagaaatgggggggtttccctcgggggccccattttcccgtggggaattcttattcccaaccnnnnnnnnnctccctaacgccgcaaggctcccaacttttctccaaaaaattttannnnnnnnnnnnnnnnnnnnttgccgcaattctttattctgggcagggaaacctgggtttgggaaaaattctaaattttaaaggcctatcttctctccgccccagcactattggggaaaaaagcccgcatttccacaaaaagaagcggggccctttttctatgaaaaacccctgtgggaattccgcgcccatggcgggggagctaatttctgagccaaccccttttgtgtagctccgccacctttaggggaaac

SEQ ID NO: 168638 - DNA, 588 bp, Homo Sapiens
cgactcaccaaggagggagatggggtatgagagctggccacctgggcttggtcggtggccagaaaggaatatttaacccagagctctgctgcactctgggcccggaccgccaaccagcagacctgaacgtccacatcagacaggatggtttttcaatgggaagaaaacaaagatggcaacaggaaggaaactgagcagggaggtatttgtactttggaggtacaacgggatctacctccagggaggctcgtcgactcggtatcttgttgcctcatattaccttgcacaatagtagcatggttttgatgtgtgggtaccctgtgagccacgatcctggcatttctcagagagttctcccacgcatgcatccctgggctgtcaccccaatcctgtcccaggagacgcttagaagctgcctcatgccaagagccctcctaagatcgtctagaagaatccaattgagctaagctccatggctctgataaccctttctaaagagaggtctggtgagcagaaaccacagatgtcttcactgatacagaagttcaagaggaggttaccacgggagctcggggttggcgatcgcca

SEQ ID NO: 168639 - DNA, 428 bp, Homo Sapiens
gactggggatagcaaggaggtgagtgggaaatgcaaccacaggccagccagcgcccgtgcatggagtcaaagggaggagtcagcatggtgaccactgcccctgcaccgggggaggaaggcatgggggtcctgggtgaacctctccctgtactgcccagagcccagcctgactccccccgaagccgggtagggatgcatcactccgactaacaaatgtctcagccctaaagggcccctggctccaggtcaccctccagctctacagaagggcagggacgaatctgatccttgttagcactgacacaagagggcgggacctgagtcagccccaggggaagccagcatgccctggaaaggctggtcccaccaaagcatgctagtgtgtctcccaggctgcacccaggaaggctgggttggcgagtcgccaa

SEQ ID NO: 168640 - DNA, 579 bp, Homo Sapiens
gtccgagcgtcacccacacttgggcatggagccgagtgtgcttcactgtccacacaggtatgttagcccagagatcaggataccacagctgcccaatcatccacaaagaggtgtggagagggaaacaatcatgacgcggaccgccacgaggttcctccctgatggacggggaagtcttctttgtggaagacaccgagccacactaagaagccgccaggcttctcagagacggggcagacacagcaagagggaggtcagagcagaggccagagcccaggcaggatacgggggggccatgccaccaccaccggcatccggggaggagtgtcaaacgggtgactcggccaggaaggccagcctttgagagacagtacatgcctgccccatccccttgccggcttccttctccgtcactgcgtcgagctgtggctacatttctcgatgagggcagagggcagacaggcagtgacaaccaccttcttgaagctctgcagggcaccctcctgcgggtggacagatgagcgcctgggaggccgttgtccttgttggcgagtcgcccgaaatcctctagagtcacca

SEQ ID NO: 168641 - DNA, 519 bp, Homo Sapiens
cgaggatctagggcgactcgccaaaagaagagcggttagataacttaccatctctaccagatatgaagtaagtcgggaaagcagctctggttcagaggcagagtcctgatgcccctggggcctatggcagctgccctaaaagcctgacattcttgcacagggtggggcgcgcagtaggaacctcccccgcaggagctggcgccctctcgctcctgctcacacagtcaccctccgctcttgctacttcggcaagacatcttaagaatgtgacacattttcaagggcatctctatctttcgctgcagagttgtagttctgggccctcgattcctttcccaccaacccacaggctttaccctttgagaaaaaggcagccctccagatattgtagacatttatcttaatatatttaacattggtgtcttttaaaagacatgttttacacaggtcatccaaagagcagagaactgaaattctcactaattggcttggtgagtcgcccagggaccgagctcggat

SEQ ID NO: 168642 - DNA, 517 bp, Homo Sapiens
aggatcctccgggcgactcgccaacctttgtgcaattcagcggcacagcttcaacttaggaattacatagcagtgccacggagaattttaaaataccacatcctgttactcaggtgtgtcatattgccaatctggttcccattctggttctgtctaaagggtaaaaaaccttatgtgtttggttagttacctaaaccttcctggccagtaagcttccgaatctttccagctggggaggtatgttctgatgagcattaggacaacttcaaaccccaggagggctcactctcagcagctttcccaagcatttcagcatcttggctttgtctttaagaagagcaataattaaatcctcaggtcaaaagaatgaggaagagaaacacgcagagccttcaaaattatccagatgaaatatcagtggtagcaaacttaggtttatggacatatgagggtagagttagaaatgaagcagcataagagcctatgtcacagcaaaggctcctgcttggcgaagtcg

SEQ ID NO: 168643 - DNA, 890 bp, Homo Sapiens
  misc_feature (84)..(84): n is a, c, g, or t
  misc_feature (763)..(781): n is a, c, g, or t
ggtttcgacagcctagaaggaacaaaacggcatttccgggaagatggcggcgacaagtcaggtccggcacatgtttccgcgggnccccagcaatgacggatgatatcacctcttcttctctggtgagagtctgaggatagagacttttttctcaccatgaatgtcaccccagaggtcaagagtcgtgggatgaagtttgctgaggagcagctgctaaagcatggatggactcaaggcaaaggcctcggccggaaggagaatggtatcactcaggctctcagggtgacactgaagcaagacactcatggggtaggacatgaccctgccaaggagttcacaaaccactggtggaatgagctcttcaacaagactgcggccaacttggtagtggaaactgggcaggatggagtacagataaggagcctttctaaggagaccacccgttataatcatcccaagcccaacttgctgtatcagaagtttgtgaagatggctacattgacttcaggtggagagaagccaaacaaagacttggagagctgcagtgatgacgacaaccaggggtccaagtccccaaagattctgactgatgagatgctgctccaagcctgtgaggggcgaacagcacacaaggctgcccgtcttgggatcacaatgaaggccaagcttgctcgcctagaggcccaggagcaggccttcctggctcgcctcaaaggccaggaccctggggcccctcaactgcagtcagagagcaagccccccnnnnnnnnnnnnnnnnnnnggagccagaaagaggaggaagaagctacagcatctgaaaggaatgatgcagatgagaagcacccagacatgctgagcagacatcagaaaaagcagaagaagaaaggcga

SEQ ID NO: 168644 - DNA, 1342 bp, Homo Sapiens
  misc_feature (255)..(274): n is a, c, g, or t
gtggagagaagccaaacaaagacttggagagctgcagtgatgacgacaaccaggggcccaagtccccaaagattctgactgatgagatgctgctccaagcctgtgaggggcgaacagcacacaaggctgcccgtcttgggatcacaatgaaggccaagcttgctcgcctagaggcccaggagcaggccttcctggctcgtctcaaaggccaggaccctggggcccctcaactgcagtcagagagcaagccccccnnnnnnnnnnnnnnnnnnnnggaggcagaaagaggaggaagaagctacagcatctgaaaggaatgatgcagatgagaagcacccagaacatgctgagcagaacatcagaaaaagcaagaagaagaaaaggcgacatcaagaaggaaaggtctcagatgaaagagagggtacaactaaagggaatgagaaggaggacgctgcaggaacaagtgggcttggggaattgaatagcagagagcaaaccaatcagtccctcaggaaagggaagaaaaagaagaggtggcaccatgaagaggagaagatgggggtcttggaggaaggaggaaaaggcaaggaggctgcaggcagtgtcaggacagaggaggtagagagcagggcatatgctgacccatgcagccgaagaaagaagaggcagcaacaggaggaggaggacttgaacctagaagatagaggtgaggaaactgttttaggtggtggaaccagggaagcagagagcagagcatgcagtgatggaagaagcaggaaaagcaagaagaaaagacagcagcatcaagaggaggaggacatcttggatgtaagggatgagaaggatagcggggctagggaagcagagagcagagcacacactggctcaagcagcagaggtaagaggaagaggcagcagcatcccaagaaggaaagagctggagtcagcactgtccagaaagccaaaaagaaacagaagaagagagactaaaggtctggtaaaggtagggctcaattgattgattttcaggagttgaagcctcaaagaccagggttgatgcaggtctgcaggtcttctgcaccccccctcaatgaggagtccctcccagaaaggaaactgatctctgggacgtcagctgctgagaggagcaagcggtagtaccaccccttagttgaaggagtcagcacaagtccctttctgcagccttctaacccagggaccatgaactcagggtcccttgaggaagccaggcagcctaaaggacaagggaatgcctgggggcctgtggggaaccgggaatggcaaataccccctttgtaagggggcaattcctggctaaaat

SEQ ID NO: 168645 - DNA, 1609 bp, Homo Sapiens
  misc_feature (642)..(642): n is a, c, g, or t
  misc_feature (861)..(985): n is a, c, g, or t
  misc_feature (1022)..(1022): n is a, c, g, or t
  misc_feature (1033)..(1050): n is a, c, g, or t
  misc_feature (1169)..(1178): n is a, c, g, or t
  misc_feature (1183)..(1274): n is a, c, g, or t
  misc_feature (1304)..(1333): n is a, c, g, or t
  misc_feature (1473)..(1508): n is a, c, g, or t
ggggcatatgctgacccatgcagccgaagaaagaagaggcagcaacaggaggaggaggacttgaacctagaagatagaggtgaggaaactgttttaggtggtggaaccagggaagcagagagcagagcatgcagtgatggaagaagcaggaaaagcaagaagaaaagacagcagcatcaagaggaggaggacatcttggatgtaagggatgagaaggatagcggggctagggaagcagagagcagagcacacactggctcaagcagcagaggtaagaggaagaggcagcagcatcccaagaaggaaagagctggagtcagcactgtccagaaagccaaaaagaaacagaagaagagagactaaaggtctggtaaaggtagggctcaattaattgattttcaggagttgaagcctcaaagaccagggttgatgcaggtctgcaggtcttctgcacccccctcaatgaggagtccctcccagaaaggaaactgatctctgggatgtcagctgctgagaggagcaagcggtagtaccaccccttagttgagggagtcagcacagtcctttctgcagcttctaacccaggaccatgaactcaggtgcctagagaagccaggcagctaaaggacaaggaatgctggngggctgtggggaacaggaatgcagataccctttgaaggagcattcctgctaaaagaagctgaaaatgttagacctatgtgaagtgctcctgatttctaaatattgtgaaggttaagaaaaacataaatttaggtctatgggctagatttagcccacagttgccagtttctagcgctaccaaatgaatgaataaacatgagcttgcgctcctagcctagnnnnnnnnnnnnnnnnnnnnnnnnnnnnnnnnnnnnnnnnnnnnnnnnnnnnnnnnnnnnnnnnnnnnnnnnnnnnnnnnnnnnnnnnnnnnnnnnnnnnnnnnnnnnnnnnnnnnnnnnnnnnnggagcgcggccaaaagaaaaaaacaaaagaaaaaaanggtcttggggnnnnnnnnnnnnnnnnnnaaaaaaatttttaaaaactttttgtgggggcgcggggccccccaaaggaaagaggaaaagggccatatcttttttccaagaaaaacccgggaaaaggaaagagggttgggtttcccccnnnnnnnnnnccccnnnnnnnnnnnnnnnnnnnnnnnnnnnnnnnnnnnnnnnnnnnnnnnnnnnnnnnnnnnnnnnnnnnnnnnnnnnnnnnnnnnnnnnnnnnnctcaatatataaaattgcgccccccgcccnnnnnnnnnnnnnnnnnnnnnnnnnnnnnnaaatttcagaacagcttttcgcgcgcgagggggagacccctccccccaacggcggtggggggaaacacttgaagtcccccgcggggggaaaaacgaaccccttgtgggcgcgcgtgggggaaataaatatttttcgcccnnnnnnnnnnnnnnnnnnnnnnnnnnnnnnnnnnnnttttgtctcctcatttgtcggccgccgccttctacaaacaacacagaaggtgggggagaacaccctccccaccgcggggggtgggtgtgtgcagaaacagc

SEQ ID NO: 168646 - DNA, 1138 bp, Homo Sapiens
caggggaaaccggcgggaagggggcctggcagccccatgtcatggcagcagcaggatgctgtttactgagcgtccagtgttgtagttgcattcaaagtgtgtaatctgtgggataatccctgagctttgtaggattgcacacgccgcttccctctttagactggccatctctacggtctcgggcatacatattcttctctgagaaattgcagcctggaagtcgaagtgggctgaattcaaggagatgagctttggatatagcatgttttccacctgggtgctctcatcactaaagctgtttccgtacatgaagcagccccttttggaagcatgtccatgcaggtccacatagtaagcaacgccactctctttgggggggatggtatcaggggctgactcttcaagccccgcagactgttgtggcataatccacacactgttgagcttctgttctgctggctctgtttgtttccaggcttcagcgttatgcctgtcagctgagtgcccacactgagcttcattttggagattgttggctttctccaggtcagaaacaggagcatcaggagggagacaggaactgggctggtgctcagaggaactctgggagttcagacgagagtgcacatggtggtagagaagcacagctttggccccatagatggccgggtgcaggacggcatcaggcttcaggtactgacggttcagattcactccacgtgagtctgtgcggtagtgtccccggaccacaccatcggggttcaacatgggaatcagcttaaagacgaagaggcgacggagggtttgggcccggggatcatcaggtcggaggatgaagtccagaaagccattgaagacaaagctagatggagtctcccctgggtgtactctactgcttaagaagaatatcctcttgcctgcgaaacggaatggtcgaggggtgctggtatcaggaaatagctgctctagacggggctctcgatcttctcgaagcccatggcaggaagtgatcgtcagcagatctacacgaagtccatccagagaatagcaaaggagctcccgatggtaatagatggtatccagggggctgctatgggtagggtggttctccggaaagcgctggtctagctggtttagc

SEQ ID NO: 168647 - DNA, 564 bp, Homo Sapiens
tgtttctgacctggagaaagccaacaatctccaaaatgaagctcagtgtgggcactcagctgacaggcataacgctgaagcctggaaacaaacagagccagcagaacagaagctcaacagtgtgtggattatgccacaacagtctgcggggcttgaagagtcagcccctgataccatcccccccaaagagagtggcgttgcttactatgtggacctgcatggacatgcttccaaaaggggctgcttcatgtacggaaacagctttagtgatgagagcacccaggtggaaaacatgctatatccaaagctcatctccttgaattcagcccacttcgacttccagggctgcaatttctcagagaagaatatgtatgcccgagaccgtagagatggccagtctaaagagggaagcggccgtgttgcaatctacaaagcctcagggataatccacagctacacacttgaatgcaactacaacactggacgctcagtaaacagcatccctgctgcctgccatgacaatgggcgtgccagcccccctcccccgccggctttcccctccag

SEQ ID NO: 168648 - DNA, 1218 bp, Homo Sapiens
  misc_feature (579)..(593): n is a, c, g, or t
  misc_feature (648)..(648): n is a, c, g, or t
  misc_feature (656)..(659): n is a, c, g, or t
  misc_feature (674)..(675): n is a, c, g, or t
  misc_feature (688)..(689): n is a, c, g, or t
  misc_feature (709)..(709): n is a, c, g, or t
  misc_feature (713)..(713): n is a, c, g, or t
  misc_feature (757)..(765): n is a, c, g, or t
attcaaaggcggtgagctatcatatggccagctttcaaagtcagagaattggtctagtgcactgatgtagtgaccatatccaatatgctctgagatggaattgtccacgctgaagatggaatcaagtgactgtgaagtcttgtccaaaaatcatgctgctcctttcttctaaagttcatacatcttatagaaaggaacccttcactcttgaggcataatacagctctgcctcaggatttgccctatccagatcctgctatagctcagttgtcagttcagaaagtcactcctcagtctgatggctccagttcaaaagtgaaagtcaaagttcgagtaaatgtccatggcattttcagtgtgtccagtgcatctttagtgggagggtttcaccaagtcctggaaaggaaaaaatgagagccatgaaacagatcaatgcaaggagaaaaaaaatgcagtggaccagaggaccactggtgaaagcacccctcccaccccaccaaaaatacgggcccaactctgaaaaaaatgggaaacctccctcaaggtggggatcccccccggggttaacagagagggggnnnnnnnnnnnnnnngtccaaaaaaggggcaaaaaatggaaaaaacacttcttacgtgggggttctctcncccccccnnnnaaggaaccagcggcnnagagaaggtgggnncgaaaaaaaaccccccaatnaaanaatggggggccccgcctttggttaacactctcggaccacaaaannnnnnnnncctcaacaagaggagatactacgtttggggcgagaaaaaaacaattttgcccgcggaaaaagagaggaatgccccgacaaatcgttactgcgtcccccacaaaacttactcctgggcggggcgccaacgaaaacgtgctgcccctcccacacagggcatggccacgcccccccctttcttcctaccgccgtgtgtaaatcaataaataataaccccttttgctgagtatttaccttatccgttccctgcgcccacatacaatttatcatttactatatacactaccctcttataaatcccctacatttacccactgctatgacctgcttccgccgccgcccatactatccttcccgcgcgccacaaaccccccacttattctcgccccgcacgccccattacacgtcggctgacctataccgctatatatgctcccccgcttcctcccccccc

SEQ ID NO: 168649 - DNA, 1487 bp, Homo Sapiens
tgtattggtggtgctctccattaaatgctgatgaagctgtcactcgaggctgtgcattgcagtgtgccatcttatcgcctgctttcaaagtcagagaattttctatcactgatgtagtaccatatccaatatctctgagatggaattctccagctgaagaagggtcaagtgactgtgaagtcttttccaaaaatcatgctgctcctttctctaaagttcttacattttatagaaaggaacctttcactcttgaggcctactacagctctcctcaggatttgccctatccagatcctgctatagctcagttttcagttcagaaagtcactcctcagtctgatggctccagttcaaaagtgaaagtcaaagttcgagtaaatgtccatggcattttcagtgtgtccagtgcatctttagtggaggttcacaagtctgaggaaaatgaggagccaatggaaacagatcagaatgcaaaggaggaagagaagatgcaagtggaccaggaggaaccacatgttgaagagcaacagcagcagacaccagcagaaaataaggcagagtctgaagaaatggagacctctcaagctggatccaaggataaaaagatggaccaaccaccccaagccaagaaggcaaaagtgaagaccagtactgtggacctgccaatcgagaatcagctattatggcagatagacagagagatgctcaacttgtacattgaaaatgagggtaagatgatcatgcaggataaactggagaaggagcggaatgatgctaagaacgcagtggaggaatatgtgtatgaaatgagagacaagcttagtggtgaatatgagaagtttgtgagtgaagatgatcgtaacagttttactttgaaactggaagatactgaaaattggttgtatgaggatggagaagaccagccaaaagcaagtttatggtgataaagttggcttgaattaaaaaatctagggcaaactattaagatacgtttccaggaatctgaagaacgaccaaaattattgaagaactagggaaacagatccaacagtatatgaaaataatcagctctttcaaaaacaaggaggaccagtatgatcatttggatgctgctgacatgacaaaggtagaaaaaagcacaaatgaagcaatggagtggatgaataacaagctaaatctgcagaacaagcagagtttgaccatggatccagttgtcaagtcaaaagagattgaagctaaaattaaggagctgacaagtacttgtagccctataatttcaaagcccaaacccaaagtggaacctccaaaagaggaacaaaaaaatgcagagcagaatggaccagtggatggacaaggagacaacccaggcccccaggctgctgagcagggtacagacacagctgtgccttcggattcagacaagaagcttcctgaaatggacattgattgattccaacacttgtttctattaaaacagactattattc

SEQ ID NO: 168650 - DNA, 696 bp, Homo Sapiens
ccagtactggggaaggatttgcttgtggtatggtgggtaggatgacagtattctcagcagggactggcaggacagggatcacagggacagtgggaggagagggaagaacagcttctgttggctttattggtgaaatatgagaatgagaaacaaatccatggacattctcaatctctgataagttcctctctgagacatgaaccaattctggacctatcacttcatttgtgatttgtggggaaatatgctcttgaggaggtgtatcttcatcctgatacctgtatttctctacactagggctaaggctgccttggcagtgtctctgaagtcacagtagagcttggaaggctggaaatctcccaagtattcacaggttgaattggttcagacggctttgaacgatctatacattttggattatccagtaaggtcacttcataaaattcttgaatatctattaaagcctgaaagaggttgctctgaaatatgttaataacccgttctatggaacttctgagctgtctgtcttcagtttggcttagttttgaacgatattcctacaaaaggtgcaatgctctctgggtatcttgcttccggaccggcatttttctccagaatcaggaagagggcacacacctttctccttgctcgctgctccgggctgctccagcgggggccggacagggcagcggccgc

SEQ ID NO: 168651 - DNA, 1106 bp, Homo Sapiens
ggggcagcctgtcttgctcgcggagagaggagctaggagcctcggccaatgggagccggcgttgttggaggccacggcggcgcagccccaaagcgagcgaagctagggtcgccgccactgccgcaggaggcgtgaggggataaaaacattcagatggcagatcacagtttttcagatggggttccttcagattccgtggaagctgcctaaaaatgcaagtaacacagaaaagctcacagatcaggtgatgcagaatcctcgagttctggcagctttacaggagcgacttgacaatgtccctcacaccccttccagctacatcgaaactttacctaaagcagtaaaaagaagaattaatgcattgaaacaacttcaggtgagatgtgctcacatagaagccaagttctatgaagaggtacatgacttggaaagaaagtatgcagcgctataccagcctctctttgacaagagaagagaatttatcaccggcgatgttgaaccaacagatgcggaatcggaatggcacagtgaaaatgaagaggaagagaaattggctggagacatgaaaagtaaagtagtcgtcacagaaaaagcagcggcaacggctgaagagccagatcccaaaggaattccagagttctggtttaccatcttcagaaatgtggacatgctgagtgaattagtccaggaatatgatgaaccaatcttgaaacacctgcaggatattaaagtgaaattttctgaccctggacagcctatgtcttgtgtgttagagttccactttgaacccaacgactactttaccaactcagtcctgacaaaaacctacaagatgaaatcagaaccagataaggctgatcccttttcctttgaaggtcctgagatggtggactgtgaccgggtgtactattgaatggtagaaaggaaagaatgttactgtcaaaaccatcaagaaaaagcagaagcataagggtcgaggcactgttagaacaattacgaaacaagtacccaatgagtcctttttcaacttcttcaatccattgaaaggcaagtctgttggttgttaatattcattatggtaagagtattaaaaatcagggtccgcc

SEQ ID NO: 168652 - DNA, 1445 bp, Homo Sapiens
  misc_feature (162)..(176): n is a, c, g, or t
ggccacccaagggggttttcagaaaaactttaagggacggaacccccaggcgaaaaagccggcagtcctcaccaggccaagaagggataaataaaatatgaggtggccccgcagcagctcttcacctgggctggggtgtcacaacccttgaccccacccctnnnnnnnnnnnnnnntcaagaagcaaacatcctaaggagaacagggccctactctacacagccctttctgagatgatcggcatacagcaggtgatgcaggctgcacactcagcagattcagcggctggaaacagcaagtgggtttcttcggatgaaagggaagaattcagtccaactgcaggaggggtgggagaggttccagatcctgggaaccacatcaccagacctcggccctttttgccaagtgacccccaccccaccctgatgtggtctacagggccctcccacagggaaaggcccagggaagtccagagctacaggcaccaaggctgcagagggtgctggacgaaacctcctatttctgaaatgcatttcagttgccactgtacaagttaagcaaaataataaggaaaaaggaaaagtgaaagtgaaaatcatgcacttgaaaacgagttagatggagtaagctctgtccacgggattgtgctgcggcaaggaccgaggccccgcccacaggcctgaagtcccgacagccggtctgccaggcacccgccttccgcttcctactgctgcttgcattccgccggccggctgggttccttcttggggttaatttccgcatcatcctcgtcttctccctcctcgtcaccttctaattcctcctcttctccttcttcaccttcttcaaaattgtcatcatcttctatggcctccccagtgaagtacagcacagcccgcgggactatccgctcacggaaaaagtgtccaatttcaaaatcagaggctaatgtgaattcagaatcttcatccagtgattctccatccccggatgctttcaatggattgaagaagttgaaaaaggactcattgggtacttgtttcgtaattgttctaacagtgcctcgacccttatgcttctgctctttcttgatggttttgacagtaacattctttcctttcttccagtcaatagtacacccgtcacagtccacaatctcaggaccttcaaaggaaaagggatcagccttatctggttctgatttcatcttgtaggtttttgtcaggactgagttggtaaagtagtcgttgggttcaaagtggaactctaacacaaaagacataggctgtccagggtcagaaaatttcactttaatatcctgcaggtgtttcaagattggttcatcatattcctggactaattcactcagcatgtccacatttctgaagatggtaaaccagaactctggaattcctttgggatctggctcttcagccgttgccgct

SEQ ID NO: 168653 - DNA, 795 bp, Homo Sapiens
cgcgggttgtgccggcgtgtcgctcacaaggtccagttagggggtttgactcgatattgagggtggagccgcgctgggcgggcttcttctgccttggggctgggtgtgttcgccaatcggctggcccacccgctttgtgggtgtgtgttagaatgaagaagcgacatcctaagggagaacagggtccctactcgtacacagccctttctgagatgatcggcatacagcaggtgatgcaggctgcacactcagcagattcagcggctggaaacagcaagtgggtttcttcggatgaaagggaagaattcagtccaactgcaggaggggtgggagaggttccagatcctgggaaccacatcaccagacctcggccctttttgccaagtgacccccaccccaccctgatgtggtctacagggccctcccacagggaaaggcccagggaagtccagagctacaggcaccaaggctgcagagggtgctggacgaaacctcctatttctgaaatgcatttcagttgccactgtacaagttaagcaaaataataaggaaaaaggaaaagtgaaagtgaaaatcatgcacttgaaaacgagttagatggagtaagctctgtccacgggattgtgctgcggcaaggaccgaggccccgcccacaggcctggagtcccgacagccggtctgccaggcacccgcctccgcttcctactgctgcttgcattccgccggctggctgggttccttcttggggttaatttccgcatcatcctcgtcttctccctcctcgtcaccttctaa

SEQ ID NO: 168654 - DNA, 466 bp, Homo Sapiens
  misc_feature (58)..(73): n is a, c, g, or t
  misc_feature (78)..(78): n is a, c, g, or t
  misc_feature (158)..(158): n is a, c, g, or t
ggttgacccgcaacagctctcacctgggctgttttgtcaaaaccttgacccacccctnnnnnnnnnnnnnnnntcaanaaagcaaacatccctaaggaaaaacagggcccctactctaacacagcccctttctgagatgatcggcatacagcaggtgnatgcaggctgcacactcagcagattcagcggctggaaacagcaagtgggtttcttcggatgaaagggaagaattcagtccaactgcaggaggggtgggagaggttccagatcctgggaaccacatcaccagacctcggccctttttgccaagtgacccccaccccaccctgatgtggtctacagggccctccacagggaaaggcccagggaagtccagagctacaggcaccaaggctgcagagggtgctggacgaaacctcctatttctgaaatgcatttcagttgccactgtacaagttaagcaaaa

SEQ ID NO: 168655 - DNA, 1128 bp, Homo Sapiens
agaaagatcttgtagagaaagcaactgctacgatcctgagcgagtcaagaattttcttaaggaagcaaaactaacagatcagctaccacttatcattgtgtgtgatcgatttgactttgtccatgatttggtgctctatttatatagaaataatcttcaaaagtatatagagatatatgtacagaaggtgaatccaagtcgacttcctgtagttattggaggattacttgatgttgactgttctgaagatgtcataaaaaacttgattcttgttgtaagaggtcaattctctactgatgagcttgttgctgaggttgaaaaaagaaacagattgaaactgcttctgccttggctagaggccagaattcatgagggctgtgaggagcctgctactcacaatgccttagccaaaatctacatagacagtaataacaacccggagagatttcttcgtgaaaatccctactatgacagtcgcgttgttggaaagtattgtgagaagagagatccacatctggcctgtgttgcttatgaacgtggccaatgtgatctggaacttattaatgtttgcaatgagaattccctcttcaaaagtctttctcgctacctggtacgtcgaaaggatccagaattgtggggcagcgtgctgctggaaagcaatccttacaggagacccctaattgaccaggttgtacaaacagctttgtctgagactcaggaccctgaagaagtgtcagtaactgtaaaggctttcatgactgcagaccttcctaatgaactcattgaactgctggagaaaattgtccttgataactctgtattcagtgaacacaggaatctgcaaaacctccttatcctcactgcaattaaggctgaccgtacacgtgttatagagtatattaaccgcctggataattatgatgccccagatattgccaatatcgccatcagcaatgagctgtttgaagaagcatttgccattttccggaaatttgatgtcaatacttcagcagttcaggtcttaattgagcatattggaaacttggatccggcatatgagtttgctgaacgttgcaatgaacctgcggtctagagtcaacttgcaaaagcccagttgcagaaagggaa

SEQ ID NO: 168656 - DNA, 1282 bp, Homo Sapiens
  misc_feature (1010)..(1010): n is a, c, g, or t
  misc_feature (1015)..(1015): n is a, c, g, or t
  misc_feature (1102)..(1102): n is a, c, g, or t
  misc_feature (1143)..(1143): n is a, c, g, or t
  misc_feature (1192)..(1192): n is a, c, g, or t
  misc_feature (1211)..(1211): n is a, c, g, or t
  misc_feature (1224)..(1224): n is a, c, g, or t
cgtctcctagaggatccccgtactccccgttggccctggccaacaagttgtttggtgctcctgagccctccaccatcgcccgctctctaccaaccactgtcccagagtcaccaaactaccgcaacaccaggacccctcgcactccccggacaccacagctcaaagactcaagccagacatcacggttttacccagtggtgaaagaaggacggacactggatgccaagatgcctcgaaaaagaaagacaagacacagttcaaacccacccttggagagccatgtgggctgggtgatggattcccgtgagcacaggccccgtactgcttccatcagctccagcccctcagaagggacgcctacagttggcagctatggctgtacccctcagtcattgcccaagttccagcatccttcccatgaactgctcaaggaaaatggcttcacacaacacgtctaccataagtatcgtaggcgctgccttaatgagcggaaacgcttgggcattggccagtctcaggagatgaacacactcttccgcttctggtccttcttcctccgagatcacttcaacaaaaagatgtatgaggagttcaagcagctggctctggaggacgccaaagaaggctacagatatggtttggagtgcctttttcgatactacagttatggcctggaaaagaagttccggctgacatattcaaggattttcaggaggaaacggtgaaggactatgaagctggccaactgtatgggctggagaagttctgggccttcttgaaatattccaaagccaaaaatttggacattgaccccaaactgcaagaatacctcggcaaattccgacgtcttgaagacttccgagtagatccccccatgggtgaggagggcaaccacaagcgacactcagtggtagcaggaggtggcggcggtgagggcaggaagcggtgcacctcccagtcttccagcaggcctgctgccatgatcagacaaccccctacaccacccaccngccancctgtccgggaagatgccaaatggacaagccagcactcgaacacacagactttgggaaagtgaaaagctccttagccctggggtttnaggggggaaaggggtagggtgggtaagagtccatgggggtncccagtcccagggagaggggacaattgaagggacaggcctgggagttantagggacaggcctttgttnttgagttaggcantgtattacaccttttgggctattcagaggttaccctggggcagggagcttttacatcc

SEQ ID NO: 168657 - DNA, 901 bp, Homo Sapiens
ggcctgggtggcgaattcggcacgaggcgcgggccgcggcggggctgcctggccggtgctgttggggctgctgctggcgctgttagtgccgggcggtggtgccgccaagaccggtgcggagctcgtgacctgcgggtcggtgctgaagctgctcaatacgcaccaccgcgtgcggctgcactcgcacgacatcaaatacggatccggcagcggccagcaatcggtgaccggcgtagaggcgtcggacgacgccaatagctactggcggatccgcggcggctcggagggcgggtgcccgcgcgggtccccggtgcgctgcgggcaggcggtgaggctcacgcatgtgcttacgggcaagaacctgcacacgcaccacttcccgtcgccgctgtccaacaaccaggaggtgagtgcctttggggaagacggcgagggcgacgacctggacctatggacagtgcgctgctctggacagcactgggagcgtgaggctgctgtgcgcttccagcatgtgggcacctctgtgttcctgtcagtcacgggtgagcagtatggaagccccatccgtgggcagcatgaggtccacggcatgcccagtgccaacacgcacaatacgtggaaggccatggaaggcatcttcatcaagcctagtgtggagccctctgcaggtcacgatgaactctgagtgtgtggatggatgggtggatggagggtggcaggtggggcgtctgcagggccactcttggcagagactttgggtttgtaggggtcctcaagtgcctttgtgattaaagaatgttggtctatgattgcggttcactgtgagcctgaggatgaccaggaggtgccagcccaggcccagttgatcatttcttccccaagccgtctttcccgcagtact

SEQ ID NO: 168658 - DNA, 657 bp, Homo Sapiens
gtcgactttagagatctccgtcctgtggttctgctcacgttgtacttgtccacagaggggctcttgggcacgggtgagggcgagggcctggctggcgcagggggcgctgtgtttggggaaggcctgtcttgttcacagcgtgtctctcccctgctgaagctgctgctggaaaggtacgcctggatggaggcatcatggagcgttacggtcacgttgttcatgtggacctgggtgccactaacacatctgtattttttatctatatctgccctgatgtcagttatagattccacagtcttgatttctttggagctcgcattggggaaaaggtgtatgtctgacaagttataaacaaaactcatgagctggacgctggaacgtgttgcatttctcgtgaaaacgagagtgagtgtatgtcctcttccaaaagcaatcacgagactggggtcagaagtattctcttttccacaggagctgcggttgagcaccactgtggcatctgatggcagatcaaaggtcatgttcttagggccactcttggtgtcgtagttcatctgagaaggcagcagagaagttgtccattatgcatcctgtcccgtgccattgtcaccatatacatgcttttacgcccaagtataaacgcgccgtatcgatcta

SEQ ID NO: 168659 - DNA, 829 bp, Homo Sapiens
taagcaaggctggtacaggtccggaatcccgggaatatcgtcgacccacgcgttcccggctcctgcccctatttgcatgagggcaagaagcttcctcaagaaagctgtggtgcagtccccgcaggtcacagaagtcctttaagagggtttgccttggatccgggcacagttgtgagggctcctctgcatcacctaccaggatgtctggaggagaaaaagacagaacaaagatggaagtggcctgggcccctgggggtgggtcctctctgtgtttttaatctgcaccttatagactgatgtctctttggccggagccagatctgcccctcagtgcattcgtgtgctcgcacgcgcagacatcccttctcccccatacacacatatacactcacagcctctctggcctcttcccttggggaggggccacctgtagtatttgccttgatttggtggggtacagtggatgtgaatactgtaaatagcttgtgctcagactcctctgcgtggagagggtgggtgcaggaggcagaccctccccccaaagccccctggggagatcttcctctctcgatttaactgtaactgagggggatcccaggtctggggatggagggacaccttgggccacaggatactggttgcttcaggggtacccatgccccctgccctcgcctggaatcagtgttactgcatctgatttaaatgtctccagaactaacgaaacaaccaacacaacacaaaggggggccgtcctaaaagttctcttcgcagggggcaaagtttacgggtaccaagttttcttgtacaaacgtggaccctaaaagggaag

SEQ ID NO: 168660 - DNA, 741 bp, Homo Sapiens
aggacagcaaggaggccaacgccaacggttccagcccagagcctgtgaaagctgtggaggctcggtccccagggctgcagaaggaggctgtgcagaaagaggagcccatcccacaggagcctcagtggagtctcccaagcaaggagttgccagcgtccctggtgaatggcctgcagcctctcccagcacaccaggagaatggcttctccaccaacggaccctctggggacaagagtctgagccgaacaccagagacactcctgccctttgcagaggcagaagccttcctcaagaaagctgtggtgcagtccccgcaggtcacagaagtcctttaagagggtttgccttggatccgggcacagttgtgagggctcctctgcatcacctaccaggatgtctggaggagaaaaagacagaacaaagatggaagtggcctgggcccctgggggtgggtcctctctgttgtttttaatctgcaccttatagactgatgtctctttggccggagccagatctgcccctcagtgcattcgtgtgctcgcacgcgcagacatcccttctcccccatacacacatatacactcacagcctctctggcctcttcccttggggaggggccacctgtagtatttgccttgatttggtggggtacagtggatgtgaatactgtaaatagcttgtgctcagactcctctgcgtggagagggtgggtgcaggaggcagaccctccccgcaaagccc

SEQ ID NO: 168661 - DNA, 411 bp, Homo Sapiens
  misc_feature (17)..(17): n is a, c, g, or t
caagcccaagctcccangtaaaacacctgccggctccctcggctcccaagtgcaccagagcggccgggaagaggttcgcctgaaagagggtctgcgtgtggtcgtccaggactgtttttggaggggtgatgaacaggtaaaatgacagctcggggttccccaggtggctcctcacgaagtctcgcaagtcccccactgtctcgctggggcggaagaagccctgtaggacgtagcggtcggggaacaggacccgcagagccacctttgggtaacgctccagcttctccttcatctgagcctccctgaaagccttggtcaccaagggggcttcttccagacgcttccgctcactcttgagctgggccaagcgtctcctcacatcatccacagtcacctcaaagaactcgtccc

SEQ ID NO: 168662 - DNA, 312 bp, Homo Sapiens
caggatctaccgtacaaggccccgccgctgatgttattctgcatccttaagtccaacaaacccgcgataaccactgccgaatgcctgaaggcgcttgagcaggtgttgggagcgttgagagctctagggatgcccagatcaaatttctgaacacttatcagaacccgggagaaaaattgtctgcttatgtcattcgtctggagcctctgctacagaaggtggtagagaagggggccattgataaagataatgtgaaccaggcccgcctagagcaggtcattgacggggccaaccacagcggggccttgtacg

SEQ ID NO: 168663 - DNA, 915 bp, Homo Sapiens
gaggccggcttgttcgggagagacggcgcgagcagtcagccaggtaggccggcagccaggtaggccggcccgggtccgcggcgcggaactcggccgcgaagagctcttgcgtctggaagctaccgggccgatgaagggggatgtggccccccacggctcgcggggctcgcagaatcttatcttggctttggatcttagaagagaatcactaaccagagacgagactcagtgagtgagcaggtgttttggacaatggactggttgagcccatccctattataaaaatgtctcagagcaaccgggagctggtggttgactttctctcctacaagctttcccagaaaggatacagctggagtcagtttagtgatgtggaagagaacaggactgaggccccagaagggactgaatcggagatggagacccccagtgccatcaatggcaacccatcctggcacctggcagacagccccgcggtgaatggagccactggccacagcagcagtttggatgcccgggaggtgatccccatggcagcagtaaagcaagcgctgagggaggcaggcgacgagtttgaactgcggtaccggcgggcattcagtgacctgacatcccagctccacatcaccccaggaacagcatatcagagctttgaacaggtagtgaatgaactcttccgggatggggtaaactggggtcgcattgtggcctttttctccttcggcggggcactgtgcgtggaaagcgtagacaaggagatgcaggttattgggtgagtcggatcgcagcttgggatggccacttaccctgaatgaccaccctagagccttgggatccaggagaaacggcggtgggggaaaacctttttggtgggaactcttatgggaaaccatggcagccagccccgatagcccc

SEQ ID NO: 168664 - DNA, 1141 bp, Homo Sapiens
  misc_feature (899)..(899): n is a, c, g, or t
  misc_feature (966)..(967): n is a, c, g, or t
  misc_feature (969)..(969): n is a, c, g, or t
  misc_feature (974)..(974): n is a, c, g, or t
  misc_feature (1002)..(1018): n is a, c, g, or t
  misc_feature (1040)..(1041): n is a, c, g, or t
  misc_feature (1043)..(1043): n is a, c, g, or t
ggagaacccaagatgtgcgggacgacgacatctttatcatcacctaccccaagtcaggcacgatctggatgatcgagatcacctgcttaatcctgaaggaaggggatccatcctggatccgctccgtgcccatctgggagcgggcaccccggtgtgagaccattgtgggtgccttcagcctcccggaccagtacagcccccgcctcatgagctcccatcttcccatccagatcttcaccaagcccttcttcagctccaaggccaaggtgatctacatggcccgcaacccccgggacgttgtggtctccctctatcattactccaagatcgccgggcagttaaaggacccgggcacacccgaccagttcctgagggacttcctcaaaggcgaagtgcagtttggctcctggttcgaccacattaagggctggcttcggatgaagggcaaagacaacttcctatttatcacctacgaggagctgcagcaggacttacagggctccgtggagcgcatctgtgggttcctgggccgtccgctgggcaaggaggcactgggctccgtcgtggcacactcaaccttcagcgccatgaaggccaacaccatgtccaactacacgctgctgcctcccagcctgctggaccaccgtcgcggggccttcctccggaaaggggtctgtggcgactggaagaaccacttcacggtggcccagagcgaagccttcgatcgtgcctaccgcaagcagatgcgggggatgccgaccttcccctgggatgaagacccggaggaggacggcagcccagatcctgagcccagccctgagcctgagcccaagcccagccttgagcccaacaccagcctggagcgtgagcccagacccaactccagccccagccccagncccggccaggcctctgagaccccgcacccacgaccctcataataaaaacgtcgattctgaaaaaccnnanccaanttatccccccccacttatcattattttnnnnnnnnnnnnnnnnnttataaacctatattaaattcnnantaaacatgtgtgggccccctccggccccccaaaaagtttttctaaaaccattcctttttgggcggcgggggcccccgttagggaaaggtgcacactgc

SEQ ID NO: 168665 - DNA, 955 bp, Homo Sapiens
  misc_feature (839)..(839): n is a, c, g, or t
ggggatttgattttctctggggttttcactagttccggcctttggcgctctatgacgtcaccgaagtgacggagcggaaaagcgcgagaagcggcttggttccttgtacgcagaggcggtagtgacacaggcacaactgacagtggcagaagctcagctgacaaggactggggacgacggtgtccttgtcttgcctttgtcgcccccgcccctctcttccctggctggacttgcggagtccccgtccgaagaacccgaggagccatatattgaagaccatgtctggaagcttcctactttggaattgttggtcacccatgataagccaggttgttgaaatggagcttttcccagctgggaaggcacaatccaaagacgaccatcgtcatctgaaccaggtcatagctcatgctgctctcgacctcgtagatgagaaacatggggctggcggaaccaacatggacttgaaaactgggggaccaagtctcaacgagcgggttggggtcaaccattttgtcaccgcggggcgcatatggagggttaatttatggcttcctggaccttaagaacaagaaggatggggataaagaaactttcttttactggagggggtgatcgattgataaaataaaaaatttttccatgggaatccatgtttaatgaacccccattgcctccgtattccaatccaaagtggcattttggacgggaaaaaggtcccgtctttcttggggggaaaacagacacgctttttagagcggggaaggggagaaaaaactttccgcaaatggaaattttatcctcgcccccccaaatgtggctgggcgtaacctgggggngacctctgcaccccttgccgggctgtggcgggtagaggagaaaactcgttgcgcgggcccgccttcctcgaggcccatccggaaaaaaagctctctctcgtagaaaacctcgttcg

SEQ ID NO: 168666 - DNA, 305 bp, Homo Sapiens
taagcgaacatgcggcgcccagaggtacggcggaggaggaggccctgatcgagttccaccgctcctaccgagagctcttcgagttcttctgcaacaacaccaccatccacggcgccatccgcctggtgtgctcccagcacaaccgcatgaagacggccttctgggcagtgctgtggctctgcacctttggcatgatgtactggcaattcggcctgcttttcggagagtacttcagctaccccgtcagcctcaatcatcaacctcaactcggacaagctcgtcttccccgcatgttcgcttaactc

SEQ ID NO: 168667 - DNA, 365 bp, Homo Sapiens
ggcctgaaagctgtgctggagcggcaggcctctttaccgcttctactccagttccctgcttgtcatctatgatggcaaggagtgccgggctgagtcctgcctggaccgccggtctgagatgcgtctcaagcacctggacatggtgctccctgaggtggcgtcatcctgtggccccagcaccagccccagcaacaccagccccgaggcgggtccctcctctcagcccaaggtggatgtccgcatgattgactttgcacacagcacattcaagggcttccgggatgacaccaccgtgcatgatggccagacagaggctacgtgttggcctggagaacctatcagcatcatgaactcgtcagaggtcg

SEQ ID NO: 168668 - DNA, 249 bp, Homo Sapiens
gcacactcagtggtgtttgagtccgatggccctcggggttatgaagttcataccacctccgcagtacgcccccaaacaagggagagaccattctaacacaggtaccgtccagacagtgcctctgagaaagggaacctaaaggcgtgtttccgacgcaccccaggtccccgtaacggccattagtcagtaccctcacgatgtcccagcagcctccaccccgtgacggggccgctccatgtaagaacagcc

SEQ ID NO: 168669 - DNA, 564 bp, Homo Sapiens
  misc_feature (433)..(441): n is a, c, g, or t
agagggtatcatggatcgtggtaggtccggtggaatgttcagaggtggccgtggggaatacagaggtggcttccgtggtggccggggcatggaccgaggtggctttggtggaggaagacgaggtggccctggggggccccctggacctttgatggaacagatgggaggaagaagaggaggacgtggaggacctggaaaaatggataaaggcgagcaccgtcaggagcgcagagatcggccctactagatgcagagaccccgcagagctgcattgactaccagatttattttttaaaccagaaaatgttttaaatttataattccatatttataatgttggccacaacattatgattattccttgtctgtactttagtatttttcaccatttgtgaagaaacattaaaacaagttaaatggtagtgtgcggagnnnnnnnnncttccttcttttaaaaatggttgtttaagactttaacaatgggaaccccttgtgagcatgctcagtatcattgtggagaaccaagagggcctcttaactgtaacaatgttcatggttgtgatg

SEQ ID NO: 168670 - DNA, 521 bp, Homo Sapiens
caagcgtacatgcggcattgtcaaaaagctcccaaagtgtcacacccagagaccagatattactatacttagtctgatctgcagttagcagtctgtcttgaaagctgattactaattctggagcagtccatcgcagagggaaaacttttttatcatctgtttcaatataatcctccttgtacctgctgaatcctattccgtaatctcccactttcacatttaagtcggaggtgagaaaacaattccgcagggctaaatcactgtgcaggaagtgcagcttgttcatggcggccagccccgcggctacctcgcacgccatcctctgcagcagcatactctgtgagtccccccgcatgtgctcctgctcgctgcgcagatacgccttcaggtcacccaagtcacagaactcaaacaccaggaggtagggaatcgcttctacgcactgtccaacacactgaagaatatttggatgctgaagaatgtagtaaggttctccatttttcaaaaaagtatcttgttcc

SEQ ID NO: 168671 - DNA, 396 bp, Homo Sapiens
ctagcgaacatgcggccgcgacggaagtcaagaataacaggacaccgggcaagatccccgcagtgccagcttcccaggactcaggattccagtcggccatgaagcaataaatacaaacatgccccacaaggtgagaataaagccatcaaggtgatgaggaagaagtcacggggattttcttcttcgaagtccaagcacagtggcaatatttcaagtattgcaaagaaaaacacacgtgtgtgtatttttgtctgttatgtggcgtgtgaccctggaaccccccgcatgggtccatggccccaccactgcctcccgcagactggggactcgttcaagtatctactgattcaggcagggctaaccgagggctgggcagaccaagggaggcccaggcgg

SEQ ID NO: 168672 - DNA, 998 bp, Homo Sapiens
gggacccccagcttttcttccgccagagctgtttccgttcctctgcccgccatgccgttcctggagctggacacgaatttgcccgccaaccgagtgcccgcggggctggagaaacgactctgcgccgccgctgcctccatcctgggcaaacctgcggaccgcgtgaacgtgacggtacggccgggcctggccatggcgctgagcgggtccaccgagccctgcgcgcagctgtccatctcctccatcggcgtagtgggcaccgccgaggacaaccgcagccacagcgcccacttctttgagtttctcaccaaggagctagccctgggccaggaccggatacttatccgctttttccccttggagtcctggcagattggcaagatagggacggtcatgacttttttatgattgggcacggagggatccagggcatctgtgaactggctgcttcttccagagagatctcttggcagagtgagggcctggagataaccagctttggattatcccgcatgcaacattcctgtgatcacataatcctcttcttcatcctcatatgaaataaatgaagagagcttcctcattcataaaaaaaagaaacgacgggcacacgcgacaaaactcagggcttctatttcggggtgcgggaaaaaaaggaaatagaactgggcacatggccaataagcggttgcccgaacccagctttcttggaaagaagggagtaaaacatgcgcggccaccctaaatggggagacctaaatccaattttgcaatagtgccacggcaaaccctgcaaatgagggaaatgagctgccagcaaacccgagaaaattaaaccctagcttattagtacagaggatagtcttatttgcaggaacaaaaagggactagttgtaggtgaaggccatttgtcgttcgcgaaaaacaaccagcgggcatcagactaaaagaatgagagaatgaccggcatcagaaactgcagagggtacggtagacag

SEQ ID NO: 168673 - DNA, 410 bp, Homo Sapiens
  misc_feature (29)..(29): n is a, c, g, or t
  misc_feature (36)..(36): n is a, c, g, or t
  misc_feature (105)..(105): n is a, c, g, or t
  misc_feature (231)..(231): n is a, c, g, or t
cccaaggctaactccttggttaaaaaaantcaaaanaaatgggcgctgtggctgcggttgtccctcgcggtgccccactaacgccgatggaggaagatggaacantgcgcgcagggctcggtggaacccgctcagcgccatggccaggcccggccgtaccgtcacgttcaacgcggtccgcaggtttgcccaggatggaggcagcggcggcgcagagtcgtttctccacancccgcgggcactcggttggcgggcaaattcgtgtccagctccaggaacggcatggcgggcagaggaacggaaacagctcctcagatgtccgtgcgctggggcctttccaggacgcggcgcccagtcgtttctgggtcaggcgacgcctggaactgggcagggtccctggcaccgggatc

SEQ ID NO: 168674 - DNA, 1134 bp, Homo Sapiens
  misc_feature (54)..(54): n is a, c, g, or t
  misc_feature (1051)..(1051): n is a, c, g, or t
tcacactctcaaatacttctcttcggtccgatacgttctaagtagcgagcctgngtggcgatttcgcacgaggggacgactcgctactgctgccctcggaggtgttcctggggccgcacaactcctcatccggcgagattgctgtcatcagcctagactccttcgcgctgctgtcccgcgtgcggaacaagccctatgacgtgtttggctgttggctcaccgagaccagcctcatctcggggaacctgcaccgcatcggagatatcacctcctgctcggtgctgtggctcaacaatgccttccaggatgtggagtcagagaacgtcaacgtggtgaagcggctgttcaagatccagaacctcaatgccagcaccgtccgcacggtgatggtggccgactgcagccgcttcgacagccctgacctgctgctggaagccggtgacccggccacgtccccctgccgcatctttgacctgggcagcgacaacgaggaggtggtggcctacccggacccatctattattaccgtcttgtctcctatcttgctttcaatccactcttctccgaacggaacgacccgatcccacctgttgtctaaatgcccgatatcgcgcacgcattctgtccatccatgtcagttccgggttcacggcgctaaaacgcgcctttttgtccgcttatcgattctactgcgtactatgtccatccactggtcgacaccccgcgagatcgctgctagttgcactcgaacacctggccttgtatcagagctggcacagtactggatatctttctcgcatcctaacgaaattatagcctaccaccgcgttaataataattattgcgtgcaccgcattccgagccgcgctcctcacccgtcggtgtctaccctcgcgtgtacctcgcgctttgtgctacccctctcggcctccccgctgcatttacacgaggttaagaaattgataacccaccccttttgcacgcacctgtgaaacgattgctgcagatgcccttacatggcgggcctgcaagattacgtagtagtgctctncgcttgcgctcctctaacatcatgtactacgcgagaccagtgttactgcctgcctagaggcgaggtggccacaattcgctgta

SEQ ID NO: 168675 - DNA, 464 bp, Homo Sapiens
cgtccggtgcttacaaatgagagaggtgccacgggcaactcctggtctgccgacttcccgtcttcttggtgaaggagtcagggttaggtgtgaaagtgggagatgaggggcattggtacacccaaggaggtctgctgcagtcatcacagaggcaggctggtccgccttcgaggtgagttgcaggcaggctgagcagcagaaaccatgtggtaggtgcccatgcttgagcaggaatgggggtggaccccatctaggtcgctgccggactagccgcagtgatgcctgacagctggaaaatgtcaaaaagtaatcaagagggagcccaggatcggggaagtaggctggggtgtcagcaaaggctattgtctggcggggggccggtatcacacaaacagcccaagccctaggcacaaatactcaatgaattcagctctgggggctttgtgcaacccggggccggctcg

SEQ ID NO: 168676 - DNA, 301 bp, Homo Sapiens
tgttgtggtgggaggaagacgtaagatccccaatttggaaagcatgcccccctcccttttagtagaagcccatggttgccctgtgccaaactggggaggaggcaatgagccttggtggaaggaacctctctgttgatatttaaagaagtgagggctgtgggtattcattgttagaaatgccaatttcactttgaaaccatagtccaagtctctaggttggtagaagggaaaggaaggaagtggtcccagtgattctagatctggattgggaaacttctgcctcatgactcctgtcctttga

SEQ ID NO: 168677 - DNA, 326 bp, Homo Sapiens
cggctagcacgacaagacttcgtggagaaggtgatgcaggagcagggcacccaccccaagtcagaagcccaagcagctgaaggacaaagctgatttctgcattatccactatgccggcaaggtggattacaaagctgacgagtggctgatgaagaacatggatcccctgaatgacaacatcgccacactgctccaccagtcctctgacaagtttgtctcggagctgtggaaggatgtggaccgcatcatcggcctggaccaggtggccggcatgtcggagaccgcactgcccggggccttcaagacgcggaagggcatgttccgca

SEQ ID NO: 168678 - DNA, 1134 bp, Homo Sapiens
cctgctgagatttgtccaggacacttcccaccagatctcctgatgatatcgccatgcctcacggggcacctctcggttcaggaagaacttcaggccctccaaaaagcttcttgtgcttctcctgcgcctccagctccttcctgcggtcttcctcctgcgctgacatctccccatcggtgggaaactcatccacctcggcctcctcctctgtggcaggccccaccacgcgggccaggctggcactgagggctgccagtttctccatacaactctcggagtccaacgcgtaggtgccctcaccggcctttgcctctgcttgggcctgaccctcgagcttcgggggatagtggaggttgagcaactggtaaaggcggaagttgacaaagcccagcagcgtggtgtagaactcggtgaaggtggccatgaccctgtagtccacgtctgtcgggtggtcatgggagaaggcatagggagtgatccacacgatgggctgccccagtacctcggcctggtagtaaatgcctttgatggacaggaagaccttgcgcagggcacgggcagcgataatgtagtgcatgaactccacagtgagccggcggcacagctgaatggtctgcacgtggcacttgccagtccgcgggaaggtggaaaacaggaagcacatggagagggcatcgtccaggtcccgcagggcatcgatgaacgtgggataccgttccttgatgatgtggtcgagtttgtagttgggcttattgtcctttaaacgctctacagtgttccactcgctcttcccataagccttccggagcttccggacgaacaccttgtattcacggaacttgttgacaatgggttcgtggaggagaaacctgatgtctttgataaggtaaaacgttcgggctgctgtagaacccttgttaaccttcttcttgtgtttgggttcatggggataaatgcccttcagaatgcacagccgcctaaagtcagccaagctcagctggagcttcttccgggctttgttccgggtgatgtagttggtggccgagcctcgttcatacttcttcttctcaaggcctcccatcgctccacgttgaggagccgactagggccgcgcgtacagggagctccacttcc

SEQ ID NO: 168679 - DNA, 1019 bp, Homo Sapiens
ggtaccgctccggaattcccgggatatcgtcgacccacgcgtccggcctccagtatgactgtggcctccagtgctcccacgactgcagcctccagtacaactgtggcctccattgctcccacgactgcagcctccagtatgactgcggcctccagcactcccatgacacttgcactccccgcgcccacgtccacttccacaggccggaccccgtccactaccgccactgggcatccatctctcagcacagccctcgcacaagtgccaaagagcagcgcgttgccaagaacagcaaccctggccacattggccacacgtgctcagactgtagcgaccacagcaaacacaagcagccccatgagcactcgtccaagtccttccaagcacatgcccagtgacaccgcggcaagccctgtaccccctatgcgtccccaagcacaaggtcccattagccaggtgtcagtggaccagcctgtggttaacacaacaaataaatccacacccatgccctcaaacaacaaccccagagcccgcccccacccccacagtggtgaccaccaccaaggcacaagccagggagccaactgccagcccagtgccagtacctcacaccagcccaatccctgagatggaggccatgtcccccacgacacagccaagcccatgccatatacccagagggccggtgggccaggcacatcccaggcacggagcaggtgagaatgagccaccgcaggtactgattccactgtgcatcaccaggagctcagggcactagatgcgcacggactcgtgccgccagcccagccgtctgtgtccatgagccctcccggccggggacaacctcttgggggcggtaccggggcctcatccgcctgttgtggcccggccttgagctcaaaaggcccgggtctcagggttgcccatagggggcggggaggccctctcttgtgacacgcctggggagacacaccactacaatgtaaagcgcccttcttctgtggtgttgtttttcctgc

SEQ ID NO: 168680 - DNA, 856 bp, Homo Sapiens
ggcaggcgcgctgcccggagctgcctgggttgcgctgccggccacgtccccgcgccgggcctcaggctccttcctactgtccgagggccaccaggccgccgggggcctgctgcgcccggatgcgtctgttactagagtggagagtctaccttcgtctcacatgtgccacaaaggatggcatggcccgggagtgcctcaccacgtggctttcaccccctgcaaagccagacttcgcccagcgacacagtgtcaagcccacagctctccaaggaggaagatggtccaggctgggagcatccccttagcagcagcctctgatcccttggccaagcaggagggaaccattagcagcctgaggagctggctggctgggagcctcggggaccgcccagccttgctcccagctcacccacaagatgtggacagctcttgtgctcatttggattttctccttgtccttatctgaaagccatgcggcatccaacgatccacgcaactttgtccctaacaaaatgtggaagggattagtcaagaggaatgcatctgtggaaacagttgataataaaacgtctgaggatgtaaccatggcagcagcttctcctgtcacattgaccaaagggacttcggcagcccacctcaactctatggaagtcacaacagaggacacaagcaggacaggatgcctattgagaagctacaaagaaagaaggactaacaccccaggtggacctacttaatcaacgcggatgttatgcggactcagaaatgtgaggggggccgggggccctggcgggaggcctggcccctttctccgtccctttcctttggcccttgaaaccaaacaaggtgcttccaa

SEQ ID NO: 168681 - DNA, 1316 bp, Homo Sapiens
gagaggcgcaggtggatgagtttcccaccgagttgggacgatgtatgcgcaggaggaacaccgcaggaaggagctggtaggcgcaggagaagcactagaacgctttttgatgggcctgaagttcttcctgtaaccgataggtgccccgtgaggccctggccttcatcatcaggagttttggtggggaagtgtcctgggacaaatctttgtgcattggggccacctatgacgtcacagactcccgcatcacccatcagattgtcgaccggcctgggcagcagacctcagtcattggcaggtgctacgtgcagccccagtgggtgtttgactcagtgaacgccaggctccttctccccgtggcagagtacttctctggggtgcagctgcccccacacctttcaccctttgtgaccgagaaggaaggagattacgttccacctgagaagctgaagctgctggctctgcagcggggagaggacccaggaaacctgaatgagtcagaagaggaggaggaagaggacgacaacaacgaaggtgatggtgatgaagagggagaaaatgaggaggaggaggaagatgcagaggctggttcagaaaaggaggaagaggcccggctggcagccctggaagagcagaggatggaggggaagaagcccagggtgatggcaggcaccttgaagctggaggataagcagcggctggcccaggaggaggagagtgaggccaagcgcctggccattatgatgatgaagaagcgggagaagtacctgtaccagaagatcatgtttggcaagaggcgaaaaatccgagaggccaacaagctggcggagaagcggaaagcccacgatgaggcggtgaggtctgagaagaaggccaagaaggcaaggccggagtgagtgcctgcggcccctcacagggctgaggccagcccctagcagctggatgtggcagaggcaggccagaggacctaagtgtgatggaccagagtcacttctcctcctcctttctccagccagccctgacccctcatgctctctggctgggccagtgggcagccctcgcttcccttggatggagctgccctgctggtgcctggtcagagaagaggcctctgtgcccagcctgattctctgctcccaggagccagtgacatgaggtgcagaggcccacccagccccctacctactgcccccattcatcctggctttccacagccccctcccacacagttggacccgtgattctcagggtgctgtgatggggtgagggtagggggagcatttgttattaaatgactggacttttgtgccaattgc

SEQ ID NO: 168682 - DNA, 419 bp, Homo Sapiens
  misc_feature (409)..(409): n is a, c, g, or t
ggctcggacccggtctgcacaaagccaagacgttccatggtatttgtgcaaaagagatgaagacttctcaatatgcttattttgctttgcataattggctctttttaagagcccaagaaagtgtttctaaaattgcttgcactgcccaatcccagtaatgctgctgcctgacagaaacacacacacagccacagttgccaaatcccgtactccttgccaccggcttcctagagcagcgtagacagctggtaaactgaagagcacaactatattcttatgaaggaatttgtacctttggggtattattttgtggcccgtgaccctcgttattgttacagctgagtgtatgtttttgttctgtgggagaatgctatctgggcattatgggtaatatattaatttttgggtnattatttgta

SEQ ID NO: 168683 - DNA, 682 bp, Homo Sapiens
gccggtccgggctgcacaaagacaaactaggtggctctgtgtgaattctagactcgactccattgtagacgtgggagtgcttttagttaagatgttatagaagttcaccccatctgtgttctgttcaatgatcatttctgctttcccccacagctctgtggcctctctgtagagccccttatttacggcattcagtacttgctctgcaaccttagacacctctgccagacctttgtcttcgagaagagacatgctgtacaggtaaggtccccaggagagcaccgaatcaacaggggagatccaggaatcacccaaggcaacccccgcaaagttgcacttgatggtccctcgctgaatggccttataaagctctagaccaatgccagctgccatttttcctccataggactctgagaaaatgtagaatggaactgtctggaattctttgtggcaactgaagaaggtcttcaggagaaccatcatgtctgaagccaccatagccaggtccttggcataggcaccactaccattcacataactgaacccagcgcccacgggattatccacaaataggagactggcagcctggagccaggtggttttccgtggtttgagatcactgtcaaggggcccaatttcctcaaagtttccaaatccagtgctagaaccgcctggaccgccc

SEQ ID NO: 168684 - DNA, 407 bp, Homo Sapiens
tctccgtcgtcagaatctggctgctcgtggaggatttgtacagatcttaacaaaacaaccttttcctaaaaaaccacgtacaatggcaacaaaaaatgttcactcaaaaccaagaacttctaaatcaatagcaaagaatagtgattcaaaaggattacgaaatgtgggaagcacgtttaaagatttcagaggaagtatttctaaacaaagtggtagtagcagtgagcttcttgttgaaatgatgccttccagaaatactttgtcacaggaagtagagattgttgaagaacatgttacttcccttggtctagctcagaatcctgaaaaccagagtagaaagctagacaccttagtaacctcagagggtctctagagaaattggatctacaaaaaataccctttgtgca

SEQ ID NO: 168685 - DNA, 729 bp, Homo Sapiens
tgactcggtccggtttgcacaaagcatgactagaaaaagccccctgcatgatgatccaagaggcaaattccagaaatgggagtagacagtttccgatgaaccctagaatgcttacagactcgcaggattagaagaaacctttatagacacgtacacttatccttgcttgctcggccatcttctcactggttcaagtaaacagaacatgatgcctaccaaagatatcctgacatgcttctgaagagagaggctccttccccctgctcaagaggatgaacctaaaatttgttgcaatgaaggcacagtcactgtaaatatacctcaggaaggaaaccgcagaaaccctaagtcaaccacagttccagtacagaggaagccctcccttggacagaggtcataaggctaaacaagcaatgttccattggacacctctgttaccttaataggcatctcatcacctccctgcccaaacgccactgctattcatactgaataagacattagctagacctggaggcaggtctaatgataatatttcttcacttgagcccccggtttggtcactggcagaaggtatccttgaggggcttctgttatgtcagcagatgttagcctgagaagtagcagcttttgtttccatgacttcttccaaatgaagtcagaagcctccagggttctcagaacatcagagagttctaggggcattgtttcctttgtgcaaaccggacc

SEQ ID NO: 168686 - DNA, 438 bp, Homo Sapiens
tccaaggcatgatgagagtcactggagatgatgacagtgttgcggccttgagcttcctctatgattactacatgggtcccaaggagaagcggatattgtcctccagcactgggggcaggaatgaccaaggaaagaggtactaccatggcatggaatatgagacggacctcactccccttgaaagccccacacacctcatgaaattcctgacagagaacgtgtctggaaccccagagtacccagatttgctcaagaagaataacctgatgagcttggagggggccttgcccacccctggcaaggcagctcccctccctgcaggccccagcaagctggaggccggctctgtggacagctacctgttacccaccactgatatgtatgataatggctccctcaactccttgtttgagagcattcatggggtgccgcccacac

SEQ ID NO: 168687 - DNA, 299 bp, Homo Sapiens
gcttccaagcaggctcaaaaatatcagttgaagaaaaataaatgtgttaaacgaatgaaagtaagttaagcaaatgcttatcatcagagtgaagaggcagtgggggccaatataatttatttacaaagtaggcaaagggagttaggaggaagcagcctggtacggaggaaagtgcattgaagcaggcatcaccagacattagctcatgactggagaagttcttaaaaccatgactctcaggcagaccttcatttctacgctgtacgaatattggccgggtcctttgtgcagcccggact

SEQ ID NO: 168688 - DNA, 360 bp, Homo Sapiens
ccaagcactgttccttacaaggcactcactagtgccacgattgaggactccatgacacaagtcatgtcctctagcagaggacctagccctgatcagtccacaatgtcacaagacatatccactgaagtgatcaccaggctctctacctcccccatcaagacagaatctacagaaatgaccattaccacccaaacaggttctcctggggctacatcaaggggtacccttaccctggacacttcaacaacttttatgtcagggacccactcaactgcatctcaaggattttcacactcacagatgaccgctctatgagtagactcctggagaggtgccatggctaagccatcccttgctgca

SEQ ID NO: 168689 - DNA, 451 bp, Homo Sapiens
ggctcggtcccgggctgcacaaaggctacatagggaaaataaaatgtccttaaagagaggattaagcaagtcaagagccatacttaggaatccaactgttcaagaataggtatcatggtcttcattgttgacttatgataagagatcttccctatcccactcaccctatgctagattaatggttttccttagaagtcttagaataaatttttcttctgtttttcttattgatttgaaaagttgggatatttttcaaataaaaggtatctatgtacacttgagtaaatggactctgggctctttctgttatgaaagctttctgaaggaaatagatgaacaaagaacgtatattttagtttccataagttttttggttgcatctttctaaacagagtccatttttaattcaaaacttttgattttggtgctcactttgtgcagcccggccggc

SEQ ID NO: 168690 - DNA, 321 bp, Homo Sapiens
gttgcacaaagacacatcatgattggaagtttcaaactttcagtctcccacctccagagaggggagaggggctggagatttgtgtcaataatccatcaggcctatgtcaacaagacataatccgttaactatggagttcagggagcttcagggttggcaaacattttgatgtgccaggaaggtgacgcactccagctttatgaagtcagcaagtcctgtgctcaggatgcttctggaccttgccccaggtaccccttcatgtggctgttgttcatctgtatcctttgtagtagccttaaaataaactgttaaacacagaac

SEQ ID NO: 168691 - DNA, 969 bp, Homo Sapiens
  misc_feature (736)..(736): n is a, c, g, or t
  misc_feature (779)..(779): n is a, c, g, or t
  misc_feature (788)..(788): n is a, c, g, or t
  misc_feature (797)..(797): n is a, c, g, or t
  misc_feature (821)..(821): n is a, c, g, or t
  misc_feature (842)..(842): n is a, c, g, or t
  misc_feature (859)..(860): n is a, c, g, or t
  misc_feature (878)..(878): n is a, c, g, or t
  misc_feature (881)..(881): n is a, c, g, or t
  misc_feature (891)..(891): n is a, c, g, or t
  misc_feature (921)..(921): n is a, c, g, or t
  misc_feature (924)..(924): n is a, c, g, or t
  misc_feature (931)..(931): n is a, c, g, or t
  misc_feature (940)..(940): n is a, c, g, or t
  misc_feature (946)..(946): n is a, c, g, or t
tcatatgtctgtgtaatgggttggtgggacacatagtgtctaacacttcagtttctctgctgcttccctcccattgagaagccagtgccagggttgctgtgaagatgggagagcttccgaacccacctcattaaaggatgagaaacccagggtccgagagcaaagggacttgacggtggccgcaagtgcttcaaaggcagagctgggattggaacccaggtgtcatctcgatgggaatgtccagcagtgatgtccaagtgggaatgtgaatgacccgaaggctcaagggactacaggtggctgacagtggtcaaaggctagggggtcaggattcaggcagaggagctctagggggtgtttgccaccctgtgtgaactcccgagactctaccaggggggccgaataggagtaccccagaagggcccaaggggtcctcggggttgacctgactctctggagtcctggatgggtcagtggctgtgggtgtttggggagggcggttcctgctgccaggctggggcagcagaccctcaagacatagttacaaagcctttggtgtcactcagtgtctggcttgccctggggcccagaagggctggtcagtcccgcctctggcaggcaatctggtaggcccatgattcaaggaacagtgacattcagtggtccagtccactccctcagaggaggcgggtccagagggtgaaacaggctgtgttgatgacagactccaggtggnggtaggtggagaccagttggcaggggggctctcgctgcctggngctgactgngaagggctntcggaaaaccattgtagagacgtntttcctaagtgggagccaganccctagcacaaagcaannaagtgaactttctgattnagnacaaccaggnactgagttcccaagtttggcctttggaaantgnctacagnttttggggnaagcgnttttaggaaaactttgaacaagt

SEQ ID NO: 168692 - DNA, 1009 bp, Homo Sapiens
tcatggaacgccaagaggagtctctgtccgcgcggccggccctggagaccgaggggctgcgcttcctgcacaccacggtgggctccctgctggccacctatggctggtacatcgtcttcagctgcatccttctctacgtggtctttcagaagctttccgcccggctaagagccttgaggcagaggcagctggaccgagctgcggctgctgtggaacctgatgttgttgttaaacgacaagaagctttagcagctgctcgactgaaaatgcaagaagaactaaatgcgcaagttgaaaagcataaggaaaaactgaaacaacttgaagaagaaaaaaggagacagaagattgaaatgtgggacagcatgcaagaaggaaaaagttacaaaggaaatgcaaagaagccccaggaggaagacagtcctgggccttccacttcatctgtcctgaaacggaaatcggacagaaagcctttgcggggaggaggttataacccgttgtctggtgaaggaggcggagcttgctcctggagacctggacgcagaggccccgtcatctggcggatgaggctaagaatcttgttagtgtcacttttgacattagcaagatgaacccttaaccctcgattcaattgccttacgcacgcttttcacagtgactagccaaggggaggtggggttgatttctgttcctaactacacctgcatatgtcagggctccagtcagcaaaaggtatagatgttgcctctaggcatgaggtcattggtcacattctacttggagacagtgattgcattcattgatttcatgcgttaattgctagttggtaggtaaaggcctctagatgattagcaatcttgataaaagacgcctagtaatgttcttttgaggttagaaacccttgctgctaggacagtctctgtgacaggttgcgttgaatgatgtcttccttatcaatggtgagcccaccagtgaggattactgatgatgacagtcaccgggggccggc

SEQ ID NO: 168693 - DNA, 552 bp, Homo Sapiens
ttgggggggtgggaggagctgtcacaaagaaggggagattcaggaatggctccaggacacgtccctttactctgccaagatcaactcaaaagaccacaactgtttcatgatgctggtgaatacacaattctgtatggcactcactgatactgtcacctgagaggaagacgggggaagagacagagtatgggcttaaagaaacaagactgtataataaatacagattaaaaaagaaaaatcgccaccatctcccctgttggcctgattaccccgatcctgctatgtaacacagcaatccctcccctggagaccagaggggcttggcactgtggtggaagccagagcgagcaggcccttaggaaagaaggcaggaacaggaactggcttcaccagaaaagctagaccctcggactcctcctggaaactctcagaagggagggttatggccctctttgtcccttcatatttctggacaaagaccaccaacccaatatcagccccataaagagcttttagaaaaacagcataagcttgggatgacaactccgggta

SEQ ID NO: 168694 - DNA, 481 bp, Homo Sapiens
tcgagctcggccccggtagactgtcatccaacttcaactcgttgactttatctatcagtccttcaatgtcgcccataccaagaagttgctaataaaaggctgtgttttgaaaggttcaaagtcatctatatgttcccctgtaccaatgaaaataatcggactttttgtggcagcgactgcactgagtgcaccacctccttttgcatggccatcaagttttgtcactattactgaggctacatctactttatctttaaaagccttagcctgggcttcacaagcctgcccaatggaggcatccatcacataaacaatgttatcaggttgtatagcattagcaacttgaagcatttcttcaaacaaagagtcttcttgtttgtggcggccacttgtatcaacaataataatttcaaaattttcatttttaaatttctctactccttcagaagcaatgatgacagtctaccggggaccgagctcc

SEQ ID NO: 168695 - DNA, 972 bp, Homo Sapiens
tgggggctacaccttcacagccaccccagaggacttccctaaaaagcacaaggcgcctgtcatcgacattggcattgctaacacagggaagtttatcatgactgcctccagtgacaccactgtcctcatctggagcctgaagggtcaagtgctgtctaccatcaacaccaaccagatgaacaacacacacgctgctgtatctccctgtggcagatttgtagcctcgtgtggcttcaccccagatgtgaaggtttgggaagtctgctttggaaagaagggggagttccaggaggtggtgcgagcctacgaactaaagggccactccgcggctgtgcactcgtttgctttctccaacgactcacggaggatggcttctgtctccaaggatggtacatggaaactgtgggacacagatgtggaatacaagaagaagcaggacccctacttgctgaagacaggccgctttgaagaggcggcgggtgccgcgccgtgccgcctggccctctcccccaacgcccaggtcttggccttggccagtggcagtagtattcatctctacaatacccggcggggcgagaaggaggagtgctttgagcgggtccatggcgagtgtatcgccaacttgtcctttgacatcactggccgctttctggcctcctgtggggaccgggcggtgcggctgtttcacacactcctggccaccgaaccatggtggaagaaatgcaggcccacctgaaacgggcctccaacgagagcacccgcccataggctgcaccaacagctgaacccaggcccaagaaaaccttgaagagcccggggtgccctgaaaaaaatgaactctggggaggggcccgggcgcacaaggatttgaggagggaagggaatcctgggccctcctccctggagactggctgtgcaattttttcctctcccagggggggaaaacccttttcaggaaagggagtcctttca

SEQ ID NO: 168696 - DNA, 632 bp, Homo Sapiens
gagagtcgcgcagctgtgttcgcggactcaggtggaaggaatttcttctcttcgttgacgttgctggtgttcactgtttggaattagtcaagtttcgggaatcaccgtcgctgccatcaacatgtcggtcccaagcgctctcatgaagcaaccgcccattcagtctacggctggggccgtcccagttcgcaatgagaaaggtgagatttcaatggaaaaagtgaaggtaaagcgttatgtgtccggaaaaaggccagactatgcccctatggagtcctcagatgaggaggatgaagaatttcagttcattaagaaagccaaagaacaagaagcagagcctgaggaacaggaggaggattcatccagtgacccccggctacggcgtttacagaaccgtattagtgaagatgtggaagagagattggctcgacatcgaaaaatagtggaacctgaagtggtaggagagagtgactcagaagtagaaggagatgcttggcgcatggaacgagaagacagcagtgaagaagaggaggaggaaattgatgatgaggaaatagagcggcggcgtggcatgatgcgtcagcgagcacaggagagaaaaaatgaagagatgacagtcatccgggccgagc

SEQ ID NO: 168697 - DNA, 329 bp, Homo Sapiens
cagccggacccggatactgtcatctgtcagcttagtataggcttccatgtcgtcaattgctgtagaaatgcgatacttttttcctccagcacctgtaatctctatgtagtcatcggcgttgaggaaagcatctgtaatcatggtatcaataatgttgccaactttgtgttgataagctctacggtgtaaagagttgcgagtgtggaacatgtcatacagatttccaacttccttatctctagcacaaatacgcaactcatagtctacttcacagacacgggcaaacttaataaagcgcttgtaatcaaaattattttggattccaagat

SEQ ID NO: 168698 - DNA, 593 bp, Homo Sapiens
ctcggtcaccccggtgactgtcatccttggcaatgatgacttccttccgcaggatcttcatggcgtagtagcggccagtggccttctcccgcaccaggatgactttgccaaaggttcccttgccaaggagtttgagatagtcgaagtcattcatggtcactttagcccgtgccttgctgaccgccacttccatctcctcagtcgtggaggagtcactgggggagccacacttgtagtccatggggtcctcgcctggggcccgctgcttgaggctgttggcgaccatctggatggcccgcatccactcctccctctcgtctggagaatccacgtggaaggtcctctcgatgactgtggtccactgcaggcagagtatgacaaaggtgtagggtcgcggcctctcggtcttcatcagctggcattctgctacggagaagttgtttaaggggggtagagtctgatcaggggcctcgggcctctccttgtacccaatgaaggagccgtcgctcttcagcaggaagtaccgtggcctccaggtcttgatgtattcaccacgcttgtggagcccctcgtgccgaattcgccacccaggc

SEQ ID NO: 168699 - DNA, 1191 bp, Homo Sapiens
  misc_feature (181)..(181): n is a, c, g, or t
tggaactgagggcccggggccccagagaagatgccagatagtctgtgaacagacagccccagggcggctggctgacagagtgaggggacacatggggcaggacctgcccgccccccccaatgccacattgcgcatagctgcagaagtctttaccattttccctacgtgaatcggattgttntgagggctgaggccacaccccggagaacaaactggatgaaataaattaaaaccccgcaggatagttttctcccctaccccgctgcgggggagggtgctgcccacagcacaaaaacgtctttccatctgggctcgagaggacagcgtggcttctctcaaatgcacccgagaaataaaaaccattaaatacagatcatggcacgagcccgcctctccatccctccaagctatcgtccagcgcagtccaccgccgcctcaggccgtgccgctggccgagtaggagaactggcggaagtggggcctgcgctcgctgtccacacactccatgctgtcatcttggtcaggtggtgtgatggtgatcatctgggccgtgaactcctcatcaaaatacctggtgtcagtctccgacgtgacctggggcttgaagggtgggctgagcttcttctcgtacacgtgctgccacacgataccggcaaagaagcgatgctgcatgatctccttggcgtcctcggagcccccgccaagcctctgcttggggtccttcttgagcagccctgaaagcaaggacttggcctcgggaccaagcgtgcgcgggaagcggatctcctccatgaggatgagctcaaaaagcttctcatggtcctggttgtagaagggcaggcgaccgcacatcatctcgtacatgaccacgcccagcccccaccagtccactgcacgcccgtagtcattgtcctccagcacctcgggggccaggtactcaggtgtgccgcaaaaggtcttcatggtggcacggtccttgatcccctccttgaacagcccgaagtctgtgatcttaaatgtgcccgtccttgtccagcatgaggttctccagcttgaggtcccggtacaccacgttcttctccgagtgcaggtagtccaggctgacacaatctcagcgccatagaagcggggccggtcctccggagaaacacacgttcccgggacaggtgcaagaacagctcgccccggtgg

SEQ ID NO: 168700 - DNA, 569 bp, Homo Sapiens
ttcaaccttggggcacgatgtcaccccaccatggtatctggccaagaccactctcctggggtgggcgggcaacagtagcccccccaggactaaaggctcgtctttgaggacctcaacgggagctggggaccttgggattggacccagggatggggaatggcccgggtttacccagtgggacgaggggcaaggttttaatttgtcatggggactaagttgttcaaacgcattttgggggtcactaaactttgtgacaggaaagccctcccccttccccttctgtgtcacagttcttggtgactgtcccaccgggagcctccccctcagatgatctctccacggtagcacttgaccttttcgacgcttaacctttcccctgtcgccccaggccctccctgactccctgtgggggttggccatccctgggccccgtccacgcctcctggccagacgctgccgctgccgctgcaccacggcgtttttttacaacattcaactttagtatttttactattataatataatatggaaccttccctccaaattcttcaataaaagttgcttttcta

SEQ ID NO: 168701 - DNA, 964 bp, Homo Sapiens
  misc_feature (116)..(116): n is a, c, g, or t
  misc_feature (123)..(123): n is a, c, g, or t
  misc_feature (135)..(135): n is a, c, g, or t
  misc_feature (191)..(191): n is a, c, g, or t
  misc_feature (279)..(279): n is a, c, g, or t
  misc_feature (347)..(347): n is a, c, g, or t
ctcccccggtggggaacagtcccacaaagaacctgtgacaccaaaaggggaaaggggggaggggctttccctttcccaaaagattaaaaaacccccccaaaatgcatttggaccancataatnccgcaataacanaatttaacccttgctcctctgtccccactgggtaaacctggccccatccccccatncctggtcccatccagggggcccagcctccgatgacgtcctcagagacacggccttagtgctggggggctgctgtgtgcctgccacccncaggagagggtgctggccagcataccatagtgaggttgcatctggtgccaccaggttgaactgaggcncagggccccagagagatgacagatagctggtgacagacagcccagggcggctggctgacagagtgaggggacacatgggcaggacctgcccggccccccaatgccacattgcgcatagctgcagaagtccttaacatttccctacgtgaatcggattgttctgagggctgaggccacacccggagaacaaactggatgaaataaattaaaacccgcaggatagttttcttccctaccccgctgcgggggagggtgctgcccacagcacaaaaacgtctttccatctgggctcgagaggacagcgtggcttctctcaaatgcacccgagaaataaaaaccattaaatacagatcatggcacgaggccgcctctccatccctccaagctatcgtccagcgcagtccaccgccgcctcaggccgtgccgctggccgagtaggagaactgggggaagtggggcctgcgctcgctgtccacacactccatgctgtcatcttggtcaggtggtgtgatggtgatcatctgggccgtgaactcctcatcaaaatacctggtgtcagtctccgacgtgacctggggcttgaagggtgggctgagcttcttctcgtacacgtgctg

SEQ ID NO: 168702 - DNA, 887 bp, Homo Sapiens
  misc_feature (769)..(777): n is a, c, g, or t
gtatttaatggtttttatttctcgggtgcatttgagagaagccacgctgtcctctcgagcccagatggaaagacgtttttgtgctgtgggcagcaccctcccccgcagcggggtagggaagaaaactatcctgcgggttttaatttatttcatccagtttgttctccgggtgtggcctcagccctcagaacaatccgattcacgtagggaaatgttaaggacttctgcagctatgcgcaatgtggcattggggggccgggcaggtcctgcccatgtgtcccctcactctgtcagccagccgccctgggctgtctgtcaccagctatctgtcatctctctggggccctgggcctcagttcaacctggtggcaccagatgcaacctcactatggtatgctggccagcaccctctcctgggggtggcaggcacacaacagccccccagcactaaggccgtgtctctgaggacgtcatcggaggctgggcccctgggatgggaccagggatgggggataggccacggtttacccagtgggacagaggagcaagggttaaacttgttattgtggattatggtgtgcaaatgcattttggggggttttaatctttgtgacaggaaagccctccccccttcccttctgtgtcacagttcttggtgactgtcccaccgggagcctcccccctcagatgatctcttcacggtaacacttggacttttcgacgcttaacctttccgctgtcgccccaggccctccctgactccccggtnnnnnnnnnccatccctggggccccctccacgtttcctggcccaaacgcttgccgcttgccccttgtaccaccgggggtttttttaaaacacttaaagtttaagaatttttacctattc

SEQ ID NO: 168703 - DNA, 978 bp, Homo Sapiens
cgccccccccaaatgccaccatggcgcatagcttgccagaaagtcccttaaacatttccccttaccgtggaatcgggaatgtttttggaggggcggaagggccaccacccggaggaacaaaactgggatgaaaataaaataaaaacccccacgggatagtttttcttccctaccccccctcggggggaagggtgttgccccccagcacaaaaaacgtctttccatctgggctcgagaggacagcgtggcttctctcaaatgcacccgagaaataaaaaccattaaatacagatcatggcacgaggccgcctctccatccctccaagctatcgtccagcgcagtccaccgccgcctcaggccgtgccgctggccgagtaggagaactgggggaagtggggcctgcgctcgctgtccacacactccatgctgtcatcttggtcaggtggtgtgatggtgatcatctgggccgtgaactcctcatcaaaatacctggtgtcagtctccgacgtgacctggggcttgaagggtgggctgagcttcttctcgtacacgtgctgccacacgataccggcaaagaagcgatgctgcatgatctccttggcgtcctcggagcccccgccaagcctctgcttggggtccttcttgagcagccctgaaagcaaggacttggcctcgggaccaagcgtgcgcgggaagcggatctcctccatgaggatgagctcaaaaagcttctcatggtcctggttgtagaagggcaggcgaccgcacatcatctcgtacatgaccacgcccagcccccaccagtccactgcacggccgtagtcattgtcctccagcacctcgggggccaggtactcaggtgtgccgcaaaaggtcttcatggtggcaccgtccttgatcccctcctcgtcgggaaatcgcaacccagccatcgctcgcgtaaaattatgcagccggtcgcgctctatgaagcaggg

SEQ ID NO: 168704 - DNA, 945 bp, Homo Sapiens
  misc_feature (894)..(894): n is a, c, g, or t
acgaggggagtacatcaagacctggcggccacgctacttcctcctcaagaatgatggcaccttcattggctacaaggagcggccgcaggatgtggaccaacgtgaggctcccctcaacaacttctctgtggcgcagtgccagctgatgaagacggagcggccccggcccaacaccttcatcatccgctgcctgcagtggaccactgtcatcgaacgcaccttccatgtggagactcctgaggagcgggaggagtggacaaccgccatccagactgtggctgacggcctcaagaagcaggaggaggaggagatggacttccggtcgggctcacccagtgacaactcaggggctgaagagatggaggtgtccctggccaagcccaagcaccgcgtgaccatgaacgagtttgagtacctgaagctgctgggcaagggcactttcggcaaggtgatcctggtgaaggagaaggccacaggccgctactacgccatgaagatcctcaagaaggaagtcatcgtggccaaggacgaggtggcccacacactcaccgagaaccgcgtcctgcagaactccaggcaccccttcctcacagccctgaagtactctttccagacccacgaccgcctctgctttgtcatggagtacgccaacgggggcgagctgttcttccacctgtcccgggaacgtgtgttctccgaggaccgggcccgcttctatggcgctgagattgtgtcagccctggactacctgcactcggagaagaacgtggtgtaccaggaactcaagctggagaacctcatgctggacaaggacgggcacattaagatcacagactttcggcttgggcaaggaaggggatcaaaggacgggtgccaccatgaaagaccttttgncggcacacctgagtaccctgcccccccaaaggtggctggaaggacaatgac

SEQ ID NO: 168705 - DNA, 905 bp, Homo Sapiens
ccaagcccaagcaccgcgtgaccatgaacgagtttgagtacctgaagctgctgggcaagggcactttcggcaaggtgatcctggtgaaggagaaggccacaggccgctactacgccatgaagatcctcaagaaggaagtcatcgtggccaaggacgaggtggcccacacactcaccgagaaccgcgtcctgcagaactccaggcaccccttcctcacagccctgaagtactctttccagacccacgaccgcctctgctttgtcatggagtacgccaacgggggcgagctgttcttccacctgtcccgggaacgtgtgttctccgaggaccgggcccgcttctatggcgctgagattgtgtcagccctggactacctgcactcggagaagaacgtggtgtaccgggacctcaagctggagaacctcatgctggacaaggacgggcacattaagatcacagacttcgggctgtgcaaggaggggatcaaggacggtgccaccatgaagaccttttgcggcacacctgagtacctggcccccgaggtgctggaggacaatgactacggccgtgcagtggactggtgggggctgggcgtggtcatgtacgagatgatgtgcggtcgcctgcccttctacaaccaggaccatgagaagctttttgagctcagcctcatggaggagatccgcttcccgcgcacgcttggtcccgaggccaagtccttgctttcagggctgctcaagaagaacccaagcaaaaggcttggcgggggctccgaggacgcccaggagatcatgcagcatcgcttcttttccccggaatcgtggtggcagcacgtggtacgaagaaggaagctcagccccaccctttcaagccccagggtcaacgtcggagactgtacaccccgg

SEQ ID NO: 168706 - DNA, 825 bp, Homo Sapiens
  misc_feature (787)..(787): n is a, c, g, or t
gtttgggccaggaaggccttgagggggccccagggattggccaacccccacaggaagtcaaggaagggcctggggcgacaacggaaaggttaaagcgtcgaaaaaggtcaagtgctaccgtggagagatcatctgagggggaggctcccggtgggacagtcaccaagaactgtgacacagaaggggaagggggagggctttcctgtcacaaagattaaaaacccccaaaatgcatttgaacaacataatacacaataacaaatttaaaccttgctcctctgtcccactgggtaaaccctggcccatcccccatccctggtcccatcccaggggcccagcctccgatgacgtcctcagagacacggccttagtgctggggggctgctgtgtgcctgccacccccaggagagggtgctggccagcataccatagtgaggttgcatctggtgccaccaggttgaactgaggcccagggccccagagagatgacagatagctggtgacagacagcccagggcggctggctgacagagtgaggggacacatgggcaggacctgcccggccccccaatgccacattgcgcatagctgcagaagtccttaacatttccctacgtgaatcggattgttctgagggctgaggccacacccggagaacaaactggatgaaataaattaaaacccgcaggatagttttcttccctaccccgctgcgggggagggtgctgcccacagcacaaaaacgtctttccatctgggctcgagaggacagcgtggcttctctcanaatgcacccgagaaataaaaaccattaaatacagatca

SEQ ID NO: 168707 - DNA, 940 bp, Homo Sapiens
  misc_feature (61)..(70): n is a, c, g, or t
atattttatatttttataattagttaaaaaatttctttacaaaggttgaaattgtttggtnnnnnnnnnnccccccggtggttgcaaagcggcaaagccggcaaggtttctgccccagggaaggcgtgaaaggggcccccagggaatgggcccaccccacaccaggggagtcaagggaggggcctgggggcgaccagcggaaaagtttaagcggtcgaaaaaggtcaaagtgcttcccgtggagagaatcatttgagggggagggtcccgggtggggacagtcaccaggaactgtgacacagaagggaaagggggagggcttccctgtcacaaagattaaaaacccccaaaatgcatttgaacaacataatacacaataacaaatttaaaccttgctcctctgtcccactgggtaaaccctggcccatcccccatccctggtcccatcccaggggcccagcctccgatgacgtcctcagagacacggccttagtgctggggggctgctgtgtgcctgccacccccaggagagggtgctggccagcataccatagtgaggttgcatctggtgccaccaggttgaactgaggcccagggccccagagagatgacagatagctggtgacagacagcccagggcggctggctgacagagtgaggggacacatgggcaggacctgcccggccccccaatgccacattgcgcatagctgcagaagtccttaacatttccctacgtgaatcggattgttctgagggctgaggccacacccggagaacaaactggatgaaataaattaaaacccgcaggatagttttcttccctaccccgctgcgggggagggtgctgcccacagcacaaaaacgtctttccatctgggctcgagaggacagcgtggcttctctcaaatgcacccgagaaataaaaaccattaaatac

SEQ ID NO: 168708 - DNA, 390 bp, Homo Sapiens
cggtgactgtcatcctcccccaggtgctgtgagtgcctccactggcacctcgacatcacactgcacacacatccctcctgtccctgccaccacctcccttcgatcccatccctctgccggtggccctgtgtgagtcttgcctccccagatgggttatttgattctgatccagtgtgtcctgccagggaggagccatgtagactccatgaaatccgtctccatttctctgcagtctctaggacatagatttgctaccatctcccccatcagactgggatcgccaagacaaaaccggcccctatctcctccattagactaggaaccctaaggctaggatcatatattctccatcagattgaatttggaggacaagaaccatggaactcgtca

SEQ ID NO: 168709 - DNA, 344 bp, Homo Sapiens
ggtaccccggctgacgtcatcgagtttggagtacaactgtggagttgccctggagattatggtggggttttctgggcttcacactagggttgctctggggtttttatagggttactccaaaaggccacaggcctgtgctactacctggcccagaggaagggagggagataaggctgtaaaagaaagctagggagtttggagggggaaggacggaggtgacccagcttcctagaggaggggataatttgaagttgcagagcagcaaggctctgctctaccccatcttggtattcaagtcccaaaccctggccaacagcctcctttgttggcagtgagggtctggg

SEQ ID NO: 168710 - DNA, 609 bp, Homo Sapiens
aacaaaggtcttcactgcctcatctgctccagcagagaatcacatcttacctgggcaaagcattgatctggtagccttgctccagaagcctgttcctcacagtcaagcctcagaagccaactcctttgaaacttcccaacagcagggctttggccaagcccttgtcttcacaaattcgctacacaacaatcagatggcaccagggactggcagctccactgccgtcaaactcctgttctcctcagagcctgtcatccgtccttggctcaggatttggagagcttgcaccacacaaaaatggccaacatcaccagctcccagattttggaccagttgaaagctccgaattttgggccatgtttaccaccaccccaagtacacagcagaatagtacaagtcaccctacaactactacttcttgggacctcaagcccccaacatcccagtcctcagtccatcagtcatcaagacttcaaatctcaacctgagccatccccagatcttagccacatgaaccagcgacaacagcaccagagccaggcagtcactgttcctcctcctggtttggagtcctttccttcccaggcaaaacttcgagaatcaacacct

SEQ ID NO: 168711 - DNA, 380 bp, Homo Sapiens
tgtagactgtcatcctaatgcaaaagcagccacacacaatatacaaacatatggccacagctgtgttccaatgaaaccttatttacagatacaggtggtgggcaagattaggcccacaggcagtagtttgcgtgacccctggacctagggtaaagttcaaccaaaatctgttaagcacgagatatacaattctgccattgttaagctctgtgtttaaacagtcctctcaattgctccagggttggttgcggcctttgaaaaattgagtaggatgagatgactatcaccagcatctcttctaaatgtcagctttgatgatgccaagaaaaaagcattgctggcttcattgatcagttactccttcattgatgagatgacag

SEQ ID NO: 168712 - DNA, 503 bp, Homo Sapiens
cccgtgagactgtcatctcttggtgaatttgcgcactgctgtgagtgtgtcctgcacaatacccatgacaggccgattgctctggggggtgacaatcatgcgaggaaccatggccagctcctggatctctgctcgcgtctccagagactgtggcaggtgcaagttcatctcatccccgtcaaagtctgcattgtacggagttgtcacgctaagattcaagcgaaaggtagaccatgggagaatgcggacccgatgccccatcatggacattttgtgcagagttggctgccggttgaagataacaatgtccccatcacacatgtgccgttccaccttatagccggtctgcaggtgaaggtcactgggcttggggtggaaacgcaagtcaatgcgatcaccattgtctcggatgatgtacttggcgcctgggtactggctgttccccctgagcactagttcttgaagtctgtcaatgttgaagggggggtatgaacaacagtgca

SEQ ID NO: 168713 - DNA, 237 bp, Homo Sapiens
  misc_feature (195)..(195): n is a, c, g, or t
tgttgaacaaaaggcacacatcagagagacagttgcaaactcagaatactgcgttatgggcaaaactaactggtccacaagagaaaatgagagactcgatgtggctgccaggaacacctgggcctaggcaagaacacaagaggcttctgggggtggggaggaaataggtctcgctgaaggtgacagatgttaaanacagatcagcaggttggaagtcgcaatagattagtgatttat

SEQ ID NO: 168714 - DNA, 591 bp, Homo Sapiens
acaacccttcgacggtgttctagcacttcagcgtgcaagctgggctcctgttacatactaggacagaccacccacagcacgctgctgccaaaccacctccactcctccggactgccagccaactacatcattctgcccacagacctacgctaccactgccatcgccatccaccgcatttcaccaacagactgtggctacctagtagatgtggactcacctcggaggtatccgagctggacacagcccctggacagtgatccagacagctggccgtcccccaaggaagcctgtcaccttcagcgagacccatttcctccccaatccccagagacctcttgtgttcctgccacatagctgccagggcttaagtgcgcctggcaaccaaatcgaatctctcattttctcctgtggaccagttagtatagcctagaatcctgtttacttctgaatttgcagctgtctctctgatgggtgcctttggttcaacacagtaagccctgctaccttccctgctctaatacactacctgtacaaaggttttttccttatatttaataaatgtcagacactattaagctttgaaagcttaa

SEQ ID NO: 168715 - DNA, 295 bp, Homo Sapiens
taaatgagctcggtacggcatgtgctgtaggccagcgaaactccgcggagcgcgcgcggcacgatggacggtcgggtgcagctgatgaaggccctcctggccgggcccctccggcccgcggcgcgtcgctggaggaacccgattccctttcccgagacgtttgacggagataccgaccgactcccggagttcatcgtgcagacgggctcctacatgttcgtggacgagaacacgttctccaacgacgccctgaagacctacgctggcctacagcacatgccggtaccgagctgat

SEQ ID NO: 168716 - DNA, 443 bp, Homo Sapiens
  misc_feature (11)..(11): n is a, c, g, or t
actacaatcantctgcccaaaaaacctgcgctgccaaaagccatcgccatccatcgcatcccaccgacagactgctgctccctagtgatctggactcacctcggaggtatctgggctggccacagtccctggacagtgatccagacagctggccgccccccaagggatctgtcaccttcagcgagacctatttcctccccacccccagaaacctcttgtgttcttgcctaggcccaggtgttcctggcagccaaatcgagtctctcattttctcttgtggaccagttagttttgcccataacgcagtattctgagtttgcaactgtctctctgatgtgtgccttttgttcaacacagtaacccctgcattctgctctgctctaatacactacctggagaaagtcttttccttattttcaataaatgtcagacattattgaaaa

SEQ ID NO: 168717 - DNA, 1322 bp, Homo Sapiens
gcttctgtatcctcgcgctccgttcggtcgcggcacgtaatttctaaataaggtggttcgcgccccctctttctttaaaaaaattagagggagaaaacacaccctttttgttcccagggttaagttttattaagaacccagcgggaaagggaacccacggggcctttccttgtgttggaaccaaaaaggccaccccatccagaggagcccagctgcaaaattccagaaggaaaaccaggatttttaggcaaaacctaacttgttccacaggagaaaatgagaggattcgatttggttgccagggcacacttaagccctggcagctatgtggcaggaccacaagaggtctctggggatggggaggaaatgggtctcgctgaaggtgacaggctccttgggggacgcccagctgtctggatcactgtccaggggctgtgtccagctcggatacctccgaggtgagtccacatcactaggagccacagtctgttggtgagatgcggtggatggcgatggcagtggtagcgtaggtctgtgggcagaatgatgtagttggctggcagtctggaggagtggaggtgggttggcagcagcggctgtgggtggtctgtccagtatgtaacaggagcccagcttgcacctgaagtgcaggacagcgtccaaatgtgcatggaggggctgggctggcaaaagagggcggaggcagcgcgctctagagtgcggcccaggagctgcagcaggagcctggagcgctattcctggaacaaaggcaagcactacgcgggaggggacaggagcgcaggggacatcgcggcggctcgagggggagggaggcgcggagggagggcgcctgtggagaccctagcggtggccactggcacagcgaaccctccccagagcacccgcccccaggcaccaagggtctcccggcctagaagtcctcgtcctcctcccatccaaagacccgcttcatctcggccagaaagccccggtaatcattgagcagggggctctccttcttgatgtaggggatcacccactgcagggcgggccctgtgaggcgggtgatgaggaacgtcaccttcagggcgtcgctggagaacgtgttctcgtccacgaacatgtaggagcccgtctgcacgatgaactccgggagtcggtcggtatcgccgtcaaacgtctcgggaaagggaatcgggttcctccagcgacgcgtcgcaggccggatcggcaaggccaggagggcctttatcagctgcacccgaccgtccatcgctgctcctcgcttcgctggacgtcaatgggctccacccggctctgca

SEQ ID NO: 168718 - DNA, 983 bp, Homo Sapiens
  misc_feature (905)..(905): n is a, c, g, or t
ggtacggtccggaatttcgggatatcgtcgacccacgcgtccgctccctccgcgcctccctccccctcgagccgccgcgatgtcccctgcgctcctgtcccctcccgcgtagtgcttgcctttgttccaggaatagcgctccaggctcctgctgcagctcctgggccgcactctagagcgcgctgcctccgccctcttttgccagcccagcccctccatgcacatttggacgctgtcctgcacttcaggtgcaagctgggctcctgttacatactggacagaccacccacagccgctgctgccaacccacctccactcctccagactgccagccaactacatcattctgcccacagacctacgctaccactgccatcgccatccaccgcatctcaccaacagactgtggctcctagtgatgtggactcacctcggaggtatccgagctggacacagcccctggacagtgatccagacagctggccgtcccccaaggagcctgtcaccttcagcgagacccatttcctccccatccccagagacctcttgtgttcctgccacatagctgccagggcttaagtgtgcctggcaaccaaatcgaatctctcattttctcctgtggaccagttagttttgcctagaatcctgttttcttctgaatttgcagctgtctctctgatgggtgccttttgttcaacacagtaagccctgctcccttccctgctctaatacactacctgtacaaaggttttttccttatttttaataacgtgtccgacctttgactgaacaacaagaacggggggcgctcagagttccccggggcccagcttcccgtaccagcttctggtccagggcccttgcgagcatataccagcggcccgttaacagcggtggcacggccncggcccggccggccccctgggggactggcccccggtagggcggcatattcgtggacgcagccggatgcgattaccccg

SEQ ID NO: 168719 - DNA, 925 bp, Homo Sapiens
gggacttaagttgcccctatcttatgtgaactttatagaaccaggttgtgttgataaaaacaggcagcggctggtacggtcggaattccgggatatcgtcgaccacgcgtcgctcctggccgggccctcggccgcggcgcgtcgctggaggaacccgattccctttcccgagacgtttgacggagataccgaccgactcccggagttcatcgtgcagacgtgctcctacatgttcgtggacgagaacacgttctccaacgacgccctgaaggtgacgttcctcatcacccgcctcacggggccagccctgcagtgggtgatcccctacatcaggaaggagagccccctgctcaatgattaccggggcttcctggccgagatgaagcgggtctttggatgggaggaggacgaggacttctaggccgggagaccccttgggcctgggggcgggtgctctgggaagagttcgctgtgccagtggccaccgctagggtctcgcacaggcgccctccctccgcgcctccctccccctcgagccgccgcgatgtcccctgcgctcctgtcccctcccgcgtagtgcttgcctttgttccaggaatagcgctccaggctcctgctgcagctcctgggccgactctagagcgcgctgcctccgccctcttttgccagcccagcccctccatgcacatttggacgctgtcctgcacttcaggtgcaagctgggctctgttacatactggacagaccacccacagccgtgctgccaacacaacttccatcctccagactgccagcaatacatcattctgcccacagaactaagctacattgcatcgccttcaccgatctacaacagatgtgggtctatgattggctccctcggaggttcaactgaacagccggccggtcaaagtgcgtccaggcg

SEQ ID NO: 168720 - DNA, 1135 bp, Homo Sapiens
cgctggtacggtccggaattttcgggatatcgtcgacccacgcgtccggcgaggagcagcgatggacggtcgggtgcagctgataaaggccctcctggccttgccgatccggcctgcgacgcgtcgctggaggaacccgattccctttcccgagacgtttgacggcgataccgaccgactcccggagttcatcgtgcagacgggctcctacatgttcgtggacgagaacacgttctccagcgacgccctgaaggtgacgttcctcatcacccgcctcacagggcccgccctgcagtgggtgatcccctacatcaagaaggagagccccctcctcaatgattaccggggctttctggccgagatgaagcgagtctttggatgggaggaggacgaggacttctaggccgggagaccctcgggcctgggggcgggtgctctggggagggtccgctgtgttactggccgccgccagggtcgccaccggcgccctccctccgcgcctccctccccctcgagccgccgcgatgtcccctgcgctcctgttccctcccgcgtagtgcttgcctttgttccaggaatagcgctccaggctcctgctgccgcccctgggcctcactctggagcgagccgccgccctctccttccagccagccagcccctcccatgtacatttggacgctgtcctgcgctccagctgcaagctgggctcctgttacacactggacagaccacccactgccgccgctgccaagccctctcctccccaccagactgccagacgactacatcattctgcccacagacctgcgctgccacagccatcgccatccatcgcatcccaccgacagactgctgctcctagtgatctggactcacctcggaggtatctgggctggccacagtccctggacagtgatccagacagcttggcagcccccaagggatctgtcaccttcagcgagacctatttcctccccaccccaagaaacctcttgtgttcttgcctagggcccggttgtccctggcagccaaatcgagtctctcatgttctctggtggccagtaggtttgccataacgcagattctgagtttgcagaaactacaataaacacaaagggcgccgccaaagatcacc

SEQ ID NO: 168721 - DNA, 792 bp, Homo Sapiens
agcggagccagcgcggcgcgatggaaggtcgagtgcagctgatgaaggccctcctggctcggccctccggcccgcggcgcgtcgctggaggaacccgattccctttcccgagacgtttgatggcgataccgaccggctcccggagttcatcgtgcagacgagctcctacatgttcgtggacgagaacacgttctccaacgacgccctgaaggtgacgttcctcatcacccgcctcacggggcccgccctgcagtgggtgatcccctacatcaagaaggagagccccctcctcagtgattaccggggcttcctggctgagatgaagcgggtctttggatgggaggaggacgaggacttctaggccgggagaccctcgggcctggggacgggtgctctgggaagggtccgctgtgttactggccgccgccagggtcgccaccggcgccctccctccgcgcctccctccccctcgagccgccacgatgtcccctgcgctcctgtcccctcccgcgtagtgcttgcctttgttccaggaatagcgctccaggctcctgctgccgcccctgggcctcactctggagcgggctgctccgccctctcgtgacagctcagccctcccatgcacattgggacgctgtcctgcgctccagttgcacaaaagctgagctcctggttacacactgacagaccactgacagccgccgttgccaacgccactcctcctcaccagacttccagaccgactacatcatggctgcccaagaacctgcgctgcactggcatcggcatcat

SEQ ID NO: 168722 - DNA, 509 bp, Homo Sapiens
ggacatgccgtcaccaggctggcgggaattgctgtgccttccagcagcttcatgatatgctaactccagcagctctgcagaggagtgagttggatccctctgcccgctgccttgtagctccgccatattctgtcgggtctggtggtggatctggatggcttctccggatggccccacaggaaaagtgtgcatccagcgccttctgttggacgtaagcttcatgggcatccgagagggagcgaaggggttaatcagtgctctctggggcgtgtatccaccaggtcgaacatgcagcatggattctgcactgccaacgtgaaacctccctggtgcactggagtctcgctgtggtggctccatcatgttctccaggacatctcgagtgctggtgtatcccaaggagctgctgacttcatactggtgcaggtcggggtgtgggatcatcaggatgttggcactcttgcctagggagctgtcgtcagaagcctggctcctcactcctcagtgat

SEQ ID NO: 168723 - DNA, 791 bp, Homo Sapiens
  misc_feature (717)..(717): n is a, c, g, or t
  misc_feature (732)..(732): n is a, c, g, or t
tcctggaggaggcgcctgtgctgggatgcaaagagggctggggagttggaagagggagctgccagtcgggagagcggcccagtgccctttctgcagactaaagtgccctcttctccttgccctacctcagagtcaccggcctgagaagggagtggcctattaagagtctcaaagtctacctgggagtgaagaagaaactcaggccacccacctgctggggcttcacagtggtgcatgagacagagaaacatgagaagcagcagtggtacctctgctgtgacacacagatggagctccgggagtggttcgctacctttctgttggtgcagcatgacggcctggtgtggccctcagagccctcacgcgtgtcccgggcagtgcctgaggtccggctgggtagtgtgtcactgatcccccttcgaggtagtgaaaatgaaatgcgccggagtgtggctgccttcaccgcggaccctctgtctcttctgcgcaacgtctgagcacaggagcccatccttggctctaggattccgccgctggaagccttctgttcagacaccccttatgctccaaggcctgatgtgagccagcggggggtgcatgggaaactgcaccccacaacccacatcctccatcctgacttgcagcatgggggttccccggcaggttgggggaggcagcaggggtcagcctggggcaggaaaccttttcccaattttnttccaggtgtttcanaactttttgggccaaacttgtttaacccaaccggtttaattttccttttgggggttgaa

SEQ ID NO: 168724 - DNA, 486 bp, Homo Sapiens
aactgcaggagaactcacggcttccttaaggggagcacttcagtccatcgatttgaaaaggaatcataacattctacgctgctaagtctgttttgcccatcatagccaccgacaacatatactttaccaaggaggacagccattttgtgacgccatctgcctttattgagagaggcaactctgatccaaatatttaactgtgagttataaatccagacatcacggctgttgattcttccacctgaaacaagaatgtcattccttagagcacagactgcatactctgatttggtaaattctggaagcttagccaaagacttccattctcctgttacaggatcgtagcactcagtgtatggaagattaaatcctccaactcgctcacatcctccaacgacaactatcacctcagaatagccagtggacctgcgtggcctagtccttggggacatcatttcattcccactgattacgagtggggtcctt

SEQ ID NO: 168725 - DNA, 549 bp, Homo Sapiens
tgccttctgactctccacctgcccttggatttctgctccttatacgacggcgtctgcttctttgctaacacccaggtagtccttcagctcaggcagtgagatgaccttgtctttgttcaggtcacagtagtccgtgtaacaccgggccacatttcttgggcttggttttcttcttcacgtagcgcttgaagggcttcatctcccgcttgttaatgtcgttgcttctttctgtgtccaactggctgaaataccagtgcactacccgctcctccaggatgtggctggggtctggctctgagaacctcccacctccagtgggcgctgctgagttaatggcctgaaccatgtcagtggtgagagcatccagtaggctggtgataaactccattttcttcccttctggacagcctggtagctccctgtccttgaaggggtcatccgcctctgtagtcttggccctggcgtcgctctcacaactgggcatcacgtagcgtgtggaggtcccaggcagcgggcgccctgtgtccaccagcacacaccagcagtagc

SEQ ID NO: 168726 - DNA, 1015 bp, Homo Sapiens
aaggggcaagaagttggagccatcccaggctgtgaggtagcagggagggggctggcgcaggcgcttgtggggaatttgcactgtgaagagtcgcaggccagcaggctggtctggaacctgcccaaacctgcaggcctggtagcggtaaggtgtgctggaaaaggtgggtccattttcttgccagtgcagctgtgtcaccagctgatccttctgccacacagaggccttaaggtcccggcccacggttaccaacttgccatcaggccctaaagccaggtcttcaatctccccttcgtgggctttgaactccagaaccttctccaggctgggcaccttccagacacggacgtagccatctgttcctccagtggcaagcagggtattatcgtggttgaagcacacaactttctgcagtggatcggagctaaagtctgtctgcaccgcctgcaaattctctaccctgagttctagcccctcgtgctgggtttccgctccacagttcttctctgctggggctgctcccttcctttgtcgaggcccctgctccttggaaccggccttctctgccttgttgccctgctgttgatgtgcctggaagcgcaggagctgacagtgggcatcctgccctgcagcaaggatgtcaccagccagtgccaagttcatggtggcccgtgtctctgtgtcatgggagtgacagcaaggaggcactcaagcgcccattaatcagctctagcagcagaaagtgcacacccattccattattgcactgtccttgcgcgtgcgccattcctcacagccctgcatgctgatgagcagccacacgtagctaggaggtcagacctagaacgcgcgtactaatcgcggaaacggatgcccggtaagcagctactgggcgcaccggcgcacggcccatcccgcccggcgcgcgttcaccgcccgcaccgcggcaccacagcacaagccgcaccgggccttcgactacgaccccgtcggctggtgaactcggccccgtcgc

SEQ ID NO: 168727 - DNA, 307 bp, Homo Sapiens
gctcggtccgccttggtcactgcatcatcccgcacatgggtgcccgccgttgtcagcacatgcaggatggtgtctatgtgccagcgtttggttggagcaaacctctctgcagccagcaggatgcctgaggcacagtcagcccgtaggtcaggagggcaggactccagaaaggcctgcagctcttgcatcatggctcgcacattggagctatttaccagagccaggcttagttccagggctctccggctgagggaggcatcagtttcccgtagacattccaccacagtggaccaaggcggtaccgagc

SEQ ID NO: 168728 - DNA, 387 bp, Homo Sapiens
accgtgcccagccaagattgattttcttactctccaaagcgtcagcattttgaagtttcttttatgaaagtgggggcaagaatcagggtgaaaatgagtgtaaacaaagcccatcctgtggtcagcacccactggaggtggccagcaaagtggcctcagatgttcctgcacctggcccaggagcccaggacagaggtcaaatctaggccccttggtctggctggattcatcaggcaagattcgaaaacaagaaaacctctagaacaagaaacaatcatgtctgcagcagataccgcactgtggccctatggccatggcaatcgtgagcaccaagagaatgagttacagaatatctccaatacaaagacatgcatctctgtacagtga

SEQ ID NO: 168729 - DNA, 284 bp, Homo Sapiens
ggaccgcctacggtcacgcacattctggtgtgttaggtatttactcgttataaactgacctacttttaaatttttaaaatactcaatatttagaagtctctttaaagtcatatttagtcccgttctttaaagcaaagccagtatattattgttcaaaaacaaaagcatatttctaacctgtatactgaagtttctaggcaaaataggcatcctgaagaccctgcaaccagtgtttcattttagaatgagatattattaaactgttctctgtcatgagtgttttt

SEQ ID NO: 168730 - DNA, 794 bp, Homo Sapiens
aactggataaggaattccaactcttccaaggcgtgacacgggcagttgacctgtgtgcagccccaggcagctggagccaggtgctgagccagaagatcgggggccaagggtccggccacgtggtggctgtggacctgcaggctatggctccactaccaggtgtggtacagatccagggggacatcacccagctgtccactgccaaggagatcatccagcactttaagggctgccctgcggacctagtggtgtgtgacggggctcctgatgtaaccggtctccatgatgttgatgagtatatgcaggcccagctcctcctagctgctctgaacattgctacacatgtcctgaagccagggggctgctttgtggccaagatattccgaggccgggatgtgacgctcctctacagccagctgcaggtcttcttctccagcgtgctgtgtgccaagcccaggagcagccggaactctagcatcgaggccttcgctgtctgtcagggctatgaccctcccgagggcttcatcccggacctgagcaaacccctgctggaccattcttacgacccagatttcaaccagctggatggtcccacccgcatcattgtgccttttgtgacctgtggggacctgagctcctatgattcggaccgcagttacccactggacctagagggcggctcagagtacaagtacactccaccagacagccccccatctcgccaccatacaggaggctgcacgttgaagaggaaggggcagctggccaaggagatcggccccaggattgcccaa

SEQ ID NO: 168731 - DNA, 525 bp, Homo Sapiens
cagatagacatgaaagtgcaaattggagagactgtgttatccattcggataacacctggacagtgatactctgtgatggctgggacccacagcaggtcagagctcaccttcaccttgataagaaaggtgaatgtgtcgtcggtccaacactaagaaagaaaaagatcctggaaataagaaaataatttgtaaaatgtgagtaaaatatggtttacagaatacagactatgaagatgaaatagacactagagcttccaaaatataaaaatagagctggaaaatgtagtgagaagattggaagtgaaggaactttccaaaaagatgatgcttctgcatctattcattctgaaattactgacagcaacaaaggtcagaagacgttgaagaagatgggttggaaaaaaaggagatggactgaggaagatgatgggagaatgaaaactccaatttagtgtcaagttcaccaacacacataggctcggagacaggaaatccatcctcaattgaagatgttcaccttctccg

SEQ ID NO: 168732 - DNA, 434 bp, Homo Sapiens
ccacattccaggagagcagcgtgcagcctgtactacatgctgggcagcctgtactacatgctgggcagcctgtactatgtgctgggtatgtactctgtgttagccatcagcactgacctgggcactttgtggctcagggtgtctgctcagatgatgcacacagagcccccagagtgacgctggggtgggctggggatgcctgttaattctaaacccatcctcccttctctttggtttcctagtttcctgcagcctcccatcggaaggcctatctgggggcttgtttagaaacaagatgagctgcttgtctttgtggacccacctctgccttccttagcttgttcgggtctcttgcacacctcccatccctagctcaggattgaggcgtttcaacctttctctctctctagtgacctcactcacgccatcctttc

SEQ ID NO: 168733 - DNA, 566 bp, Homo Sapiens
gcgcggccagtccgtgcacagaggaaaaggatatccatgatgggcgatttcatacataggcacggaatgctcatgtgcgccccggatagatatcgccgtggtgatggtgcggataggtgctcctggcccgctgtgtcccagatctgcagcttgatcctcttgtcatggctgtagacggtcttgaccttgaaatcgatgcccacagtactgacgaaggcgggagtgaaggagtcgtccgcgtatcggaacaggaaggaagtcttgcccacactgctgttgcctatcagtagcagtttgaacatatagtcgaagttctgatctgctgcatcccgtgggcctgcctgggtgtctccagctgatgccatcttggcacaagcctcctgggacaaggagacctgaaatcctcagggagaggagacgggcgtcctgctcggatgcggaggggccgggtgggctgcgctccttcccaggggtgacctcgcgtagggggcgccgcctgcaggggttccgcctgtgaactcgctgcggcttggccctggccgcgaccccgaccccgcagccgcccc

SEQ ID NO: 168734 - DNA, 439 bp, Homo Sapiens
cgtcaactaacgcacatcgaactactgaatcaaatccaaacttgcggagatatggtgattcgtgtgcacaaactcacttaagcagcatggattacatctttgacacggcatcaggccaatacaagatctagggtacagttctcagaatggactatctcaggatgtacaagacagcagagatagacaaaaagccagaagcatggtgattgactgtagtctgatgaatggcattaaaatagcagaagttcttatgattacaggttggcctccctcttgatatttctcctgagagaagctcacgatggtccatcactagtctgtttggtcaggactggattaggacctttagagacctggagcacagaaataaatatggtgcctgcagcaatcatgtaactcacaaccaaacacaatataaaatgagtgtggggttaggtct

SEQ ID NO: 168735 - DNA, 385 bp, Homo Sapiens
agacctaaccccacagcatacacctgccacagcgaaatccagggtgttggcacctgtgtgtccgtgatgagcctaggaaaccagagcaggggcagaggggcgtcatcctcccaccggacgctgggagctcagaccccaaaactgaaacaccgtggcttcggcggggggtgtgcctcctgatgtcaggagccccatccacgtgtgtccacacagatctcgtcgcagcacggcaggaaggggtgctgcttagggctcattgttggggacatgaccgggttcagcggctagaacatctgccccacagcagcctcctcctccaccgaagagggtagttgtcttcctgaagcagtcacagcaggctctctccgtccgtcaccacatgggt

SEQ ID NO: 168736 - DNA, 450 bp, Homo Sapiens
aggcgccgcccaggtgagcaggagcatgtgcacctctcatgcctgctcatgcctaggaaagcacaggcacctcctgccgccccacctgccctctcccagagttgaggccggcagctatcggaagcccggtgacgctgtgcacaccaggactgagagctggaaggcacggagccaggagaagcctctgtccctgggcaagggccacctgaaccggacctgtcattggccaagagggacatgcacacaactgtgtccacctggtgctgaggcgtcaggcggcctcgtcacagaccctcgccccagcttcacattctccctgccctggcctctgccatgtctcactaggcctggagccgccaccccaggacaaggcccactaaatacagagctcctgaggagtcagacatgcctccacgggtcccaaaggaagcctaccgaggcagcagagta

SEQ ID NO: 168737 - DNA, 226 bp, Homo Sapiens
accaagtagaagagcgatgaatgataatgtcccattcgaactccagctcctactcaccagtctctccgcatggagaagtggccgtcatggtcgacctgttcccaagggtggccttgtgagtgcaggctctcctcaccagagctgagggctttgtgaacctctgatgtcaatagatgcccctcatcttccaggaggacaaaacagggcaaagcaagacatggggtta

SEQ ID NO: 168738 - DNA, 188 bp, Homo Sapiens
cgtagaagacaggatccagtcctccctcccttcttcccgaaggctgcactttggaggaggcacggtggagccacactggcccctaggtggcaggaggcagaatagcagcttccaggctctggcctcacttcccgctctgtctcttcctcgccttacgtgctttcggagaggagtgacttcacttcctc

SEQ ID NO: 168739 - DNA, 1506 bp, Homo Sapiens; identical to SEQ ID NO: 3524
  misc_feature (1088)..(1208): n is a, c, g, or t
  misc_feature (1219)..(1230): n is a, c, g, or t
  misc_feature (1288)..(1410): n is a, c, g, or t
  misc_feature (1450)..(1464): n is a, c, g, or t

SEQ ID NO: 168740 - DNA, 224 bp, Homo Sapiens
ggagctgggtctcatataaggtcggcacactgcaatgtatcccatcaagactttttcgattatggccaccaaaacaatttcagaatgtggattgcttacagaaaatacagcctgcttgggaaattttagccattcctctggaagtcccttgatgtgaggttcttctgattgtcttggagtgatggtgtcgatgttgccattttccaaagccacaaaatccccgt

SEQ ID NO: 168741 - DNA, 386 bp, Homo Sapiens
tacaggaacatgcttagagaattgagtttgtgcacatgaacattccaagtgacagtcttgagtagtgggcactacctgctaaaaacactaagaaagtaggtaggatcctcatctagtgcacagatcaggagcaaatgtaattgcacatattaacagtccaaaacaacagcactttggttgatcaggacaccctgttgtactacaaaggaaaggtgatggggtatgaccttaatctactgacaaagacaaaagaaaatttcaattatatgttgatagtacagccagaaggggccttggagggaaacagtataccccacactcacgcaaaagaggtataatggtcctaaaagtgatagggttgtggacaactgcaattattcacatat

SEQ ID NO: 168742 - DNA, 1422 bp, Homo Sapiens
  misc_feature (1269)..(1341): n is a, c, g, or t
acccacgcgtccgtgcagacattatctggtggtgaactacagcgagtagctttagccctttgcttgggcaaacctgctgatgtctatttaattgatgaaccatctgcatatttggattctgagcaaagactgatggcagctcgagttgtcaaacgtttcatactccatgcaaaaaagacagcctttgttgtggaacatgacttcatcatggccacctatctagcggatcgcgtcatcgtttttgatggtgttccatctaagaacacagttgcaaacagtcctcaaacccttttggctggcatgaataaatttttgtctcagcttgaaattacattcagaagagatccaaacaactataggccacgaataaacaaacttaattcaattaaggatgtagaacaaaagaagagtggaaactactttttcttggatgattagactgactctgagaatattgataagccatttattaaaaggagtatttactagaattttttgtcatataaaacttgaatcaggattttatgccccacatactctggaacttgaagtataatatacttaatataacataaaaagccagttgggttctaaattgtagttgaaacacagaaaatgccacttttctgttcctgaagaggctcttttgtgcataatattctaaaatgaagacatttcaagctatacaaattacttccaagttttcatgatgtatgggaagattttcagtaggtgtattatattcacggtaccaaatgctgaccagtgttgctccattttttaaatcttgaaaagggtttctgtacttacctggtttgccaagtatgccagtgtaatgaaactgcccttattttaaaagccagtcaaagattccactgattgacatttgataaataaacatcaggattatgtttattgtttgttttcagtctttgcactatattaccagtatatggtttccgaggaagattatctactgcaaaacaccactgttggaaaaataggtatttttaaactgtttttaatcttttttggtgcttttaaacatgtttagcaaaaaccaattcagttccattccccgcaaaaaacccctaactttactctgaacttttttgttttgcattccatgaggttctgtattcagtcattctctaggtaatgtcattttgtacacatatatttatataatcactgattgagatttaggaaaaagcatttctaaagaatatttgcttcccttagaactacagactcgaaatctttaaagannnnnnnnnnnnnnnnnnnnnnnnnnnnnnnnnnnnnnnnnnnnnnnnnnnnnnnnnnnnnnnnnnnnnnnnntcctaaaggcacattaatgcaaaagtccccagatggcaatacaagtatcccggtaccacatatatccattgtgagttggct

SEQ ID NO: 168743 - DNA, 534 bp, Homo Sapiens
cagctgtaatgaggcttcatgttgcacaggtgtgagtttgaaaatggctcagtctctgacgcctgttgattcaagtgctgtctcaacactggggacataagtattacagttagggaatctgctctttgttgaaaatgaaatctagtgccacacagtgactgcacatgagcttgtggtaaatggtctgttttggagaagtgcacctggtgtgagggtttttggaactggagatgttggtccactgtaccttgggactgcccttgattcatttcaacttggtacatttgtgacttgtgctccagctgtgttgttttctgggtgtaagcttgccttgggagccccccaggcatgttggaatttccagtgtattgtttggaggtcatttgattggagagattgggttgatactgaagaattgatggcagtgatgcctcattacgttttagatgggattccgcttggtgaaaacgaggggccttcaattcaatccatcctggtttcagatagtgctgtgttgggggcacaaaatccccg

SEQ ID NO: 168744 - DNA, 362 bp, Homo Sapiens
atgtgtacaaacaggcagttacaagcgtgtcattttcagtggctccattttaaatcagtctgctgcctcagaatcccgtacgctctgaaggttttaagttgcatgtgcacctgaaactagtatatgagtattttctgtctgtgcttttagagaggaggaattctgtaacgacttttgtttcgggttaggaagagaatgatctctttcagtgcaccgccacttatgttacctttttccttttatttctttgtgtttccagttgcaagaacagcaaggaaaaggaagccctctccagaaccagaaggtgaagtcgggccccctaagatcaacggagaggcccagcgtgctgtccacatccacat

SEQ ID NO: 168745 - DNA, 742 bp, Homo Sapiens
  misc_feature (400)..(400): n is a, c, g, or t
  misc_feature (517)..(517): n is a, c, g, or t
  misc_feature (647)..(647): n is a, c, g, or t
  misc_feature (706)..(706): n is a, c, g, or t
ccgatctgggcgcccacaagcggccggcatccgtgtcgagcagcgctgccgtggagcacgagcagcgtgaggcggcagccaaggagaaacaaccgccgccgcctgcgcaccggggcccggccgacagcctgtccaccgcggccggggccgccgagctgagcgcggaaggtgcgggcaagagccgcgggtctggagagcaggactgggtcaacaggcccaagaccgtgcgcgacacgctgctggcgctgcaccagcacggccactcggggcccttcgagagcaagtttaagaaggagccggccctgactgcagttgcaagaacagcaaggaaaaggaagccctctccagaaccagaaggtgaagtcgggccccctaagatcaacggagaggcccagccgtnggctgtccacatccacagaggggctcaagatccccatgactcctacatcctcttttgtgtctccgccaccacccactgcctcacctcattccaaccggaccacaccgcctgaagcgncccagaatggccagtcccccatgggcagccctgatcttagtaggcagacaatgcagggggcagtcatgcttcaaaagatgccaaccagggttcattccattaccaggggggattaggcaacagtccgccntttccgttcttttattggaaccaaaggaagggttggggccccagagaggttgggggggncaggggagcagggcaacacagggagggtttgggaag

SEQ ID NO: 168746 - DNA, 328 bp, Homo Sapiens
  misc_feature (256)..(256): n is a, c, g, or t
  misc_feature (302)..(302): n is a, c, g, or t
cccagtctgactcatctctgttatgctgcttcagacatgaacacgttgccaccaagcactggttccgcctcaggagatcaggaagtggggtgtttgttgtttctgggctggggtaaaatggtgaatccaaagaaccacccttcctctgctctccgtccccttttctcccctagaccccctcacttcacagccgcccctacctgctttagacccgttggccccgttggcctcgaaacccaacaacctgcctgcagtncagggccggctccttcttaaacttgctctcgaaggggccccgagtnggccgtgctgggtgcagcgccagagg

SEQ ID NO: 168747 - DNA, 410 bp, Homo Sapiens
atctaggatacaactcatcataaggagacatacactgagatagctggaatgcaacggttgggggctttttatatggattacctgtatacaatggagaacactagtggcaaaggttccacaaatcaacaagacttttcttcagggaaaagtgaagatttgggaacagttcaggagaagtccaccaaaagccttgttataggtcctcttgattttcgtttggataagcagtgcggtgcataggattttgaaaatgattgtgtgtgccttggaacatgaatatgaaccatatagcaggctaaaatcagatattaaggatgaaaatgaaacaatactgaatcctgaagaggtggctcttctggaggaatatattcctactcgacatacaagtgttactctcctcaaatgtacct

SEQ ID NO: 168748 - DNA, 503 bp, Homo Sapiens
cagggagaatgggtgtagtcacaaaggcattgatgaaggtggcccccccatgttccataatctttctcgttttgttcatgacttgcagggaccccagctccacatcttgatcatcggtaggcacaagaataatgttgggtcggatgttttttcgttcctgctgtatccgtcctctgaacctcggggatctgacagtcgaacagaggcttcccagcaattctgtgcccaggacagccaaaaccagagcacagcaagaatacttcattgtatttggtccaatgttgcaaaactgacaaaatgtctccgtctcctgatttctggagttcttgaattaggtatcctggttgaataatcaatctctattctcagaggtattcagaacatctgcagatagggtcctttgaagattttctgcaattattctgccttgaagaacctgcatgtcatttgccaagtttatcttctttagatcatggtgggtgggcgtcagcacaaaatccccg

SEQ ID NO: 168749 - DNA, 549 bp, Homo Sapiens
tatgtgagaaatccataatctttatacacaggcaaattagatatagcctaactatttcttgtttagcctgtaggtctttgttaatgttcataccaataccagctgacctcttaatttcaagtccaacactgggagtgtatatgtcaaactatcttttaaaatacctacttagaatttatctttttttaatcataagtgaaaatagataaattcagctttattctcgcattccatcactaaccaatactgaggaggaagaataacaaaaattatgttaagaggcagccaataaggaacttgattatacgttacgtttctgtaactttagagtgaaataaacagataaaatactgcagaaaggaaaggcttatgagtgatttttcaacatactattaaaatggaatatttattgttacaaaagatcatgtgaaatatgctactacatttcctaatttttgatttgtgtgatgagatatttatatgttcccatcttctcccaatgctcccaatgtaattacttccatggtacctatctctctggaatacgta

SEQ ID NO: 168750 - DNA, 717 bp, Homo Sapiens
cacaggtcctggtgcagggtcccaacgaacatcgaggctgttaggtgtaggattgtatacttggacatttcttgccagtcctctcatcactgaggaaatgaaggccaacatctattttttaagtctgtttatatatctcaagcttttgtatcacttttccagaacctacattctgtaacaggataaaatgctatcttctttatacttctaattacctacacacaaaggcagattaaaactctccaaacccaaatttagttaaagttagcaagtatggcctttgtctataaggaagcaacattgtattcaattaaaaacaagctaataaacgtggtggaactggattggccataaagggtcatgggatagagaaaagaaataggaaaagtagtttcagttttctaacataagtaatggagagaggaagaagagacattttttaagagtctgccttctaagtaaaatctgacaacagctattgagctcatctgattcagtcagctagtttcaaccattcattacttcttcatttaacaaattgctactcaataactttgctgattaatagaaaaggtaaaaggagagagaaaataagatatacccagttcttaattaactgccgtcaataggaacttaggggaacataccttttagagtgatgtacgaatgccagagcgtataagtaaaccaaggacatcatcttcgctcgaccgctaa

SEQ ID NO: 168751 - DNA, 473 bp, Homo Sapiens
atgggtatgttcattggggaaaggcagatctcttaagtaactgtaactcatgatatgacgaggtggaataagagataggctaccagtaatgcagagttaagctaggaaatagtttagcttttagtgtaaattttacttcaaggaaattagagcattttatacatttataaccatcagtcttggctgaaatacttaatggaggcatgataacatatcttgtacctttatagatattgtagctcaaaattatgtttaaaagttgcttttccaattaggagatcctaacttcgttggcaaagaaataatacacggtaaaacaaacaaaccaccaatataggcattatgaaagaggaaaaacttaataatcggcattgcaaatgggtaattatctaattatctacagaagaaaatgttaaatgacataataaacagaattagaaaaactgggcaagatacaaatattagcttttcag

SEQ ID NO: 168752 - DNA, 222 bp, Homo Sapiens
ggggatggtgcagttacgatagttcttacaaaagataaggaagaacaaaagagatcaggacctgaaatatcaacaaactcctgggaaaagcacaggaagaacatcttgagggaagtatggttaagagctatggtgctagaacagagacctggattcaaatcccaagaaaatggatgacttccttcgcttgtcttattccttatgtgtaaaacaaaatccccg

SEQ ID NO: 168753 - DNA, 425 bp, Homo Sapiens
gtaggtagccttgaaagacgagctgcctgtaaggcttcttgggaggaagcagcatctcctcctcctccctgccaatttaaaaccacacatcttcccgtctcattgcccagagcaagatccactgaagtaatctcaattttctttcccacatcttcagtttttgcaacaaacttaaataacagttttcttgttttgccaggaactaggcacatctttccttgagtcagattttctaaaacttcatttgctttggatgcttcttctattacacagaactggttgtattcctgattattaaagctgacacagagcttggaaaacctaatgggatgtggacaatcagccttcagataaatatcaaactgaacaggaacatcacatgtactggggcattacttgctttcctgcacttatggacgagctga

SEQ ID NO: 168754 - DNA, 779 bp, Homo Sapiens
atgtcccatagcctttctcgccataggccaggaatggagggatgataatcttccttctctctccaggacacatgcccagcagcccctggtccatgcccttgatcagccaaccagagccgacgtaggtgtcataagtgccgcccttactgtagctggtgtcgaaggaggtgccgtccagcagggtgccattgtagtggtagcggacaaagtcgccgtcctggaccatgcgggggcagtggggcgggcgcagcaatgtgctcacctgcacggtgtcttccttgttccacacatccagcagaaccacatcgaagtagagggtggcatccggtggaatgagccccgccaggccgatgctcccatagcccaggtggggaggcacaatgaggcgtcgccgctcgttgacacacatgcccatgaggcctcggtccatgccagtgatgaggcgccccacacccaccacgatggccaccaaggtgttgcgatcatagcttgaatcaaacttcttgccatcttcaaaagtgccgttgtagtggtagcgcacaaaatcccccatctgcacttcccggggacaggccctggggatgtggtacctctcgatgaccacatcttccagggggcccccggccgggctggcgcggcccagccccctccccacggcctgcaccaccagtagcagcaactgcagcagggggagccggaggaggctgtggctgggggggcccgcggggaacatggtgcctggagttgggaccgccggcagtgagggcgagcgagggccc

SEQ ID NO: 168755 - DNA, 528 bp, Homo Sapiens
ctttcgagttgcctttgcctccattgtcatttattctttctgaagtttgtgattgtcagaaaggcctccctgggctagtcctggcccaggactaccctggctcctacaggtatcccaagggtgctgcagaggagggctaaaattagggatttgtgcccaaagggtttaaggacgggagctgatagagatccatggaacctgggttctagttggggctggtaattctgggcttagtagccgggggcactgtgggtggaaggcagctttgttgctatctggaacaacagaaggagtgaattgaggtcagtagttgagcccatctcttcagaggaactctgttgttaccattcttttgcatatttcagcttgtatctccttgtcagggcaactgcctttgcctcatacctcagcactggcctttcctcagttccaagcctcggctctgtgttcctgaggatggggtgtgcagctttgcctggacatataggttagtgccaatgagaaaccaaaatgagacgtgatatctat

SEQ ID NO: 168756 - DNA, 287 bp, Homo Sapiens
tgaagtaacactgtagaaccgactgggtgcagaggggcagtcacaggacttattccagatgaacttttcttttgaaattagaatgcccttgtggaagccaaaggaggagcagaggcctaaaataatgtcaagtgtcaaagcaaaaagaagtgccattggctactacagtgtgtgatgataacaagagaggtgcgaattaggaattaaaaacgtttgaaaaactacaggccatatgctttgaaaccagccactttttccatctttcatctccctctcccctccggttt

SEQ ID NO: 168757 - DNA, 483 bp, Homo Sapiens
  misc_feature (56)..(77): n is a, c, g, or t
  misc_feature (99)..(107): n is a, c, g, or t
cacccagccctgttccaggagaatttcaagttttacaggttgagcttcaagatggnnnnnnnnnnnnnnnnnnnnnnctctcatccaggctgaaggatnnnnnnnnnctttacaaaatgagttcctcaaattgaccaatagctgctgctttcatattttggataagggtctgtggtcccggcgtgtgctcacgtgtgtatgcacgtgtgtgtgtccattagacacggctgatgtgtgtgcaaagtatccatgcggagttgatgctttgggaattggctcatgaaggttcttctcaagggtgcgagctcatccccctctctccttccttcttattgactgggagactgtgctctcgacagattcttcttgtgtcagaagtctagcctcaggtttctaccctcccttcacattggtggccaagggaggagcatttcatttggagtgattatgaatcttttcaagaccaaaccaagctaggacatt

SEQ ID NO: 168758 - DNA, 384 bp, Homo Sapiens
  misc_feature (265)..(265): n is a, c, g, or t
ttacaaaaaggagacccctcaaaatgacccaaaagctgcctgcctttccaaaatttggaaaaagggtctgtggtccccggcgtgtgcctcacgtgtgtatgccacgtgtgtgtgtccattagacacggctgatgtgtgtgcaaagtatccatgcggagttgatgctttgggaattggctcatgaaggttcttctcaagggtgcgagctcatccccctctctccttccttcttattgactgggagactgtgctctcgacagaatcntcttgtgtcagaagtctagcctcaggtttctaccctcccttcacattggtggccaagggaggagcatttcatttggagtgattatgaatcttttcaagaccaaaccaagctaggacatt

SEQ ID NO: 168759 - DNA, 749 bp, Homo Sapiens
  misc_feature (543)..(574): n is a, c, g, or t
gggccggcggcgtgacctgaccgcaagaggccaatggagtgtgggagctgaaagggtcttcgctggcggccggacagtactgcttttaaagagacagtgttagggatcttggaagcacagccaacatgtgtgacattgaagaagccactaaccaactcctagatgtgaaccttcatgagaaccagaagtctgtacaagtgacagaaagtgacctcggaagtgaatctgagcttctagtcactattggagccactgtacctactggctttgagcaaacagctgcagatgaagtcagagagaaacttgggtcatcatgcaaaatcagcagagaccgtggcaagatatattttgtcatttcagtggaaagtctggcacaggttcattgtctgagatcagttgataacttatttgtggtggttcaggagtttcaagattaccagttcaaacaaacaaaggaagaagttctaaaggattttgaagacttggctggaaaactcccatggtcaaaccccttaaaagtgtggaaaattaatgccagttttnnnnnnnnnnnnnnnnnnnnnnnnnnnnnnnntcagaattcaagtaaagagaagattaataatggactagaagtccatatcgatcagagaaatgttaaaaaagagttcactagccatgctttagattctcatatattagattattatgtaaatccacgccatctaagagaatgtatctacagtaatagagatgatctggcatctgcc

SEQ ID NO: 168760 - DNA, 298 bp, Homo Sapiens
tcgaaaacgaagtatctcccagctggagcaagggacgagctatgggtggctgagagaggaaccacccaggactgccatccagcctgggagcctcgatctgaaagccaagcatcacgcaaggaagagggcctgcctgaagaggagccatcccatgtcacgggaagggaaggattcccgacagatgctctttatcccaccacgttagggaaagacagggagtgtcagagccagagtctggcactcaaggagcagaataacttgaagcagttggaatttggcctcaaggaagcaccagttc

SEQ ID NO: 168761 - DNA, 594 bp, Homo Sapiens
  misc_feature (578)..(578): n is a, c, g, or t
cggacgagcttcactttgcggaggctgctcctttgtgggtggagctggtggtgagggagtaggaaccgccgtgcatcatcctggcattcaggccgttggccatcgagaaggacttgaggtggcttcttaaggcaatggggagcgggagcttgtccaccaggtgcaccggcgtgcaggacacgaccgcccggcagcagaggtcttgcaagctcagcaccttgctcggccgccagagccggtccatcccatgccgcagcagcacgatcctggccagctccgtgaacgactctgtgatgttgaaattgcacagagggctgacctcaaagaaggtcacgcccaggcgctcggcgtaggcctgggcctgctccgtgggcacctgccgcttgaacgccaggtgcaggcggttccccaccaggatcttggggactccgggggcatgctagcgggcaggagaaaggcgaggagcatgggttacttcagtgagattttgttgtcgtcgtaatgtgggtgctctgggtcgaggaaccccccacgagttcatgtccacccagaacctcagcatgggacctcgtaatttnaattatgcctttgcag

SEQ ID NO: 168762 - DNA, 272 bp, Homo Sapiens
aacaacttcaaccaggatgaggccctggtgaaatcagaaggtgacacgcaggaggctgtcgacgggtagcggaggaaggtgcaggctgaggagcagggaggtaatgccagaaagcaaactgcaaaccagcgctgatgccgcttctttggagaggcgataaaggcatggagaaactcacctctgcttctgagcaacgggttcatcggtcccatcttacatgcagtgtgattcttctatgtgatcagtttccctctttctttgtgttatgatat

SEQ ID NO: 168763 - DNA, 679 bp, Homo Sapiens
cacaccagcgggctagtcagggtccatgccaggcaggctgtagacagtgatgagctcatcagccagcagggccagctcactgctgtcggctgcctcgtagtcatagagcacccgagctttgcgggtcccactggcagggggggccacctcttccaggcagagcgaggcctcccccggaggggccaggctggccacagagggcaccacaggcatagtggccgcagcagtggtgggtgaggtgctgctcaggggtggggaggcgggctctgtggtgcccacgaaggtgccgggaaatctgcccagctgcttctgcaagtccagcatgtggcggtagcactgtgcgtagtaggttgtctgagacttgacgaactcgtggaggcagcgcaggtggttcacgtgagtgctactgattccctccagcaagagacgggtcacttctgcttgccggtcaaactctgtctgggccacacggagctcctgctcggccttgtccacttcatcattccagagcgcggaggcgctggccgagagaatgtaattacgaggtctagtctcctgaaagtcaggcaccgtcgtggctttggcttctgcagccttggccttcttcagcctcgctttgcaggcatccaagtccagacgccggttttggaggagccgcctctccttcgagatggtcttc

SEQ ID NO: 168764 - DNA, 838 bp, Homo Sapiens
  misc_feature (13)..(13): n is a, c, g, or t
cgagcgagcctgngtggcgaattccgcacgaggcccgagtggaggagttcctgtatgagaagctggacaggaaggtcccctcaagggtcccaacggggagctgctggctcagtacatggcagacgcggccagtgagctggggccgaccaccccctatgggaagacactgatcaaggtggctgaagctgaaaagcaactgggagccgcggagagggatttcatccacacggcctccatcagcttcctcacacccttgcgcaacttcctggagggggactggaagaccatctcgaaggagaggcggctcctccaaaaccggcgtctggacttggatgcctgcaaagctgaggctgaagaaggccaaggctgcagaagccaaagccacgacggtgcctgactttcaggagactagacctcgtaattacattctctcggccagcgcctccgcgctctggaatgatgaagtggacaaggccgagcaggagctccgcgtggcccagacagagtttgaccggcaagcagaagtgacccgtctcttgctggagggaatcagtagcactcacgtgaaccacctgcgctgcctccacgagttcgtcaagtctcagacaacctactacgcacagtgctaccgccacatgctggacttgcagaagcagctgggcagatttcccggcaccttcgtgggcaccacagagcccggcctccccaccccctgagcagcacctcacccacccactggctggcggccactatgccctgtgggtgcccctctggtgggccaagcctggcccccttccggggggaagccctccgctcctgccctgggaaaaagggtggg

SEQ ID NO: 168765 - DNA, 1068 bp, Homo Sapiens
cctttatgccttgcggagagaagattttgatgtggaagcagctgactcagcgggaaactgccttgacagtttagtttttgttgcaggagatcggcaatttggtccttactgtggtcatggattccctgggcctctaaatattgaaaccaagagtaatgctcttgatatcatcttccaaactgatctaacagggcaaaaaaagggctggaaacttcgctatcatggagatccaatgccctgccctaaggaagacactcccaattctgtttgggagcctgcgaaggcaaaatatgtctttagagatgtggtgcagataacctgtctggatgggtttgaagttgtggagggacgtgttggtgcaacatctttctattcgacttgtcaaagcaatggaaagtggagtaattccaaactgaaatgtcaacctgtggactgtggcattcctgaatccattgagaatggtaaagttgaagacccagagagcactttgtttggttctgtcatccgctacacttgtgaggagccatattactacatggaaaatggaggaggtggggagtatcactgtgctggtaacggcagctgggtgaatgaggtgctgggcccggagctgccgaaatgtgttccagtctgtggagtccccagagaaacctttgaagaaaaacagaggataattgggaggatccgaatgcagatattaaaaacttccccctggcaagtctttctttgacaaccccttgggctgggtggcagccccttcattaatggagtacttggggtggctgaccgggttgctccatgtttggggggagggaaaaacagggacacccacaccattggtatggttgggggtccaccccttcagggggaagaagggccccgggggttgggtcaaaattccccaaaaattgcttctcctcccctggagccctggtggtttaaatctccctcccgcgggaagggggaaaccttggcttgtgaaaatttcccctatggaagggccgtgaacccccaatgtttttgcaaaaaacgggacaactatggcaactgtgggggcgcgagacttag

SEQ ID NO: 168766 - DNA, 399 bp, Homo Sapiens
cctggtggcccgtgagggcgcccgcgtgaagaagctcatcaactcacagatcagcctcctcatcggcaaaggcctccacgagtttgactccttgtgcgacccagaagtgaacgactttcgcgccaagatgtgccaattctgcgaggaggcggccgcccgccggcagcagctgggctgggaggcctggctgcagtacagtttccccctgcagctggagccctcggctcaaacctgggggcctggtaccctgcggctcccgaaccgggcccttctggtcaacgttaagtttgagggcagcgaggtgaccccatgcgtggcctgcggcatccaggctgctctgtccatggggagcacttcctctgtgaaactcctcagtcgtccgcaaggcaaaaagggtac

SEQ ID NO: 168767 - DNA, 406 bp, Homo Sapiens
tacccttttagccttgcggagagggagcgggctttctgacccgccaggcctgagcctcgtaagcctgttgtgtgagtgtgtgtgtgcttaacggagctcaacacattgcaaatgagtgttctactgggacatactggagtagtgtctgctttgggggaagtcagtttgtcattgcatcctaattggtccccatgctgacgtggattatttgttccaaagatatcagctgctggaagcggcagacacagaaaacacgttacacacctggaagcgtaatcctcttgaggcttggcacagtgtttccattcacagaacatacagcagagatgcgtgggaacccctttcctcattccaaaccctctcctggcaccgcaggcaagcaagagaaaaggccgtgagaagtcga

SEQ ID NO: 168768 - DNA, 345 bp, Homo Sapiens
  misc_feature (214)..(281): n is a, c, g, or t
acctggctatcatagcaaggcgtcgtctaaaggcaggactgggctgattactggtttcatcactacttgattcatcgtcactaggctgagatgaaaatactattaagaaaaaagttgacatttagctattcaaaatcttggaaaagctttcccagtaaaaattatttagaataatcaatgccatcccttacatgcctttctacataagatagcnnnnnnnnnnnnnnnnnnnnnnnnnnnnnnnnnnnnnnnnnnnnnnnnnnnnnnnnnnnnnnnnnnnntaaagcatttcaaactgtgatacacaagaatctgttaatcatactatttggtgcaggagagcca

SEQ ID NO: 168769 - DNA, 1011 bp, Homo Sapiens
tatacgcatcaagagtagggaagactgggtaagtcgaagcataataaaggggcaaacaaaacaaaccacacagtcacaagacaccctagcaaaggcttcccacagtgccccctacacgggtaggcacccaggccttttgttcttataaaatatgtttttattggtctttgcagtctcacggcacaaaataacaaaatgaacacaaggcagatagagctggttggggagcacagacatgtggtggccttgaaagcagcttttccccttaagtctctagaacctgccatgagtaattaagacagtctttgaggatggggctgtcaggtgggggcgtttcagcaggtgccgacgagcgccttacaaacgactggctgaacacctttcctcccaggcctctctgccccagcatcactcaatctgctcagtcctcgactgctgcaggggaatgcgtgctcagagagagatgacacttctgaggtggcccccagctctgggtgccgtggagccggggtggggtattcaggccacacttccctgtggccacaggggaaaggaccaggggaaaaaatggggcagggatggccagctaacaaggggcctttggctttgtcctttgtactggggagtgaatttgcgcatctcagcagggagggtctcgtagaactgatgttcccttgggaccaggggcttgcacagggttgtctcattgaagcggagcacgcatgagtgccccccgacctggtggacaaagggctccagaaggacgcctttggcgcggggctccacatccatggccctgaaggctgggctcatcctccgggcgcagatggcggggagatgggggaggcagcggagtccagcggccagtacgtcttctgtctgttgtttgtccgtgtgtccctctcgtcttggctccttggcttgttctggccaggatgctctgctgccgcctcagccgggttcctcggcgtttccgtcctattgtttctctcgcaccaaaatggctgcccc

SEQ ID NO: 168770 - DNA, 1066 bp, Homo Sapiens
  misc_feature (38)..(38): n is a, c, g, or t
  misc_feature (58)..(58): n is a, c, g, or t
ggattggccaggcccctagttgttgcaaggcctttccntgccagtcccgtcttgaaanctgtggtcttctgcatctggggttggcacgaccaagttagaaggaattgggagtggcgcgaagtggagcgacaaaagtccgcagaagcgagagccgggctcgctccgctgggtcccgcttgggttcaggacgtcaacgtagcgagctctggttcctgctgctcttctagagtacatgttcacgggggctccaggaggccctgggagggcaggcggggcagcttgcacagtcttgggcatcgaggttgcgaactttaagaatggcaaactgtgattggatccgattaagacaagctttgtagttttcttcgtgtaaacaccaaatcccgcctgggccatgaggtagcagaagtgggccgcatccaagaggccccttgaagccagagtgtcgcccatggtagccagtcgtccgtggactcgacgtccatgttgttgttcaagttggacaagaccatggcgaggtgcggcctccaatctccccatttctcgtctccacagcacgtggacgcggcaggcatccgtccggacatgagctggtagactgtctgcagagggtcgttgattgggaggctgttagcaaacctggtcatgactcgggcgtgtgtccggctgtccatcttacttgcaagtagcagagcgtgaccccacaggccattcttcattgcagactccaaagcatccttcttacggccatacagcaacagctccctgaacctctcggtctctctctcgagcgagctggcggcagccgccggaccaccagtgaggaaagagagctgggcctcaccagactcctcctcttccacctgctccactgcctcattcgtgaaatcaatcaggtttgcttcattgggcgacttcccaggaagccacactgttctgtggtctcgtaacagaagctccgcaatgtcggtccctaccacggtctgtttgggtcaacaggaacaggaaggagaacaacggctctcaggtgaggacgcgttggaccaccacaggcacaaagccccac

SEQ ID NO: 168771 - DNA, 479 bp, Homo Sapiens
  misc_feature (383)..(383): n is a, c, g, or t
  misc_feature (420)..(420): n is a, c, g, or t
  misc_feature (440)..(440): n is a, c, g, or t
  misc_feature (453)..(453): n is a, c, g, or t
  misc_feature (461)..(461): n is a, c, g, or t
tggtggacgtcaccacggcacaggtgtaaccgtccatgttccgtgtgagcagagtccctaccaacgggcaggtctgcatccggggagaatgcagctgcttctggcgacaatcctgctagtaaacactggtcttcggtgagcaacgaacactcgcctggcctgggaaactgcatgcccactttctgggaggggttagtgcaggtgccgtggacaaaggacaacatttctctggggctttttaacttttattcctaagactctaaaggcgttgatttcaaccctccttcactctggcttcttcaggcaacccacgtggtctcctggtgaagaatcttctcgacagttacttatggggacacttgtgaacaattaactgccagggnagagcatgagaacaaacattcccaggggcatgtaggntagggatacttccagacttncagttcattcctncccccttncatgggttttctgtttac

SEQ ID NO: 168772 - DNA, 489 bp, Homo Sapiens
  misc_feature (402)..(402): n is a, c, g, or t
  misc_feature (416)..(416): n is a, c, g, or t
  misc_feature (442)..(442): n is a, c, g, or t
  misc_feature (458)..(458): n is a, c, g, or t
catccggggaaaaatgcaactgccttctggcgaaaaaccctgctagtaaaacactggtcttcggtgagcaaacgaaaactcgtctggccctgggaaactgcatgccccactttctgggaggggttagtgcaggtgcccgtggacaaaggacaacatttctctggggctttttaacttttattccctaagactctaaaggcgttgatttcaaccctccttcactctggcttcttcaggcaacccacgtggtctcctgtgagaatcttctcgacagttacttatggggacacttgtgaacaattaactgccaggcagagcatgagaacaaacattcccaggccatgtaggataggatactccagactccagtcatcctcccccatccatggttttctgttactnatggtttccagttncttcattagccaacttgcagaccganaatattaaatggaaanttttcaggatttaaacaactttttaagtttt

SEQ ID NO: 168773 - DNA, 744 bp, Homo Sapiens
catgagtcccagccggatcactgccgccttggtgttgtcgccaaaagcccaggccatcacagaagccaagcccccacggccactacattctttaaggctccacagatctctactgtgtccacctcttgcaccactgtgatacggaagtttggtgtctgcatcagctctttcaggagttgtccctgggccgggtccttgcagtccaatggttgtctcacagaacttctcatcagccatcctcgctggcaatgttggcccccatcagcacatctcatggggatgtccgaggcgctccccaatcacttccgagatgagcttcagcccattggggccctcgtctacccccttaataagagatatgccagtggcgtttgccttcagatggcccttgagctggtcacagatcttgccgatgaactgatggggcaccacaaagatcaggatgtcagcatcctctgcagcctggaccacatctgggacagccaccacatttgggggcaacttgtgccctggcaggtatttgacattctcatgctgcgtgttgatgatctcagtcagctttttgcctccaatgtcttcctcaaatacccacatggtcacccgtgggtcaaactgtgccagctgggctgcattgccacccacgatcttggcgatggctgagccccagttcccggagcctacaatgcagactttcttgctagccatggtgccgcgtctctgcctgagccggctcagtgccacact

SEQ ID NO: 168774 - DNA, 803 bp, Homo Sapiens
  misc_feature (44)..(44): n is a, c, g, or t
  misc_feature (51)..(51): n is a, c, g, or t
  misc_feature (93)..(93): n is a, c, g, or t
gttgttaagctgtgttggggacagctcctgtctgttaaggctgntacgttnccgtgggacggcgtgaacgaagctgtcttttggtggggctgncagcaggacggggacggcgcagggaacacagtcttctttctcttgaagggtggatgagggacggggcaggccgaagggcacgggctccttctccagggctcggtacaccaagtgcatggccacggcgaactcatctcgatccaagtgcccatccgtgtcaatgtcactgaggtcccagaccctgcccaggacatcaagaggcagctttgatgttcatgaggactggcttgactttgtctccagagagcaaaccattgatgggcaagaggctttcaaaaatcccatcaaatttggccttttcttccaccctcacagcccagtgggcctctgcagaaggcggtgtgaccatcagagggctgctggtgtcgtgaaatttaggcggtggcatgctcaaattcagattgctcaaggtaacttcatggccactctgtgcacaggccaccagtctcagtgcaacatagaaaccctgtttgtccaagaaccctttaccttctggatcggccaagtcccatatcttcccaaggataatgtccgagaggccagacttctttagaaaaagcgcagcttcactcgcccccaccctccctgtgtatgccggatcgacctgcttgtaataagattcatacaacgaatttccagtgggaatctgctgggagagggggatgagcggcgccgccatcttcccgcggactcgggctccgagcgccggg

SEQ ID NO: 168775 - DNA, 753 bp, Homo Sapiens
ggggcagaacataggttgccttagagaggttccccggtgtcccgacggcggctcaagtcagagttgctgggttttgctcagattggtgtgggaagagcctgcctgtggggagcggccactccatactgctgaggcctcaggactgctgctcagcttgcccgttacctgaagaggcggcggagccgggcccctgaccggtcaccatgtgggccttctcggaattgcccatgccgctgctgatcaatttgatcgtctcgctgctgggataggtggccacagtcaccctcatcccggccttccggggccacttaagtgcggcgcgcctctgtggtcaggacctcaacaaaaccagccgacagcagatcccagaatcccagggagtgatcagcggtgctggattcctgatcatcctcttctgcttcatccctttccccttctctgaactgctttgggaaaggagcagtgtaaggcattcccccaccatggaatttgtgggccctgataggggccctccttgccatctgctgcatgatcttcctggggctttgcggatgatggactgaatctgcgctggcgccataagctgcgtgctactctacagctgcctcactacctctcctcgtgggcctatttcccccacttttggcaacccgaccctttgggggggcccaagcccctttccgcccgaatactttgggcctggcttctggacttggggaaatccctgtactaagggccaaccgggggggtggg

SEQ ID NO: 168776 - DNA, 931 bp, Homo Sapiens
  misc_feature (761)..(761): n is a, c, g, or t
  misc_feature (764)..(764): n is a, c, g, or t
  misc_feature (783)..(783): n is a, c, g, or t
  misc_feature (796)..(796): n is a, c, g, or t
  misc_feature (802)..(802): n is a, c, g, or t
  misc_feature (808)..(808): n is a, c, g, or t
  misc_feature (819)..(819): n is a, c, g, or t
  misc_feature (842)..(842): n is a, c, g, or t
  misc_feature (873)..(873): n is a, c, g, or t
ttcagcaggatttccctgatctcaaacacccatacttccccttagtttcctggaactgactttctatctgcataaatacaacctgattctctagctcactgtttttctcaatcctgtctccattgctgctcagcagaaagtccagggatccagatcctccttgctggatcacagcatccggggacctttgacattcccctcatccatcatcttcagctctatccaggtaagctcctttctctctgcaaaaggtttctgctcttctctgctgtgtccccactctttgatccaagtctgagtcccaccttctcatgcccagtctgagtcccaccttttcatgccccgcaaccccaagctcatcttcctatatgagattgcagaggaaactagggtgtgctgccatttgatttaacccacttctctttctcccagccaggctgattacccctcaaggccatcaaggctttgggaggggaggggttttatcttgggggagaacaaaattaaactgcgctcaaattactgatgagttaaagttttataatactatacaataacatttatcccaaacagaatattacatttttgatgaatcataaggcactttaagtgattaaaatgccttttgtcattaggcatattaattattatgggtaagtgaaaatgcaaaaaaatgaaattagcaaatctctctggttgatagcatgatggatatgtcaacttttcctctactagaaaggagataaaatagagtaacatcnggngctcaatatcacctctatnggctatatttcanggtggnaatggnctaaaaacttnctgacaacaaacttattggagtntaattataaaagccattaatagtttaaagcnctacattaaagtatttattaggaaaatcacccatattatgtcatacaatatgcctaat

SEQ ID NO: 168777 - DNA, 636 bp, Homo Sapiens
ggacaagatcaccatctcaaagaacttcaaggagaatgtgattcgccctatcctgaaagctcacttccggagggatgagtttctgggacggatcaatgagatcgtctacttcctccccttctgccactcggagctcatccaactcgtcaacaaggaactaaacttctgggccaagagagccaagcaaaggcacaacatcacgctgctctgggaccgcgaggtggcagatgtgctggtcgacggctacaatgtgcactatggcgcccgctccatcaaacatgaggtagaacgccgtgtggtgaaccagctggcagcagcctatgagcaggacctgctgccagggggctgtactttgcgcatcacggtggaggactcagacaagcagctactcaaaagcccagaactgccctcaccccaggctgagaagcgcctccccaagctgcgtctggagatctatcgacaaggacagcaagactcgcagactggacatccaggggcaccactgcaccctgagaaaggggtggcaacaccatctagcaaccacctgccctgctcctatgggccctcaccatccaataaagtccctggctgtggcatggcaactgacttaccttcccctcatatgacgcgggtccg

SEQ ID NO: 168778 - DNA, 805 bp, Homo Sapiens
  misc_feature (569)..(693): n is a, c, g, or t
  misc_feature (695)..(733): n is a, c, g, or t
  misc_feature (736)..(736): n is a, c, g, or t
  misc_feature (740)..(756): n is a, c, g, or t
gggagggcgcctgtgcttgaggttgggggttgcgtcgctctctggtaaaggcgtgcaggtgttggccgcggcctctgagctgggatgagccgtgctcccggtggaagcaagggagcccagccggagccatggccagtacagtggtagcagttggactgaccattgctgctgcaggatttgcaggccgttacgttttgcaagccatgaagcatatggagcctcaagtaaaacaagtttttcaaagcctaccaaaatctgccttcagtggtggctattatagaggtgggtttgaacccaaaatgacaaaacgggaagcagcattaatactaggtgtaagccctactgccaataaagggaaaataagagatgctcatcgacgaattatgcttttaaatcatcctgacaaaggaggatctccttatatagcagccaaaatcaatgaagctaaagatttactagaaggtcaagctaaaaaatgaagtaaatgtatgatgaattttaagttcgtattagtttatgtatatgagtactaagtttttataataaaatgcctcagagctacaattttnnnnnnnnnnnnnnnnnnnnnnnnnnnnnnnnnnnnnnnnnnnnnnnnnnnnnnnnnnnnnnnnnnnnnnnnnnnnnnnnnnnnnnnnnnnnnnnnnnnnnnnnnnnnnnnnnnnnnnnnnnnnncnnnnnnnnnnnnnnnnnnnnnnnnnnnnnnnnnnnnnnngcngcgnnnnnnnnnnnnnnnnnaaaaaacttttcaaaaacccttctgggggggggcggggccccccacaag

SEQ ID NO: 168779 - DNA, 296 bp, Homo Sapiens
ctggtccccgtggctatgagggctattctcagatagttcggcctcataggagggccgctcaaacttggaggcgtagtcattggtgtcaagcacggtgacacgcagaagggcacagctggcgcgtggaggggctgaccgacatcctgcaccttgatggtaaggtcatagagagtcccagcgctcacggtccaggttgcccatcacaatgagctgtggttgcttctcctcctggtcctctgccaactgaagcccaaatagatcctggacctcaggcccagcctgcagctcataggccg

SEQ ID NO: 168780 - DNA, 858 bp, Homo Sapiens
cgttgctatgagagagagcggaaggagcagctgatgcccagagcggggcagagcggcgggtctatgttcacgtccccccagcagcaggcggaaccacccagccagggcactcagtgcattggactgtccacatgttcttgaggaaagccggtggaagattctggaatgccgtgcggatgaacttcagcgcccgagtcagtcccagctcatcctccccagtttaccactttgttctaataggagatgggaacacgagaagtatgatggctttgccctgggctgggaatacctcacccacgcccagttccagaaaggcctccagctgagcagacggccccgatcccgccagaacggccttttgcttccagccaaagaacaccgccaacacgcacacctccaacctgggacatcccacgctgggcctcgcacggaggaacctgcagaatttggattctgagggtagtcgggaggcctcggtagccaggcagaacaggatatctgccaaagggtgtctgatgtggggtggggctggcatcctcccaggaaggttctaggtgggaccccgtcttctgggggcgggggtgtcttttcatcttccctggtttcctagaactcactttcctttgacggcgtgtgttggtcccatctctcagaccagctcactgaggcagaggagttgctcagaggctcacatgggcacccccattggttcgtgtgagcagctgcccagccccaggcctgccctcggcctggtccagcatgaaggcgtttccatctgcaaggatgcacggtaccctccccgaaagcaagcctgtcccctacccaaacttgggaataaactgggaaactgggccaaag

SEQ ID NO: 168781 - DNA, 402 bp, Homo Sapiens
taagtataacgatctctgtcactgagaagtacgaggcatggggagtaagtgcagcagaagagaggcgaagaaaatccatcggcttttctatttctcttgggagaagactgaaacaagtgtacttagatccccagtcagtattaaaacttgtgatttctccagactgttctgaaaacttgtcgccagtccagtaaatacttttgtcttcacagatattaacaaggcaatgcagaaattctctaggattgtgttatttctgtgtctctctcaaccatttgagagtaacacagcaaaagttgggaaagctaacgttggcacacagatccccagcctggtcctgactcgctcaactacccaggagcacctgcgtggcccagcgtcccctcatagcagcggggccag

SEQ ID NO: 168782 - DNA, 1219 bp, Homo Sapiens
gtcagccgaagcagatggaatcccagttggaaaaggaggcccggttccgacagctgatggcccacagctcccacgactcggccattgacacggattccatggagtgggagacggaagttgtagagttcgagagggagacggaggatattgacttgaaggcactggggtttgatatggcagaaggtgtgaatgagccttgttcccggggactgtggcatatttgtcactaaagtggacaaaggaagcattgctgatggccgcttaagggtcaatgactggctgctgagaatcaacgatgtggacctcatcaacaaggacaagaagcaggccatcaaggcgctcctcaatggggagggggccatcaacatggtcgtgcggcggaggaagtccctgggtgggaaggtggtcacgccgctgcacatcaacctcagtggacagaaagacagtggcatcagtctggagaatggagtgtatgctgccgctgtgctgcctggaagccctgccgctaaagaagggtcccttgctgtgggagacaggatcgttgcgatcaatggcattgcactggacaacaagtctctgaatgaatgtgaatctctgctgcggagctgccaggactccctgaccctgtccctcctgaaggtattccctcagagctcctcgtggagtggccagaacatttttgaaaatatcaaagactctgataagatgctgagttttcgagcccatggcccggaggtccaggctcataacaaacggaacttgatacagcacaataactccacgcagacagacatcttctacacggacaggctggaagacaggaaggagccaggccccccaggaggcagcagctcctttctgcataagccattccctgggggaccattgcaggtctgcccccaggcctgtcccagtgcctctgagcgtagcctgagctccttccgctcagatgcctctggggaccgtggctttgggctggtggacgtgcgtggccggcggccactgctgccctttgagaccgaggtgggcccctgtggggttggggaggcctccctggacaaggcagactctgaaggctccaacagcggcgggacctggcccaaggccatgctcagctccacggcagtgcctgagaagctctctgtttataaaaagccaaagcaaagaaagtccatctttgaccctaacactttcaaacgccccctagtacaccgtcgaa

SEQ ID NO: 168783 - DNA, 869 bp, Homo Sapiens
  misc_feature (829)..(829): n is a, c, g, or t
aagacagcaaaggagtcggagaaatacagggaggagcgggacgctgtgtacagcgagtacaagctcatcatgagtgagcgtgaccaggtcatctctgagctggacaagctgcagaccgaagtggagctggccgagtccaagctcaagagcagcacatctgagaagaaggcggccaatgaggagatggaggcgctgcggcagatcaaagacacggtgacaatggatgctgggagagccaacaaggaggttgaaatccttcgaaagcagtgcaaggctctgtgccaggagctgaaggaagccctccaggaggcggatgtggccaagtgccggcgggactgggccttccaggagcgagacaagattgtagcagagcgtgacagcatccggacactgtgtgacaacctgaggcgggagcgggaccgtgcggtgagcgagctggctgaggccctgcgcagcctggatgacacccgcaagcagaagaatgatgtcagccgcgagctgaaggagctcaaggaacagatggaatcccagttggaaaaggaggcccggttccgacagctgatggcccacagctcccacgactcggccattgacacggattccatggagtgggaaacggaagttgtagagttcgagagggagacggaggatattgacttgaaggcactggggtttgatatggcagaaggtgtgaatgagccttgtttcccgggggactgtggcatatttgtcactaaagtggacaaaggaaagcattgctgatggcccgctttaagggtcaatgactgggctgctggagaaatcaacgatggtgggacctcatccaacnagggacaaggaaggcagggcccatcaaggccgctcccttt

SEQ ID NO: 168784 - DNA, 545 bp, Homo Sapiens
tactcttctctgctctacttaaacaataattcatctgggtcttcttgtataatacaaaattcttccatgggagtctgatgatttgggggccagcaactcttctcacatgtgtaaactagaattgttccaaattccacagaaagacctaaattagcactcttgagcatgctgaccagtgctggcataagctgaaactcaaatatcctttggcctccacactggctgcaggctgggagctcggtgacttctgatgtagggcaggtcaaaaagagtggctctccactccaggaatacctcaaaatctgctcctgacaagcagcaattcgcttcatgaatttgtaaaacgtctgatctccacttttaattatggtcttctcatatttttcatcaccatcattaggaaggctttgggaaagcaactgatccatggcaatgccttctctctgctgatagtccctcagaaggctgtgggcatgatccaggttgacaaagtccctgtaatcatcctcatctgcaacacagatgtagtagagcagagaagagta

SEQ ID NO: 168785 - DNA, 510 bp, Homo Sapiens
ccagctcaagccccgtcctgaacacccagcggcaaagggaccgcagagaaactggagaactctcctggccatgggaagtcgcctgaccacagaggccgggtcagcagcttgctgcacaagcccgagctccctgatggagagatgatggaagtcctcatctaactgccatccctgtggaatttcagtacagaacactgacaaacaaggaaagcggcagagaaagaagaaagacctagaaggttgtagatgggaaatcaggaatgatttgaactgataaagatttcagactcataagaacacattttataaatgttaaacacaaaaactacatgactgaagatagaagagaatgcgatggattttattacacatggtggaagagagaagaggcgtgtaggtttgcaaacaaagttaagaaataggaaactgaatttttcattgtacagaaaatgtatctccttggggagggcctgtgcacccccattctctgattataaacagataaacccc

SEQ ID NO: 168786 - DNA, 1200 bp, Homo Sapiens
gggagtcacggtgaggcgactggacccacactctcttaacctgccctccctgcactcgctcccggcggctcttcgcgtcacccccgccgctaaggctccaggtgccgctaccgcagcccctccatcctctacagctcagcatcagaacactctctttttagactccgatatggggtcctccaagaaagttactctctcagtgctcagccgggagcagtcggaaggggttggagcgagggtccggagaagcattggcagacccgagttaaaaaatctggatccgtttttactgtttgatgaatttaaaggaggtagaccaggaggatttcctgatcatccacatcgaggttttgaaacagtatcctacctcctggaagggggcagcatggcccatgaagacttctgtggacacactggtaaaatgaacccaggagatttgcagtggatgactgcgggccggggcattctgcacgctgagatgccttgctcagaggagccagcccatggcctacaactgtgggttaatttgaggagctcagagaagatggtggagcctcagtaccaggaactgaaaagtgaagaaatccctaaacccagtaaggatggtgtgacagttgctgtcatttctggagaagccctgggaataaagtccaaggtttacactcgcacaccaaccttatatttggacttcaaattggacccaggagccaaacattcccaacctatccctaaagggtggacaagcttcatttacacgaatatctggagatgtgtatattgggcccgatgatgcacaacaaaaaatagaacctcatcacacagcagtgcttggagaaggtgacagtgtccaagtggagaacaaggatcccaagagaagccactttgtcttaattgctggggagccattaagagaaccagttatccaacatggtccatttgtgatgaacaccaatgaagagatttctcaagctattcttgatttcagaaacgcaaaaaatgggtttgaaagggccaaaacctggaaatcaaagattgggaacttagtggaaaccggaaaagcaggtcttgatgggtcctagaattttgccatttctgagattgagccattgaaggcattccatttctaaagcttatttagcaggtgcttctaaagaattccacactaacgtgataacatggtttttgtaacactatgtagga

SEQ ID NO: 168787 - DNA, 229 bp, Homo Sapiens
aaagtaccttatgtagcccaagaaattcaagaggaaattgatgagctccttcaggagcagcgtgcagatatggaccagttcactgcctcaatctcagagacccctgtggacgtccgggtgagctctgaggagagtgaggagatcccaccgttccaccccttccaccccttcccagcctactgagtacgaagatctggagtgtagagcagagaagagacaggtcgtggta

SEQ ID NO: 168788 - DNA, 561 bp, Homo Sapiens
aggacgcgaggcctgggtggctttccggcacgaggcaaccgacagactatgggggctccggcaaccaggcgctgcgtggagtggctgctgggcctctacttcctcagccacatccccatcaccctgttcatggacctgcaggcggtgctaccgcgcgagctctacccagtcgagtttagaaacctgctgaagtggtatgctaaggagttcaaagacccactgctacaggagcccccagcctggtttaagtcctttctgttttgcgagcttgtgtttcagctgcctttctttcccattgcaacgtatgccttcctcaaaggaagctgcaagtggattcgaactcctgcaatcatctactctgttcacaccatgacaaccttaattccgatactctccacatttctgtttgaggatttctccaaagccagtggtttcaagggacaaagacctgagactttgcatgaacggttaacccttgtgtctgtctatgccccctacttactcatcccattcatacttttaattttcatgttgcggagcccctactacaagtatgaagag

SEQ ID NO: 168789 - DNA, 832 bp, Homo Sapiens
cggccgagacggacatgaagcaatatcaaggctccggcggcgtcgccatggatgtggaacggagtcgcttcccctactgcgtggtgtggacgcccatcccggtgctcacgtggtttttccccatcatcggccacatgggcatctgcacatccacaggagtcattcgggacttcgcgggcccctactttgtctcagaggacaacatggcctttggaaagcctgccaagtactggaagttggaccctgctcaggtctatgctagcgggcccaacgcatgggacacggctgtgcacgacgcctctgaggagtacaagcaccgcatgcacaatctctgctgtgacaactgccactcgcacgtggcattggccctgaatctgatgcgctacaacaacagcaccaactggaatatggtgacgctctgcttcttctgcctgctctacgggaagtacgtcagcgttggggccttcgtgaagacctggctgcccttcatccttctcctgggcatcatcctcaccgtcagcctggtctttaacctccggtgatggctgctcggtggccccacacccaccaggggtcccgaggaaacagcccgccatcccttttgggttccagatttttttcctcctcaccccaaaaggcagggttggggccttgcttgttgtggaaccggggggtccggggctgggcagggatggaaagggactggaagggacccaccattgaaattgggggggttttgttttggtcttccccttggccttctctaaaaaagcaccccttgggctccccttcctttcccccaaggggccctggggggaactctccccgggcc

SEQ ID NO: 168790 - DNA, 955 bp, Homo Sapiens
  misc_feature (710)..(823): n is a, c, g, or t
tagatttctgtgctttcttcctttccctctttgaagcaattaaaatcttccttgataactgctgtttctttctactcttgtttctggcaatttagtgggttccttctctagtggtcttaaatctcattccactggtggcaagatggggcctagccttcttttcacatgtctaatcttttcctttctcatggtgccctccatggaagtcacagtcaacactgaataaatgactagaatgacacgtgtgcgtgcgcacgcgtgtgcgtgtgtgtgttcatctgtctgcatgtggatcaatttcttttagataaataatttattgtatgaattattttggagttatattcatgattacactgctccctcgtcccaaatagcagtgatcttttcccccctcataaaatgtataatctggtctcaggttggattctttggtacatttctctcttctggatgccatgcagcttaattaaaaccttgcttaaaaacaaaaagtgaaaattgtgtactcttgtctggaataccgcctcaggtggtggcacagagaggggagaaaacctttgcctcataatttgggtaagtgtagtggtttgattccaggtcccttgaaaaagtagatctactgaattgggcagactcatctatagctttctgaggggtcttctctcctcctctccagctgtattttgaaaattacagttctagttggnnnnnnnnnnnnnnnnnnnnnnnnnnnnnnnnnnnnnnnnnnnnnnnnnnnnnnnnnnnnnnnnnnnnnnnnnnnnnnnnnnnnnnnnnnnnnnnnnnnnnnnnnnnnnnnnnnaacccccgtcttctactgaaaaataaccaaaaattaaccccggcggtccttgggcgcaatggccttggtgggtccccagatcttacctcggggaaaggcccccaaggctacggaaaaaaatacccccttttg

SEQ ID NO: 168791 - DNA, 570 bp, Homo Sapiens
  misc_feature (144)..(144): n is a, c, g, or t
  misc_feature (146)..(146): n is a, c, g, or t
  misc_feature (487)..(487): n is a, c, g, or t
agcatttccagcagcgtgatctcctggtgaagcagaacaggtaatataaaaccgatacaataaggcctcccctctatccttatctgtctggtcgagtcattccgggccgagtgggcaccatcatgggacgggcaggaggtcttntnattgggggcccaggcatcattggcatatggcctcccatgggcggcctcattccgggagcaggtcccactggcatcatcccaggaggaggagggcccatcattggcatcatgggagggccccccatatggggtgcttggcatcataccagggcgaggaggacccggaaggctggggggaggtggtatcatcgcccctgcaggaggaggagtcagcatttccagcagcgcatggctgatggcaagcttcctggagcttcctgagaccttctgttcagcttcaaaacctgcctgccagcaaagcatgcaagaaagatgactgtcccagcgaagtggcttctctnaactggacagagtgttccacaagctgcggggaaggcacccagactcgaagcgccatttgccgaaagatgcttaaaaccggcat

SEQ ID NO: 168792 - DNA, 867 bp, Homo Sapiens
ggggtcatttccgggcgtcacgtaacggagtggccaacggcctgcagagcaacatgcccaagttttattgtgactactgcgatacatacctcacccatgactctccatctgtgagaaagacacactgcagtggaaggaaacacaaagagaatgtgaaagactattatcagaaatggatggaagagcaggctcagagcctgattgacaaaacaacggctgcatttcaacaaggaaagatacctcctactccattctctgctcctcctcctgcaggggcgatgataccacctccccccagccttccgggtcctcctcgccctggtatgatgccagcaccccatatggggggccctcccatgatgccaatgatgggccctcctcctcctgggatgatgccagtgggacctgctcctggaatgaggccgcccatgggaggccatatgccaatgatgcctgggcccccaatgatgagacctcctgcccgtcccatgatggtgcccactcggcccggaatgactcgaccagacagataaggatagaggggaggccttattgtatcggttttatattacctgttctgcttcaccaggagatcatgctgctgtgatactgagttttctaaacagcataaggaagacttgctcccctgtcctatgaaagagaatagttttggaggggagaagtgggacaaaaaagatgcagttttcctttgtattgggaaatgtgaaaataaaattgtcaactctttcagttaaagcgaacaactcttcccccaaacacaccccgccctaataccacaccctcactattctcaaaccatctttttttccgccaacacccctcgaccacacacccacctatatcttt

SEQ ID NO: 168793 - DNA, 291 bp, Homo Sapiens
acctcttatattgcttctcctgggcattgggatcgctgcctccagctcctgcaggcaatggccagtgtgaggcgttgaatgcattctactttatattatccaagttaggtgggaaatagcttttaatttacagattttcacttcgcaggtaactctgaaggcacacatctgttttatataacaagggatatataaccagcaggagctcatagtagcatttgtagactggttatttgcttttatgtttctttgggactggaagtaacaatttttaatgttaactgtcagttt

SEQ ID NO: 168794 - DNA, 913 bp, Homo Sapiens
ggagcctctcctcctggtacgaggtgacaggcttatggaagctcttgagggcattgatggccttggcatagcccacggccctccacttgtctccctgaacactgtaggctttggccagaacttccagcttctctgtgatatggaggttgtgattggtcgccttctggcttgagggctgtgcacagacccacttatccaggacagcaggggctgggctaggctcacaatctccctcaagggaggtggggtagtggccactgatgagggcttccagatcagctgcactaacctgggtttcttccccatcactggcttcatcatcagagatgggctgggcttgggtgtttggtgcctcttttgccttttggggaggagacacaggcctggtgggaggaggaggaggagaaagggctgtctgaagcagggcctcatgggtgccaggaggaatagaagcatcctgctctgccttgctgggctgtggatggtccaagtacctactggggatgaagatgctgaatccagctacatccaccagcctcctctcctgaaggcacaagctcagccaggctgacttcaccagctgagcacccgggggcagctggggtagtctgagaaggcggagggctcgctcatagtccatgccttcatccaccacaatgtgagtgacacctgggccctgggcagggcatagctggccgccatgctgaacaatctgcttctcaaagagttctgcccgggctcgtccaatgccagtgcgcacaacatgggcccgaagggagctcagccactctgcaggccctggacaggcagagtcagctccaatatctgattctggacataaacaacgtagggctgaagcacatgaaggcagcagagccaatgagagcggacgaaggggggaaggagggcaaat

SEQ ID NO: 168795 - DNA, 473 bp, Homo Sapiens
gaccggaacgtgttgagagcgatgagacctggacttagatatctctttcttgccctagaacgagattcactggtacgcttgcgtgatttgtgttcacgaagatttggaacgcttacttcgagatcttaatgaagagtctcttttcttctctttctcccccttatcacggttcttatttttcttgcttttattcgtgagtgtccttaacttttacaaaaatttcataatcatctttttcctctgaagaagactctgaagctctttctggcatactacttacaaccgggctggcagcagatctgtcacgtccaacatcacttgcaagtaaaggtccttcaatgccagctctaaggcttgtaagacgttccatgtccttaggaagtaacggtctcactaaatctgcttcattaatatcctcaatattggcagaaaatcctgaatcaggcagtgtctctttaggaggaggaggagga

SEQ ID NO: 168796 - DNA, 868 bp, Homo Sapiens
tagaggaccctgcacggttgtcataccctggcacaggtagtgtggcggaattgacatcgttactccagtcacctagagcaggctctcagcacccaaccttcccctcattgtctccccttcggcgtcttgagaaagggaaccagtccctaatcttttaggcacgtggctcccacccctctatcttggggaatgggcgtgcgccctgaaagctcagtagtgtcctcccttccacctcctgtagttctcatggtgccagcgcctggcccacccacattgtgcaatgaacggcctggcttcgtcattctatgtagaatgttttagagttcccccgtcggagacagcttcaaatttttgccatgctattttatcaatacgaaatcttagtgccaaggttcttttgctttaaggttttcccttagaaacacccagatggcggccgtcttgcttaactcacaggtgaagcagagaacgctccctgaaacaggcttgaatctgcaaagaatatctgaacgttgttgggcaagttaattttcgtgttttgcaccttaaatgagtaaaagaatatggcgctctttaaacagttgggagacagggcggagagggagaatgctcaaaggcactgtggtagttaaatctttttgagaggcttaaattttcatcaggctggtatgaactggcagttctcagccactgctactaacctacttttttagaatgtaggtttcaaattatagcccacagatataagctactctatactaaaatgctgagtaattttcattttgagtaactaaaggcaaacattcttgatattgcattgaggagcactataatacataccttggttttcttttggtactaacgggga

SEQ ID NO: 168797 - DNA, 884 bp, Homo Sapiens
ctggtggtgctgctggacctggccttggagggaatggccgtcttcgggttcgtcctcttcttggtgctgtggctgatgcatttcatggctatcatctacacccgattacacctcaacaagaaggcaactgacaaacagccttatagcaagctcccaggtgtctctcttctgaaaccactgaaaggggtagatcctaacttaatcaacaacctggaaacattctttgaattggattatcccaaatatgaagtgctcctttgtgtacaagatcatgatgatccagccattgatgtatgtaagaagcttcttggaaaatatccaaatgttgatgctagattgtttataggtggcaaaaaagttggcattaatcctaaaattaataatttaatgccaggatatgaagttgcaaagtatgatcttatatggatttgtgatagtggaataagagtaattccagatacgcttactgacatggtgaatcaaatgacagaaaaagtagacttggttcacgggctgccttacgtagcagacagtacagggctttgctgccaccttagagcaggtatattttggaacttcacatccaagatactatatctctgccaatgtaactggtttcatatgtgtgacaggaatgtcttgtttaatgagaaaagatgtgttggatcaagcaggaggacttatagcttttgctctagtacattgccgaagattactttatggcctaagcgatagctgatccgaggttggaggtttgcaatgtccactcaagttgcaatgcttaactctggctcatattcaatttctcagtttcaatccagcatgatcaggtggaccgaactacgaagttatatgcttcctgctactattatgtgtgagccgat

SEQ ID NO: 168798 - DNA, 541 bp, Homo Sapiens
gccatccgctttcccaatctggtggacccctggactcctcatctgtatgctcgtctccgggaccctgctcagcaagtgcggaaaacagcggggctggtgatgacccacctgatcctcaaggacatggtgaaggtgaaggggcaggtcagcgagatggcggtgctgctcatcgaccccgagcctcagattgctgccctggccaagaacttcttcaatgagctctcccacaagggcaacgcaatctataatctccttccagatatcatcagccgcctgtcagaccccgagctgggggtggaggaagagcctttccacaccatcatgaaacagctcctctcctacatcaccaaggacaagcagacagagaccctggtggaaaagctgtgtcagcggtttccgcacatccccggaactgaggcggcaagcaccgaagacctggccctactgtggtgttcacaagcctgccccccttcaaaaaaagcgaaggggccttccggaaagaaaagccttggaaaaatttttttgaccttggttttttggg

SEQ ID NO: 168799 - DNA, 2071 bp, Homo Sapiens
  misc_feature (243)..(361): n is a, c, g, or t
agagtgggggatttccagaagcccctctagtccgctgggccccaggatttttccctagagaaaaacacggcttttggtcccagggttccacgttgcccttccgtgggaccccccggcggcccaaaaaggaaaggggtcttagaaagaggctttcttcgagagggcccgaaggccgcccccaccaagtttgaagtggctggtttttcgttttttcctccgcaggaagaagatggggttttctcnnnnnnnnnnnnnnnnnnnnnnnnnnnnnnnnnnnnnnnnnnnnnnnnnnnnnnnnnnnnnnnnnnnnnnnnnnnnnnnnnnnnnnnnnnnnnnnnnnnnnnnnnnnnnnnnnnnnnnnaaaaaaaagagacagacaaatattttacaagggaaacagaattcgaattccaggtcaccctacaggataccctgcacagggaggacaggaacagacttcctaggatctgtgcctgcgagccgatgctctgagaatgggagttgttttcttgggtgtctcgtcttctgtcatctctgctgaaagatcttcctcactggactcatcacttgagaagacaactttgggtttctttttggaagctcgctgctgggtgtttggatgccgacgggtagtacggcggggctctggtgtgacaaagtcattgtctgaggctgtagaagccagaggctggtacctagaaccagtggatggtttcttggctgatggcgctctctggctacctgcttggccaatctcaagctccttgattccatccaaacctctggtatgacaggcccgaagcttctgctcaaattcatctattatagccttgccctcaggcttggccccacgtcgcagcttgcccacaactgacaaaaaagcactgaagatggactcatctgacagtttgtctccaaaacagtcaaaattgtcaagcatcttacggaggcctcgctctgtgaggggcagctgtgacacacagtaggccaggtctcgctgctgccgctcagttcgggatgtgcggaaccgctgacacagcttttccaccaggctctctgtctgcttgtccttggtgatgtaggagaggagctgtttcatgatggtgtggaaaggctcttcctccacccccagctcggggtctgacaggcggctgatgatatctggaaggagattatagattgcgttgcccttgtgggagagctcattgaagaagttcttggccaggacagcaatctgaggctcggggtcgatgagcagcaccgccatctcgctgacctgccccttcaccttcaccatgtccttgaggatcaggtgggtcatcaccagccccgcgtgttttcccgcacttgctgagcagggtcccggaggcgagcatacagatgaggagtccaggggtccaccagattggaaaagcggatggccagatccccagtggcaaccatgaggctagaccggacaatgggaagtggagacttttccagcatggtgaacagaagacgaagctgggagtcgcagaaagtggcactagatcattgcagaacttgccaagggcaagtgaagcagctgcagagaggtctagggttgctatagaggcctgggttgttacagacttcaagcaagagctggaacaaaggcagccagtgtctgtgtgccatccaacagttccatctcgcagatgccacggattagttctgcctctgtgtcatctgctgttgccccaaccagccccagctcctcctccatggtggtctcagagctcgtattcttctccttgggatctttggtcttgtgctcctgttcttcccggagaactcggcgccggcagagctctccactcactgcctgctccaagtggaccagctgctgcagagccacatccccagccagggacagcaggttcatcaacaggaaagtggggagcattgcgggggactccttcgggtcctcctgactggttctcttctcttctagcttctccagggcctgttttgcacagccctgcaatatctgggcacagatcacttcggggccctctgccagttggtaaatgagggtcactgccacctctcc

SEQ ID NO: 168800 - DNA, 1199 bp, Homo Sapiens
gggtacggtccggaattcccgggatatcgtcgaccacgcgttcgattgaattcttgtgatggtcttccaattggggtaccccaggccctgtttggggtgcgccgtatgctgcctctcatctggtctaaggagcctggtgtccgggaagccgtgcttaatgcctaccgccaactctacctcaaccccaaaggggactctgccagagccaaggcccaggctttgattcagaatctctctctgctgctagtggatgcctcggttgggaccattcagtgtcttgaggaaattctctgtgagtttgtgcagaaggatgagttgaaaccagcagtgacccagctgctgtgggagcgggccaccgagaaggtcgcctgctgtcctctggagcgctgttcctctgtcatgcttcttggcatgatggcacgaggaaagccagaaattgtgggaagcaatttagacacactggtgagcatagggctggatgagaagtttccacaggactacaggctggcccagcaggtgtgccatgccattgccaacatctcggacaggagaaagccttctctgggcaaacgtcacccccccttccggctgcctcaggaacacaggtagtttgagcgactgcgggagacagtcacaaaaggctttgtccacccagacccactctggatcccattcaaagaggtggcagtgaccctcatttaccaactggcagagggccccgaagtgatctgtgcccagatattgcagggctgtgcaaaaacaggccctggagaaagctagaagagaagagaaccagtcaggaggacccgaaggagtccccgcaatgctccccactttcctgttgatgaacctgcttgtcccttggctggggatgtggctctgcagccagttggtccactttggagcaggcagtgagtgggagagctctgccggcgccgagttctccgggcaagaacaggagcacaatgaccaaagatcccaggggagaagaatacgagctctgagaccaccatggaggaggagctggggctggtgggggccaccagcaggatgaccactagtaggcagacttaattccggggcatctgcgagatggaactggttggatggcaacagacactgggctgcctttgttccactctggttaaaagctggacaaccagggcctatagaaccaaacctctttgagtggtcattgc

SEQ ID NO: 168801 - DNA, 835 bp, Homo Sapiens
attctaataactatgacacagcaaaggagtgaggggagaaatgttaactctggatgccaaattcagagcaaagtatctattatctccttctcacttttgcagtatctataaataagtggtggggggagaattatatgaataatgttaaataaaagtgcatacagaactgagaaatattttcatggaatttgccacttagttcttaaaattcttataaggaaaataaccatttacaacaaaagactagttacactgttgctgtttagaacatgagagcaaaatgagtaacaatcaaattctctggtttaaacttaattatcttaaaacatgttattctgtaagttgacatctatgccttgaaaattcaaggcagaaagtaaaatcatttagaaagccagaaattccatcaatacatctagacagatgtttgcttgtagtttttggtatccaaaaccttttttccacacatcgcacagatgccttttttgtaggcacagccctggcagtaatgagaacctggttggtgcacagaacttttacaaattctacaagtggagaacttattctttccatatggatcaaatcttgctttttttgaagtcaaagctttattttcattcagctttcttccaccactttctgtggtattcctagcaccatctttccatgtatctggagtgataacagtaccaagtttcttttcacatttttcgcacaccatccttccccacgacggttcccctagccgcaacagcagcagcagcagcaggctgaaaacaacaacactacaacttggaagtattccccttccgggctacgtcaacccacttccccc

SEQ ID NO: 168802 - DNA, 1319 bp, Homo Sapiens
  misc_feature (1184)..(1184): n is a, c, g, or t
tagctggcttaaggagtgagatcccgcttatgagctcctcatcactggcggaacctatgcatagttgacaactcaagcctgagctttttggtcttgtgctgattcggaaggtgaattgagcaggtctgctgctgttggcctctggagattcatttagtaaaagcacatgtacactggtgttggacagagcagcttggcttttcatgtgcccacctacttacctactacctgcgactttctttttccttgttctagctgactcttcatgcccctaagattttaagtacgatggtgaacgttctaatttcagaaccaattgcgagtcatgtagtgtggtagaattaaaggaggacacgagcctgcttctgttacctccaagtggtaacaggactgatgccgaaatgtcaccaggtcctttcagtcttcacagtggagaactcttggccaaaggtttttgcggggaggaggaggaaaccagctttctggttaaggttaacaccagatggtgcccctcattggtgtccttttaaaaaatatttactgtagtccaataagatagcagctgtacaaaatgactaaaatagattgtaggatcatatggcgtatatcttggttcatcttcaaaatcagagactgagctttgaaactagtggtttttaatcaaagttggctttataggaggagtataatgtatgcactactgttttaaaagaattagtgtgagtgtgtttttgtatgaatgagcccattcatggtaagtcttaagcttgttggaaataatgtacccatgtagactagcaaaatagtatgtagatgtgatctcagttgtaaatagaaaaatctaattcaataaactctgtatcagcccccccaccaaaacgtccccgcaataacccacaaaaatgtccggcccgcctcgcgcccttaaaaaacctttcctaaaccatttccctttgggcgcgccggggccccagccaggtaaagttgaaacttgggcccataccgtgttttccctaacgaaaacccctgggtcatgaactcagtggcttggaatttttcccccaataaaaacacccgcccgggcgggaaacccgaagccgtctttgaaacccaaccccaatatgcccgcctcttgaaggttccttccctgggattctatccccatgggagtcccccagccaagncctcaatatctcaattttacccccccgcccttgttccccttcttcccaaataaatgggcccctatattacatttacccatttctggccaaacctggtaaaccccctccaccacaccggcttggattgataccctg

SEQ ID NO: 168803 - DNA, 516 bp, Homo Sapiens
tcctggtggtgctgctgcatgtgtgtaaaacaaataatcaagatatatataagaaaactcaaaaacaagttgttttaaataagtccagctgtttttgctgcctgcagccaaagatttgcctaatttgaatgcttaaatttataaaataaaaatcaaacactgttctgaagtcctgctttcaaatactcttcagagttgacctgaaatcgtttcaacgaattttaagaggtacgttaaataaccaccagatcatttggagcacacatgtgtcaaaatcagcagttagtatttatgagttgtacaacaactgcattctgaccaaatcctccaataaaaatagtgccataaaatttacagcgacattggatacctttgaattgtagccacggacagtagtgacatgaatctttcctgtcacactggtgcacaggtaaaagcccatataccccatagggtagggtctcagcctggtgaaagcaacacaaggatgttcttgagtgagcagcaccaccagga

SEQ ID NO: 168804 - DNA, 407 bp, Homo Sapiens
  misc_feature (12)..(12): n is a, c, g, or t
cttgcccccagncctcactgcggcttatacagtaccctaacctgctactaatcacagagaaaaatgtgaagaaggaggagaagaggaaggctagaagcctgagcaagtgagggtagaaccttttgggactggcctttgaagctctggccagggatggggtgggggccaaaaggacagagcctggtatgtcttcatagtcattgagaatgtggagataccagtttgggtggggggtgatcaccaggggacctagggagatccccttcccaccctctctgttggcctcagagtcactcctgccccctctccctgacttggtgctcacatgcacctcactagggtttgtgaccagggtctggatgagcttgaatttgaatgaattgagtttgtatttctagaaccctggg

SEQ ID NO: 168805 - DNA, 970 bp, Homo Sapiens
  misc_feature (772)..(772): n is a, c, g, or t
  misc_feature (796)..(796): n is a, c, g, or t
  misc_feature (876)..(891): n is a, c, g, or t
gaggccgccgcgggtcatgtgaccggaagggctcctcacggacgccgtccctcctcggcgcggcctgagcgcccggcccgaccccggccatggggtgctgctacagcagcgagaacgaggactcggaccaggaccgagaggagcggaagctgctgctggaccctagcagcccccctaccaaagctctcaatggagccgagcccaactaccacagcctgccttccgctcgcactgatgagcaggccctgctctcttccatccttgccaagacagccagcaacatcattgatgtgtctgctgcagactcacagggcatggagcagcatgagtacatggaccgtgccaggcagtacagcacccgcttggctgtgctgagcagcagcctgacccattggaagaagctgccaccgctgccgtctcttaccagccagccccaccaagtgctggccagtgagcccatcccgttctctgatttgcagcaggtctccaggatagctgcttatgcctacagtgcactttctcagatccgtgtggacgcaaaagaggagctggttgtacagtttgggatcccatgaagagaggggtccttggacagctcttctcctctcttcatcccatctctaccccacccccttgggccccagcctcactgcgggcttatacagtacccctaacctgctactaatcacagagaaaaatgtgaaggaaggaggagaagagggaaggctagaagcctgagccagtggagggtagaacccttttggggactggncctttgaaggctctggcccaaggnatggggtgggggggccaaaagggacagagccctggaatggccttcatagtccattgaaaatggtggagaaacccagtttnnnnnnnnnnnnnnnnatcacccagggggaacctaggggagatcccctttcccacccctctttggttgggcctccggagtcccctccctgccccc

SEQ ID NO: 168806 - DNA, 927 bp, Homo Sapiens
  misc_feature (55)..(68): n is a, c, g, or t
  misc_feature (124)..(124): n is a, c, g, or t
acccggagaggggtgggaaagggggtttctcccctaggttcccccgggggatcgnnnnnnnnnnnnnnaaaatgtatctcccacattctcaatgactatgaagacataccaggctctgtccctnttggccccccaccccatccctgggccagagcttcaaaggccagtcccaaaaggttctaccctcacttgctcaggcttctagccttcctcttctcctccttcttcacatttttctctgtgattagtagcaggttagggtactgtataagccgcagtgaggctgggggccaagggggtggggtagagatgggatgaagagaggagaagagctgtccaaggacccctctcttcatgggatcccaaactgtacaaccagctcctcttttgcgtccacacggatctgagaaagtgcactgtaggcataagcagctatcctggagacctgctgcaaatcagagaacgggatgggctcactggccagcacttggtggggctggctggtaagagacggcagcggtggcagcttcttccaatgggtcaggctgctgctcagcacagccaagcgggtgctgtactgcctggcacggtccatgtactcatgctgctccatgccctgtgagtctgcagcagacacatcaatgatgttgctggctgtcttggcaaggatggaagagagcagggcctgctcatcagtgcgagcggaaggcaggctgtggtagttgggctcggctccattgagagctttggtaggggggctgctagggtccagcagcagcttccgctcctctcggtcctggtccgagtcctcgttctcgctgctgtagcagcaccccatggccggggtcgggccgggcgctcaggccgcgccgaggagggacggcgtccgtgaggagcccttccggtcacatgacccgcggcggcctc

SEQ ID NO: 168807 - DNA, 582 bp, Homo Sapiens
tcctggtggttgccagaggcaagggtggggaggagtgggcagaataggaaggtggaaataaagaacataaacgaagaaagaaacaaacataataaaaatacacatcagcatcaaaggtcaacacaaggtcaaaggtgagagttcaagcatcagagaagctgaagagacagggatttggacgatgtacttgacgccacatcggcatgctttaggcacaacgatgaacaaacggcaggaatcagaagaccctctcactccagtctcagaggggagcacgctcagtagggcttgctgtcattcttcgaacgtttgagctgcactttaagccgcttcatgccaatctgaaagccgttcatggactggatggcagcttgggccgaaacaggattgtcgtaacttacaaaaccaaaacacttgctcaggtttgtctgcttgtctatgaaaaccttggcagacacgacattcccaaagggcataaacatctgcagcaggtcctgatcaccaaactcctggggcaggtggtagatgaacaggttggctccctctggaccttccttctggcttccagcagcaccaccagga

SEQ ID NO: 168808 - DNA, 640 bp, Homo Sapiens
  misc_feature (404)..(468): n is a, c, g, or t
atcgagctcggtaccgctctcgtgagactcagaagaaaaacaaaagaaagaacatacatgcggtctcctcaagccccacagactgtatcagcaaaatgtgctcaggagcctcagaggttttagtgacatcttttatttcattgtttacttcaaagttgtctttaaaactaagcacacagagaaacaaagcctagaaacggactggctgtgtgttcacagaaatacaaacaccacgcggtatgtgctagtagggctgctctgaagacaattacaaagaattggaatcacaaaatcaagtggttatcttatgaagttctagaaaaatagattttttttatattcaaatgcaagtttaaatatttccccttcagcagtcgttctagcaaaaccaatttggcagcacnnnnnnnnnnnnnnnnnnnnnnnnnnnnnnnnnnnnnnnnnnnnnnnnnnnnnnnnnnnnnnnnntacacatcagcatcaaaggtcaacacaaggtcaaaggtgagagttcaagcatcagagaagctgaagagacagggatttggacgatgtacttgacgccacatcgacatgctttaggcacaacgatgaacaaacggcgaatcagaagaccctctcactccagtctcacgaaagc

SEQ ID NO: 168809 - DNA, 604 bp, Homo Sapiens
  misc_feature (243)..(243): n is a, c, g, or t
gttttgagtagaaaagggcctggaaagaggggagccaacaaatctgtctgcttcctcacattagtcattggcaaataagcattctgtctctttggctgctgcctcagcacagagagccagaactctatcgggcaccaggataacatctcctcagtggaacagagttggacaaggcctaggggaaagccctggatgggattatcttccagcttgttgagccttcctaagtttctttcccttcantcctaccctgcaagcccaagttctgtaagagaaatgcctgagttctagctcaggttttcttactctgaatttagatctccagacccttcctggccacaattcaaattaaggcaacaaacatataccttccatgaagcacacacagacttttgaaagcaaggacaatgactgcttgaattgaggccttgaggaatgaagctttgaaggaaaagaatactttgtttccagcccccttcccacactcttcatgtgttaaccactgccttcctggaccttggagccacggtgactgtattacatgttgttatagaaaactgattttagagttctgatcgttcaagagaatgattaaatatacatt

SEQ ID NO: 168810 - DNA, 976 bp, Homo Sapiens
  misc_feature (671)..(708): n is a, c, g, or t
tcctggtggtgctgcttcaccctgaccacctcatcacggagaacttcccgctgaagctctgcaggatatagcccggaggagggaagcatagagaacgggagtggccatctggaaatccagctggttatccaaatcctaaggggagctacagccagcggcatatacttgtttttgtgattattctgtatcagaaatgaaacagaccctcaaattaactttccttcctcatttcttgaggcttctgcttccaacaggcacctctaatcagaccttttctttgaaattcaacaagatttcttaatgctatttgccaagaccatttcacagaaaacattgactgtggctcttgccttatctgttcctttttaggtacagtaaaacaattgtgacagcagtttgagcttgctggagagtggcatcatggggacaaaaggaaacctctgacttgctaatggatgtagccagggactccccatagcaaagggtctgtggccagttgacatccaggatggctgcaagcgcacttgatggtcaggaagtttgcagatactcgccaaggcagagcgcaaagtgctagccactggaaatgcatgacttccctccacccctactctattctgtagttacaaggttagtttctgagacggagtctcagtctgtcacccaggacnnnnnnnnnnnnnnnnnnnnnnnnnnnnnnnnnnnnnngttcaagcgacgtctcctgactcaagcctcccgagtagtagggatcacaggtgactgccaacgatgcccggctaactgccgcatataagaagagacgaggcgtacaccaacctggagcacgggctggacctgtgaaccacctgaactcgtgacacagacgcctgggcactcccaaagtgacgccgaatacaaaggagtaagccagcgaaaccacgaccggaaaaagctaacagaacacaagagaaacaaacgtaacaatcaacaagca

SEQ ID NO: 168811 - DNA, 210 bp, Homo Sapiens
tggtgctgctctgtggctgtttcaaagactgggcgaaaggctgtccggagggcagaccaggtgccttgccgcagagaaaacaccaaagtctcctgttcgctcataaagaagtttttgggatgggagagaatccagaccatcttggggcagccaggccctgccttcatttttacagaggtagcagcaccaccagacggtaccgagctgact

SEQ ID NO: 168812 - DNA, 856 bp, Homo Sapiens
  misc_feature (554)..(576): n is a, c, g, or t
acagcaaatcctgtatatgtatctacatgggagacaggtagacactacttatttgttacattttgtactacacgtttgtgttccaggtttcagcttccctcgctcctgttgttaagaagcgtccctgtcagcacaggtgtgcattgaggaaggggccccagggccttcgctccctcagcactggggtggaggcggcaggaaggggcggcccttacctggcaggtctgggcgcacctttagcaggtggactccgtggggctccaccagccagaagcctttggaaggcaacgaaggcaatgctgctccctgagtccagtccccgcccccaaacccagcccaggtgccttcagctacttcggcttcttaaaccctgcagtgttaaacagaggcattgagaaaggggaaaggcgggtatttttaaaagccaaagattgacccagttacttgagggtagggaggcgggcccagtgcaggaggctgcatccctggcctgctggtgcccaccgggggctgtgcctgtgccgggccgcaggaaaactggctggccccattcnnnnnnnnnnnnnnnnnnnnnnnctggggactgtctcaaacactgcgccgaaaggctgtcccgacggcagaaaagacagccttgcttcgcacagaaaacacggtgcaaagcctgccgccccgcagcataaaggcaacaaccgaccatgggcagacaacccagaccatcttggggcagccaggcgccttgcctgcattttttacagaggtagcacaagtggaattccaacacagaaaactcctttccccttttttaaaaagggatttcggggttccaagtggccataagatgcaaaggggccta

SEQ ID NO: 168813 - DNA, 645 bp, Homo Sapiens
aatgaagccgagtgaatgggggctgaatgtgcgagtccagtagctgaagaggagcgccagatggtggaggaatacacttatttatgaaactgtcttgagttcttcttgaattgccagttttcagcctcctcatgcctccgtctcctttagacgacagggtagtagtggcactatctaggcccgtccgacctcaggatctcaacctttgtttagactctagttaccttggctctgccaacccaggcagtaacagccaccctcctgtcatcgccaccaccgttgtgtccctcaaggctgcgaatctgacgtatatgccctcatccagcggctctgcccgctcgctgaattgtggatgcagcagtgccagctgctgcactgtggcaacctacgacaaggacaatcaggcccaaacccaagccattgccgctggcaccaccaccactgccatcggaacctctaccacctgccctgctaaccagatggtcaacaataatgagaatacaggctctctaagtccatcaagtggggtgggcagccctgtgtcagggacccccaagcagctagccagcatcaaaataatctaccccaatgacttggcaaagaagatgaccaaatgcagcaagagtcacctgccgagtcagggcc

SEQ ID NO: 168814 - DNA, 579 bp, Homo Sapiens
tgccagtgataagagcagtggttggagggcacttggccagttttctgttcagcttttcagtgaatgtgcccctttaaggttcagacttaactttccttaaaaagtggcgttgttcatagaatcgttggactcattaatgaatcgttcaactccactcactgaagcccagacctccgtgcccaggcccaatctcgtcaggctgccagagaaagttggtgctgctcatactggtctcacagtctaagtaagtgtatgtgatgctcccaagcaaaggaaatgcaagctctggaaattcgttaatgtatttgatgtcttagtgttttagtgacgagggagaccattaactagtttatcattaaccacttatcagtgtattgatgttaaagcatttccctgttagctaaaagaggcctgttcatacaagccaactggtatatacgtgtggttcatccatcatctgctgcacatagcagactagaattctgggaaccctgtgcaattcagtctgctataacttgtggaccctggtaaagaaaagcctcagctcatagcgacagcaggcaggggatccacaagagt

SEQ ID NO: 168815 - DNA, 623 bp, Homo Sapiens
  misc_feature (461)..(573): n is a, c, g, or t
ggggtgcgagcagcccgggctacagggttgcctgaggtgtgggtcccaggatggaggagccccaggccggcggtgaggatgctgctcggttctcttgtccccccaactttaccgcgaagcccccagcctcagagtcccctcgtttctccttggaggcgctgacgggtccagatacggagctgtggcttatgtcaggcccctgcagactttgccccagaatgcttcaatgggcggcatgtgcctctctctggctcccagatcgtcaagggcaaattggcaggcaagcggccccgctatcgcgtcctcagcagctgtccccaagctggagaagcgaccctgctggccccctcaacggaggcaggaggtggactcacctgtgcctcagccccccagggcaccctaaggatcctttgaggggtccccagcaatcccctggccagggagcccctctggaagccatnnnnnnnnnnnnnnnnnnnnnnnnnnnnnnnnnnnnnnnnnnnnnnnnnnnnnnnnnnnnnnnnnnnnnnnnnnnnnnnnnnnnnnnnnnnnnnnnnnnnnnnnnnnnnnnnnaagggcaaacccttggggccccccaaactggcttgtccccctttgggggg

SEQ ID NO: 168816 - DNA, 387 bp, Homo Sapiens
taagtcggtacccctggtggtgttgctgcttcagtaggatgcgacaccacacggccgctttgaggaacgcaggttcccctccagcttcgaggagattgaggatcctgtggtctcagttcctgaagtttaaggagatggagctaccagccaaggaggccgacaagaacaggtccaaggagcatctaccaatccctggagggagcggtgcaagcaggccagctcaaggtgccccctggctaccacccgctggatgtggagaaggagtggggcaagctgcacgtggccatcctggagcgggagaagcagctccgcagcgagtttgagaggctggagtgtcttcaacgcatcgtgaccaagctgcagatggaggcggggctgtgtgaggag

SEQ ID NO: 168817 - DNA, 301 bp, Homo Sapiens
ggggggctgctctcagaggatcccgagaggtgggacacgggaagctggagacagaagcttcccctccctcgggcatctgacaggagaggggaggactgccagaaaggctgctatttgctgggccccggcgacaggctgtggaggtggatctcagcagtttcctggggcaggagaacatcttgcatccatggatggttctggatttcttcgaaggtgggcctatctgatggtctcagggccaagcaccatctaatgagatgctgacatcgaagagaccctctgcctgaagaaaccagcacct

SEQ ID NO: 168818 - DNA, 951 bp, Homo Sapiens
tatgtctagtccctggctcgaaagtgctgcatacgactggctgagggccgtactttttttggcttggtgctctgtgactgctgatgccactgggtgtaaacgtccagcctggcagtacaggacacaatccctgcttcattcttggctgacacagtataccacccagcatcttcttttgtggctccctgaatgagcaggcagatgtagccgtggttgtcctggtgcatgctcactcggtcagtgctgtgagtgagtgattcattttctttcttccaaaatatctgaggtggtggcactcccaatacacgacattccagccgcactgggtacccatcagcaactcctgtgtttgggagcttctcaataaacacagggggtttgtgtgcttctttagcagcaaccacaagctccaggctgaatgagttctgtcctgctcggttggtagctatacatgtgtagatgccggcatcacgtgacgtgactggctctatgatcagagagtgcaccccgttctcacgcaccagcatcttgtgagcactgtcagggcgtacgggctttccatctagttgccagcttagatctggggttggtaacccactgactttgcagtccattctgcagagttttccttcttgaacagtcagatctccaggagcctgcaagaagtgaggtctgaagaatcgctcctgaattggttcattttcgtctccactgtcccttgatctagaacgaggccttctgacatgaggatggcctgagggagaccggggacttcgacctctttggttgacagcctgtaccattagccgtccagtacaactgatgcggccctgagggtttgcagccataattgtataattcccatcatcatctagggtggaggctgtggtatggagggagcaggtcccatcgagatctctttgaatggtgtagtgatcactctttggagcc

SEQ ID NO: 168819 - DNA, 1009 bp, Homo Sapiens
  misc_feature (946)..(955): n is a, c, g, or t
gggtttttcccattaaggggcatttcatttttgtttgccttggggccccaacccccttgtggatcacaagggtttcaaaacagtgtccttcttaaaaaagaagtgggagagccaggctcccttctggggggtttgggcctccccctttggttctccaagagtttttcctgtcctctagaagccaagccagccaagggagctgggagcgaccaagctgaggccacgtccacaagggagcttttcatgccccctgtgccgcatagcctcacctctttcctccaggagtggctctctgcggccctgtgttcctgcttacagagtgttcttttctggagtcaggatgttctcgggtcaccctcctggttctggccctgtcccattcccaccccacccccagggggaacagtagcttcaccttgttattcccattgctctcctggctcactcttacggtcggtctccagtgactgaagcattccccacccttggaatttctcatcttctgcctcccttcctactccttttggttttgtggggagaggggaaggatcagggggccaggccagcagctcgggggccacaaggagatggataatgtgcctgtttttttaacacaacaaaaaagcctacctccaaaatcccctttttgttcttcctggacctgggcattcagcctcctgctcttaactgaattgggagcctctgccacctgccccgtgtatcctggctctcagctcatggggaagccacatagacatccctttcttcccttgcacgctcgctagcagctggtaaggtcttcacaccctgattcctcaagttttctgcttagtggcactgacattaagtagtggggggacagtccatgccaggacaccctggagtagccttcccccttggccgtgggcaggccctaactcactgtcgctttggagttgaggtgtcnnnnnnnnnnctttctttagttcctgtattctaaacattagtaaaaataaatgtttttacacag

SEQ ID NO: 168820 - DNA, 952 bp, Homo Sapiens
  misc_feature (130)..(141): n is a, c, g, or t
  misc_feature (899)..(899): n is a, c, g, or t
tctcaaaaaaagggccccccccggtggattttaaggggggcgtcttgccccccccgggggccacaagagggggaaaaaaggtttatttctcccccgagggtgttttccctgggccaaaggggcctttttnnnnnnnnnnnnttgggtttaaaattttcccgggtgcccccttttaagccccggaaaaacctttgggggggattccgggggtttgggaaagacccctttacccaaggtgtgtttagggaaagcggttccaaggggaaagaaaaaggggaattttctatgtgggggttttcccccatgaaagctggaggagccccaggatttcccgggggccaggttgggccagaagctttccccaattccaggttaagaacccgggaggctggaattccccaggttcccgggaaggaacaaaaaagggggattttggaggttaggcttttttggttgtgtaaaaaaaaccaggcacattatccatctccttgtggcccccgagctgctggcctggccccctgatccttcccctctccccacaaaaccaaaaggagtaggaagggaggcagaagatgagaaattccaagggtggggaatgcttcagtcactggagaccgaccgtaagagtgagccagaagagcaatgggaattaacaaggtgaagctactgttccccctggggtggggtggaatgggacagggcagaacccaggagggtgaccgagaacatcctgactccagaaaagaacactctgtagcaggaacacagggccgcagagagccactctggaggaaagaggtgaggctatgcggcacaggggcatgaaaagctccttgtggacgtggcctcagcttgctcgctcccagctccctggcctggcttgcctctagaggacaggnaaactctggagaccagaggggaggcagaacacagagaagtgagctgctctccc

SEQ ID NO: 168821 - DNA, 859 bp, Homo Sapiens
  misc_feature (723)..(723): n is a, c, g, or t
ctgtgtaaaaaatttatttttactaatgtttagaatacaggaactaaagaaagaaaaagaaaagacacctcaactccaaagcgacagtgagttagggcctgcccacggccaagggggaaggctactccagggtgtcctggcatggactgtccccccactacttaatgtcagtgccactaagcagaaaacttgaggaatcagggtgtgaagaccttaccagctgctagcgagcgtgcaagggaagaaagggatgtctatgtggcttccccatgagctgagagccaggatacacggggcaggtggcagaggctcccaattcagttaagagcaggaggctgaatgcccaggtccaggaagaacaaaaaggggattttggaggtaggcttttttgttgtgttaaaaaacaggcacattatccatctccttgtggcccccgagctgctggcctggccccctgatccttcccctctccccacaaaaccaaaaggagtaggaagggaggcagaagatgagaaattccaagggtggggaatgcttcagtcactggagaccgaccgtaagagtgagccaggagagcaatgggaataacaaggtgaagctactgttccccctggggtggggtggaatgggacagggcagaaccaggagggtgaccgagaacatcctgactccagaaaagaacactctgtagcaggaacacagggccgcagagagccactctgngaggaaagaggtgaggctatgcggcacaggggcatgaaaagctcccttgttggacgtgggcctcaagcttggctcggctcccaagctcccctgggcctgggctttgccttctagaaggacagggaaaaacctctgg

SEQ ID NO: 168822 - DNA, 476 bp, Homo Sapiens
atccccgtcctggtggtgctgctgcctcctggcatacaagtgtagtcataaagagcagtcaacagagtaactgtttaaaatagttgttgtttctataattaaccatatactaagtacaagtctcagactaagtttttagccacttgtcaaattcagttttaaatgcttagaaaacactgaggacacctattgaggagggaggggggaaggtcacctgtaaaggagtccaaagtatgtgctggagcagatgatgacaaagacagaacatctaagaagatagacatggaggaaagggagtagtatttccacacactatgacattgaaaattcaatcatttatgataggattttgatccactgcccattactaccttgtgggaaaaatcctccacaatgaaaaggttgaaaaattcattctccaaaaatgacacagttttaaagagaaaatattagagcagcaacagacaggaatggta

SEQ ID NO: 168823 - DNA, 1509 bp, Homo Sapiens
atcagctcggtcctgagtggcatgtagagtagatgtgaagtggcaggatccagaggcacaaggaggcagtatactgtgccactgatttacatggtctggggggtaaagaggctggagagctgcaaacactgggaggcaaggttcagggctggactcagagcagtcagagctgctggattcagggcccccaagggaactgctccattcagttgcaaggcagcagcctgggcggcggcggcggcagcagcagcagcaacagtgcttggcagttggattccagcgccttctgccagttttgccatgagctgaaaacgtccacctgctgatcccagatccagctcctggtccccatcaggaaaagtgatgtctgtgccaccatccagtcgctcagtcacatggccaaccctcataggtcgaccagcaagctcaaacccattcaactgttccagggcccgccgggcacactcagaatcagagaacgtgatgaaaccataacctttagagcggcctgtatctgagtccttcatcaggacaatattatcaattttaccaaagggctcaaagatgccccggagcatgtcttcagtgatattgaagtgcagggaacccacatagaggcgcattggtccaccattgcccttttgcaggttgttggccatggctgccagtcggtttttctctgcctgtgaagcctgtacaatgataggcactcccagcaaccgctgcccagtcagcccaatggccagtggcacagactggatttcacagaatttccacgtaggcaatgcccttagaacgacggtgagttccgatccgaaatgatacgtacatcgcgaaccttgcctacagcagagaaaaagtcctccagatctcgaggccggaattcgggcagctaactgcatacagaaaactgtgcgggcatcacgctcctcagcactcagattatcaactggctccctgactgggctcttctctctgaaatgaggactcttactgtgtccatatctataaccagtggcaagtggaggactcctgtaatgcacacgatcctcacgacgatggtcccgacttcgcgactcactaccatgtcgacgatcccagctacggctacggtgacgacactgccgacctggacttcggctccgactatttctccgtctataccgatcccgatctcgactacgattgcttgtctccccgatggtgctgcttccactggtctcattgccactgttgctggtgctgctggtggtattgctaggataatcctttttaacttctttcctttgttgctcatcctcttcttttttatagggagcttccagcatggcctcaatcactatgtcaaagtcatcagatgccatcctgtcagatcagttccgggtccccgcaggggggtcccggttctctccgttcctttgagtatgttgtggggagtggagctcggatagttcctagagtctaggcaagaaaagcagcagcagcaccaccaggacagcagcagcacca

SEQ ID NO: 168824 - DNA, 290 bp, Homo Sapiens
aaggtttgggggtctggaaagaaggagtgcgcggtgcttgctcactcactctgcctgtctttgttctagctctgagtccagccctgaaccttgcctcccagtgtttgcagctctccggcctctttaccccccagaccatgtgagtctcaggatctagctcatactagccttagattattctctttcctttggcttcccatttacctcttctttccacaggtaaatcagtggcacagtatactgcctccttgtgcctctggatcctgccacttcacatggccacggtattg

SEQ ID NO: 168825 - DNA, 358 bp, Homo Sapiens
tacggcgcgtgtatgtctggtggtgctgctggattatggtacttaggaagatggcagtagtcagctcacttcattggtcaagagacagaggccacagtaaggctaggaagaaatataaaggtcacttcctgtgctgaacacttcctagagcagccacaggccagcccaccaactactggctgcaattctggaccactccatcgcacagcctacaaatgttttctaactgtcttccgtttttattaaccagtcaagcatgttttactttacactctgataagaggatcagaaacagctttcccacatctaaggcactcttaatcacattgcaaggaatacaagagcagcaccaccaggc

SEQ ID NO: 168826 - DNA, 680 bp, Homo Sapiens
aagccacaagccatggctgtggggaacatcaacgagctgccgagaacatcctgctggagctgttcacgcacgtgcccgccgccagctgctgctgaactgccgcctggtctgcagcctctggcgggacctcatcgacctcgtgaccctctggaaacgcaagtgctgcgagagggcttcatcactgaggaccgggaccagcccgtggccgactggaagatcttctacttcttacggagcctgcacaggaacctcctgcacaacccgtgcgctgaagaggggttcgagttctggagcctggatgtgaatggaggcgatgagtggaaggtggaggatctctctcgagaccagaggaaggaattccccaatgaccaggttcgcagccaggccagattgcgggtccaagtaccagctgtgcgttcagctcctgtcgtccgcgcacgcgcctctggggaccttccagccagacccggcgaccatccagcagaagagcgatgccaagtggagggaggtctcccacacattctccaactacccgcccggcgtccgctacatctggtttcagcacggcggcgtggacactcattactgggccggctggtacggcccgagggtcaccaacagccagcatcaccatcgggcccccgtgccctgacagcccctgagcccccatctgctgaaca

SEQ ID NO: 168827 - DNA, 730 bp, Homo Sapiens
  misc_feature (647)..(647): n is a, c, g, or t
  misc_feature (661)..(661): n is a, c, g, or t
cattgttccactgttggatggtcacaggtgggggctcgaaggaggccaacacgaagtagtcagccgaggccagctgcactttgagttggtaggtgcagccacagtcggctctggcagcaaaccagtccttaaccacgatgtccggccggaatgtgtctagtagctcctcccagtagccctcggctacaaggtccaccagctgggacttgaggcacatttcgtaggatgtgacaaaatacttcttgactttggggtcaggaaaatctgtcccgtgggctccagggaggctctccaccttccagcggtccccaccattgaaatcaatttgccatgcaaacatatcctcttcagcacacgggttgcgcagggaggttcctatgcaggctccgtaggaagtagaagattttccagtcggccacgggctggtcccagtccttggtgatgaagccctctcgcaggcacttgcgtttccagagggtcatgaggtcgatgaggttcccgccagaggctgcagaccaggcggcagttcagcagcagctggcgggcgggcacgtgcgtgaacagctccagcaggatgttctcgggcagctcgttaatgctgtccagggctgctttggagtggggagcatccatggcctgggatcccncaggccccggcccntcgctgcggcctgcgtgtcctggaagctgtctccccctccaggcggcgggcggctcagcacccacacct

SEQ ID NO: 168828 - DNA, 1241 bp, Homo Sapiens
aatgggtgtgaaggcgtctcaaacaggctttgtggtcctggtgctgctccagtgctgctctgcatacaaactggtctgctactacaccagctggtcccagtaccgggaaggcgatgggagctgcttcccagatgcccttgaccgcttcctctgtacccacatcatctacagctttgccaatataagcaacgatcacatcgacacctgggagtggaatgatgtgacgctctacggcatgctcaacacactcaagaacaggaaccccaacctgaagactctcttgtctgtcggaggatggaactttgggtctcaaagattttccaagatagcctccaacacccagagtcgccggactttcatcaagtcagtaccgccatttctgcgcacccatggctttgatgggctggaccttgcctggctctaccctggacggagagacaaacagcattttaccaccctaatcaaggaaatgaaggccgaatttataaaggaagcccagccagggaaaaagcagctcctgctcagcgcagcactgtctgcggggaaggtcaccattgacagcagctatgacattgccaagatatcccaacacctggatttcattagcatcatgacctacgattttcatggagcctggcgtgggaccacaggccatcacagtcccctagttccgaggtcaggaggatgcaagtcctgacagattcagcaacactgactatgctgtggggtacatgttgaggctgggggctcctgccagtaagctggtgatgggcatccccaccttcgggaggagcttcactctggcttcttctgagactggtgttggagccccaatctcaggaccgggaattccagggccggttcaccaaggaggcagggacccttgcctactatgagatctgtgacttcctccgcggagccacagtccatagaatcctcggccagcaggtcccctatgccaccaagggcaaccagtgggtaggatacgacgaccaggaaagcgtcaaaagcaaggtgcagtacctgaaggacaggcagctggcgggcgccatggtatgggccctggacctggatgacttccagggctccttctgcggccaggatctgcgcttccctcttcaccaatgccatcaaggatgcacttcgctgcaacgtagccctctgttctgcacacagcacgggggccaaggatgccccgtccccctctggcttcagctggccgggagcctgatcacctgccc

SEQ ID NO: 168829 - DNA, 544 bp, Homo Sapiens
ctcggtaccctgacagtaaaatgaacacattgctcaaaagattccccattataaatgacgtacttgtaaggaatgtatttatctaggtgcttcttggaaatgcagacaatgccttcaacaagaacgcggtcatgacccaagtctctggtgtagtgcagctcacagatattgctgtcccattttgactccccaaattcttctcctcctctgatgaaggctttatggaggtcaggattgaatgggaaatgaagagagatgatggcgtggaagaacacggtgactcctcacccgggctcagcgtgcttgccttcacttcctggacatctgcttcctggtttttttgctccttctcgtttttcacagcagctgcacttctgttcttcccctctggcttcttgaggtcttcaggctccccttgttcattcttaccgactttttcttcagcagcagccatctcgtccttggtcttggtctcagcttcctggcaatgtgttcatttacaatcagggatactcaagaacaacacagaaacaggtgcactgcc

SEQ ID NO: 168830 - DNA, 371 bp, Homo Sapiens
tgtacagggtcaggagactgcggtaggccagcaactctgtgacctatctaaactacacaacctcaagggcaggctgtggtacggggctgccccactgagccatctgcagaggtggtatcactcaacgatgaaagactcaacgaaccagcctttaacgaccagtcttttctatttcaagagcagtctggactctgacagcccctgattcaggtgcaaactaaaaattttaagattggcaagcaacagacactccttaagtggttcctaactctccccaggtgcagaacacttaagggtcccaacatctgattgaaacacagcccacaccaaaccacgagatggcacctcatacacattagggtggggactat

SEQ ID NO: 168831 - DNA, 474 bp, Homo Sapiens
caactttcagccggtggtaatactgtcggcctatgtccaccaccaggcttctcctagatgtgaagaacatcgcccaccagaacaagtttggggaggatatgccccacccacactaagccccagaatacggtccctcttcaccttctgaggcccacgatagaccagctgtagctcattccagcctgtaccttggatgaggggtagcctcccactgcatcccatcctgaatatcctttgcaactccccaagagtgcttatttaagtgttaatacttttaagagaactgcgacgattaattgtggatctccccctgcccattgcctgcttgaggggcaccactactccagcccagaaggaaaggggggcagctcagtggccccaagagggagctgatatcatgaggataacattggcgggaggggagttaactggcaggcatggcaaggttgcatatgtaataaagtacaagctgtt

SEQ ID NO: 168832 - DNA, 949 bp, Homo Sapiens
ggcggtccggttattgggggtaaaggggtgcacagggccccattcccaggttttgctgggccctccctggtcccggcgtgcccggacggaatcatgtacagcttcagctcaaagcggggccccgacctcatggagctcccacgttggggtggtctgtcttcttatacccatggtgccggaaatgatatgtagtcgtcccgggtttgcgaagggtgatgacccggtggctgtcatctttgggcacgggaaataggtatcggaggatgtcagagacccgcttgcccaggcgggaggagaaagccgtgtgtgatgaggtggggcttggcctccgacatggtgcccaggtctgggatgtcatgccgcatgaccacattgcacagcgtgaagtaggcagtaggaccaaagggcaggtggctgacgatgagccccacaggtgtgccccgatgctcgtgaacgaccagcagatcggtgacgccgttggctttgcaggctcgcaccagtgcccccacttcatgtcgacctcggttcattcgctgggcgcccgggaacaccagcttcagctcctttgcaaacatcttgaggcgggaactggggtctcgggaggtagtgatcataaccttgggatcctcgactcctgcccatcggtattcatcatccacgtggctggtcacaccttcacctccagcatcatcaaactccagggacccctgtaaggccagagcctctcggcgtaactcagtgggaatcaggcggttttcttccagcgcgcgccgcagccgctccttcctctcctgggctgagcgctgcgcctcctcccgggccttgcggtacaggtactcgcggcgcaggcgggcctcgcggcgcagcatcttgagtgccgcttccacgtgggtccgggagaatctgtgggctcctccagcgcgacacagtcctcacttccgccctcccc

SEQ ID NO: 168833 - DNA, 1103 bp, Homo Sapiens
  misc_feature (1074)..(1074): n is a, c, g, or t
gggactcaagatggtaggagaatgagctcctgtttcggagctgcgccgcgaggcccgcctgcgccgcgagtacctgtaccgctaaggcccgggaggaggcgcagcgctcagcccagaagaggaaggagcggctgcggcgcgcgctggaagaaaaccgcctgattcccactgagttacgccgagaggctctggccttacaggggtccctggagtttgatgatgctggaggtgaaggtgtgaccagccacgtggatgatgaataccgatgggcaggagtcgaggatcccaaggttatgatcactacctcccgagaccccagttcccgcctcaagatgtttgcaaaggagctgaagctggtgttcccgggcgcccagcgaatgaaccgaggtcgacatgaagtgggggcactggtgcgagcctgcaaagccaacggcgtcaccgatctgctggtcgttcacgagcatcggggcacacctgtggggctcatcgtcagccacctgccctttggtcctactgcctacttcacgctgtgcaatgtggtcatgcggcatgacatcccagacctgggcaccatgtcggaggccaagccccacctcatcacacacggcttctcctcccgcctgggcaagcgggtctctgacatcctccgatacctatttcccgtgcccaaagatgacagccaccgggtcatcaccttcgcaaaccaggacgactacatatcattccggcaccatgtgtataagaagacagaccaccgcaacgtggagctcactgaggtcgggccccgctttgagctgaagctgtacatgatccgtctgggcacgctggagcaggaggccacagcagacgtggagtggcgctggcacccttacaccaataccgcacgcaagagagtcttcctgagcaccgagtgagcacactcaccactcagtcaggacatggacttggaactcaggatggggctgtcatagacagacccaccagtaggaactgtcacagaatggcctgctgaactgggatgtggaactgtggcgggtggagaggtctgaataaaccgtctgtgtcatgccaaangtttcttgaattcctctgaactttcttgt

SEQ ID NO: 168834 - DNA, 852 bp, Homo Sapiens
  misc_feature (380)..(514): n is a, c, g, or t
  misc_feature (734)..(734): n is a, c, g, or t
  misc_feature (781)..(781): n is a, c, g, or t
ggcatctgccggcacctgctgccccgggtccagtgccccgccttgattgtgcacggtgagaaggatcctctggtcccacggtttcatgccgacttcattcataagcacgtgaaaggctcacggctgcatttgatgccagaaggcaaacacaacctgcatttgcgttttgcagatgaattcaacaagttagcagaagacttcctacaatgagaatgcacactccagtcttggtggttccttcgtgtggggcttgatcgtgttgctgcctgttaacatgatgcctttgaaactctccgcctttgaaactttctacccctcccttcaatcttatcctaaccaaatgagaataatgacatattgaaaacagcctctagcttcannnnnnnnnnnnnnnnnnnnnnnnnnnnnnnnnnnnnnnnnnnnnnnnnnnnnnnnnnnnnnnnnnnnnnnnnnnnnnnnnnnnnnnnnnnnnnnnnnnnnnnnnnnnnnnnnnnnnnnnnnnnnnnnnnnnnnntttcaaaaatctacccaggcccgaagagggcaacaacatccggggggttccccaggatggcttccaggaaaagttgaaagtgggggcaaggaatcccccttggagcccccactttccaaagcctggccagctgcaacctgggaaattttggcaatccccttggcacccccgcaaccgtgggggcccacccagagaccaacgaacccttgggtcccttagntcaacaatagtaaatagagggcacaaccacccactcattcctctggntcgggccccccctcttacggacccattcgaaaaaaagcctttctccccaaaacacaatttctcactattgg

SEQ ID NO: 168835 - DNA, 628 bp, Homo Sapiens
ggggtgttcgccattaatgaccggcagagtttcaacgaggtgggcaagctcttcacgcagattctgcgggtcaaggaccgcgacgacttccccgttgtgttggtcgggaacaaggcagatctggagtcacagcgccaggtcccccgatcagaagcctctgccttcggcgcctcccaccacgtggcctactttgaggcctcggccaaactgcgtctcaacgtggacgaggcttttgagcagctggtgcgggctgtccggaaataccaggaacaagagctcccaccgagccctcccagtgcccccaggaagaagggcgggggctgcccctgcgtcctcctgtagcccaggcaagagagaagcaaccaccacaagctctcgggactagctgccttcgcaccttgctgtgtgacctgaggccctcactgagcctcaatttcctcatctgggtctcccaggacacatcacatacccacccttacttcctggcctcttctgggctactgccactgtgtgccttctgccaacgcctcctgtccccacctaagcctggtgggggtgaggggctccgggtcactgctgtatataactcccctcccccagaaaaataaatgtcactgccaacgtcaaa

SEQ ID NO: 168836 - DNA, 177 bp, Homo Sapiens
taacagctctgtaggaattatgcagcgcctgagagatggggtataatatggttaaatgcttttacagttccccattaaagtaagtggatggaaattcataaaatattgatagcatttgaaatgtgttcattcatagctctgcccagaatctcaagtggtgaaccacgacgacgacga

SEQ ID NO: 168837 - DNA, 596 bp, Homo Sapiens
ctggcgtgcggggcacgccagcaggccccgactattcgtgggcatgatcctgattctcatcttcgccgaggtgctcggctctacggtctcatcgtcgccctcatcctctccacaaagtagaccctctccgagcccaccagccacagaatattatgtaaagaccacccctcctcattccagaacgaacagcctgacacatacgcacggggccgccgccccagtagttggtcttgtacatgcgcagtgtcctagtgcccatcgtctgtttccccggccttgcccccgcccgccccgtgccgtgggacatctgggcccactcatcgcccctccagggcccccggcgccccacccccttaggagtgctctgtgtatgcggatgatttagaattgtcatttctctttactggatgtttatttataaagatctggcctgttcctgcgtctgcggagcggcccttgtctcccagctatctataaccttagctagagtgtcgccttgtgggttcctgttgctgagacttcctggatggagccgccctcgaagccacgccgtggccctgcgcggagctgtgtccaataaagttcttggatgtgag

SEQ ID NO: 168838 - DNA, 941 bp, Homo Sapiens
  misc_feature (136)..(136): n is a, c, g, or t
gggagacaaaggggccgctccggcagacggcaggaaacaggccagaatctttataaataaaccatcccagtaaaaaggaaatgccaattctaaaatcatcccgcatacacagagcactctagggggtgggggcgcncgggggcctggaggggcgatgagtgggcccagatgtccaccggcacggggcgggcgggggcaaggccggggaaacagacgatgggcactaggacactgcgcatgtacaagaccaactactgggggcggcggccccgtgcgtatgtgtcaggctgttcgttctggaatgaggaggggtggtctttacataatattctgtggctggtgggctcggagagggtctactttgtggagaggatgagggcgacgatgagaccgtagaggccgagcacctcggcgaagatgagaatcaggatcatgcccacgaatagtcggggctgctgggcggtgccccgcacgccagcgtcccccacgatgccgatggcaaagccggctgccaggccgctcaggcccacgctcaggccggcgcccagctggaggaagctcttgtagaggctgatgtcgtcattcagggagttggcgatgaggactgccaccaccaggccgtagatggcgatgatgccagccatgaccactgggatgatggacttcatgatctgctccggccgcatgacagacatggccgcaatgccggtaccgctcttggctgtgccataggcagcgcccagggcgctgaagaccatggcggccgaggcgcccatgacggcgaaaaacgaagcatactcggggccgctcttggactcggacatgtctgcgggtggggagggggcaagctctgcgggccgaggcggtggcggaggcgggggcgaggacgggccgggcacgaaggtttgcgggcgcctcgtgccgaattcgccacccaggcc

SEQ ID NO: 168839 - DNA, 818 bp, Homo Sapiens
  misc_feature (374)..(374): n is a, c, g, or t
agcgcagcggctgacgggccggatcgccttcgccgccgcccgcccgcaaaccttcgtgcccggcccgtcctcgcccccgcctccgccaccgcctcggcccgcagagcttgccccctccccacccgcagacatgtccgagtccaagagcggccccgagtatgcttcgtttttcgccgtcatgggcgcctcggccgccatggtcttcagcgccctgggcgctgcctatggcacagccaagagcggtaccggcattgcggccatgtctgtcatgcggccggagcagatcatgaagtccatcatcccagtggtcatggctggcatcatcgccatctacggcctgggtgggtggcagtcctcattcgccaactccctgnaatgacgacatcagcctctacaagagcttcctccagctgggcgccggcctgagcgtgggcctgagcggcctggcagccggctttgccatcggcatcgtgggggacgctggcgtgcggggcaccgcccagcagccccgactattcgtgggcatgatcctgattctcatcttcgccgaggtgctcggcctctacggtctcatcgtcgccctcatcctctccacaaagtagaccctctccgagcccaccagccacagaatattatgtaaagaccacccctcctcattcccgaacgaacagcctgacacatacgcacggggccgccgcccccagtagttgggcttggacatgggcagtggcctagtggcccatcgtctggtttccccggggctttggccccggcccggcccccggggccggggaacatctgggggcccacatcctttc

SEQ ID NO: 168840 - DNA, 1024 bp, Homo Sapiens
  misc_feature (20)..(20): n is a, c, g, or t
  misc_feature (391)..(544): n is a, c, g, or t
  misc_feature (554)..(568): n is a, c, g, or t
  misc_feature (611)..(781): n is a, c, g, or t
  misc_feature (830)..(839): n is a, c, g, or t
  misc_feature (879)..(887): n is a, c, g, or t
ggccgccgcccccaaatagntgggtcttgtaaaatgcgcagtgtcctagtgcccatcgtctgtttccccggccttgcccccgcccgccccgtgccgtggacatctgggccccactcatcgcccctcccaggcccccggcgccccaccccctagagtgctctgtgtatgcggatgatttagaattgtcatttctctttactggatgtttatttataaagatctggcctgttcctgcgtctgcggagcggcccttgtctcccagctatctataaccttagctagagtgtcgccttgtgggttcctgttgctgagacttcctggatggagccgccctcaccgccgggcccgtggccctgcgcggagctgtgtccaataaagttcttggatgtgnnnnnnnnnnnnnnnnnnnnnnnnnnnnnnnnnnnnnnnnnnnnnnnnnnnnnnnnnnnnnnnnnnnnnnnnnnnnnnnnnnnnnnnnnnnnnnnnnnnnnnnnnnnnnnnnnnnnnnnnnnnnnnnnnnnnnnnnnnnnnnnnnnnnnnnnnnttgggcgggnnnnnnnnnnnnnnnaaaaattttttaaaacctttttttgggggcggggcccccaagnnnnnnnnnnnnnnnnnnnnnnnnnnnnnnnnnnnnnnnnnnnnnnnnnnnnnnnnnnnnnnnnnnnnnnnnnnnnnnnnnnnnnnnnnnnnnnnnnnnnnnnnnnnnnnnnnnnnnnnnnnnnnnnnnnnnnnnnnnnnnnnnnnnnnnnnnnnnnnnnnnnnnnnnnnnctctttaatattaatattcccccccgcccctgggcgccttttgggagannnnnnnnnntggaatttcttaaaaacctctccggcggccagggggggannnnnnnnnacagggggtgtgtggaaaccctaaaatccgccccgggggtacaccccccgttgggccgcctggggagtataaatattcccccccggggggagaaaagggggggcgaaaaaaattttgttctttttggcgccctcttt

SEQ ID NO: 168841 - DNA, 553 bp, Homo Sapiens
cgacaggtggctgcttcaagaactgggggaaatagaaagccgagaaagagctccgatacacaagggaaaccgcacgtgagaaccagcactcccagcagggagacgtcactctccagaggccacagagatggcagacacctctgtctccacaatgacccacatccaactgaaagtgtgcaggaagacaggtctattgacactgaaatctagaaatcaaggtccacaggcgaatggaggcatcttcagccctgaggaggccaggctgtgtctcctgacgcccctgagggtgggcacagcagccagctctgtgtgggcggagtccacgtggtcctcattctcttccctggggacagggcagcacagtcagatgctgagactgaggccacacacatgggggcgccttcctgccttggcccggcccagctgcctctggagccaggaggccgtggcagccacaccacagtgtggatccagacacgattctgtggaggggttccgggattccagacagactgaatctccatggaatgatgaaaattaaaatttacttgat

SEQ ID NO: 168842 - DNA, 558 bp, Homo Sapiens
cccatggaggcatttgcttgtcagcacttccaggttagttaccacttcattactggagggcactgtcacaaacttctgactatccagacttgaagtgctgtggactctccttaggggaatgtcgggtgcttcttccctcaagcagctcagcactttgtaggagagcatggatctctgggtgcagatcctccatactagcttcccctgaggccagtgctctgcagtgcaataccaaggcgacatctggattataaaaatgaaaataccggcatactctacttgcttcatgcacacagccatcatctcagtaggcgcccaatcaaaaagtttagtgactcctgctctttccaatccaatctattctcgcatgtctcttgggatggaaggctgttaagttctaagtattttgatgtgttcagagcagccaacttggagaaggaaaactcactggctaaactatcaaaggaaagttcaccactagttgagatctgtcgagaaaatctgggctctgtttcctcctgatttaaaccaagagtgtgctgggtgatgcggcaagta

SEQ ID NO: 168843 - DNA, 712 bp, Homo Sapiens
ggggcgcgcggccgcgtttgaatggccctgagtgggactcggcccagaagccgagggactctctaggctgccgggcgctggtcgtcagcgccgaggctgggctgaggcgccgcggtaccatgaggcgccggtacttaagagattatggcatcagaaacccacaatgttaaaaaacggaacttttgtaataagattgaggatcatttcattgatcttcctagaaaaaagatctctaatttcactaataagaacatgaaggaggttaagaaatctccaaaacagttggctgcttacataaatagaacagttggacaaactgtgaaaagcccagataaacttcgtaaagtgatctatcgcagaaagaaagttcatcatccctttccaaatccttgttacagaaaaaaacagtcccctggaagtgggggctgtgacatggcaaataaagaaaatgaactggcttgtgcaggccacctgcctgaaaaattacaccatgatagtcgaacatatttggttaactccagtgattctggttcttcacagacagaaagcccatcatcaaaatatagtgggtttttttctgaggtttctcaggaccatgaaacaatggcccaagttttgttcagcaggaatatgagattgaatgtagctttaactttctggagaaagagaagtataagtgaacgagcctcagataaagcaaagatggattcca

SEQ ID NO: 168844 - DNA, 310 bp, Homo Sapiens
cccgcgaaacagctatgactcacataagtctacataccataggtgacaaattattctgctagtgcaaatatggcaaagaaaaaaatcaagattataacagcgaacttaagttaaactagatatgagttagagaaaagacttacctcagaaaaaaacccactatattttgatgatgggctttctgtctgtgaagaaccagaatcactgcagttaaccaaatatgttcgactatcatggtgtattttttcaggcaggttgcctgcacaagccagttcattttctttatttgccatgtcatagctgtatcctg

SEQ ID NO: 168845 - DNA, 1619 bp, Homo Sapiens
  misc_feature (442)..(443): n is a, c, g, or t
  misc_feature (1389)..(1389): n is a, c, g, or t
ctagccttatcctctatgaggaagttaaaccgaatttaacagagagaattcaggactatgacgtgtctcttgataaagcccttgatgaactaatggatggtgacatcatagtatttcagaaggatgaccctgaaaatgataacagtgaattacccaccgcaaaggagtatttccgagatctctaccaccgcgttgatgtcattttctgtgataaaacaatccctaatgatcctggatttgtggttacgttatcaaatagaatgaattattttcaggttgcaaagacagttgcacagaggctcaacacagatccaatgttgctgcagtttttcaagtctcaaggttatagggatggcccaggtaatcctcttagacataattatgaaggtactttaagagatcttctacagttcttcaagcctagacaacctaagaaactttnnactatcagcagcttaagatgaaaatcacagactttgagaacaggcgaagttttaaatgtatatggttaaacagccaatttagggaagaggaaataacactatatccagacaagcatgggtgtgtccgggacctgttagaagaatgtaaaaaggccgtggagcttggggagaaagcatcagggaaacttaggctgctagaaattgtaagctacaaaatcattggtgttcatcaagaagatgaactattagaatgtttatctcctgcaacgagccggacgtttcgaatagaggaaatccctttggaccaggtggacatagacaaagagaatgagatgcttgtcacagtggcgcatttccacaaagaggtcttcggaacgttcggaatcccgtttttgctgaggatacaccagggcgagcattttcgagaagtgatgaagcgaatccagagcctgctggacatccaggagaaggagtttgagaagtttaaatttgcaattgtaatgatgggccgacaccagtacataaatgaagacgagtatgaagtaaatttgaaagactttgagccacagcccggtaatatgtctcatcctcggccttggctagggctcgaccacttcaacaaagccccaaagaggagtcgctacacttaccttgaaaaggccattaaaatccataactgatttccaagctggtgtgttcaaggcgaggacggtgtgtgggtggccccttaacagcctagaactttggtgcacgtgccctctagcccgaagtcttcagcaagaggagtcgctgctggtgttaattttattttattgaggctgttcagtttggcttccctggatctattgaccgccctttttgagcaaaaatgaagatgtttttataaagcttggatgccaatgagagttattttatggtaaccacagtgcaaggcaactgtcagcgncatggggggaagaagagttagtgggattcggggggtccctggctcaaggtcctctgggctgtccctaggtgggcacgaagtggctccggctggccttccctgggggtcccgtggcaccagcccctggcagctaagcaaagtccttgtggttttagggctccgttctgaacccttttttcccttcccgtttatacttttccaatggaccctttttggggcatcccggttaa

SEQ ID NO: 168846 - DNA, 490 bp, Homo Sapiens
tacggcactgttagagcgtggctgacgaggtgagacaagtttattaaaaagcccccaggcagctggaggaggagaacccgaggaagggccgaacaatgcacacaatgaaagggaaagagcgctatttaattaggttgtgagtttctctgttttgccttaacagatgccacaaaaggtcattgaaagtataactgaaggaaataggtcagacgagcctaaacacaagacttgctagctgcagggctggtgcacgggaccccaggaaggcagccgagccactcgtgcccactagggacagcccagagaccttgagccagggacccccgatccactaacctcttctcccccattgcgctgacagttgccttgcactgtggttaccataaaataactctcattggcatccaagctttataaaaacatcttcattttgctcaaaaagggcagtcaatagatacagagaagccaaactgaacagcctcaataaaat

SEQ ID NO: 168847 - DNA, 893 bp, Homo Sapiens
  misc_feature (406)..(406): n is a, c, g, or t
aagtttattaaaaaaagccccccaggccaagttgggaggaagaagaaccccgagggaagggcccgaacaatgccccacaatgaagggaaagagcgctatttattaggttgtgagtttctctgttttgccttaacagatgcacaaaaaggtcattgaaagtataactgaaggaaataggtcagacgagcctaaacacaagacttgctagctgcagggctggtgcacgggaccccaggaaggcagccgagccactcgtgcccactagggacagcccagagaccttgagccagggacccccgatccactaacctcttctcccccattgcgctgacagttgccttgcactgtggttaccataaaataactctcattggcatccaagctttataaaaacatcttcattttngctcaaaaagggcaggtcaatagatacagagaagccaaactgaacagcctcaataaaataaaattaacaccagcagcgaatcctcttgctgaagacttcggctagagggcacgtgcaccaaagttctaggctgttaaggggccacccacacaccgtcctcgccttgaacacaccagcttggaaatcagttatggattttaatggccttttcaaggtaagtgtagcgactcctctttggggctttgttgaagtggtcgagccctagccaaggccgaggatgagacatattaccgggctgtggctcaaagtctttcaaatttacttcatactcgtcttcatttatgtactggtgtcggcccatcattacaattgcaaatttaaacttctcaaactccttctcctggatgtccagcaggctctggattcgcttcatcacttctcgaaaatgctcgccctggtgtatcctcagcaaaaacgggattccgaa

SEQ ID NO: 168848 - DNA, 424 bp, Homo Sapiens
cctggaccctctctacccctgcctgtggctctcccgtctcctggcattctaacctgccactgaattcttcccacgccaaacgcaggttaggaacctaagctcggatgaaatgctggcttagacctcattgctactgagaagcagaaaccacactttttagttggtagaggtggatgtggattggggccataaagtttcctcaatcattgaataaggatttcattatttggactaactaaatacattagattatttatactaactaaataaattagatttatttttcgaagtttaaaatcattttcaatagtgacgaaaaaggctgtagatgagatgggagaatctttcgacgccaaattcttcccatctcctgcctagtatgtatcactacaccttgcccagagagggtccaggcgggtaccga

SEQ ID NO: 168849 - DNA, 531 bp, Homo Sapiens
  misc_feature (450)..(450): n is a, c, g, or t
caggccccgaacaatcttgcctagttctcacccagccctaggctccccatagggccaaggagggtctgggctgcctctggctccgtgggcactgctgcttggctggtggtctccgcagcgggaaaccaactccaaacgtcttctccttcgcgcagaaggctgatttggcatgaagaagccctgtgtgcactggccctagcaacccacccagagccagctagggagggacccacctagggcctagctccgaaacggcacaaaacgcgcttctaggagctgcattctgcaaagggaaactgggctcggggaacaaacctcagccccaatgcggcttggctcaggatcccagagcttgcctagttctcacctagccctcggctccccataggtccaaggagggtctgggctgcctctggctccgtgggcactgctgcttggctggtggtctcncgcattgggaaaccaactccaaacgtcttctcctttacgcagaaagctgatttggcctgaagaagccctgtgtgcactggc

SEQ ID NO: 168850 - DNA, 427 bp, Homo Sapiens
gagctcggtaccccaggccccgaacaatgaccagcctgacctccttccctttactgccaacgctgacccaccagcatccggtggtgttagctccagccctgtttctcctccaatgcaggccgccaccaccctccccttcacccacatccaccaagctgtcagccctggcatttctaggccccctcccactcgcagctgctgaccataggctcttcctcccaccacttcagcaggtcccccagagcacctaccagccacccaaggagcagcagcagctggagacagtcaagaggtacaaccgccgaaaggccgaggtgagctgtgtgcgacccctgccttcctagagaccccatatgagggattgttcggggcctgatcatataattaggcctgatgttattaaaagggctgatagggttacggtaag

SEQ ID NO: 168851 - DNA, 249 bp, Homo Sapiens
ttctagaggatcaccccaggtgtcataaacaatatctgccaactcaacctgttgtcttcaaatgctaaaaaaggagaatggagggtacaagactagacatgactgaaatggatttgggttttttggtgacctcccttactgggctaatcagcacttgatcggaagtccaggttagtatgtgaagccaggagtactattattattgtgttagcaacagttgcattaactatttcaaaaattactgccttt

SEQ ID NO: 168852 - DNA, 783 bp, Homo Sapiens
gcatggtgttcttgaggatcccccacggtgtcataaacagcagctgacaaacaggagaactggaggctatggctgtgctgaccttggagaccttggggacccttgctgtcctggaggagaaccttcagagagaaattctgagatgaatggagggtcttccatggtcccagggattttacactcacaacctcggtggtttggttacagcaaggatgaggtgcctgctcagaatgggatctgtgctcagaatgggttctgccagggtggaggcagccaccacaaatgtaaagtgggcatccaggcacgagtgggtttgcatagtaagaaaaggcttttctgggacttaaagctactgctcagcgccactgacatcccttctataactctgggttctcctgaaggggtgagtgtttaatcagggccttctggtctcatctctctggtggtaaagaggagtgaggggcttttcgcccagggctgggggctggattgtaaccgtggacagggttattctcataattcccttagggtttgcatatccagccagtttcaagagattatttatttgaccttgaaggagtgtgatcagaatcactttaccccaccttgtctttcccccaccccatatttaagagctggcagtgaatttctggggagtcccagctgcgccaggctctcagggggctgttgtattgattgccactgaatcctaaactgggttgataatagatctttctgtgttctggctttatgacaccgtgggggatcctctagaacagcatg

SEQ ID NO: 168853 - DNA, 466 bp, Homo Sapiens
ggaggatcccccacggtgtcataaaccaaggaaagcatcagctccgtggtacactaaccatttgcaaataatagttcttcctataaaagtttgctctctctttttgaaggaaatttctgggcaaacaacattttgagaaagaaattcagatatgggaaagtaaagatcatggggagcaggaggctttaagaaacctggcttgtgcatgtggtttacacatgttgaaaagtatgaagattaatgaagccaagagcatagaagatagaacaatatcagatttgaattacagctgagttacccacttgggagtcagttttagattggagctggtatgagggaatagggccaaaatatgaaatcttgggtaatcaaaagctaaaataagattcatggatttatgaattgtgttttattttgaataaatgcttatcttaacttcctttatgacacctgggggatcctctag

SEQ ID NO: 168854 - DNA, 358 bp, Homo Sapiens
cacggtgtcataaagatgatgaaaatgttaggaagacaccctttgtctcaagagtaaatccaccatttttgtcctcattctcagcaggtccctgtgttctaagcttaattttctaagctgccctcggaattaaattttatagtgaattagaacatcagcatgtgtgttgcatgtgtttattaagctgaagtaatacttccagaatgccagaattggatactgaacctctttttaatgagttttattagcaaattggaaataagtatggtgaaacttctgagagactttaagaaaaaaaatgcgaatgtatactctttaggcctagtggaatgttgttagttttgtttatgacacttgg

SEQ ID NO: 168855 - DNA, 300 bp, Homo Sapiens
cgtacttacatgtcataaactaggtactttctccccttctgatgagactaactacagttgaaactactgatccctcctatccattttctcccttaaagtttaaaatcaaatcttccttccctttcccaagttctcaagaaccataagttactaaaaagatgaatttacacctttaaacaggttcataaataaatgtaagacaaatattttatattgaatattttcctttctgtttttgaaaagaatgtcactctaaaaagatgcacctctgactctcacactatgctttatgacaccgtg

SEQ ID NO: 168856 - DNA, 401 bp, Homo Sapiens
cccatacaatatcacacatacttacgagaaaaaggaaggttagaagcacagcacttaaaatcgttgtcagtgacacatgaaaaaaagatgggaaactaataaaaacagtaacgcagttttacacatgttaaaagtggttaaatacataaatattacataaatatggcactttaccttgaagaaaacctgaagtttgcttgtggggaagtaggtctcagaagggttatagcttgtgtgttactgctgcatggtggaaggatggaaagttgtcagaccagatgggtgtgtttcctaacacacagtgaaccaaggtagctggtagatattcaaggagtacatgtgggtgtggttttctctgttcataaaattgtacataagtgtattgtgtggatattgtatga

SEQ ID NO: 168857 - DNA, 618 bp, Homo Sapiens
  misc_feature (584)..(584): n is a, c, g, or t
  misc_feature (598)..(598): n is a, c, g, or t
cacggtgtcataaataaacttttattgggacgttgccatgctcattcatttacgtgttgtctgtggcactcttacgctacaagggcagaactgattagcttcaacagagactgtatggcctacaaagaccatatggcctaaaatttcaagtatctggccatttatatatagtttgctgatccctgatctaatagcactaattctaatagcaactattcctttcaattcacctaaagacagacctttagcctttagacagacttgtaagtggaaaggaacatgggtttctgtgctcatttcatagcgtagactagtaatgatctaatgactagaatggggcctattttgatcactaaatgccctatttccacaatatagtatagtaaagcagtcaatactgcactttctgatggagtcttaaggagtcacagtatttataaccattttgagctaataagctatacctcactctctgctttctctctcactctttttgatagtgtgttagggtgaaaaatcagttatttaacccaatttacttgtgaaagaagttttatctttatggacaccgtggggggatcctnaagagtcggggtgnttccaaagagttcacatatt

SEQ ID NO: 168858 - DNA, 540 bp, Homo Sapiens
atgttgtggccactgcggaagacagtatggcatctttcctcaaaacatcagacatagaattaccacatgatcctgcaattccacttgtagtaattgacccacaagaagtgaaagcagggacttgaacacatatttgtacaccaatattcatagctgcttattcataagacccaaaaggcagaaacaacccaaatgttcatcaatgaatgaatgaatgaatggctaaacaagatgtgatgtgtacaatgttcatcaatgaatgcatggctaagcaaaatgtgatatgtacataacgaagtatccttcagcctgaaagaggaatgaagtactcatacttgttacaacacggacgaaccttgaaaacttcatgctaagtgaaataagccagacataaacagataaatagtttatgattccacttacatgaggtactgagagtgaacaaattcacagagacagaaagcagaacagtgattaccagggactgaggggaggggagtatggggagtgatggttttatgacaccgtgggggtcctcag

SEQ ID NO: 168859 - DNA, 314 bp, Homo Sapiens
ctttgggggtgaggagtaaggatgcagaaatgattgcagcatatttcattctctacgcaaggatgttcctcggaaatggaggcgacattgttatgtgggaagcaagtggtctgagggctcagctgggactgggagggaaagggctaagggctatctattcccgtgccaccacccatgaagcaggaagagtatacctttgtctgaattgccatctggcttctccactgaactttaaagctggcgggaggagggggagggcaagatgaatgggaaagaaaatattagcttaagatctgtttggtgtagaaattgaa

SEQ ID NO: 168860 - DNA, 456 bp, Homo Sapiens
gaggtggatctagaggatcccatgcaccattccgagtgtaggaagagcagctgtccattcttggtgggcagcctgtcgtcaatgaccacctccacccactctccgtactgccagaactggggaggggggacacagcggctgctcacatgaataagcagatgtgtaaagggagtccctccaggggacctcacgtggggactctgtgccatcagtgttcgagtcttggctccttaggagcaggacatgtgtctgccttatctgtgcacataggagatgccagatgaacccgggaacatctagtccagggtctgcgtttgtgcatcagagaacttgcccagcgccacctagtggcagcaggaagtgattcagacccacacctcctgaccctcagtccacagggctttcctgaaggccacgtggcctaggggagctgggaagaggatggatgtgtggata

SEQ ID NO: 168861 - DNA, 564 bp, Homo Sapiens
tgaggaagaggaagagaagctcaaggacaagggctctccaagaccacaagcccccaagcccaatggcacctctgcactgactgcccagaatggaaaagcagctaagaacagtgaggaggaggaagaagaaaagaaaaaggcggcagtggtagtttccaaatcaggttcattaaagaagcggaagcagaatgaggctgccaaggaggcagagactcctcaggccaagaagataaagcttcagacccctaacacatttccaaaaaggaagaaaggagaaaaaagggcatcatccccattccgaagggtcagggaggaggaaattgaggtggattcacgagttgcggacaactcctttgatgccaagcgaggtgcagccggagactggggagagcgagccaatcaggttttgaagttcaccaaaggcaagtcctttcggcatgagaaaaccaagaagaaacggggcagctaccggggaggctcaatctctgtccaggtcaattctattaagtttgacagcgagtgacctgagccatcttcgtgaacaagggtgttaccggataccag

SEQ ID NO: 168862 - DNA, 1665 bp, Homo Sapiens; identical to SEQ ID NO: 15407
  misc_feature (577)..(587): n is a, c, g, or t
  misc_feature (645)..(665): n is a, c, g, or t
  misc_feature (1341)..(1341): n is a, c, g, or t

SEQ ID NO: 168863 - DNA, 914 bp, Homo Sapiens; identical to SEQ ID NO: 15408
  misc_feature (38)..(38): n is a, c, g, or t

SEQ ID NO: 168864 - DNA, 1123 bp, Homo Sapiens
  misc_feature (995)..(1021): n is a, c, g, or t
  misc_feature (1041)..(1041): n is a, c, g, or t
ggggctgcagtcgccacacctttgcccctgctgcgatgaccctgtcgccacttctgctgttcctgccaccgctgctgctgctgctggacgtccccacggcggcggtgcaggcgtcccctctgcaagcgttagacttctttgggaatgggccaccagttaactacaagacaggcaatctatacctgcgggggcccctgaagaagtccaatgcaccgcttgtcaatgtgaccctctactatgaagcactgtgcggtggctgccgagccttcctgatccgggagctcttcccaacatggctgttggtcatggagatcctcaatgtcacgctggtgccctacggaaacgcacaggaacaaaatgtcagtggcaggtgggagttcaagtgccagcatggagaagaggagtgcaaattcaacaaggtggaggcctgcgtgttggatgaacttgacatggagctagccttcctgaccattgtctgcatggaagagtttgaggacatggagagaagtctgccactatgcctgcagctctacgccccagggctgtcgccagacactatcatggagtgtgcaatgggggaccgcggcatgcagctcatgcacgccaacgcccagcggacagatgctctccagccaccacacgagtatgtgccctgggtcaccgtcaatgggaaacccttggaagatcagacccagctccttacccttgtctgccagttgtaccagggcaagaagccggatgtctgcccttcctcaaccagctccctcaggagtgtttgcttcaagtgatggccggtgagctgcggagagctcatggaaggcgagtgggaacccggctgcctgcctttttttctgatccagaccctcggcacctgctacttaccaactggaaaattttatgcatcccatgaagcccagatacacaaaattccaccccatgatcaagaatcctgctccactaagaacggtgctaaagtaaaactagtttaataagcnnnnnnnnnnnnnnnnnnnnnnnnnnnacatgtccggccgcctcggnccctccaagaagcttttctaagaccaattcggtttgggcggcccggggccccagtaaggtaaagtggaacattggggccaaa

SEQ ID NO: 168865 - DNA, 357 bp, Homo Sapiens
ggtggagggtcggtggggggcttggcgtgctgaagacccaagcggcaagaaactgctctgctacaaggacgctggcagcctccaggacgcgtgccctgactcgcccttcactggctcccaggcaggtccggtagcttccctgcagtaactccactctcaacagaactgctatttaacaagtgagtctatgcagaaagaacggaggggtgcggggggtgtggtttttcttccacccatgactaatgaagcagagatcacccaagcaccccaactggtcagcctcaagaccccaaattggcatctcacttccttgacatacacgcagatgacacacatgagagacgcctgccgagtaac

SEQ ID NO: 168866 - DNA, 789 bp, Homo Sapiens
cgggtcgaccaagcgtcacaagaaaaatgtcaccttgatcctcgactgtaaaaagaagaccaccaaattcctcgaccgcagcgaccaccccatgatcgacatcaatggcatcatcgtgtttggcacccggatcctggatgaggaggtgtttgagggtgacatccagcagctgctctttgtctcggaccaccgggcagcttatgattactgtgagcactacagccctgactgtgacaccgcagtacctgacaccccacagtcgcaggaccccaatccagatgaatattacacggaaggagacggcgagggtgagacctattactacgaatacccctactacgaagaccccgaagacctagggaaggagcccacccccagcaagaagcccgtggaagctgccaaagaaaccacagaggtccccgaggagctgaccccgacccccacggaagctgctcccatgcctgaaaccagtgaaggggctgggaaggaagaggacatcggcatcggggactatgactacgtgcccagtgaggactactacacgccctcaccgtatgatgacctcacctatggcgagggggaggagaaccccgaccagcccacagacacaagcgctggggccgaaattcccaccagcaccgccgacacctccaactctcgccacatccagactccgcctacaggggaaggtgcaggatgacattggagggggagttcactgaggaaacgatccggaaccttgacgagaactactacgacccctactacgacccgacgcgtggtcgaccc

SEQ ID NO: 168867 - DNA, 966 bp, Homo Sapiens
gcgttctagaggatcccacgaaaggaaatggttgtcacgaggagggggccaggaggcagactggaggtggacctgggggagggcagggggtcggcctggtggcggtcctggaggtaaaagtcggggtaagggccctcggagtcctggcattccaggtggtctcaggaatggaggagctcctggaggtggaccaggaggaaggcctgtaggtggcccaggaggccgtaatggtggagcaggtggtggtccaagaggtggtggtcctggcatgggaggtgcttgtatctgagaaggaggaacagactgcggcggagcctgctgctgtgaagaagcagtggatgtgccatcagaatgggattcctctttatgctgcttttgtgattgcttttctgcttcagagtcatcagaatcatcttcatcatcgtcctctgaaaattcctctacttcccgtccctcctcagggatttcttgacctgccatacgaagcatcatggcttgaagaggagtcagttccttcatgttcttctttttcttccttgattttccaggcatatctgcaaaccgtacactcagacctgacttcttttcttcattgttgtctctctcaccattatcacggtgcacaaattcatccccgtcactttctccatctgatttgtcggtgtcactgtcatcagtactgtcatcatgcttatcttgatccatgtcctcaggatagccatcatcttcactggtgctagaaacatcatcatcatgacctcgctgggcaagttcaggactatataacatgtcttcatctcgcctacgagggggaagatctagggcaaaacccactttacggccatacatcggcacgacttgaggaggaggtggaccagggggagggaccaggaggttttctgccagggggcaaacgtggacaccatgtccagaagaggaaggatagaactgcccgatatgcggtga

SEQ ID NO: 168868 - DNA, 185 bp, Homo Sapiens
ctcatggcccttcctccgtcctcagagtgctgcactccgacctctgcttccatcccccatcactcctccgaccttgacctctgctttcatccaccatcactcctccgaccttgacctctgcttccatcccccatcactcctctgaccttgacctctgcttcaatccccccccgagtagtgcggtc

SEQ ID NO: 168869 - DNA, 260 bp, Homo Sapiens
accgcatactcggggatgcagaaatgaagatctacaaagaccacttttactgaaacagtgagcagaggagcttcagtgtctgcagaaaatgagcctggaaaccctcaaacaatcagggcacacgtcccttctctccatgcttgtctgctccattcttccaaatgcagacaacttatcaggtaacttgctgtcaggatggtccaggtgtataagcttcaaatccaactgaggtttccggttccagggatggaatcagatgg

SEQ ID NO: 168870 - DNA, 807 bp, Homo Sapiens
tgagacatctacaagataataaagatccacaggataattcttcagaggatgaactttcagcataaaattagcttcggctcctggacgcagctggatagacacttctcctggtgtcacctgggtattaagttcattttcagtgggtattataacatgcacagatgggtattctattgaatcaactgagcagcctttgcttagtaaattggaaacaatatcacaacgttcacttcttgatccacctgaaatgaaatcctcttgaacacaccatccacattctggacccagcgcaaggcacctggcacaggatgctgcatttgaagatgcacatctattgtcttcaccttggcccagtccaagaacaagtgaaaacacccaggctgcccagaggaacgaggcgggacctcgccggtcgttttgcaggcagacaaatgcagcggtaaaaaaagccagggccgagccgcacataatgcaaaacagcccgccccgcgcccgccgcctggctgccttccggacgcgggctcgcgcctcccgggcgcacctcggggcccgcgggccgagtgtcgctaggacgttttccgcaggcctagcaggcggaccccgcggctcggagcaagcggtgcaggtaagcgggcccgggcaccgctcggcatctcagggcccctgcggccctcccggctcggcacggcgggtcccgcggtctccgcgagaagcacctccttcgacggccaagggccccggcggcgactggagagagggctctgcaagggctccgcagcctgctccgggacaaagaaaagagctttt

SEQ ID NO: 168871 - DNA, 829 bp, Homo Sapiens
tggtgtaggtgtaaatgggtgccatcagggccccagggtcttgggagtgctccagccccatggcgtggccaaactcgtgggctgccacgaggaacaggctgtacccttggtcagggcagaagccccacttgcggtcgtcatcgtagttggctgtggtcgcacaccacatctttccgtcactccggccagcgctggtgcagctctcatacttgttgccccaggaaagtgaaggggaagacacagggggcaccttctgagttcccaccaacagtggacatggcggtctcagggcagaagccatacttcttgtcgcggtcgtagtcctcagtggtgccgcaccagcggtagccatccgtgcggccctcagtggtgcagctgtcataggatgtgccctggaagcggaatggaaacttgcagggctgtccttcagcgttgccgcccatggtgaacagggcttcatggggacagaagccgtacttgccatccttctcaaagttgtaggtggtggagcaccagaggaagccatcgctgcggccggtatcagtgcagctgttgtactccttgccattgaacaagaaggggaacttgcagtactacccatcggcgttgccatacttcacacggaccacttggccttctcccaaggtccatagctcatcgtcatcaaaatgggagtctccccaacaccagtgcctggggcgaaggcatgagccaggagtccgtccttaccgtcaaaggggtatccatcgccatgctcccagcggccaaagttgatcatatgtctgcctctccatcatgattcgagaaaccgcagatgaaaatcgcaggt

SEQ ID NO: 168872 - DNA, 805 bp, Homo Sapiens
ccgacagactgcatgtggcagataggggacagtcttgctcttcctcatattttgaagcagagatatttcatatttcatagtttctgaacttcctcaggagtactgagggagcatccttggaccagcggaaacgaaggtgccaaccattcacatctgcaaaacctgaagaatctgaatttcgcggggagactgacttctctaggggcttgggttctttctgctccgttttctctgcggttgaagccagctcctctttctttctttctctttgctcattacattcctcattttccatcttggtggtatgagtcttgtcagattcttccagcatcaggtcttttttacctctgacaacccagtgcattgacgtcttcactgagtcattcaaagcttcccactgctggaatggcatcgacatctggctccttcgccagtggtcatagcgggctcgactctcttcattggtcagaatctcctttgccttctgcagtttctgaaaagtctccacagttctgggaagagagatctcattttgtaagcttataggagcaaatgatgctggaagtcttgcgagacattctgatttaactcctgggtcagctttggggttttcaggatgcttgtctgggtgacattccagagctctgactttaaattctgccaggatttgttcaaccgaagatagttcatcacatcccagtaatgtgtagtaatcttcagtatcttctgacctgtaattcagtattgcatccatttagatgacttaatcagtccttcttccctcggaaacaagaggcacagtccc

SEQ ID NO: 168873 - DNA, 824 bp, Homo Sapiens
  misc_feature (173)..(173): n is a, c, g, or t
aaaaaggccctatggggacctgattccagggatggaggggattcaattagttctcagcaatttcccagacatgccataaaacatgacatttttagaccataaccaaaggcctgcatgttggcagcataggggacagtcttgcttttcttcattttttgaagcagagatattcnatatttcatagtttctgaacttcgtcaggagttctgagggagcatccttgacccagcggaaacgaaggtgccaaccattcacatctgcaaaacctgaagaatctgaattttgcggggagactgacttctctaggggcttgggttctttctgctccgttttctctgcggttgaagccagctcctctttctttctttctctttgctcattacattcctcattttccatcttggtggtatgagtcttgtcagattcttccagcatcaggtcttttttacctctgacaacccagtgcattgacgtcttcactgagtcattcaaagcttcccactgctggaatggcatcgacatctggctcccttcgccagtggtcatagcgggctcgactctcttcattggtcagaatctcctttgccttctgcagtttctgaaaagtctccacagctttggggttttcaggatgcttgtctgggtgacattccagagctctgactttaaattctgccaggatttgttcaaccgaagatagttcatcacatcccagtaatgtgtagtaatcttcagtatcttctgacctgtaattcagtattgcatccatttagatgacttaatcagtccttcttccctcggaaacaagaggcacagtgagtccc

SEQ ID NO: 168874 - DNA, 434 bp, Homo Sapiens
  misc_feature (21)..(21): n is a, c, g, or t
gaaaatcctcaccctgtcccncattgccaaaaaatgaagaaagtatgttcttgaaagaacactagggtgtggctggacaaccatgtgataaagagattagtataggtctgaatggaaccaattaaccatctcaccagaaatgctgccagcttgaactgaatagagaaagagacaggacaaaaatgaaggcaggctgttagacttctgggattctacgggaaggtacaatagagctatccagttgcaaacgcacgttaatcttcaagaaaagggagtctcccccaacaccagtgcctggggcgaaggcatgagccaggagtccgtccttaccgtcaaaggggtatccattgccatgctcccagcggccaaagttgatcatgatgtctgcctctccatcatggattcgagaaaaccgcagtggggtcacatcgctc

SEQ ID NO: 168875 - DNA, 570 bp, Homo Sapiens
acacgcgatgggtgcagtacctccggcttcttcaggagtcatctggcctggtggagtttgcctaagtttccacggcccgtaagggacccaagagcagaaactggctgctgagaaacaggctttgcagagcctgatgggagtcctcccagatctcgtagtagaaattcttggggtgaacaaatgccggctgagctggggtctagtcctggagtcactacaacaacccctcatcaacaggcatttgatatactgcctcgggaacatcatcctggaattcttggatctcagtgcctctattgaggagtctgctgctaccacctctgcctcagatactccagccaactctaagaggatgcgtgtctcctcttatgctgcttagtcacgccttcttcccaggtcagggaagtagagttactcggccaccagagaccagtcagaaagcccgtgacctcttcaagtaggctacagctaagaaggcctaggttctcgatggctcacttctctcccacattctgactccagttgtacgcaggtgacaggggtctgtgttacacaagcattgcatgcact

SEQ ID NO: 168876 - DNA, 146 bp, Homo Sapiens
acgcgatggtgctatgaatataaactacgataccattgcttaatagagagatgtttagtcagaggtaacattgtatttttattatctagtcttctgtcttaatttatttctatcttattcactctatttattgaatgaaattaagt

SEQ ID NO: 168877 - DNA, 560 bp, Homo Sapiens
tgcggccgctgcccgccttaatcgactgaagaagaaggagtacgtgattggggctggagagtcgagtccggggtctggcagccgagaaccaggagctgcgggccgagaatcgggagctgggcaaacgcgtacaggcactgcaggaggagagtcgctacctacgggcagtcttagccaacgagactggactggctcgcttgctgagccggctgagcggcgtcgggactgcggctgaccacctcgctcttcagagactcgcccgccggtgaccacgactacgctctgccggtgggaaagcagaagcaggacctgctggaagaggacgactcggcgggaggagtctgtctccatgtggacaaggataaggtgtcggtggagttctgctcggcgtgcgcccggaaggcgtcgtcttctcttaaaattttctttttttaaggtgatttccttcctgccaggctccgttgtaaggggttacagaacagtcgttcccggctcacaagctgtggatacagctgttaggggcagaagagacggggacagcttgctgggcacatttcctg

SEQ ID NO: 168878 - DNA, 356 bp, Homo Sapiens
tcgagctcggtacctgacagtaaatgaacagcattgccatattatactgctgcccacgcaatgagttggtgtttacagtgttcccaaggagtggcttatcttcacagcatgcaacccaaagcgctaattcacagggacctgaaaccaccaaagtaagttataataatgtgacacccctcagcctcttcctccttctctctcactctcaccaccccgaacccactctctaattctcagttaatcgtaatgctgaggctggaccaatcgattggatcgaggaggtggggtggactgagagcgagcatcgatcgactgacatgtccatccatggtggcgacgtgatgagagtccgtctc

SEQ ID NO: 168879 - DNA, 935 bp, Homo Sapiens
cgaagatggcggcggagcgacaggaggcgctgagggagttcgtggcggtgacgggcgccgaggaggaccgggcccgcttctttctcgagtcggccggctgggacttgcagatcgcgctagcgagcttttatgaggacggaggggatgaagacattgtgaccatttcgcaggcaacccccagttcagtgtccagaggcacagcccccagtgataatagagtgacatccttcagagacctcattcatgaccaagatgaagatgaggaggaagaggaaggccagaggttttatgctgggggctcagagagaagtggacagcagattgttggccctcccaggaagaaaagtcccaacgagctggtggatgatctctttaaaggtgccaaagagcatggagctgtagctgtggagcgagtgaccaagagccctggagagaccagtaaaccgagaccatttgcaggaggtggctaccgccttggggcagcaccagaggaagagtctgcctatgtggcaggagaaaagaggcagcattccagccaagatgttcatgtagtattgaaactctggaagagtggattcagcctggataatggagaactcagaagctaccaagacccatccaatgcccagtttctggagtctatccgcagaggggaggtgccagcagagcttcggaggctagctcacggtggacaggtgaacttggatatggaggaccatcgggacgaggactttgtgaagcccaaaggagccttcaaagccttcactggcgagggtcagaaactgggcagcactgccccccaggtgttgagtaccagctctccagcccaacaggcagaaaatgaagccaaagccagctcttccatcttaatcgacgaatcagacccaccacaaagagcaatgtgttcatttactgtcaggtaccgagctgatctc

SEQ ID NO: 168880 - DNA, 1220 bp, Homo Sapiens
caggtgactctaagcatccccgtaatcagaggctatgagagtagacgttgcactggactgctgggtatgcacaagggggcaggaggggcgatccccatgggcatggccactggccatgggaaacacaggagggaggccaggcagctggctgggcggttatgttaaccgctgcacgatgacagcattgagcaggttggcttccttcagggtctggctctcatcagccagctctttgttcgggaaagtagtcatgaggataaagctggtggcagccatggctggccgggcatccacgatgaagagtcggatgtcgctgatcctgtggctgtggttaaatttctgcaccagcctcccgccgtctgcaagccgaatttggatgtttgtggtaggctctgattcgtcgattaagatggaagagctggctttggcttcattttctgcctgttgggctggagagctggtactcaacacctggggggcagtgctgcccagtttctgaccctcgccagtgaaggctttgaaggctcctttgggcttcacaaagtcctcgtcccgatggtcctccatatccaagttcacctgtccaccgtgagctagcctccgaagctctgctggcacctcccctctgcggatagactccagaaactgggcattggatgggtcttggtagcttctgagttctccattatccaggctgaatccactcttccagagtttcaatactacatgaacatcttggctggaatgctgcctcttttctcctgccacataggcagactcttcctctggtgctgccccaaggcggtagccacctcctgcaaatggtctcggtttactggtctctccagggctcttggtcactcgctccacagctacagctccatgctctttggcacctttaaagagatcatccaccagctcgttgggacttttcttcctcctcatcttcatcttggtcatgaatgaggtctctgaaggatgtcactctattatcactgggggctgtgcctctggacactgaactgggggttgcctgcgaaatggtcacaatgtcttcatcccctccgtcctcataaaagctcgctagcgcgatctgcaagtcccagccggccgactcgagaaagaagcgggcccggtcctcctcggcgcccgtcaccgccacgaactccctcagcgcctcctgtcgctccgccgccatcttcgccccgtgcgccttcccc

SEQ ID NO: 168881 - DNA, 994 bp, Homo Sapiens
ggcctgggtggcgaattcggcacgagggcgaagatggcggcggagcgacaggaggcgctgagggagttcgtggcggtgacgggcgccgaggaggaccgggcccgcttctttctcgagtcggccggctgggacttgcagatcgcgctagcgagcttttatgaggacggaggggatgaagacattgtgaccatttcgcaggcaacccccagttcagtgtccagaggcacagcccccagtgataatagagtgacatccttcagagacctcattcatgaccaagatgaagatgaggaggaagaggaaggccagaggttttatgctgggggctcagagagaagtggacagcagattgttggccctcccaggaagaaaagtcccaacgagctggtggatgatctctttaaaggtgccaaagagcatggagctgtagctgtggagcgagtgaccaagagccctggagagaccagtaaaccgagaccatttgcaggaggtggctaccgccttggggcagcaccagaggaagagtctgcctatgtggcaggagaaaagaggcagcattccagccaagatgttcatgtagtattgaaactctggaagagtggattcagcctggataatggagaactcagaagctaccaagacccatccaatgcccagtttctggagtctatccgcagaggggaggtgccagcagagcttccggaggctagctcaccggtggacaggtgaacttggatatggaggaccatcgggacgaggacttttgtgaagcccaaaggagccttcaaaagccttcactggccgaggggtcagaaaactggggcaagcactggccccccccaggtggtttgagttacccaggctttctcccaggcccaaccaggggcaagaaaaaattggaaaggcccaaaagagccccaagcctttcttttccccatttcctttaaaattccaaaacccgaaatttcccagggaagggcccctgtaacccccc

SEQ ID NO: 168882 - DNA, 598 bp, Homo Sapiens
cggtccgacagtaaatgaacacattgctactagctacttctccctgttagtgagttatgatggctaaagtatcaggcttgggaccaaggggaaatatatagctgctacaagttgttccagataaaatactagaattaaaaacatctgtaaactttgccttctgtactgttttcttctttcagtcctggtggtttgtggcaggtggaacatcaagttggcagcacaccgaattctgagaatgaaaaattcttaggatcagcaccttctttgacaagtggcagactcctgagtcttcccattgaaaaataggactggtaaaggagaaaagaacacattctgtcctgtctctatattttaatgttcacctctttgaacgcaacatggtttttggtaaagataaattcattctaatttaacatgatatttcaaacaggaaatttggctgagcacatcgatccccaaacatcaactgtaactgtaaagcaacagaatatcacatcagtaatctattgcacttggtgaagaaagtaaattcctccgtttgtctcccagctcccagaaggcaatgtgttcattttactgtcaggtaccgagctcg

SEQ ID NO: 168883 - DNA, 661 bp, Homo Sapiens
agattataaatgaacacatgcggtaaggcaagaaggtaagcaagagccaaggtcatgtcatttggcaaggcttcacttgctagttgcaagagaacttcagttgttggaaatacttctcctttatttttagcctctgccaattttccagttctcagcaatacttctgcaaagctttccactggaacatgctgataggtgtcataggtcccttcagactcagcgacaaaaggatttgagatgacagattcataaaaaggatgacacccttgtttctctagatcttcattggctgtagttccgatttgatatgcaccaccacatttttgcccctgaaggggtcgaaggtaagttaaagacttcttccaccactgcccatcactgacggcctgcagcaccgctttggtggtggttgtggtgttggaaaggactttcatggtggtagcagtggtccagcgcaataggtcagctgaattgctacctggaacacctacttcatcctcttgtactgctttactagttaatggtgaagcactgatattttcccctccttcatgatggatctggaaattcactctttgataaagaatttctgtctgcagagagctgctagctgccaaaagaagttcaatgctgcctacggagggcaatgtgttcatttact

SEQ ID NO: 168884 - DNA, 564 bp, Homo Sapiens
tttgcccaagttccccgagccacaataggcgaagatgaagacctgagagcagagaaccagaaaacaaaggagaagtgtgacaaaattaggcaagaacgagatgaagccgttaaataactggaagaatttcagaaaatttctcacatggtcatagaggaagttaatttcatgcagaaccatcttgaaatagagaagacttgtcgagaaagtgctgaagctttggcaacaaagctaaataaagaaaataaaacgttgaaaagaatcagcatgttgtacatggccaagctgggaccagatgtaataactgaagagataaacattgatgatgaagattcgactacagacacagacggtgccgccgagacttgtgtctcagtacagtgtcagaagcaaattaaagaacttcgagatcaaattgtatctgttcaggaggagaaagaagatattagcccttgagctggaaaatctcaagagcaactcgtagaagtaattgaagaagtaaataaagttaaacagacaaagactgttttaaattcagaagttcttgaacagagaaaacgtctc

SEQ ID NO: 168885 - DNA, 534 bp, Homo Sapiens
tctgtctctaatggctctttgaagtttcagagcctcactcatacaggtaaaggtcaccatctttcattctcaccgcagagtcaaaatggccgagcaccccctcctttgtcattttcctcctcccctccttctcctgcctcctccgtctcactgaatcaaggtgccaagggcaccaggaccatccatactcccagcctcaccagctacaaggcacagaatggaagttcaagcaaagccaccccatccacagcaaaagaaacctcttaaaggtcaaatcctattaggcacaagtcggagttacatttaaaaaaaattaacagtctacaacaactgttttcacaagagaatgtaacatattgctgtatcgtttgaggcttaatgctaaatatgtgctaaatactggattaatagatttcagtaaagctcgttcgttttgtttggttttctttttacctagttgctatagtgtctacagtctatactcaatacctataaaactgcagtaagcaatgtgtcatttatagtcagggccga

SEQ ID NO: 168886 - DNA, 479 bp, Homo Sapiens
tccttcacgaaggaaatgactcaaaagtagacgggctggtcaattttgagaagctaaggatgattgccaaagaaattcgtcacgttggccgaatggcttcagtgaacatggaccctgccctcatgttcaggactcggaagaagaaatggcggagtttggggtctctcagccagggtagtacaaatgcaacagtgctagatgttgctcagacaggtggtcataaaaagcgggtacgtcgtagttcctttctcaatgccaaaaagctttatgaagatgcccaaatggctctaaaagtgaagcagtacctttccaatttggagctagaaatggacgaggagagtcttcagacattatctctgcagtgtgagccagcaaccaacacattgcactaagaatcctggtgacaaaaagcctgtcaaatccgagacctctccagtagctcacaagggcagggtcacaacagaaagctcagtcactgg

SEQ ID NO: 168887 - DNA, 684 bp, Homo Sapiens
tcccctgacagtataatgaacacattgcttttattatcctaatagaggaaatgtaataatttcagttttactaattcatactgcaagggtcacaagagcagacatcactgtgcccgtcttaagtcttctgtaagaatctggtatcccccagcctttacactaaagtcacaccagcaggggctccctctgggctctgccgcccagcaccacaggccctcatgctgctgacgctgtgtcagctcctagccccgcatggctaaaaggcccctgcggccatgaagttctgggtctggtttagaaagttatcccataccctagactgcagcagtacacgtccctgccctgccaaaggcaaggcccctgaaaaagctatcctacaagtccgaaaaccctccagatgagctttgtgaggaaggcgttctcccaagtgccccaaccacaccagtaaggccaaccaggctctctccatcatgccagctctcagaggcaccgctgccagggggctatgctgagtgggattctgaggctacattacatagccttagtaaaaaaaactgttactattcattggtgatgaatactcattagctgacattcaccatcttcctgctgtgaccagacactcactgtatgacatgcttcactgcgtctgatggcaatgtgtcatttcactatcaggaccga

SEQ ID NO: 168888 - DNA, 827 bp, Homo Sapiens
ctcatgggcgttgattgagcaatgtgggcattccaatagggacttgagtgaacaatgtgggcattccaatagagagacttcagtgagcatcgtgggcattccagttgttacttgagtgagcaatgtgggcattgcaatagggacttgagtgagcagtgtgggcattccagttgtgacttgagtgagcaatgtgggcattgcagtagggacttgagcgagcaacatgggcattgcaatagggacttgagtgagccatgtgggcattccaatagggacttgagtgagcaacgtgggcattccaatagggactttagtgagcaacgtgggcattccaattgtgacttgagtgagcaacgtgggcattccagtagggacttgagtgagcaacgtggccattccaatagggactcgagtgagcaacgtgggcattccaatagggacttgagtgagcaacgtggccattccaatagggactcgagtgaacaacgtgggcattccagttgtgacttgagtgagcaacgtgggcatgcactagggacttgagttagcaatgtcggcattccagtagtgtgacagatattcttttggttggtgtctcattgttcattttgaagatttaacatgttttttctgagttccttctctttcaacctcttatgaccctgcagactgattatgaagtttccattaaccagaataagaaaatgtacttgcagactactgtagttaactgttcatatagcattttatcttatgcatactataaaactgttatatgggtatgtaatacagaacagacaaaataaggaccgcagggttttccaagt

SEQ ID NO: 168889 - DNA, 479 bp, Homo Sapiens
tgacagtaaaatgaacacattgctgcgtttagtgaggggtgatcagaagctggtcctgcctgctgagctcccatcaggatgctggggttcgtcccaggaacgggctcgctggggaaggcagccgtgctctccagggctgggaagagggaactggaacaagtactggcggggatctgccggcttctaaactctgagcctttccaacagattaaaggtcctttggttagagtcccttgtgcattacggaccaggtaatacttcaagtgtttctgcttcttgggttgagtggtcagtttcagatttatatgattggagaattccgtgaagtaacagaagcctttctttccacagccaacacaattcccagagaaaccaagaagagcattgtggccattgtcatctggcaagaacctcttgtcaacggcgcacaccaggcaatgtgttcattttactgtcaggcgatcctctacagctcgacc

SEQ ID NO: 168890 - DNA, 552 bp, Homo Sapiens
  misc_feature (387)..(438): n is a, c, g, or t
aaatgaacacattgcccatttcacatttaaaccagctctccattcccattgagttgccctaacaacattgtctccagtgtcagaaccatattaaggttcgtttctcagattgggagcctgcaacaccatacagccaacattgcctttgccacgccactgccaccatccccaccattgccctatggtgggcagatgaattccagaaaccctcagggagccaggataattaggcaacccatctgaattggccacgtaagtgacaggcacttatctctcgggttcttgcttttgcagactccagggaagtcctgtctagaggtcgatggcagagactcctagtctttcccatgaggggttgataggaatcaaattgggattcctttggcnnnnnnnnnnnnnnnnnnnnnnnnnnnnnnnnnnnnnnnnnnnnnnnnnnnngtgtatggggggtgattttgtttctgaataagaaaaagaagaggcaaccatggcccttatgtgggtttatcctttttgagcaatgtgttcattttactgtcaggggatcctcta

SEQ ID NO: 168891 - DNA, 456 bp, Homo Sapiens
  misc_feature (315)..(325): n is a, c, g, or t
agtgacacatagcagatggggagtgtttgctgaaagtagtgctgacagctacaggtgtttttcttttttaagtttagaaggccctcggaagtggttctacaaccctgtcttttagcaggctaccctgcaaggagattcaaaattatttccaaaaccccaactgtgtatcccattggtaaagtctgacagcatacatccctctcaaaagaggtggaggaacatctgaatggttcatattgccgagaagacatgaattagataaatgtaatattagtggtctctttgtatttaattgcattggaaaaaatgacaggnnnnnnnnnnnggttttcttaataactaaacatacgggagtccatgcgtttcgatatttatttcccattggataagcgtgtgctatcatacatacattagtgagttcgccaaagtactacaaagtaaccacattttaaacag

SEQ ID NO: 168892 - DNA, 428 bp, Homo Sapiens
ttccgggtgatgggttagaatattgacctgcaactccctaggattatctgtaaccccaaatacctcctcaagagcctgcagacattcatcgacagtaattaaaggatgtttatcttgaggacacgaataacatcaagtgctgggcctcgaaggctctctagcaatcgccttctcttctctacatctggcacctgccacgccttttatcatctggagtagtatgaaacatccagcgtccaaattcttcttctcctggttctggagactccctgcccgagaacactctcagctttttatacttcaagcattgcagggcaggctgaagagcctctaatgcctgtgccaacataggggcccacatttccgggatcatgccctgctctgggtctaaggagccattttcatggcccaaaaatgtgtaaaatata

SEQ ID NO: 168893 - DNA, 200 bp, Homo Sapiens
taggaaaaagtaggctctggagaaggagtaaaaaccctacaaatatgtaaagccaggaaggaaataggagaagcaaggatgttaaatcaatctgagcttggaggaacagatctctgtttttctctgaagcgttgtcacacaatctcatgtgctcaccgcttcaggccaagggtgtgtcagcaaggctttcttgcactgca

SEQ ID NO: 168894 - DNA, 371 bp, Homo Sapiens
tcgtcttttgtttcaatgggaacatgccaaggcagttggaaatgggcgggctttctcctgccggggatatgtctcatgtggacgctgctgcagctgctgtgcccctctcatatcagcacccaagtgtagatcagaaacaaattgaagaacaaaaggaagaagaaaaaatacgggaacagcaagtgaaagaacgaaggcagagagaagaaagaaggcagagtaacctacaagaagttttagaaagggaacgaagagaactagaaaaactgtatcaggaaaggatgattgaagaatcactgaagattaaaataaaaaaggaattagaaatggaaaatgaattagaaatgagtaatcattgaaacaaaagacga

SEQ ID NO: 168895 - DNA, 231 bp, Homo Sapiens
ttgaaatgggcacagaaattacagtgaaaacagaaaagaaagaagaaatggaaaagactgaagaaagaaaagagactcaagaattcctatttctaaaaatgttcaaaatattgaagtacattcaccgtcttctcttctgctcccttaacacttaaacagatccattactggaatttctttctagaggagggtaacccaaatttctgtgcccatttcaaggggatcctctag

SEQ ID NO: 168896 - DNA, 255 bp, Homo Sapiens
ctagaggatcccttaaatggccagaaattatatctcaattttggcgggtggggtgagtgtaacagctttattgagatataattcctgtaccatacaattcacttaaagtgtacaagtcagtggtttttagtttattcacaaaattgtgcaactatcacctgataaattttagaactttctctttccttcaaaaactcttttcttcaaaaacaccctttagctgtcataccctgaaaatttctgtgcccatttcaa

SEQ ID NO: 168897 - DNA, 379 bp, Homo Sapiens
aagatcgagaatcagggaaatttaaaaactaatttcggcgcccatctcaagtgaaatgggcacagaaattgtgagcagacagtagtagtgataataataaaagaaggcaatcaaaatttaattttatcatgccctctcacaggtttgtgttataattgtaagcccatattacttgtgttagtagttttgtctctataggtaacataatgacagtggtgtaaagtttctgttcaagaaacatatgttgtaaagttactttatacaagatacctgccaaaggaaatggtcttactttcaaatgactttgaaagcatgtataattgcaaacagagcaggagaagactttaatcagaactttctgtgccctttcagaggggat

SEQ ID NO: 168898 - DNA, 563 bp, Homo Sapiens
tcctaacccacagcatgtacttcacctagagagaaccttagtgttaactatggactttaggtgatgatgtgtcaatgtcggctcattaactgtaacttacataccactctggtgggggatgctgatgatgagggatgctgtgcctgtgtgggggaaatacatgggatatttctgtgcccatttcattgaaatgggcacagaaattaaaggtcatatactgtactactttcacaaagatcacacagttttgcaaaagacttgtcatatgtacaatgctatatatcaaatgagaaaagctgtaagcaattatatacgcaaaagaaatgcagtatttacagtttgtcaggagacattagaaatcatctatacattaaatttctgtgcccatttcaagggcacagaaattaacttgtaaatgattctctttgaaattcgaatgagcctgagaggcaggcactatcttgtaacaggtccatccaggtgtggttgcattcctcagttgtctgagatagataatgagatttcagggaggtcaaggaaggcaatttctgtgcccatttcaa

SEQ ID NO: 168899 - DNA, 597 bp, Homo Sapiens
  misc_feature (135)..(190): n is a, c, g, or t
ctgatatgggccagaaatttgggtaacctcctctagaaagaaattccagtaatggatctgtttaagtgttaagggagcagaagagaagacggtgaatgtacttcacatattttgaacatttttagaaataggaannnnnnnnnnnnnnnnnnnnnnnnnnnnnnnnnnnnnnnnnnnnnnnnnnnnnnnnactgtaatttctgtgcccatttcattgaaatgggcacagaaattgaaaaataaagcttccagttcagatatgagaacagcaattacagaaaaattggaaagggtcaagaaccagtgggatggcacccagcatggcgttgagctaagacagcagcagcttgaggacatgattattgacagtcttcagtgggatgaccatagggaggagactgaagaactgatgagaaaatatgaggctcgactctatattcttcagcaagcccgacgggatccactcaccaaacaaatttctgtgcccatttcaattgaaatgggcacagaaatttcccatgtatttcccccacacaggcacagcctccctcatcatcagcatcccccaccagagtggatgttgaacaggtgccggcc

SEQ ID NO: 168900 - DNA, 614 bp, Homo Sapiens
  misc_feature (418)..(505): n is a, c, g, or t
catgagccggccctgatatgggcacagaaattcctgtttatcagagttgactggcttattggattctcaagataagcgtaggttgagtttcatcacgaaaagatttgtatcgtttgtagttctacaaacccccaactttattgaattccgctctccggggcatgagtcagtcagaattgttggagacaaaactatgatggtctcttccgttccgccagtcgccgcttcacttatcgccaccaccgaaaatattttgcatatcgcacctgcgtcgagaggctggaaggctgacgcacccagcaacgtagtgtttatccctccgacattaaccaagcaagctctgcttatacagattggacttctgcggccatcaacgatcattgtcgcggaaatttctgtgcccatttcaatgaaatgnnnnnnnnnnnnnnnnnnnnnnnnnnnnnnnnnnnnnnnnnnnnnnnnnnnnnnnnnnnnnnnnnnnnnnnnnnnnnnnnnnnnnnnntaaagaaattttcaaagaaaatcaacaccataaaaagcactcctatgatccctcaagctcagccaaaccgatgctgtctaagcagtactgaattggtccgagctcgatg

SEQ ID NO: 168901 - DNA, 351 bp, Homo Sapiens
gccggaccgatgttgaaattgaggccagaaattacgtaacttgctgaggacaaccaactagaaagtgggagaacaaagactccaccctggcacctgggctccagagttctaaagaaatttcccatgtatttcccccacacaggcacagcctccctcatcatcagcatcccccaccagagtggtatgtttgttacagttgatgagccgacattgacacatcatcacctaaagtccatagtttacactagggttctctcttggtgttgtacatgctgtgggtttggacaaatgtataatgacatgtattcactattatggtgtcatacagaataatttctgtgcccatttcaa

SEQ ID NO: 168902 - DNA, 466 bp, Homo Sapiens
catcgagccggtccctgatatgggcacagaaattcagtacctgcttagacagcatcggtttggctgagctgagggatcataggagtgctttttatggtgttgaatttctttgaaaatttctttagaactctggagcccaggtgccagggtggagtctttgttctcccactttctagttggctgtccttcagcaagttacttaatttctgggcctcaatttcctcatctgcaaatttctgtgcccatttcaatgggcacagaaattagaataacactgtacagctgacgagaagcccatctcatctgattaacttctcgctacctcctcaggagaagggagaggcacatgctattccttccactttacctggttgcaagctgaggctcagaagtgatttgaaagacctcacagcatgtagggatggggcaggacctaatcccaagtcttctttctccaatttctatg

SEQ ID NO: 168903 - DNA, 633 bp, Homo Sapiens
  misc_feature (60)..(69): n is a, c, g, or t
  misc_feature (104)..(115): n is a, c, g, or t
  misc_feature (119)..(133): n is a, c, g, or t
  misc_feature (138)..(158): n is a, c, g, or t
  misc_feature (249)..(270): n is a, c, g, or t
gtatggtggggcgcgggtgggcgcccgcaccaacaaagaaagggtgttcttcaaaaagannnnnnnnnncttgggggtggggagagcgcccccccaccccaagnnnnnnnnnnnncttnnnnnnnnnnnnnnngtttnnnnnnnnnnnnnnnnnnnnnaaggcgggaggaggggctgtggttttgtcccatgatgcttttgggttggggagttgtgtttggccccgggtacctgttgtggggttgcacnnnnnnnnnnnnnnnnnnnnnnaaaactgacataattgtgatttattaacatgaattaaaatgcccaaccagtgcttcagtgtgacagtatatttaaaataaaaaagaaattaaaggtcatatactgtactactttcacaaagatcacacagttttgcaaaagacttgtcatatgtacaatgctatatatcaaatgagaaaagctgtaagcaattatatacgcaaaagaaatgcagtatttacagtttgtcaggagacattagaaatcatctatacattaaattacattttgcttgcaaataactggtaaaacaaaatgagccatgtccacaccaaaatataaaaatctgtattgcatttttatacctaagatgcattcacagcc

SEQ ID NO: 168904 - DNA, 486 bp, Homo Sapiens
cccttgatatgggccgaaattactcagtaatctcagagcatcacactctcaatggcttcctatttctttatagtcaaacgaaagggttgaatgatacagacttaaacaaactttttagctctaaagatgtcagaaactatgactatgtcgcatcaatattaataacgaatttgctgtgcccatttcagaaatgggcacagaaattgcgagaaagacccagtccccagtctttgccaccattgcaccatggttgtctcggtgtcccttcacctgacctttttagtcagctcagatctttttgtagtttgagaatagacctattcaagagctatcagggttaaaagctgcactgaccaaagctgtacttttaaaacacaacccctgggctagtgatgtctctacttgctctatgagccttttgccagcctcagaataggcgaggtaaccttgaatttctgtgcccatttgaaggggatcctctaagat

SEQ ID NO: 168905 - DNA, 283 bp, Homo Sapiens
ttgaaatgggcacagaaaataggtatgctctaggataatagtgcagtgattcagttccttctcaagtgttcagacttaataatattacctaggacagtatatgtatcttttcaatggatagaccaatgggtgtatttaagagaattttataggtcaatgaacgtacataagagaatacaacagacttacttattttttatataaatttaaggcctgggaacttcaagtacttaaaattcaaagctctgtccctagtgttttggaatttctgtgcccatttcaa

SEQ ID NO: 168906 - DNA, 211 bp, Homo Sapiens
gtcagactctacgaaggatcccccctagttttagaacgtttcaatagcagtagtacaaaactaacatggtgagttatcggtgggagtgtagaatgagcaaacgaatgagtgaacatgaagtctaaagccacccttagctgggcagtgtggctcaacacctgtaatcccagagagatcagataatattgctattgaaacttcttaaactagg

SEQ ID NO: 168907 - DNA, 310 bp, Homo Sapiens
ctagaggatccccgttgaaatgggcacagaaattaaaacaggcaagtaaagtatttcttcggaaaacattttatcaaaccaaatgttaaaaagactttccttttgtaaaactggattagagaagacttttcagtgggttatctctaggatgatcagtagttcagcacttaaaaactgcagaggaaactgaaagttatgttccagataactttccgttgtttaccaaattttcttagatttggtcatcatcaggaagcatttgtaaaaataaaaatctccacaaatttctgtgcccatacagggccgactg

SEQ ID NO: 168908 - DNA, 637 bp, Homo Sapiens
ttgaaatgggcacagaaattctctactttctcttctctttcatccataatcaatttttcttcttctatggataatatcctttaagtgtttcttggaatatcttttattttaaaaatcactttatcccacatactctttcagctgttgctctatttatctgctcctttttagagcaaaatccataagtacctgtactccaatttctgtgcccatttcaatgaaatgggcacagaaattgataggaaatgcaaacagttttaaaaagaaagttgatgcctctcttgtatatcgggagctctggattaaagcttcccagccaccctttgcttccttatctttttcctgtcttatgctatttagcaggctttttggatttactgtcttggaaaggcttcttgtcattgtattctattcaacattcttaattgtgtctttgatttatttgggtctcacgtatctctcaaattctttccattctcactttctctagagcccaatatagctttttatgcaagacagcttgctccacatagcccaaataatttctgtgcccattccatggaaagtgggccagaattttaatgtctataaaattaactacttgacctacgtctaattcaagcaaaattgccttcct

SEQ ID NO: 168909 - DNA, 195 bp, Homo Sapiens
tcccctattaaatgggcacagaaattgagaatgtgatttgggttcatgtgatgtgtggggagactctgaaacagtcagagaatgagaacaagtcagaaaatggaagacgtgaatttttaattgcagctctgagttatgaattggatccctttgagagatgaaagcagagaatgaatttctgtgcccatttcaggt

SEQ ID NO: 168910 - DNA, 251 bp, Homo Sapiens
ctccccttgaatgggcacagaaattctagtgataaatacctgcccaaagtcctacacctgtgagctgatggcgccagactataaacttgagtctcactcccctacacgccgtaactttctccatttcacacagcagcacttttataaagtaagcacagagcaaaaaagttcacgttccagtttaaagcttccaccaacaaggaagatcgagaatcaggaaatttaaaaactaatttctgtgcccatttcaa

SEQ ID NO: 168911 - DNA, 303 bp, Homo Sapiens
agcagcatgtgcattgggatcatgtgatgtgtggggagactctgcaaacagtcagagaatgagaacaagtcagaaaatggttgaaatgggcacagaaattccagtcatgtgaagcaaactgccctttgtcctcaaagaaatcgttgaaaaagaaaacttttataaagagattttttgcatattctctgccttgttcttatcaacttgaaatgttggcattttctaaccttgttttgttggctacaataattcagtattcatgtcaaaatttctgtgcccatttcaaagaatgatatttaacac

SEQ ID NO: 168912 - DNA, 396 bp, Homo Sapiens
gattttttgcatattctctgccttgttcttatcaacttgaaatgttggcattttctaaccttgttttgttggctacaataattcagtattcatgtcaaaattgagaagtgccctaattgaatgtgtttgaatgttatccttgcacaattctttaaattgaaagataaaatgttttacctcactgttggacatacattccaagcttttcaactctaggagaaaaagaaaatcatgttttcctgtattgtaaattttagactatttcatatacattgtattaaaactgccatatcaattttaatgtatagattttgcaaatattatgctatatgtaatacctaactgtatctgtagtgtatatgtaatatatttatgcccaataaatgttttaattct

SEQ ID NO: 168913 - DNA, 130 bp, Homo Sapiens
aggacgatttctagagcgatcccccacagaaatgtctagggggaacatttaacaccaaaagattaacagtggtagcatttgggtggcaaacttgattctttctaaaatttctgtgcccaaatacagggcc

SEQ ID NO: 168914 - DNA, 185 bp, Homo Sapiens
tgtagcctcggtacccttgaaatgggcacagaaatggtatatacagaataacgactatgtaaacacaccacagatatctatgcacagaaatgtctagggggaacattgaacaccaacaagattaacagtgtgtagcattgggatggcaaacttgattctttctaaaatttctgtgcccttttcaa

SEQ ID NO: 168915 - DNA, 321 bp, Homo Sapiens
tctctagcaggatccccgtttatatgggcacagaaattaaaatgacactgtaaggctgctaatatcagtataaactcacaactttagagccagaaatggatcacaggtaaacatcaacatccagcttctccctctatttgcttcattgctgcagaagaggaaagccctgaggaacaaaggcacttgtccagggtctcccagccagtggggacagagacagggccagaatctggtcttcctgatgtcccagtacaatgtccttccttctatgactagcacaacccttgcatagtcgaattttaatttctgtgcccatttcaa

SEQ ID NO: 168916 - DNA, 205 bp, Homo Sapiens
catttgtagctcatgaactataaagaggtgggggccataatctgctaacccctgttctaagagggcagagcctaaaggatttgctatctgtatctagacgtgatgtgtgagaaaagagatgcctagatatgctactaaagttaactatgcttttgctacagttaattttcataccaaactgttccatacacagtacgaagcaaaa

SEQ ID NO: 168917 - DNA, 808 bp, Homo Sapiens
  misc_feature (87)..(87): n is a, c, g, or t
  misc_feature (240)..(249): n is a, c, g, or t
ccttgaaatgggcacagaaattcctttgctttgtactgtgtatggaacagtttggtatgaaaattaactgtagcaaaatgcatagtntactttaatacgcatatctggtcatctctatttctctacatcatctacgtctagttactagtagcataatcctatttggactctgctcccttagtaacaggggttagcatcattatggcccccacctctttatagttcatgagctataaatgnnnnnnnnnnaacaattctcaatggtttaaaaatattaaaataatatttcaaacacatgcaaatcatatgttattcaaatttctgtgcccttttcaattgaaatgggcacagaaatttagtataaaaagtttagtgtgatgaaaactatattaccaactggaatgaagtacaataaactactaacaaacatactaacttgctacatatactaactaaaataaattagaattgtcaagttaataccactacccaaaataccagagatccaatatgtgcctatccataatgaagagttctttaattgtttagctccataccttccactaggcacaaatatcaaaggtcattccgcaaagccgtccatgcatcagtatcacatttgtgcaaaggcagatttatcagataaattctttgcaacttctgagggcttcaattaagtaacttaaaactatgaacttaccaactatgtagtaatttaatcaaagaatgttttaaagcaatccagtagcttctctactgctcatttcattaacattaatctcaccatagtgtcaaatctgagccgagc

SEQ ID NO: 168918 - DNA, 839 bp, Homo Sapiens
taatcgagccggcctgattgggcacagaaattcatgatcctacttagtatccatcttagcagaaaaatgtaaaccatagtgagttttgtttgctaacactatccttagacaataagaataatctttaggtacttataataactctcactatgtttaggttactgagtcagttaaaagcagactaatcagtaaaatacattttctggttttagagagcttataatttacaatagattaaagggaatgacagtaaccacagaaaaataattaagagaaatgtgatttacttgttacctaagaagcaaaagatacatttttctccaaagtaagtcattaaagattgcaatcgtttataccagagttgatttactagcatgaaaatgattgcttaaccctgctccctgtattcaccaggcgggttggtgaaagcttgtgtttcagatgagccagcctggctacaggaaaagatatttgcatagaagactggggacactgccacacaagaaaatgaagaattatgcttttgaaattccttttattacttccttgattaaattgttgtttccaagggaattggattttcagatgaaattttaataatgcttcagataattccaattgtgttctttcattttactctgctttcacaatatgatcatatttggtttcacttcctggttagtgcacacaagcctgttgctgggaaatatttgaataaaatgtttatgagagaagactattgtttcaaagtagaggaaggcatttttgtttgatttagacttagttcatgtagtaatttttatagaaataaaatttctggcccatatcaaggtccggcc

SEQ ID NO: 168919 - DNA, 355 bp, Homo Sapiens
ccccttgaaatgcgcagaaattatttgggctatttgaaatgggcacagaaattagtagtcaacatctcaaaaactgaaaagagaagaaggatcaaggcatgttatgagtgaattaaatcttcatctggcacagaaaaaaattcaagagataaagtccaaagttggttattctaaaaatagtaatatgaaaatattatttagagatatggtaataatcacctgaaaacactaaaataaaagcagaaagctgagtagttgcctctggaaatttcaactattgtttttcatacattatacattttgattaaattttaaataatttctgtgcccatttcattgaaatgggcacagaaat

SEQ ID NO: 168920 - DNA, 272 bp, Homo Sapiens
ctcaaatgggcacagaaagtttcggaacatgagtttgtgaaggctatttttcatcacccagcagttatatgtgagatagtactatactacactgtaaatgtgtaatgaaaataatatactacttcaattaaacctacataataaagaggaaaaatacattattcacataattctatttcttagtccatttaaggtcgtctaggctaaattaccaattgactatatttccgacaccctataggacataatgaccatttctgtgcccatttcaa

SEQ ID NO: 168921 - DNA, 474 bp, Homo Sapiens
  misc_feature (399)..(399): n is a, c, g, or t
ctcgagctcggcccacagttattggatacatttctgtgctctgaaatcccacagagttcataaaaatacaattgttgcttttgtgtatacatgtgtaagttacattttattatggaaattgatattagtgaaattgacagctttctatggttaaagattatcctgtaggtgagccaaggttctctgtttttctgatttctcttattcattccctataatttcagcattttcgttctcattgacttaatattcctgagggtattattgtgaatgtctttgtttatgttaactccatacttcaatactttatgtagttttctaataacaccttcagtatgtgttctaataaaaattttagcagagcacctgccctttctgggtaggtaattattttttttngttatgaacttttcctatgccatttgaatttctgtgcccatttcaattgaaatgggcacagaaatttgtggagat

SEQ ID NO: 168922 - DNA, 150 bp, Homo Sapiens
ttgaaatgggcacagaaattaggaagcaattaaggcacattctggaaataaagcaagatgttgaaacaagttcagggtatggtatctgactaattaaaaaaagaaacggagcattggaccaatcattgaaatttctgtgcccatatcagg

SEQ ID NO: 168923 - DNA, 262 bp, Homo Sapiens
  misc_feature (134)..(218): n is a, c, g, or t
ttgaaatgggcacagaaatcaattaacagaaggcagagaaagaatcatattaaatgtgaatggtatagagacaccaattgtaagactggatttaaaaagcaagacccttaggccaggtgcagtggctcatactnnnnnnnnnnnnnnnnnnnnnnnnnnnnnnnnnnnnnnnnnnnnnnnnnnnnnnnnnnnnnnnnnnnnnnnnnnnnnnnnnnnnnccccatctctacaaaaaagtaataaatttctgtgcccatttaaa

SEQ ID NO: 168924 - DNA, 137 bp, Homo Sapiens
aaaaagaaagctccttgttttctgattacttgtggatacgtactccttggcttaatctgagacatgtacattttttactgtaatttgtttgttaaaattataaatatttctcttctaatttctggcccatatcagga

SEQ ID NO: 168925 - DNA, 193 bp, Homo Sapiens
atgtcagtaaagtttaagaaaaaagtggttgtcaaaaaatgaggactgtatgctttttccatctctaatgccagttgaaagaattttagatctaaacaagcaactcaaatcactttataaacttttgccagaactcatcttttttatttggtatgagttcttagaaatagatatatagaatgatatttaacac

SEQ ID NO: 168926 - DNA, 287 bp, Homo Sapiens
tctagaggatcccttgaaatgtgcacagaaatacacactccttgacagaggtgcattaacccttatccatcagcattctcagacagcacctccggtgagggacagtatctgaccgtccgacatccctgacagcccccatgtgtcacacagactcagcctcaggtagatagtttccgtagatagtggctttctgtggacccttgacatcaaccagttactaatttggtaagaatcttaagtcattccacgtgcctccctcagaagcatttgcatttagaatttctgtg

SEQ ID NO: 168927 - DNA, 565 bp, Homo Sapiens
ctgtcttcccagcacaacgaacaaacttcgtaattgagcatcgatcttatcaaactcttttttcaaggactttaggctttgggtattctcatacagctcgttcgtatatgccccacagagcaacctgccaattgtatctctagtgtctttttgctcaaactgctcaaacctaaagatttcatcaacagggctcaactgatcagcgtaaagcaaacgcagaacctgatgcatcgtaatattgcctgaaatctccagagaaacatcaggcattccgagtaatctgaacagcgcttgagaaaaactttcggtcgttaatgagcgacggtacggatatctattccatgcattagccggctgctttaaagatagttcatatgcgccactaaatatatccatcggagagccagccgttttggatatacccctagccaaagtaactaacctataccattaagctcgaactctaaatagacacgactgcaaagaagcgcagcagtgctccaatccgtgagatccccacctaatccatagtatataaaattaagtatggtagactttccgtatg

SEQ ID NO: 168928 - DNA, 909 bp, Homo Sapiens
tgaaccaccaaccccagcccacttgtaggtcctatgcacaacagccagagttatctctgtgtatgtcaccttgctctccacaaagaaggacagcagaagctggaagaaagtcctctgggcgcctgggctctggcgttgctctcttccacccatcgttcttatctcgcactcagggtagaaaagtttccagtacagaaattcacccacagcagaggccaggcctcaattagaggcctacacaatggggtagacgctctcacagtccacgtccatcagcaccccttccatgttcttaaggataagtatcagtaatctgacggcctccactgccacactgtactctctgtccatgatcatggaaaccatccagtccttgaagcggccagtgaagagctccaggcgtgcggtcaggtcccggttaccgtacagccctttcagagccttcacgcacttcacgcggacttctcggtgctgcatgtcacttttggcagctttcgcagcattgaaaagatcattggctggtggctctgactgtttccggctatgacgatgtaccgcttgggaccctttctgttggatattttgccaccggcgttgttttcagtggtcgttttgctgctttcttcttcacaccgcgattgaagctgtcctcaaatcattttcttgtcttcttgtctggtacatcggcatggcgcaaccaaagcaagagagggtggcgcgtgccagacaccaacggtcggaaaccgccagacaccaacggtcggaaaccgccaagacaccaacgctcggaaaccgccagacaccaacgctcggaaaccgccagacaccaaggctcggaatacacgccagaccacgacggagggcgaccacctcccttctgaccctgctgcgggcgttccggacgcgtgg

SEQ ID NO: 168929 - DNA, 1218 bp, Homo Sapiens
  misc_feature (824)..(874): n is a, c, g, or t
tcggggcgtggagggggggcgcgtggggatggtatagttgttgtgtgtgttggtggttgctgggtgtgggatggggaggaggttagcgcgcccggcggatgggtgcgtcggaggcggtgggtgctgtgtttgagcggcccgggtggttgtgtgttgtgtttgtagttggggtggttgtctagatgtcgggaggtgtgcgtgtggtgtcgatggttgtggcggtcgtgcttgcgtgtcgtgtggctgtattgtgcgccgaggcgtgtgcttggtgtgggaggggcgcgctccagtggcgtgtgtgcgggcagctcagcgatccgggaggttgccaagggaggggtggtgtgatggattcccgtgtgcgtgtggcgggcgttgcgtgtgtggttgggggtgccgcgcggggtgtgtgggaggcttgctgggagcgagcggcatgaggcagtgtgaggggcgggagggtggtggtgattgatgcgtgggccgcagctgttgtggtgctgctgctgaggggaagtctcctggtcaggggcgtgggggggctggtgcggacgttctgcgtctgtagtccttggtgattagtgtcctgggaaggccatcgcaagttgaccggcttcggtgtgatccgtcggcgcttctttgctgtcttgtcacgccgttggggggatcaggtagtcggatgagggcgtggtggtgcggcgacgtggacggtgtgcttcgacgtgcggatggaggtgcccatgggtgcgtggccgttgggcgactggtgtgcgtgttgagtgttatctgcgcagcagtgcatggagaacagtgaactggannnnnnnnnnnnnnnnnnnnnnnnnnnnnnnnnnnnnnnnnnnnnnnnnnngagagcagagagaggtagaaagtggagggagggagggttacaggagtgtgggaaagtcaacaggaaaaggagggaaggttcgctgtgaactgacagtaactgtgacatcacaggcatgtgcggagtccccgcccccccaggcactgtgccaaggccagtaccttcatgtcatgagaccctctcagcaactctgtaaccttgtccccaccagaatattcctttcacagcttgctctccacaaagaaggacagcagaagctggaagaaagtcctctgggcgcctgggctctggcgttgctctcttccacccatcgttcttatctcgcactcagggtagaaaagtcc

SEQ ID NO: 168930 - DNA, 898 bp, Homo Sapiens; identical to SEQ ID NO: 78073

SEQ ID NO: 168931 - DNA, 659 bp, Homo Sapiens
tgcatccatacggaaagtcggggcactggagtccaaactcgcttcctgccggaacctcgtgtacgatcagtccccaaaccgaacaggtggcccagcctctgggcggagcagcaagaacagagatggcggggagagacggccaagcagcaccagcgtgcctttgggtgataaggggagagaaaattgagaccctgtgagaccctgctcctgactcttgatgttcacccttataactctctgggccccggtgctagccagtttgtcacagctgttatgtcagcttaatttggtttgctctgtctgaaggttggggaagcgcctggaatttgggaagccgccttcacacatgtcttcatcgccgctgccgtcagcccagggggtagtcaagatgttgctttaggaaaaccacggaagctgaaggtcttggtgttggtgcggaagtcgttaccttttgtcgtctttttacactaggtttttgttttaagttagtttgagaaataagagcagtcaccatagttagttagctttgcggcccaagccaatgaccgaggccatcacctgtgctctggggtttgtccctgggaaatgtcttttcatccttacctgccaccgtgtgcattgcaaagagggacaaaagggctctctggaaggtaataagt

SEQ ID NO: 168932 - DNA, 430 bp, Homo Sapiens
ggaaagaaagaaaatggtgcagtttggactaacagatacagcgacatcaaaatgtttcctgggtctgttaagtcctgggtttgtttagtgaacgttattaatctgttcctgtaaccctaaacatcttgtgactactaagaatgcagccaacaggtctctgcctgattttacctactgcctcttcaagatggaattgctctggttccaatgcctctgacaaactggctgcttgatctctaggttgtgaccatgtcagggatagaggcagcttaggtagaggtagactttcttgtactcaacattgaattgtggcttagttaaaatcagaactttcattcttggaataatacagtattgtaagggtaagccaaatgattaacacatttacttaattacacattgtagcattgaaataactgactttccgtat

SEQ ID NO: 168933 - DNA, 893 bp, Homo Sapiens
catcctcctagacgatggaggacaggcattcaagatgtctgatcagctacaaaaaaattattggtgcatggaaacagttctatcctatctcatgttgcttgaaggagatgtctgaagaaaaacaggaagatctggatcgggaagatgattctttagctgcagtacaagttcttgttgctggtgtccgaatgatctacccagcatgctttgttctagtccctcagtcagacattcctactcctagccctgtgggatccactcactgttcatcttcttgcttgggtgtccaccaagtgcctgcttccacaagagatcctgctatgtcttcggttacgcttacaccacctacgtctcctgaggaagtccaaacagttgatcctcagtctgtccagaagtgggtcaaattttcttcagtatctgatggcttcaactccgatagtactagccaccatggtgggaaaatacccagaaaattagcaaatcatgtggtggatagagtttggcaagaatgcaatatgaacagagcacagaacaagaggaagtattctgcttcatcaggtgggctatgcgaagaagcgacagctgctaaagtggcatcctgggattttgttgaagccacacaaagaacaaattgcagttgtttgaggtagattatctcccgatcgattgatgcctatgtgtgatagtttgttacgccactgaatgcttatgcccactttatttgaaacagcttacatgaacatatgtcaggattttttttcaaaagaaaattcaggaaaaatatttcaggaatttgaagctgattatagaagtacatgtaaatataagctttcagttcattcactgttaccagaggcagacttctgaaaagttttggtttccctagtagctaa

SEQ ID NO: 168934 - DNA, 569 bp, Homo Sapiens
aatacatgggaacggataggtctagaggagaaaaactgacagtgaccgatgtacagacttccctctaaaatgcaagatacaatggaggagaacagtgagagtgctctacggaaacgtattcgagaggacagaaaggccaccacagctcagaaggtgcagcagatgaaacagaggctaaatgagaatgaacgaaaaagaaaaaggccaagattgacagacacctaatattcatgacttgagaatattctgcagctataaattttgaaccattgatgtgcaaagcaagacctgaagcccactccggaaactaaagtgaggctcgctaaccctctagattgcctcacagttgtttgtttacaaagtaaactttacatccaggggatgaagagcacccaccagcagaagactttgcagaacctttaattggatgtgttaagtgtttttaatgagtgtatgaaatgtagaaagatgtacaagaaataaattaggagagattactttgtattgtactgccattcctactgtatttttatactttttggcagcattaaatatttttgttaaatagt

SEQ ID NO: 168935 - DNA, 560 bp, Homo Sapiens
tgatcgagctcggacctctcagttagctgttatcatcctaggattggcacatgctaaactgacctggaaagcaaacccatgactgggggagtacacacaataggcaccatgcccaggtttgcttctaacaattataagaaacccaagccagctaaaggagcagtgtgctgatctagggctgtagggcaaaaaccactctggcagccaccctgcccctccatctccctctctgccagacagtgggttgaacacacatgtacacctgaggaggagggtctgacgagggctgcctcagatcagaggcagcaggactagctctgtatgttcgacctcatgtctggcccatcttgagtcccaggctcatacaaaatcacctttgttcagatacagattcaatcagtatttaatgagccaagcactacttgaagcatttgaaaattccttctttcacataagccccacaataacactgcaaggtagttatcaagtccctacgttctagatagaaacaagattccgagaggttaagcgactttccgtatggatggtaccgagctcga

SEQ ID NO: 168936 - DNA, 462 bp, Homo Sapiens
cgtacccgtaagaaaggcagtctcaagatgtatgagacagaaaacactgtaattcctttttatcctaccataataattatgatacaaataaattataattataggttgaaatcttttctcagataaataaaagccacaacctgtccaaaatgtgacaagatccaaaagttattttctataactaagacaggacaaatattgattgatctttggagaaaagcaaaaatagtgaatagccttacatattctgactctaaggaaaaggtgaggttcctcaccaagggtaaagattaaaattgaggcagcaggcaggaggtgccacctgctggtaaaacacaaattctcagtattttgatctgtgacagagatcagtcttaataggaatttcaactaaccgaattagaggttacttatgtctccaataataattcttgagacagatacagaatctgagactaaccg

SEQ ID NO: 168937 - DNA, 379 bp, Homo Sapiens
ccagatatgtaggaaagtggaagggctaagttggggggtttccaaagagctttatagtctcatgaatcttcatgcagtactaccactggaaactcccattccaggcagctttttaaagaaagaagcaagatggctatcatgtcctaatgtaaaaaacagaaatttaattaaagaaaaaagcaagagatacgagtctccctttccaagtacaaaaacaagcaccccaactcccctcaagaaaacagaaggctcaatatctttaccaacaattattagagccacagaatacattccaaaatgtcatccagaagttgctgtcttaagcagcaggaaataatctaatgacattataccacataaaaatatatttgcctgctcc

SEQ ID NO: 168938 - DNA, 259 bp, Homo Sapiens
tctgctcgatcaaccgcacgagctcggtttcaccctgaacgcgaacaacctccgcgagatgccgctcagcggcggagatcaagcggcgcttcgctttcatgtgcagcaggccgcactgccgacctgtcttgaactcggaatgacgtaggcgacgcgccccagaggcgcgaacagggggatgaatggcgaaacggaacgaccgccctgctatcgggtagtcgaatgcgcgaaccacgcgaacttcactgaaatgagccgg

SEQ ID NO: 168939 - DNA, 353 bp, Homo Sapiens
cgtgcaatgcggtccatcagcagataccaagcggcgaagaggcaacctccctccatcggccgcagcttgatgtcggctttggtcgactcgaactcgacttgagctcgggtgaatagcaccgtctgccggcaagccgccgcgagttccctgatcgggccttggagctcagcgagccgttgactgatcgcttccgggctatcgtacccatacgagagcgtccatcagctcaatgaactggtcgtcgatcgatttgcgtccgatcgcggcgtcccattcggccacccgctcggggcaacaactgcagacgccctcgccacggctgtaatccactcgcagccagtaacagggcccat

SEQ ID NO: 168940 - DNA, 272 bp, Homo Sapiens
gtacgatcgagctcggacacctggggatcttattaaaaatttgtatatacatgtgtgtatttatgtgtgtgtgtctcatattggggtttcagctatataaagcaaatactaacaaaactgaataaacacaaagagagcaatacaattatagtaggatatttcaatactccactttctgtaataaaacaagagagaatattagtaaggaaacagaagactagaaggcagtaaaaaaacaattatttttaataagatccctagggccgagctga

SEQ ID NO: 168941 - DNA, 541 bp, Homo Sapiens
ctacacctggccaacgtgcatttttaataaggatcccctagggggatccttattaaaaattcctaggggatccttattaaaaatgttttctgtaatactaaacacttgtaacctgtggatggtaggtttgtccctttatctgacatctgtgctaatatcatcttcagttcctatgtgaaacatacaccaacatacatggagttctgatgtacatttatttgttcattttcaagctggaagcataccattcctaatttattttatgtagacagcacctacatatttatgcctctggaggtaataagaaacagagcaatgtttctcacagtgcacaacctccatcaaaatcatcaaaatgctgatttgcaggcctattccagactcactgaaattctctcaaagtgtactgttcgtctggggctctgcatttttaataagcagtttttttatttccacaggggaaaaaagagattctattagttatgtgtaggattaaataaaaatttttaataaggatcccctaggtaccgactcgagtgtc

SEQ ID NO: 168942 - DNA, 187 bp, Homo Sapiens
cactcagttcggaccctaggggctcttattaaaatcccaaaatactgccctcctcctttttaatagggtcaacactttactacttccttttaaaaatgttttttttaattgtggtaaatacatgtaacatacattttaccattttaataatgttttaagtgtacagtgaagtggcattaagtacagt

SEQ ID NO: 168943 - DNA, 269 bp, Homo Sapiens
tcatcgagctcggacccttagggatcttattaaaattgcacgcatccctcctttaatacccctaatctttttcttctcagtacttattaccatctccagcgttatctattttgtttatctggctagaggttactctatatgtaccgtttgctgtagctgtaggtagcagaagttaaactttcctgtggtatccttatgttcatatcctctgttgtccttgggtttccctagagacaacggacctaggggatccttattaaaaataattg

SEQ ID NO: 168944 - DNA, 222 bp, Homo Sapiens
cctagggatccttattaaaaatactaaacaaaggggcctcgggaggaaggtggagagaagagagcctttaagttccttttgctttgaagatggaataatcatgacttccttctccaaatatcttttggcccttcctagaaccagatggcggatgtttggaatttttaataaggatcccctaggggggatccttattaaaatcttgtcttttggtaccgaatt

SEQ ID NO: 168945 - DNA, 451 bp, Homo Sapiens
ctaggggatccttattaaaaatcaatagaggataagtataagggttaatttctaggactctgactctgttccattgatctgttgtctcctttcttttgccagtaccactacactgtatttcattacatgtaccttcgtagtaaaatttgaaattgagacatgggaatcctccaacttcattctttttcaagactgttttggctattcagggtgattgagaacactttgccatatttgcactcatgttgttgttgttatgatgtggctattcaaaagcaagctactgacatcatgggaatttgccataaatacttccgcatatgttttctaagaaaatatgcatttctctacaaaaccacaataccattgtcacatccaaataacttaaaattatggaatatgtagtccacactcacatttccctaattgtcttgttttatttgtaataaga

SEQ ID NO: 168946 - DNA, 411 bp, Homo Sapiens
agaggttccggctatcacattatcctgtgacgtattaagaactgattcctctcatcaagcctggtacttgctacagccaagagacaatggaaacaagtcatccaaaactgatgacctggggtctcttcgattaaaaatatgttatacagaagactacgtgcttccttcagagtactatggtcctttgaaaactttgctgctaaaatcaccagatgttcaaccaatctgcctcagctgcttacattttgagtgaaatatgtcgagataaaaatgatgctgttttgccccttgtacgactgctgctgcaccatgataaacttgttccttttgccactgctgtggctgaattagacttgaaggatacacaagatgcaaacacaatttttaataaggaggtaccgagctcgattt

SEQ ID NO: 168947 - DNA, 584 bp, Homo Sapiens
cggcagtacggatgtggcaggactataggtatggtggccagagggtcagcaggaaaacatgtgagcaaaggactctgtgtcataaataagtttagaggaaaggtgctgcgccgtggatgtgcacataggccagatttatgtctgactttacacaaacatctcagtgcagtaaagagcagtattgccgccagcaggtctcacctccagccataaggcagttttctcctatcccagtaaatagaatatacaatcaggtcttacaccgagacattccattcccagggacaagcaggagacagatgccttcctcctatctcaactgcaaagaggccttcctctttcactaatcctcctcagcacagaccctttacgggtgtagggctgggggatggtcaggtctttcccttcccacaaggccatatctcaagctatctcaatcgcgggaaaacttagacaacaaccaggctttcttgggcagaggtccctgtgggcttccacagtgcattgtgtcccctcggtacctcagaacggagaacggggtgactttaacaagcaaacggctggaacattttaacaaggcaatc

SEQ ID NO: 168948 - DNA, 1308 bp, Homo Sapiens
gggggcacgcggtgccacctgcagtcaagtacttcttcgacttcctggacgagcaggcagagaagcacaacatccaggatgaagacaccatccacatctggaagacgaacagcttaccgctccggttctgggtgaacatcctcaagaacccccacttcatctttgacgtgcatgtccacgaggtggtggacgcctcgctgtcagtcatcgcgcagaccttcatggatgcctgcacgcgcacggagcataagctgagccgcgattctcccagcaacaagctgctgtacgccaaggagatctccacctacaagaagatggtggaggattactacaaggggatccggcagatggtgcaggtcagcgaccaggacatgaacacacacctggcagagatttcccgggcgcacacggactccttgaacaccctcgtggcactccaccagctctaccaatacacgcagaagtactatgacgagatcatcaatgccttggaggaggatcctgccgcccagaagatgcagctggccttccgcctgcagcagattgccgctgcactggagaacaaggtcactgacctctgacctacaatctccagtgctgccttgggacataggtacctgaggtacctgagagcccctcagggaaggaggccgagtggctgtggctgaggcccccaccctcccctgggaacgcgccccaagccggagtgggtgcagccggaacccgcccagcgtctagactgtagcatcttcctctgagcaataccgccgggcaccgcaccagcaccagccccagccccagctccctccggccgcagaaccagcatcgggtgttcactgtcgagtctcgagtgatttgaaaatgtgccttacgctgccacgctgggggcagcatgcctccgcctccgaccacgcaccagcagccgcctccatgccctaggttgggcccctgggggatcgtgatgcctgttgcccccagggcaagttcccagatcctatgtctgtctgtccaccacgagatgggaggaggagaaaaagcggtacgatgccttcctgacctcaccggcctccccaagggtgccggcactctgggtggactcacggctgctgggccccacgtcaaaggtcaagtgagacgtaggtcaagtcctacgtcggggcccagacatcctggggtcctggtctgtcagacaggctgccctagagccccgacacagtccggggggactgggagcagttccaagaccaccccacccctttttgtaaatcttgttcattgtaaatcaaatacagcgtctttttcactctg

SEQ ID NO: 168949 - DNA, 1257 bp, Homo Sapiens
  misc_feature (829)..(829): n is a, c, g, or t
  misc_feature (955)..(955): n is a, c, g, or t
  misc_feature (1134)..(1134): n is a, c, g, or t
  misc_feature (1148)..(1162): n is a, c, g, or t
ggaggtcaaggagaagatcattgaccaggtgtaccgtgggcagccctgctcctgctggcccaggccagacagcgtggtcctggagtggcgtccgggctccacagcgcagatcctgtcggacctggacctgacgtcacagcgggagggccggtggaagcgcgtcaacacccttatgcactacaatgtccgggatggagccaccctcatcctgtccaaggtgggggtctcccagcagccggaggacagccagcaggacctgcctggggagcgccatgccctcctggaggaggagaaccgggtgtggcacctggtgcggccgaccgacgaggtggacgagggcaagtccaagagaggcagcgtgaaagagaaggagcggacgaaggccatcaccgagatctacctgacgcggctgctctcagtcaagggcacactgcagcagtttgtggacaacttcttccagagcgtgctggcgcctgggcacgcggtgccacctgcagtcaagtacttcttcgacttcctggacgagcaggcagagaagcacaacatccaggatgaagacaccatccacatctggaagacgaacagcttaccgctccggttctgggtgaacatcctcaagaacccccacttcatctttgacgtgcatgtccacgaggtggtggacgcctcgctgtcagtcatcgcgcagaccttcatggatgcctgcacgcgcacggagcataagctgagccgcgattctcccagcaacaagctgctgtacgccaaggagatctccacctacaagaagatggtggaggattactacaaggggatccggcagatggtgcangtcagcgaccaggacatgaacacacacctggcagagatttcccgggcgcacacggactccttgaacaccctcgtggcactccaccagctctaccaatacacgcagaagtactatgacgagatcatncatgccttggaggaggatcctgccgcccagaagatgcagctggccttccgcctgcagcagattgccgctgcactggagaacaaggtcactgacctctgacctacaatctccagtgctgccttgggacataggtacctgaggtactgaagcctccccgggggaggaggagcccaaagtgntttgtgctttaagnnnnnnnnnnnnnnngggaaccgccgcccaaacccggaagggggggcaacccggaaaccccccccaaggggtctaagactggaacacttctttccctccggaaccaaaac

SEQ ID NO: 168950 - DNA, 862 bp, Homo Sapiens
tgatgatcaccggcaagctggacatccccgagccgcggcggccggtggtggagcaggccctctaccagttctccaacctgctgaacagcaagtctttcctcatcaatttcatccacaccctggagaaccagcgggagttctcggcccgcgccaaggtctacttcgcgtccctgctgacggtggcgctgcacgggaaactggagtactacacggacatcatgcacacgctcttcctggagctcctggagcagtacgtggtggccaagaaccccaagctgatgctgcgcaggtctgagactgtggtggagaggatgctgtccaactggaatgtccatctgcctgtaccagtacctcaaggacagtgccggggagcccctgtacaagctcttcaaggccatcaaacatcaggtggaaaagggcccggtggatgcggtacagaagaaggccaagtacactctcaacgacacggggctgctgggggatgatgtggagtacgcacccctgacggtgagcgtgatcgtgcaggacgagggagtggacgccatcccggtgaaggtcctcaacgtgtgacaccatctcccaggtcaaggagaagatcattgaccaggtgtaccgtgggcagccctgctcctgctggcccaggccagacagcgtggtcctggagtggcgtccgggctccacagcgcagatcctgtcggacctgggactgacgtcacagcgggaggggccggtggaaagcgcgtcaacaccttatggcactacaatgtccggatggagccacctcatcctgtccaaggtggggggtctcccagcaggcggaaggaacaggcagaaggaactgcctggggaagcgccaaggctc

SEQ ID NO: 168951 - DNA, 424 bp, Homo Sapiens
  misc_feature (28)..(28): n is a, c, g, or t
  misc_feature (61)..(61): n is a, c, g, or t
  misc_feature (87)..(87): n is a, c, g, or t
  misc_feature (92)..(92): n is a, c, g, or t
  misc_feature (94)..(94): n is a, c, g, or t
  misc_feature (101)..(101): n is a, c, g, or t
  misc_feature (113)..(113): n is a, c, g, or t
  misc_feature (122)..(122): n is a, c, g, or t
  misc_feature (147)..(147): n is a, c, g, or t
  misc_feature (167)..(167): n is a, c, g, or t
  misc_feature (249)..(249): n is a, c, g, or t
  misc_feature (275)..(275): n is a, c, g, or t
tgccaaactgggggaagctgcctccgcntccgcccaaaggaaccaacaaccgcctcccatncccctaggttgggcccctgggggaanactgnanctgttgnccccagggcaanttcccagancctatgtctgtctgtccaccacganatgggaggaggagaaaaaanggtacgatgccttcctgaccttaacggcctccccaagggtgccggcactctgggtggactcacggctgctgggccccacgtnaaaggtcaagtgagacgtaggtcaantcctacgtcggggcccagacatcctggggtcctggtctgtcagacaggctgccctagagccccacccagtccggggggactgggagcagttccaagaccaccccacccccttttgtaaatcttgttcattgtaaatcaaatacagcgtc

SEQ ID NO: 168952 - DNA, 707 bp, Homo Sapiens
  misc_feature (690)..(690): n is a, c, g, or t
gtagcgagacctctcttggccagggggccccctgaggacgagattaggggacccttggcaataggggcctgcccagcaggactgcccccagaaagcctccttgccccctgccggtgaagtccttcagtgagccccttccccagccagcccttccctggccccgccggatgtataaatgtaaaaatgaaggaattacattttatatgtgagcgagcaagccggcaagcgagcacagtattatttctccatcccctccctgcctgctccttggcacccccatgctgccttcagggagacaggcagggagggcttggggctgcacctcctaccctcccaccagaacgcaccccactgggagagctggtggtgcagccttcccctccctgtataagacactttgccaaggctctcccctctcgccccatccctgcttgcccgctcccacagcttcctgagggctaattctgggaagggagagttctttgctgcccctgtctggaagacgtggctctgggtgaggtaggcgggaaaggatggagtgttttagttcttgggggaggccaccccaaaccccagccccaactccaggggcacctatgagatggccatgcttcaacccccctcccagacaggccctccctgttttccaggggcccccaccgaggttcccaggggctgggagatttcctntggtaaaacatttcctt

SEQ ID NO: 168953 - DNA, 441 bp, Homo Sapiens
tctggcccccatccctgcttgcccgctcccacaacttcctgagggctaattctgggaagggaaaagttctttgctgcccctgtctggaaaacgtggctctgggtgaggtaggcgggaaaggatggagtgttttagttcttgggggaggccaccccaaaccccagccccaactccaggggcacctatgagatggccatgctcaacccccctcccagacaggccctccctgtctccagggcccccaccgaggttcccagggctggagacttcctctggtaaacattcctccagcctcccctcccctggggacgccaaggaggtgggccacacccaggaagggaaagcgggcagccccgttttggggacgtgaacgttttaataatttttgctgaattcctttacaactaaataacacagatattgttattaaatgaaaattgt

SEQ ID NO: 168954 - DNA, 616 bp, Homo Sapiens
  misc_feature (546)..(546): n is a, c, g, or t
  misc_feature (574)..(574): n is a, c, g, or t
  misc_feature (579)..(579): n is a, c, g, or t
  misc_feature (585)..(585): n is a, c, g, or t
ccaacggatgaccaacggggccatgaacgtggagattggaaaccccacctacaagatgtacgaaggcggagagctgattgatgtgggaggcctactggacgctgactttgccctggaccctgacaagcccaccaacttcaccaaccccgtgtatgccacactctacatggggggccatggcagtcgccactccctggccagcacggacgagaagcgagaactcctgggccggggcctgaggacgagataggggaccccttggcatagggccctgcccgtcggactgcccccagaaagcctcctgccccctgccggtgaagtccttcagtgagcccctccccagccagccattacctggcccagccggattgtataaatgtaaaaatgaaggaattacattttatatgtgagcgagcaagccggcaagcgagcacagtattatttctccatcccctccctgcctgctccttggcacccccatgctgccttcagggagacaggcagggagggcttggggctgcacctcctaccctcccaccagaacgnaccccactgggagagctggtggtgcagnctttncccttncctgtattaagacaattttgccaagggtttt

SEQ ID NO: 168955 - DNA, 514 bp, Homo Sapiens
ccagtccctctccttacttcatccccatcccatgccaaaggaagaccctccctccttggctcacagccttctctaggcttcccagtgcctccaggacagagtgggttatgttttcagctccatccttgctgtgagtgtctggtgcgttgtgcctccagcttctgctcagtgcttcatggacagtgtccagcacatgtcactctccactctctcagtgtggatcccacccctctttcatctctgtaccccacaaataacacagacaccccatcctatctgtgtcctcagagaaattgagtgatatgtctccaggcatggccagtattccccaggacacagagaggacaaaattacaccatttaagaaacactctggtctacacctgtgtctgctgatttcttttcctagcaaccctggacctcacacctaaggacaaaggtcagtagaactggggaggcttgagtcttggcctggtcatttccaaggttccaagtttactacaatagggagttga

SEQ ID NO: 168956 - DNA, 297 bp, Homo Sapiens
tcatccccatcccatgccaaaggaagaccctccctccttggctcacagccttctctaggcttcccagtgcctccaggacagagtgggttatgttttcagctccatccttgctgtgagtgtctggtgcgttgtgcctccagcttctgctcagtgcttcatggacagtgtccagcacatgtcactctccactctctcagtgtggatcccacccctctttcatctctgtaccccacaaataacacagacaccccatcctatctgtcgacgcggccgcgaatttagtagtagtagtcgacc

SEQ ID NO: 168957 - DNA, 397 bp, Homo Sapiens
  misc_feature (16)..(16): n is a, c, g, or t
ggctcacagccttctntaggcttcccagtgcctccaggacagagtgggttatgttttcagctccatccttgctgtgagtgtctggtgcgttgtgcctccagcttctgctcagtgcttcatggacagtgtccagcacatgtcactctccactctctcagtgtggatcccacccctctttcatctctgtaccccacaaataacacagacaccccatcctatctgtgtcctcagagaaattgagtgatatgtctccaggcatggccagtattccccaggacgcagagaggacaaaattacaccatttaagaaacactctggtctacacctgtgtctgctgatttcttttcctagcagccctgggtcgacccggccgcgaatttagtagtagtagtcgacc

SEQ ID NO: 168958 - DNA, 390 bp, Homo Sapiens
gtccctctccttacttcaatcccatcccatgccaaaggaagaccctccctccttggctcacagccttctctaggcttcccagtgcctccaggacagagtgggttatgttttcagctccatccttgctgtgagtgtctggtgcgttgtgcctccagcttctgctcagtgcttcatggacagtgtccagcacatgtcactctccactctctcagtgtggatcccacccctctttcatctctgtaccccacaaataacacagacaccccatcctatctgtgtcctcagagaaattgagtgatatgtctccaggcatggccagtattccccaggacacagagaggacaaaattacgtcgacgcggccgcgaatttagtagtagtaggcggccgc

SEQ ID NO: 168959 - DNA, 534 bp, Homo Sapiens
gtcgacagaaactgaagcagtccctgcccctctttcatctctgtatcccacaaataacacagacaccccatcctatctgtgtcctcagagaaattgagtgatatgtctccaggcatggccagtattccccaggacacagagaggacaaaattacaccatttaagaaacactctggtctacacctgtgtctgctgatttcttttcctagcaaccctggacctcacacctaaggacaaaggtcagtagaactggggaggcttgagtcttggcctggtcatttccaaggttccaagtttactacaatagggagttgataggggtgctcaggggttggccacgatggtgtccttgatccacttccggtaatgcaccaccttggtgtacagggaaggcctttcgggcagggcacatggttcactgccccatgacgtgataccttgaagcacaccattacagacaagtgggcccccagaatcacccgagcaggtgcttttgccccgtcgacgcggccgcgaatttagtagtagtaggcgg

SEQ ID NO: 168960 - DNA, 532 bp, Homo Sapiens
ggtcgactactactactaaattcgcggccggataaactctgagggttgtctggaggacttcaatacacctccccccatagtgaatcagcttccagggggtccagtccctctccttacttcatccccatcccatgccaaaggaagaccctccctccttggctcacagccttctctaggcttcccagtgcctccaggacagagtgggttatgttttcagctccatccttgctgtgagtgtctggtgcgttgtgcctccagcttctgctcagtgcttcatggacagtgtccagcacatgtcactctccactctctcagtgtggatcccacccctctttcatctctgtaccccacaaataacacagacaccccatcctatctgtgtcctcagagaaattgagtgatatgtctccaggcatggccagtattccccaggacacagagaggacaaaattacaccatttaagaaacactctggtctacacctgtgtctgctgtcgacgcggccgcgaatttagtagtagtaggcggccgc

SEQ ID NO: 168961 - DNA, 324 bp, Homo Sapiens
gcggccgcctactactactaaattcgcggccgcgtcgacgagatgaaagaggggtgggatccacactgagagagtggagagtgacatgtgctggacactgtccatgaagcactgagcagaagctggaggcacaacgcaccagacactcacagcaaggatggagctgaaaacataacccactctgtcctggaggcactgggaagcctagagaaggctgtgagccaaggagggagggtcttcctttggcatgggatggggatgaagtaaggagagggactggaccccctgtaagctgattcactatggggggaggtgtattgaagt

SEQ ID NO: 168962 - DNA, 357 bp, Homo Sapiens
gcggccgcctactactactaaattcgcggccgcgtcgacgtcctggggaatactggccatgcctggagacatatcactcaatttctctgaggacacagataggatggggtgtctgtgttatttgtgggatacagagatgaaagaggggtgggatccacactgagagagtggagagtgacatgtgctggacactgtccatgaagcactgagcagaagctggaggcacaacgcaccacacactcacagcaaggatggagctgaaaacataacccactctgtcctggaggcactgggaagcctagagaaggctgtgagccaaggagggagggtcttcctttggcatgggatggggatgaa

SEQ ID NO: 168963 - DNA, 306 bp, Homo Sapiens
tccagtccctctccttacttcatccccatcccatgccaaaggaagaccctccctccttggctcacagccttctctaggcttcccagtgcctccaggacagagtgggttatgttttcagctccatccttgctgtgagtgtctggtgcgttgtgcctccagcttctgctcagtgcttcatggacagtgtccagcacatgtcactctccactctctcagtgtggatcccacccctctttcatctctgcatcccacaaataacacagacacccgtcgacccggccgcgaatttagtagtaatagtcgacc

SEQ ID NO: 168964 - DNA, 300 bp, Homo Sapiens
tccagtccctctccttacttcatccccatcccatgccaaaggaagaccctccctccttggctcacagccttctctaggcttcccagtgcctccaggacagagtgggttatgttttcagctccatccttgctgtgagtgtctggtgcgttgtgcctccagcttctgctcagtgcttcatggacagtgtccagcacatgtcactctccactctctcagtgtggatcccacccctctttcatctctgtaccccacaaataacacaggtcgacgcggccgcgaatttagtagtagtaggcggcc

SEQ ID NO: 168965 - DNA, 251 bp, Homo Sapiens
ggtcgactactactactaaattcgcggtcgactactactactaaattcgcggccgggtcgacggacactgtccatgaagcactgagcagaagctggaggcacaacgcaccagacactcacagcaaggatggagctgaaaacataacccactctgtcctggaggcactgggaagcctagagaaggctgtgagccaaggagggagggtcttcctttggcatgggatggggatgaagtaaggagagggactgga

SEQ ID NO: 168966 - DNA, 534 bp, Homo Sapiens; identical to SEQ ID NO: 168959

SEQ ID NO: 168967 - DNA, 306 bp, Homo Sapiens; identical to SEQ ID NO: 168963

SEQ ID NO: 168968 - DNA, 1767 bp, Homo Sapiens
  misc_feature (1602)..(1602): n is a, c, g, or t
  misc_feature (1608)..(1608): n is a, c, g, or t
  misc_feature (1715)..(1715): n is a, c, g, or t
ctcgaattccgacggtttctccttggccatcgagctcagggaggccgtcgagcagcagaaagtgaagaacaatgacctccgggagaagaactggaaggccatggaggcactggccacagccgagcaggcctgcaaggagaagctgcactccctgacccaggccaaggaggaatcggagaagcagctctgtctgattgaggcgcagaccatggaggccctgctggctctgctcccagaactctctgtcttggcacaacagaattacaccgagtggctgcaggatctcaaagagaaaggccccacgctgctgaagcacccgccagctcccgcggagccctcctcggacctggcctccaagttgagggaggccgaggagacgcagagcacactgcaggccgagtgtgaccagtaccgcagcatcctggcggagacggagggcatgctcagagacctgcagaagagcgtggaggaggaggagcaggtgtggagggccaaggtgggcgccgcagaggaggagctccagaagtcccgggtcacagtgaagcatcttgaagagattgtagagaagctaaaaggagaacttgaaagttcggaccaggtgagggagcacacgtcgcatttggaggcagagctggaaaagcgcatggcggccgccagcgccgagtgccagaactacgccaaggaggtggcagggctgaggcaacttctcctagaatctcaatctcagctcgatgccgccaagagcgaagcccagaaacagagcgatgagcttgccctggtcaggcagcagttgagtgaaatgaagagccacgtagaggatggtgacatagctggggccccagcttcctccccagaggcgcccccagccgagcaggaccccgttcagctgaagacgcagctggagtggacagaagccatcctggaggatgagcagacacagcggcagaagctcacggccgagtttgaggaggctcagacctcggcatgtcggttacaagaagaattggagaagctccgcacagccggccccctagagtcttcagaaacagaggaggcctcacagctgaaggagagactagaaaaagagaagaagttaacaagtgacctggggcgcgccgccacgagactgcaggagcttctgaagacgacccaggagcagctggcaagggagaaggacacggtgaagaagctgcaggaacagctggaaaaggcagaggacggcagcagctcaaaggagggcacctctgtctgagtttcctctttggaaaaagaagttactgttcaacttaccaaaatgccttacacattccttacaaataaaccaaccaacctacacagcgttatccaggcccaacttccggtactccgagagaagccatgagagacaagtctcttagagccacagaagtagaccttccagagccccagtttgtaaatgaacctgtgtcacatttgataaacactatcctgggcgcagccccgggccaccgccgagtgacgccaaagccctggttgactctgacagcccccgtgcctgttgtgggaggccgggcgctctggggtctgtctgtcagtgcaatcgtttagtgttttttcagtggngcgggngcgggaagcgggtgggaccgggcagccagttctcaaaggctgtgggggccgactggagggcacagccccctcacccctagacgtttgccacccagaactgacgtggnacccttcctgggtggttgatgccatttaaaaaccaaacgtttggtgccccgg

SEQ ID NO: 168969 - DNA, 968 bp, Homo Sapiens
  misc_feature (529)..(606): n is a, c, g, or t
ggcatgagagacaagtctcttagagccacagaagtagaccttccagagccccagtttgtaaatgaacctgtgtcacatttgataaacactatcctgggcgcagccccgggccaccgccgagtgacgccaaagccctggttgactctgacagccccgtgggtgtgtgggaggccgggcgctctggggtctgtctgtcagtgcaatcgtttagtgttttttcagtggggcggggcgggaagcgggtgggaccgggcagccagttctcaaaggctgtggggccgactggaggccacagcccctcacccctagacgttgccaaccagaactgacgtgtgacctcctgggtgttgatgccattaaaaccaacgtcggggccgggtatgtacagcgctggtcggggtccgctccgccctctgccttttgcgccccttcttccgtcccgttcggtctggggccggtccccgccccgcgttgcgccgcttcgcttgcgtgtgtctccggctgccgaggtcggcgcgccggtccgttnnnnnnnnnnnnnnnnnnnnnnnnnnnnnnnnnnnnnnnnnnnnnnnnnnnnnnnnnnnnnnnnnnnnnnnnnnnnnntcccccggcctttggggtgcgccctgtgcccgtcgtgggcctggcgtgggcctggcggcccggcggttcctctccgtcgcgaggcgcgtgggggcacgtgcggtgtgtgctcctcgcccgcccgccttttcgatccctccggtctcgcgctctttccgcatttcgccgccgctcgcctcgggatggtccccgcgccccgccctgaccgttgttctccccgcgctcgttgcgaccggttggtcccgtggcccgcccgcgtggcccctctcgtgtatgggcgttcgccgcgtcgcctgcgtgttcccgcttcgcgccgcgccgcataagttcggtgggtccactgctggtcggttgtgccacgc

SEQ ID NO: 168970 - DNA, 427 bp, Homo Sapiens
  misc_feature (388)..(388): n is a, c, g, or t
gaactacgccaaggaggtagcatggctgaggcaacttctcctagaatctcaatctcagctcgatgccgccaagagcgaagccagaaacagagcgatgagcttgccctggtcaggcagcagttgagtgaaatgaagagccacgtagaggatggtgacatagctggggccccagcttcctccccagaggcgcccccagccgagcaggaccccgttcagctgaagacgcagctggagtggacagaagccatcctgggaggatgaggcagacacagcgggcagaagcttcacgggccgagttttgagggaggctcagacctcgggcatgttcggtttacaagaagaattttggagaagcttccgcacagcccggccccctaggagtttttcnaggaaacagagggaggccttaacagtttgaagggagaga

SEQ ID NO: 168971 - DNA, 454 bp, Homo Sapiens
  misc_feature (20)..(20): n is a, c, g, or t
  misc_feature (38)..(38): n is a, c, g, or t
  misc_feature (133)..(133): n is a, c, g, or t
tgaaaaaacgccagctggantggaacaaaaagcccacnctggaggatgaaccagacacagcggcagaagctcacggccgagtttcaggaggctcagacctcggcatgtcggttacaagaagaattggagaaantccgcacagccggccccctagagtcttcagaaacagaggaggcctcacagctgaaggagagactagaaaaagagaagaagttaacaagtgacctggggcgcgccgccacgagactgcaggagcttctgaagacgacccaggagcagctggcaagggagaaggacacggtgaagaagctgcaggaacagctggaaaaggcagaggacggcagcagctcaaaggagggcacctctgtctgagtttcctctttggaaaaagaagttactgttcaacttaccaaaatgccttacacattccttacaaataaaccaaccaacctac

SEQ ID NO: 168972 - DNA, 466 bp, Homo Sapiens
  misc_feature (269)..(269): n is a, c, g, or t
ctcgtcacagtgtttgaactgtatggcctggataggatgattgcgccggttgccagcttggtgagtgggtgctggatagagtgctcagtttctgtcatgtccacagtataatgctggtccaagagctctgggcaggacacactcacaggtggctctgtggggctagagaaacagtcctggttcctcccccacatctggttagtcagctctgggtagcagaggtcagcacaccagccacactgactgtggccatatctaccacatagacnaggcggccagtggcgggaagaggcaagcaggtccacatggtcacgggcactctcacctcgcacaagatacttggagccgcagaccacctgatgggggcacaccttgtagattttaccacctgtgaagtgacgtgggggccgtatagctctagctccattctgtacagattcgtagagggccaacaaggagaagcaga

SEQ ID NO: 168973 - DNA, 640 bp, Homo Sapiens
tccatggatggcaggagcatgcgttgccagaatggaaagaaagatgacggacttgaccatgaagaacttgaggacggggctgtaggggctgagcagctcccgggtggcgaagtagaagaggaagagggcgtagagggccaggctgacggagatgtcgtagatgatggtcacgtagaggtagccactggtgacgtcaaagtccccatcccggtacttgccgaaggcctggaggaccacagtgccgaccgccatgagtggcttcaccacacagaactgcagggtggcctgtttgcagaacctcagaaatccgatggaataagtctttccccagaggcagcaggtgccatacatacagctggactcaatgggttttcctctgatctccgacatgatggaactttctcctcctaggtactcatagcacaggctcaggaaattatagatgaccaaggcctcatagcagtcgcggaaggtgccgaagtacacgtagtactggtcgttggtgaagaagaggaggctgagcccaggagtcaaaggcgtagatgggcacgatgaagaggatgcgcacgatgtagcgctgctcgtaggggcagctgtagcagcgcaaggtgcatgtagatctggtggcatgtgatgagca

SEQ ID NO: 168974 - DNA, 1056 bp, Homo Sapiens
  misc_feature (858)..(909): n is a, c, g, or t
  misc_feature (978)..(993): n is a, c, g, or t
gtgctggttggaccgggatggccacatcaagattgccgactttgggatgtgcaaagagaacatattcggggagagccgggccagcaccttctgcggcacccctgactatatcgcccctgagatcctacagggcctgaagtacacattctctgtggactggtggtctttcggggtccttctgtacgagatgctcattggccagtcccccttccatggtgatgatgaggatgaactcttcgagtccatccgtgtggacacgccacattatccccgctggatcaccaaggagtccaaggacatcctgggagaagctctttgaaagggaaccaaccaagaggctggggagtgacggtgaaacatcaaaatccaccccttcttcaagaccataaactgggactctgctgggaaaagcggaggttggagccacccttcaggcccaaagtgaagtcacccagagactacagtaactttgaccaggagttcctgaacgagaaggcgcgcctctcctacagcgacaagatacctcatcgactccatggaccagtcgtgcattcgctggcttctcctttgtgaacccccaaattcgagcacctcctggaagattgaggttcctgacagaatcaggctagccctgccctccacccacacctgcccgctccccacgataagcaccagtgggactgtggtgactcctgctgctgcccccgcccctgcccccagagcgtccttggctgccgtctggccgggctctcatggtacttcctctgtgaactgtgtgtgaatctgcttttcctctgacttcggagggaaattgtaaatcctgtgtttcattacttgaatgtagttatctattgaaannnnnnnnnnnnnnnnnnnnnnnnnnnnnnnnnnnnnnnnnnnnnnnnnnnngctcagtagagaaaaaccatgggggactggtgatatgttgatctttttcaaaaaaatatatatatgacnnnnnnnnnnnnnnnnggagcacaagctgtttgaaccaccaggtttatttgtgtgtctaaataaacaccaaatagtacc

SEQ ID NO: 168975 - DNA, 378 bp, Homo Sapiens
  misc_feature (45)..(97): n is a, c, g, or t
  misc_feature (135)..(135): n is a, c, g, or t
  misc_feature (171)..(171): n is a, c, g, or t
  misc_feature (230)..(230): n is a, c, g, or t
  misc_feature (233)..(233): n is a, c, g, or t
  misc_feature (294)..(294): n is a, c, g, or t
  misc_feature (304)..(304): n is a, c, g, or t
  misc_feature (316)..(316): n is a, c, g, or t
  misc_feature (327)..(327): n is a, c, g, or t
  misc_feature (353)..(353): n is a, c, g, or t
  misc_feature (358)..(358): n is a, c, g, or t
agatcaacatatcaccagtcccccatggtttttctctactgagcnnnnnnnnnnnnnnnnnnnnnnnnnnnnnnnnnnnnnnnnnnnnnnnnnnnnntgcaatagataactacattcaagtaatgaaacacaggntttacaatttccctccgaaggcagaggaaaagcagnttcacacacagttcacagaggaagtaccatgagagcccggccagacggcaggccaaggncgntctgggggcaggggcggggccaggcaggcaggaaggtcaccacagtcccactgggtgcttntcgtgggggngcggggcaggtntggggtgggangggcagggttagcctgatcttgtccnggggnccttattttttccggggggt

SEQ ID NO: 168976 - DNA, 856 bp, Homo Sapiens
  misc_feature (814)..(814): n is a, c, g, or t
aaccagactgctctagtatatattctggattttcctccatcagtctaggactgaagacaccgatctctggtgtcggttgagatttcaccaaggttctggttctggaatgagtcactggctaagggtctgataagcaaagggcggaagtgggcagagtgtgagaagggtgggggaggtccttgatctgatcagtacaacccagagaacacacccatgtcccacacgcttgcgagggggccttcataataaccaagcacccctttccatctgtagaacatggttacgtgtctttcaatttgccatcctgttgttaatttgtccccgttttccagatgaggcttggtgagattcactgagatcatgcatacaaagaaagccctgagcacagtgcttggcacatagtgggcactcagtaaacctcggtgtcactgagaagacagaatgagaatgagcatgctgtggagtctttcacctgcctctcctctgggacaggttactctttcattctgtagactgtaatgacatggaaattccaagataccaagagacaatgatgaatcaaagatgagttcccaaaagacaaatcacatcccttattccccatcaaatctaaagcctaataaagtccatatagcactcatgaggcctctaaccttctgcctaaaagtgatcatcatcacagcaaacctgagcctcagaaaggacctagcttacttggtgacagaggagggcaacagaaggacttggcccatggcacccagctgaccatgtcagcaaatagagaggccttcaaagcctttgcattcctgttccntggagaaactgaggattgcagtaaagtgtaattacaacctct

SEQ ID NO: 168977 - DNA, 647 bp, Homo Sapiens
atccctacttacttaaccagtgtgggaggttgacaatatcaagggtttttagggagagcatatgagaaacacaaccttacctgtgtgctaggctctgtaatgacactttctgtaccattcaagacctttacacaatatgcaagagaatggcatttacaatctttataaagcggaggcccatgaactcacctatttgcctaagccttgctaagagacacaggatctctgctattggctggttcaaggtatgagacttatgccatctgtgagctaggccaagataaatgtgacaattacacccgtggatagggaagaaaataggtggatttggaatctgtttcagagatgcagtcagatccagcagagaattcagggcctcactgagtatcaaaagctggagggatccttagaacttgtcctcccaattaacacagcttacataggagaggacggaagcactgctgagtcaaggacccaactagggtcacaaagcaactcaaggtggctcctacctgaggagtcaggctcctgcctcaaaacccagggctctttcatcatgaacagactagaaaggggtcagcaaaccatggcctgtcatccagcttgtgactgttttgcaataagcttattggacacagatcacatgg

SEQ ID NO: 168978 - DNA, 387 bp, Homo Sapiens
ttaccatacagaggtgaaggagagcttctttttatgaaagtagtctaactgaaatgtcaagaaagactgacagaattggaatatcaccattttgcagtccctcaatgaattaatggatctaggcaatggtcatcaatagctattaatatcacaaacagaaaaacagcggataatatgttgttcctgatggaagcacacagaacacctataaaatatgcttgatgaagcctcaagattgaactaccaacttataggaaataccactgaaaaggaggcatgttaagttactccatttttggaagaggggttgcagtcagcaaaatccagactggcaaatactgcaggacactttcttctccaaataaattagtccaaaggcaggacaag

SEQ ID NO: 168979 - DNA, 642 bp, Homo Sapiens
cggtaccctgtgaacacagagctgagtcctctttgtcatacccttggatttagtgtttcatcagctgtttttagttataaaccttttgttaaaatagatattggtttctgaataaattgaactaaatcccaactatttcctaaaatcacaggacattaaggacccatagcatctgtgccagagatgtactgttattagctgggaagacccattctaaccgccaataaccgtctgagactcctcatacctcagtggttagaagcatgtctctcttgagctacagtagaggggaagggattgttgtgtagtcaagtcaccatgctgaatgtacactgattcctttatgatgactgcttaactccccactgcctgtcccagagaggctttcccatgtagctcagtaattcctgttactttacagacaggaaagttccagaaactttaagaacaaactctgaaagacctatgagcaaatggtgctgaatacttttttttaaagccacatttcattgtcttagtcaaagcaggattattaagtgattatttaaaattcgtttttttaaattagcaacttcaagtataacaactttgaaactggaataaagtgtttatttttctattaataaaaatgaaattgtgacc

SEQ ID NO: 168980 - DNA, 642 bp, Homo Sapiens
tactgtggtttaagaaacactgtaccagacattcaccctccattgttaaatgaatcagataaagtcctgcccctcatcgtgcttacagattagggaaggaagcagacattaaataaacacatgctgtgataagtccagtcaaggaattggtgtgctccgataaagaataggcggctacagatgggatggccaggggagactcctctgaggagtaatgtttaataatgtcccgatgctaaagtttggtgtctgggacatagaagtggtaccagaataatcctcctcttaacccagtcagaaggtgagagtgcgtatccactcaaacatccttcaccccagtcgtttttatgagccaacccaaagtggtttggttctaaaggactgtggttgctgtggagtaagtagatctctccagtagcttcataaaaggtctgggagcccagaggtagagatggactggtcaaagagactgggagcttgaagatgaggacagagctacagaaggtactgctttgcaattcttgattcagaggagaaatgagataagggaaatgttcagctgcacagaggagataggagaaaattaaagactttaactgttgaagtttttttcgataccaatttatatccaatgaaaatcgt

SEQ ID NO: 168981 - DNA, 329 bp, Homo Sapiens
tcggtacccttaggataccccattatgtgtatattgtctctacaatcgtatacaccgtagtgtccttaacaggtatataaggtcaatggccctagtctaattcagatttaaactagtgcttgccttgtaactctgcaacgtgatcaataatctcttaatactgaaagtcacaaaataggataaaacgttctgttgctagtccccacaaagcctactacattttcttccccattctcccccaacttaggagaaacttgactaaagatgtgagataaaattatttattgttaaagaatgtcatctgcacgggtcctctcagatcaccgccg

SEQ ID NO: 168982 - DNA, 309 bp, Homo Sapiens
ggctgtagatcccctgagacaaacaatataaatgtgatggatgtggcaagctctttaatcacgagcaatacctggcattgccattgatgggatgtcacactggtggagaaaaccttacaagtgtaaagagtgtggcaagacctccagtcaggagtcatcccttacctgccatcgtagactccatacggaagtaaacggtgacaatggtaatggagtgtgggcaagaatcttgggtcaaattccagcccttctatttggatagggcaatggatcacgggagaaattccttacaggtgtatggatgtgggg

SEQ ID NO: 168983 - DNA, 634 bp, Homo Sapiens
tccaagtgatgtacatcacagcaatcgcaggtgtaacctcaccgggaaccctcacacagcgaccatttccacatccatggaggatgccggcattcctcagccggtaactcctcaaagctatttagaaaacggcctgggatgaagtagggatcggcttcgggagtatacggttcactgaagtcaaccaaggcgtcccgtccatattggctgccggcgtcccgtcacggggatgttacacagctgagcatagtcatctgaatccttcagggggcagaggacacactgcatgccccaggcctctccatacagacagcagcactcagtgtacgttgtctgcttgcccacaagaggccggctacacacgtattcatcactcagatgttcccagcacaaatcttgggagacatcagtttcttctatttgttcgtttgactcagccggtcgtatacatcttttttctgacgcatccaggaccatggggcgagtacagaagcagttgtaagagccctctgtattaacacactggccatcaatacaactactggggtcttgacattcatccatatcaaagcactgcagtttcacaggatcatagtacgtcccttgcttacagtagcattcatacgtcgacgcg

SEQ ID NO: 168984 - DNA, 261 bp, Homo Sapiens
tcagaaagatgagtattatagaatgagagtgaaaatcaacaaggaagattttatctcacccagccagtcctttctagtgtttaatagacctcaaagccagacctttaacctactcataaaatttcttcttggatctgttttcattaaaactggaaattaactggtcagtattccacattcataattagcccatccaaaaatcaaggtctgcttattggtacacttgggccttttcttcacatgataatttgtatctagaca

SEQ ID NO: 168985 - DNA, 796 bp, Homo Sapiens
gcttcgtaatgttggagttgaagttttctccttgggcattaaagctgcagatgccaaagaactcaaaccaattgcctccacaccttcactgaaccatgttttcaatgtggcccactttgatgccattgtggatattcagaatgaggtcatctcccaggtgtgctcaggtgttgatgaaccacttggtgaattggttagtggagaagaagttgttgagcctccttccaatttgattgccatggaagtctcttccaaatatgttaagctaaattggaatccatctcctagtcccgtgactggctacaaagtcatcctcacaccaatgactgcaggaagccgacagcacgctctgagtgtggggcctcagacaaccacgctcagtgttcgcgacctctcagcagacacagaataccagatcagtgtttccgccatgaagggaatgacatccagtgaacccatttcaataatggagaagactcagccaatgaaagttcaagtggaatgctcacgtggtgtggatataaaagccgatattgtgtttttggttgatggctcctatagcattgggattgcaaactttgttaaagttagagcctttttggaagttcttgtaaaaagttttgaaatttcaccaaatagggtccagattagtcttgtgcaatacagccgggatcctcatactgagttcactttgaaaaaattcaccaaagttgaagatataattgaagcaataaacaccttcccttacagaggaggatctacaaatactggcaaagcaatgacttatgtcagagag

SEQ ID NO: 168986 - DNA, 316 bp, Homo Sapiens
tggtcatactatgtgtttcaaaagcaatatgatggagctaaaatcgtacatgtggttttaattgattttacttagctgttggcatcctcacagaaacaaaggccatgtgcaagggagaaatagaaatctttttcaagtgatcttgacctttttttgttgagtctagtacaccgttaggaaaaggtcacacttgctcctagaacttttctatcaaccagtaagtctgtgtgtaaattagtaatttttttgaaaaaccaatgtttgaccacaaaatggtagcttattttcacctagtacacataatggggtatcctaa

SEQ ID NO: 168987 - DNA, 611 bp, Homo Sapiens
ctccccgcaaaagtcacactccaagtcccacatctcctaaatcttatccttctcaaaaacatgccccagtgttggagttggaaggaaagaaatggagagtggagtaccaagaggacaggaatgaccttgtgatttcagagactgagctgaaacaagtggcttacattttcaaatgcgaaaaatcaactattcagataaaagggaaagtaaactccattataattgacaactgtaagaaactcggcctggtgtttgacaatgtggtgggcattgtggaagtgatcaactcccaggacattcaaatccaggtaatggggagagtgccaacaatttccattaataagacagaaggttgccacatatacctcagtgaagatgcattagactgtgagatcgtgagcgccaagtcatctgaaatgaacatacttatccctcaggatggtgattatagagaatttcccattcctgaacagttcaagacagcatgggatggatccaagttaatcactgaacctgcagaaattatggcctaacttcctgagagaccgaaccccctcacctggagcccccgtcgcatcgcaatccaatgtcttcgcccgtgctggcgtacg

SEQ ID NO: 168988 - DNA, 482 bp, Homo Sapiens
ggcaagctgctgtgctggtgatctagaggatcccgggagagtctgtatgtctctgcacttttctgaccccagcatcactaggattaaagacctggccctgggatctgagggtgagcagaggagcgccccaggaggtcccatactgagggaaggactctggaagcttccccaaaccctcatttggaaagatccttccctgagcttcctaaagccccacgttcctctcggggtgagtcctgcatagacacagaatggatggtcatttgaagagagctgagaaggtcacgccttccctttgacagcttgcactgtacctaaaaccccatcatttatgagccattatccttaaataagcattgccttgtcccataagttctctcttaaaaggcaaagagtgttccctgcagaggtcaacaaaggaattctttaatctccagataagacaggaggacagagcagctagagcacctagacagcctggg

SEQ ID NO: 168989 - DNA, 206 bp, Homo Sapiens
gtgtcatttcagaatcggggcaatcaactagcttatcttcatgtcctgggattaacgttcctcacatagggcagtcctataagctcccagtacagaagtaacacaattccccttgacactcactttttaaaaccttttggaaaattcttcatctttattaataaagcttgagattttggatcagttcacatagggtaccgagctcg

SEQ ID NO: 168990 - DNA, 288 bp, Homo Sapiens
tgtcttactccttgcttgcttctcagtttgtcacactcacgtaggaaagaggggtactatttactggcttctttagaccaacgtaaaataactatcaacctaaatgtttgaaaagagcagaactagatttctattattccagcatatgaccataccttaacaagacttaataactgctgtttccaatataagttataactgtttaaaaggaagcaaggagtaagacaagcagaaacccaaaatatcactttgattactgatagaggctttgtggaggatattgcttca

SEQ ID NO: 168991 - DNA, 300 bp, Homo Sapiens
ctcggtaccctaccccattatgtgtcaatgagacaagtagcctctgaactttaaaaagattgaagtttcaacttcagtggagtgatagttgcacaaatcactctcacctcggttcagtggagaattgtggttcatcggaagacaaggcatggaacaaggtttgtgaaggggagaagagggaaagggttgaggcgagaaagatctttgtttttaaaatggtttggctgtttttcctttagagaggttaaatattgaagaatgagcgggatcctctagatcacctcagcatcactgcctgcc

SEQ ID NO: 168992 - DNA, 238 bp, Homo Sapiens
caggcagtgatgcgaggtgatctagaggatcccgatacccattatgtgcgtgatcataggcatgagccaccatgcctggcttccacatgaaatttaaagtcagcttctcaatttctattgttttggttctaaaatagatgtaagggttttaaatgtgagcaacaatctctatggagccagcattttttgagttttctcatcccaatagctgctttttccgcctcagtcttctcctggg

SEQ ID NO: 168993 - DNA, 961 bp, Homo Sapiens
  misc_feature (781)..(797): n is a, c, g, or t
ccaagcacgagggctaagcagagactgtattagcggcgacagcgacgacggcagcgatggctggggcggggccagccccgggactcccgggtgcaggaggacccgtggtcccgggtcctggcgctggcatcccgggcaaaagcggcgaggaacgcttgaaggaaatggaggcggagatggccctgtttgagcaggaagttctgggggctccagtacctggaatcccaactgctgtgcctgcggtgcccactgtccccacggtccccacagtagaagcgatgcaggtcccagcggctcctgtgatccgcccaattatcgcgaccaacacataccagcaggtccagcagactctggaggcccgagcagctgctgcagccacagtagttcctcccatggtgggtggccctccttttgtaggccctgttggctttggccctggtgatcggagtcacctggacagcccagaggctcgagaagccatgttcctgcggcgggcagcagccggcccccgccctatggccctaccgccccctcaccaggccctcgtgggcccccctctgcctgggccccctggaccacccatgatgctgccaccaatggctccggctccagggccccccgctgggctccatggcttgcactgaggcccccctctggaagagccaacagccaccccccagagctgggcctagggcctgggggttgggccctgaaacagaaggcaacaggcactggtggtcggcccgccgcttgggcctggaaggaggcctaccgcggcctnnnnnnnnnnnnnnnnnccagacagtagcccccaactgggccccgggcagtgccctggggcattatgccctggcggctgggtcccctcccgcctgcccacctcgcctgtagatttgtagccccccccattcatttcccgatgttgaagtctcccgccgactttcccgtaattacccccccc

SEQ ID NO: 168994 - DNA, 118 bp, Homo Sapiens
agctgaattttaaacagaggaatgatatgattggattttccttagaaaatagctacagtaataatgtttcagaagaattggggaaggaagagccagaaggccacagaaaatgaagatg

SEQ ID NO: 168995 - DNA, 266 bp, Homo Sapiens
ttcccttcctgttcagtgtctcatgtcaatcccacctatgagtagaacatgcagtatttggtttttgtccttgtgatagtttactgagaatgatgatttccaatttcatccatgtcttaggataccccattggcttcttcattcagtcctacacataccccagtggctccttcattcagtcctacacataccccagtggcttcttcattcagtcctacacataccccagtggctccttcattcagtcctacacgggtaccgagctc

SEQ ID NO: 168996 - DNA, 487 bp, Homo Sapiens
  misc_feature (327)..(327): n is a, c, g, or t
  misc_feature (341)..(341): n is a, c, g, or t
taggataccccattagtgaagtagtaatgttcagaaactgattattggatcacaaaccattgaaactgcctcaaaaattatatctttaagtactgctactggaataactcagttaacgctctgttttgaaccttacagggaccaaatggtttaggacttcaagatcacaccttgtgggaaatcctgggggagccacaacttttcatgaaatgcattgtatacaaaattcatagttatgtccaaagaataggttaacatgaaaacccaataagactttccatcttggcagccatcctttttaagagtaagtcggttacttcaaaaagngcaaacactggggntcaaattattttaagaggtatttcagttttaaatgcaaaatagccttattttcatttagtttgttagcactatagtgagcttttcaaacactattttaatctttatatttaacttataaattttgctttctatggaaataaattaa

SEQ ID NO: 168997 - DNA, 2018 bp, Homo Sapiens
  misc_feature (820)..(829): n is a, c, g, or t
  misc_feature (1203)..(1204): n is a, c, g, or t
  misc_feature (1347)..(1347): n is a, c, g, or t
  misc_feature (1436)..(1436): n is a, c, g, or t
  misc_feature (1465)..(1465): n is a, c, g, or t
  misc_feature (1548)..(1588): n is a, c, g, or t
  misc_feature (1713)..(1713): n is a, c, g, or t
  misc_feature (1748)..(1748): n is a, c, g, or t
  misc_feature (1825)..(1825): n is a, c, g, or t
  misc_feature (1835)..(1835): n is a, c, g, or t
  misc_feature (1883)..(1883): n is a, c, g, or t
  misc_feature (1951)..(1951): n is a, c, g, or t
acaatgacctggcttgctttgcagcaagcgatggcatagtaaacgaaaacttggaggagcgatttagccaagaagttcagattacagaagcccgctgtttctatggcttccaaattgccatggaaaacatacattctgaaatgtatagtcttcttattgacacttacataaaagatcccaaagaaagggaatttctcttcaatgccattgaaacgatgccttgtgtcaagaagaaggcagactgggccttgcgctggattggggacaaagaggctacctatggtgaacgtgttgtagcctttgctgcagtggaaggcattttcttttccggttcttttgcgtcgatattctggctcaagaaacgaggactgatgcctggcctcacattttctaatgaacttattagcagagatgagggtttacactgtgattttgcttgcctgatgttcaaacacctggtacacaaaccatcggaggagagagtaagagaaataattatcaatgctgttcggatagaacaggagttcctcactgaggccttgcctgtgaagctcattgggatgaattgcactctaatgaagcaatacattgagtttgtggcagacagacttatgctggaactgggttttagcaaggttttcagagtagagaacccatttgactttatggagaatatttcactggaaggaaagactaacttctttgagaagagagtaggcgagtatcagaggatgggagtgatgtcaagtccaacagagaattcttttaccttggatgctgacttctaaatgaactgaagatgtgcccttacttggctgannnnnnnnnnccatctcataagaaaaatcagctgaagtgttaccaactagccacaccatgaattgtccgtaatgttcattaacagcatctttaaaactgtgtagctacctcacaaccagtcctgtctgtttatagtgctggtagtatcaccttttgccagaaggcctggctggctgtgacttaccatagcagtgacaatggcagtcttggctttaaagtgaggggtgaccctttagtgagcttagcacagcgggattaaacagtcctttaaccagcacagccagttaaaagatgcagcctcactgcttcaacgcagattttaatgtttacttaaatataaacctggcactttacaaacaaataaacattgtttgtactcgcccnntataaccccctatccaacactctccccgaacatccataaaaatgccgctattcatccccccaatattaataaatgaaccgaccatcgtcatatccccccctaactattatttttcaccacactacgacaccaaaggtattttnttttttgtcgtggaccctccttgcgcgctccagaaaaatgttttttaaatacaccattttcttctttgggcgggcgcgggccccccccnagagtatgtgaatgcgagcaacgcggcgngccacacatctccctctctccctaagaaaaaaaacccaccccgggtatatatattaactaagcgcgcgcgttgtgtttatctnnnnnnnnnnnnnnnnnnnnnnnnnnnnnnnnnnnnnnnnngggcgccacatttccccactccccttttctttcgtaacaacaccctcgcccggaagagacggtctctttttccgggcggttccattctcgggtggtaaacccaaccaaaaacgccgggcggcttnatacaaacggccgcgcccctctatacacactcganagtattattagccgccctctctgtaatcctgtcgccgcgccatatattttgtaagaacgacgacgggtcgtgcggantaatatatanccactaaagacgccctttcttcgccgcgcacaagtacgtgtggatacnatccgctactctcacgcctatcgcggtgtgtatggctccagataatcctttccaatgcttcccccccnctgggggagttaccaccgtccactattctgtcggccacgccgcttcttctccctgaaaaatatcata

SEQ ID NO: 168998 - DNA, 935 bp, Homo Sapiens
ggctggtacggtcggaatcccgggatatcgtcgacccacgcgtcgccctgtcccagccgtcctgtcctggctgctcgctctgcttcgctgcgccgccactatgctctccctccgtgtcccgctcgcgcccatcacggacccgcagcagctgcagctctcgccgctgaaggggctcagcttggtcgacaaggagaacacgccgccggcccctgagcgggacccgcgtcctggccagcaagaccgcgaggaggatcttccaggagcccacggagccgaaaactaaagcagctgcccccggcgtggaggatgagccgctgctgagagaaaacccccgccgctttgtcatcttccccatcgagtaccatgatatctggcagatgtataagaaggcagaggcttccttttggaccgccgaggaggtggacctctccaaggacattcagcactgggaatccctgaaacccgaggagagatattttatatcccatgttctggctttctttgcagcaagcgatggcatagtaaatgaaaacttggtggagcgatttagccaagaagttcagattacagaagcccgctgtttctatggcttccaaattgccatggaaaacatacattctgaaatgtatagtcttcttattgacacttacataaaagatcccaaagaaagggaatttctcttcaatgccattgaaacgatgccttgtgtcaagaagaaggcagactgggccttgcgctggattggggacaaagaggctacctatggtgaaccgtgttgtagcctttgctgccagtggaaggccattttcttttccgggttcttttgcagtcgatattcctggctcaagaaacgagggactgatgcctggcctcacattttcttaatggaacttattagccagaggatgagggggtttaccctgtggatttttgct

SEQ ID NO: 168999 - DNA, 927 bp, Homo Sapiens
  misc_feature (312)..(469): n is a, c, g, or t
  misc_feature (476)..(609): n is a, c, g, or t
  misc_feature (634)..(642): n is a, c, g, or t
  misc_feature (650)..(691): n is a, c, g, or t
  misc_feature (723)..(734): n is a, c, g, or t
  misc_feature (748)..(763): n is a, c, g, or t
ggtaacggacaaaaagtaacaaaaagacagatgccctgaatcagacacatcgctaacaagcaagagatgaggagatcccattgggtgtaatcccggcatagagcaagcggcaggcttggatgcagaagcttatggtagaatggttaagtgattttagtcgacaggatcacatacaaatcatttacaagccacaattagtttattatttacataaaactactaaccagaggagtctatgccattttaagaaaaacaattaaccgggttaaagagaaatgtcttatgtaaataataaactaattgtggcttgtnnnnnnnnnnnnnnnnnnnnnnnnnnnnnnnnnnnnnnnnnnnnnnnnnnnnnnnnnnnnnnnnnnnnnnnnnnnnnnnnnnnnnnnnnnnnnnnnnnnnnnnnnnnnnnnnnnnnnnnnnnnnnnnnnnnnnnnnnnnnnnnnnnnnnnnnnnnnnntttgggnnnnnnnnnnnnnnnnnnnnnnnnnnnnnnnnnnnnnnnnnnnnnnnnnnnnnnnnnnnnnnnnnnnnnnnnnnnnnnnnnnnnnnnnnnnnnnnnnnnnnnnnnnnnnnnnnnnnnnnnnnnnnnnnnnnnnnccccggggggaaaccagaggttttnnnnnnnnncacaaaannnnnnnnnnnnnnnnnnnnnnnnnnnnnnnnnnnnnnnnnncccccagcggggctctcatattttaatttttnnnnnnnnnnnnggggaaattttttnnnnnnnnnnnnnnnnaaaattttaaaacacttttccccccgaaagggagaaacccctcccaaaaagggggtgtggggaaaaaccttgaaatcccccccgggggaaaaaacaccacccttgggcgccccttgggggaataaaaaattttctccccccgggggaaaaaaagcggggggcgg

SEQ ID NO: 169000 - DNA, 638 bp, Homo Sapiens
ctcggtacccctggcatgtagtgaggacaaggatgttattcctcgagctggataggcagcaaagcactagtaagccctgttggtagaactgggaataaagggactgtcccctgtctcccaggagatggggcagtgcctagggttagctctctgaagacgaattacctgagaggctcttgcccctaccctactctcccaggtctgtgatgatgagtggcaccactacgctctgaacctcgagttccccacagtcacactctataccgacggcatctccttcgaccctgccctcatccatgacaatggcctcatccacccaccccgaagggagcctgctctcatgatgggggcctgctggactgttaagcttctcagtgaagactccagtggttcaggatctgggaagggaggtaggctggtgaggagcaagggcagtctgacccagcagctgaggccgcctcctgcatctctctgcagcttgtgcagggtgactctgaagatctccatgggaagggaccacagcctccctcccgtatctcccactaatccaaggggtcatcacctctgacttgaaggaattaacttctcacgcatccccagactctctctctgtaactccagccagttccacttttttc

SEQ ID NO: 169001 - DNA, 520 bp, Homo Sapiens
tgggaggtaagatttctggtgtaatgggacatgagccatacatggagagggctgcgggctacggaaagaaatataaaattttaaaatttctgaaatcatgcagttaacatctgcacacttcactatattttaagttttggttaatataaaagaataagaaaacagaaaagtattactgttaaacaataatagagaaatgtatacttctatttacaaatttctccctctagctgatcatacagttgaccagttcagggtgcccgctgctggttggatgccaggcggaatgtcagggtgttctctgggtgtctgttgtggctgtgggatccacggttactgggcggagccctgtggtgactgtggtgccatggaggggctgcgatcttctgtggagctggaccctgagctgactccagggaagctggatgaggagatggtgggcctcccacccattgacgcgagtcctcaagtcactttccacagcctcgatggaagacatgtgttcctcactacatgccat

SEQ ID NO: 169002 - DNA, 772 bp, Homo Sapiens
gtacccctggcatgtagtgaggacaacgagagggagggaacggaaaatggagcccttgatgctgttcctgttgatgtaaatcttttcactggagaggatttggatgaactagaagaagaattaaatacacttgatttagaggaatgacacccaacacatcgctgaaaaaattaagtcagctcagcacgagttgaaattgactacattaatttctttccacctagaatcaacaggatgtttatttcctatgctgattctggaggagttaacctcctgccaaaaaggcatcttgtccctacatcttctcttctgactttggctacatctcatagtaagttcagagtagttcatgataaattgaaaatataatggtcattgcagaaaatgattgatgttgtaactgtccacccaagtaagaagtgtatctgcctttccatcttttggttttcatttgggcatgtgctattaccagaaacaacaaacttatatttaaaatacccttcatttgacacagtttttaatgagtgatttaatttcctctgtatttgtatgtttagaagactgcctaaaacatgagcactgtacttcataaaggaaactgcgtatgcagattcagtattgtgtatctttggacaattagatggacatttaaaatggaacttcttttatctgacaggatcagctacaatgccctgtgttaaattgtttaaaagtttcccttttcttttttgccaataaagttgtaaataaagaccatcatacattaaaatcc

SEQ ID NO: 169003 - DNA, 1410 bp, Homo Sapiens
acccacgcgtccgggtacgtcccctgaagataaacagcaggcagctctcctacgacccactgaggtctactgggacctggacatccagaccaatgctgtcatcaagcaccgggggccttcagaggtgctgcccccgcatcccgaagtggaactgctccgctctcagctcatcctgaagcttcggcagcactatcgggagctgtgccagcagcgagagggcattgagcctccacgggagtctttcaaccgctggatgctggagcgcaaggtggtagacaaaggatctgaccccctgttgcccagcaactgtgaaccagtcgtgtcaccttccatgtttcgtgaaatcatgaacgacattcctatcaggttatcccgaatcaagttccgggaggaagccaagcgcctgctctttaaatatgcggaggccgccaggcggctcatcgagtccaggagtgcatcccctgacagtaggaaggtggtcaaatggaatgtggaagacacctttagctggcttcggaaggaccactcagcctccaaggaggactacatggatcgccgtggagcatctgcggaggcagtgtggcccccacgtctcggccgcagccaaggactccgtggaaggcatctgcagtaagatctaccacatctccctggagtacgtcaaacggatccgagagaagcaccttgccatcctcaaggaaaacaacatctcagaggaggtggaggcccctgaggtggagccccgcctagtgtactgctacccagtccggctggctgtgtctgcaccgcccatgcccagcgtggagatgcacatggagaacaacgtggtctgcatccggtataagggagagatggtcaaggtcagccgcaactacttcagcaagctgtggctcctttaccgctacagctgcattgatgactctgcctttgagaggttcctgccccgggtctggtgtcttctccgacggtaccagatgatgttcggcgtgggcctctacgaggggactggcctgcagggatcgctgcctgtgcatgtctttgaggccctccaccgactctttggcgtcagcttcgagtgcttcgcctcacccctcaactgctacttccgccagtactgttctgccttccccgacacagacggctactttggctcccgcgggccctgcctagactttgctccactgagtggttcatgtgaggccaaccctcccttctgccgaggagctcatggatgccatggtctctcactttgagagactgcttgagagctcaccggagcccctgtccttcatcgtgttcatccctgagtggcgggaacccccaacacagcgctcacccgcatggagcagagccggttcaaacgccacagtgatcctgcttgtctttgagcctgagtaccgcagtggtccc

SEQ ID NO: 169004 - DNA, 644 bp, Homo Sapiens
cgggcttactagaggatccccatggcatctagtgagtacacacaacaaagcagcatgcaggaactagaaacacatcttcagcctcctcctgggccagctcttgtgctacaggtggggcggagccagcccctcaccttcctggttccctgagggtcctcagggtggaggacaggtttggcccagaaagactagccagaggcctgatggtcccaggtggctctggatatacttgggatatggatttaaatggtctctaagagccgggggtagggggcaggaaaagtgggttgtctttgcccctcaaagtccacctacctagaaaccaagcccacggtcttggccgtgaccctgataataaatgggctctctcagaggcgccagcccctccctccccagccggaggcgtcatctctcttctgtaccactagagggagctctgatgcagctggagagcagcgctcaaggctctcgcccctcccctccctaacccttaacttcagtctccaccagcctgaaggggcctcctaggggatcctcaggcggcccccaccaggcacaccctactgtccttgtgcctcacgccccctcctcatccgtgcaccccttccatcccaccttccctttcaaataaacagctgggatgg

SEQ ID NO: 169005 - DNA, 560 bp, Homo Sapiens
gattcgccggtgttatagaggatccccatggcatgtcgtgaggataccattgaccataagcgctgactgcttgtccactctctcagtgacagcatgggccacggcatagtaggactgcaggccacgtgcatgagtgggaagatcctcacaggcacagatgcccccaaacccgggcagctggaggcctgcatcgagatgaacccggggttatgaaagtagctccggaggtctgattagtgaagaaagtggctcagaagaagaggaagaggaggaggaggaagagcagccgcaggcagcacagcctcccaccctgcccgtggaggagaagaagaagattccagatccagacagcgatgacgtctctgaggtggacgcgcggcacatcattgagaatgccaagcaagatgtcgatgatgaatatggcgtgtcccagcccttgcacgtggcctgcagtcctactatcgcgttgcccatgctgtcactgagagagtgacaagcagtcagcgcttatggtcaatgtgtcctcaacagtaccagatcaagtttgacgccgtggggat

SEQ ID NO: 169006 - DNA, 1158 bp, Homo Sapiens
aggctggtacggtccggagtttcgggatatcgtcgacccacgcgtcgattccggcctggagctcccaggccgagcagaccttgggacctgtgagcgctgcatccaattaaccatgggaagggtcagcaccagccaccagccccttaggtgaggactctccctggggctctgctgatggttccgaatcatggagctgcagagagctcctccagcctggagacgttcttggtgaaagctgtggtctaactccaccggctcttcctgcacattgtattcaagaggggtgcctgcccccgctgactcaggagctccggtgctgcagccgccacgaatggggaggtgggccctcgatgtggcctttttgtggaaggcggtgttgaccctggggctggtgcttctctactactgcttctccatcggcatcaccttctacaacaagtggctgacaaagagcttccatttccccctcttcatgacgatgctgcacctggccgtgatcttcctcttctccgccctgtccagggcgctggttcagtgctccagccacagggcccgtgtggtgctgagctgggccgactacctcagaagagtggctcccacagctctggcgacggcgcttgacgtgggcttgtccaactggagcttcctgtatgtcaccgtctcgctgtacacaatgaccaaatcctcagctgtcctcttcatcttgatcttctctctgatcttcaagctggaggagctgcgcgcggcactggtcctggtggtcctcctcatcgccgggggtctcttcatgttcacctacaagtccacacagctcaacgtggagggcttcgccttggtgctgggggcctcgttcatcggtggcattcgctggaccctcacccagatgctcctgcagaaggctgaactcggcctccagaatcccatcgacaccatgttccacctgcagccactcatgttcctggggctcttccctctctttgctgtatttgaaggacacagggctgctcctgcgggtacttgggagcctcttccttggcgggattctcgcctttggtttgggcttctctgagttcctcctgggtcttccagaaccttccagccttcaattcttttccaattgcccggcaattttaaaggaagttttgcaattttgcttgt

SEQ ID NO: 169007 - DNA, 333 bp, Homo Sapiens
atggcatgtaggttaggacattctcagcagtatggtgcgcacaagatgctctccacatcctgaggtactcacagctggggagtaggggtgatgagctccagtatttccagcccagcagccacatccataaagagcagcctgcccaactctccccggatgtgtcaaggccaagcctccactggagacagcagcagcaacattcccttcgtggtccacaaccacagcgcctaccgtgtccaaagtgcctgagtcattttccttctcactggattgtcttcttttcttgaggttgcataaaatctgtgtcctcactacatgccatgggtacccgag

SEQ ID NO: 169008 - DNA, 363 bp, Homo Sapiens
ccatgggatgtattataactaactattacagaaacacagctaatgaatatcaagtattgctctggctctagacagaaaaaaatcagttgacttaaccctttgctgtcaaaagagttggcgtgtccggttcggggtgctactgccaaacgttatggtacttagagtcgggatgcacaacttcaagccaccgacttatcaatgcagccggctgtgtattggcgaatgggccgttaccttaagcacggagccacccgggttcagtccagccattacaagaatgtatatgtaagcggtcggtagttctggcttaattaaacatgcagcatgaggtactcttctgtcctcatgtacagtgccaggggt

SEQ ID NO: 169009 - DNA, 441 bp, Homo Sapiens
tcggtacccatcgcatgtaatgaggacaagaaacagcgcgaggagagcgaggctccaggcctccaagcctggtgatggcatgaactccctaactggtcaagacactcaggcccaacacgaggaaagctgcagggggatgtgtagataacagagtcagcacactgtgctccacccagattgcttggtgcaaaacagcatattctgataaaacactgacttctgtacacatctacttggctaaatacaaagagtcttcgccttgccctttcttctttttcactgaggagagagatgtccagttgcagggatttaagaaccattgcttatttactcattactctcccctccctagaactcaaccgcccctcctagtgttactcactggcattatctgcccacgtgccatctgtgtcactcactacatgcggggacctctagagt

SEQ ID NO: 169010 - DNA, 606 bp, Homo Sapiens
  misc_feature (412)..(494): n is a, c, g, or t
atggcatgtagtgaggacacacactgttgcacaggccggtctcaaactaggatctctttttatccctaggtgaggtgagtattgatgtgctttcgccggctatcttttgaaatggaatgtgctttgtactcaatgggcctgctaagtatgtggactcatgatttgtaatgctgggaagtgttctttattagctctttgaaaatgtcctgtattcatttctcttcatacttactttggaacttctttagtagatgctgatccttccagattcttccactaacccactaaatgtcccaaccattacactctttcgtactgccttcctcctacttcaacctcccaagtaactaagactacaggggtatgctaactgaacctacctaatttttaaaatttcgtagagataaacgcnnnnnnnnnnnnnnnnnnnnnnnnnnnnnnnnnnnnnnnnnnnnnnnnnnnnnnnnnnnnnnnnnnnnnnnnnnnnnnnnnnncaggaaggagccactatccctagtcctcctaatactttttgtccacctgatatcttcttaaccgtttagttcttatgtgtcgttcttcaaccttatactggcattttaatgg

SEQ ID NO: 169011 - DNA, 505 bp, Homo Sapiens
atctaaggatcccctggatgtagtaggcaggtggcatggggtcctggaatgctgctagctgcttgtgtcaattacatgggtcacaacggggattcccttccgctggaaactgtaagaaaaggggaacggcacacagaaaatgaagagccagacaccagacggcaagagaactggggaaaagaagatcaagtcttactccataactaggtaagtagccttgagcaggccaatttccctctggtggaatttctaataccagggattaaactaaaagatgtccaaggaccactctagccatgaccttccagaaatcactctataaccaaatcatgtgagcaaatgtaggtctgagaaatgggacagagctacatgagggagaagaaaatgatagggtatgaaatgggattcaagttaatattggccaaaagacagaagatggcagagagcaaaggaagggagcctgaaccagaaggttcccaatcctggcctggcgggtaccgagctc

SEQ ID NO: 169012 - DNA, 236 bp, Homo Sapiens
atacggatcccggacagagaagagtggatgtgaccctccgcaggtattatctgaccctgaccacctcgtctactgcccacgctgcatcttcacgcccatgctacgctggggtcctgtattctcccaagcccctgtgcccttccttcagctgcttcctatgccaatcctgagtcctgagttctgacacggtcggccagtcatgtcctcatgtacatgtgccaggggtaccgagctcg

SEQ ID NO: 169013 - DNA, 248 bp, Homo Sapiens
ctggcatgtaatgaggacagaactgatcctgccccctacggccattctccaccgcgtagcccaaaccatctcttctaaatggaaatcatctggatgatgagcatacagaaacttctttgtgctaatcttgtaatttttttgtaagtttgaaattatttcaaaaagtttaaaaatcatataaatcagatccaactactacgtcactgaccaaaaccctccctgtgcctctcctgcactataggaaaaga

SEQ ID NO: 169014 - DNA, 498 bp, Homo Sapiens
tagaggatcccactggatgttataggcaaaggtgttgtaattacatgatgttcaaatagaacgtaacagcataaggtcctggaagacaaaggtattgtagattacctgatgtccaaataggaggaaatagaataaagtcatggaagagagagggctgtaaattacctgatgtcaaaataggagataatagaataaagtcctggaacacaaaggtgctgtagattacctgatgtccaaataggaggtaatagcatacggttgctggaagagagagggcttaagataacctgatgtccaaataggaggtactatcgtacctgtgctgtaagagagagggctgtagattacctgatgtccaaataggatggacatagcataaggtcctggaagacaaaggtgttgtagattacgtgatgtccaaataggatgtaatagcatccggtcttggaagagaaaggtgtagcacatcacctgatatcccaataggcaggtactaga

SEQ ID NO: 169015 - DNA, 1448 bp, Homo Sapiens
ggagagaaggaagagcaagacaaaaaaaggaaggaggaagaggagcgaaggcggcgtgaagaggaagaaagagaacgtctgcaaaaggaggaagagaaacgtaggagagaagaagaggaaaggcttcgacgggaggaagaggaaaggagacggatagaagaagaaaggcttcggttggagcagcaaaagcagcagataatggcagctttaaactcccagactgccgtgcagttccagcagtatgcagcccaacagtatccagggaactacgaacagcagcaaattctcatccgccagttgcaggagcaacactatcagcagtacatgcagcagttgtatcaagtccagcttgcacagcaacaggcagcattacagaaacaacaggaagtagtagtggctgggtcttccttgcctacatcatcaaaagtgaatgcaactgtaccaagtaatatgatgtcagttaatggacaggccaaaacacacactgacagctcccaaaaagaactggaaccagaagctgcagaagaagccctggagaatggaccaaaagaatctcctccagtaatagcagctccatccatgtggacacgacctcagatcaaagacttcaaagagaagattcagcaggatgcagattccgtgattacaggggggccgaggagaaatgggtcactgttcgagtacccacccatgaagaaggatcatatcttttttgggaatttgccacagacaattatgacattgggtttggggtgtattttgaatggacagactctccaaacactgctgtcagcgtgcatgtcagtgagtccagcgatgacgacgaggaggaagaagaaaacatcggttgtgaagagaaagccaaaaagaatgccaacaagcctttgctggatgagattgtgcctgtgtaccgacgggactgtcatgaggaggtgtatgctggcagccatcaatatccagggagaggagtctatctcctcaagtttgacaactcctactctctgtggcggtcaaaatcagtctactacagagtctattatactagataaaaatgttgttacaaagtctggagtctagggttgggcagaagatgacatttaatttggaaatttctttttacttttgtggagcattagagtcacagtttaccttattgatattggtctgatggtttgtgaactcttgctgggaatcaaaatttccttgagactctttagcattcatactttggggttaaaggagattcctcagactcatccagcccttgggtgctgaccagcagagtcactagtggatgctgaagttacatgagctacatgttaaatatttaaagtctccaaaataaaacaccccaacgctgaccttacccggctgatggttagccccttgctgcctgctccatgtgtcttatgagagcccgtagttacagtgtcctcactacatgccat

SEQ ID NO: 169016 - DNA, 305 bp, Homo Sapiens
atggcatgtagtgaggacaagacagagagaggaaagaggttccacagccttttaaactactagatctcatgagaactcgacgtcactatcaggaggatggcatgaagggcttagtgctttgccataggtgaaggatccactcccacccctttatgattaaagattttcccacctaggccccgactctaacatgagggagtgtactttcacatgagcttgggaaggggcatagagaaaaaccgtattattctgtccctgaccccacaaatctcatgtcctcactacatgccatgggtaccgagctc

SEQ ID NO: 169017 - DNA, 624 bp, Homo Sapiens
atggcatgtagtgaggacaatgaggaccgcactgaaagcagtggaaacaaacgcttccccaatgtcatacatgatgcgtggagatatactacacatgtatacatacaacatgcattctacatacagcatagcggcatgccgcaagcatacgcagtgcttttcataaacaaaaccactgaagtctcacaacggccccggaagggggtcagtcatatgatcctcaccccatgtcacagatgacaaactgaggcacagaagggctgagggtggcaatgggacggaagccccagtggcctggctctggccccctcccaatccatctgcactggccacgacaagggtgctggacacagggcagtggggtgtgggcagcgtgtgagtcacaaggcaggttccgcgggttcagggcccatcgggattcaccagcagcagcaccaggctctacagtcaggaccagatgggccttggtcaggcagcctggggcagggccaggggcctgcagcagccctccgaggatgggaggctctgagaatcctcagtgaagggcaggcttgagcctgggatggcgctttttaacagggccagtgtttcctacataaaaagccctgtctgcagatttaagtt

SEQ ID NO: 169018 - DNA, 566 bp, Homo Sapiens
tggcatgtagtgaggacatgaggacacggtgtgggtaggctacagaatatatgaataggtaacgaaacccgcccccgtcgcacgggaacctctctgaaataactatggagacacagcaggaggctagtgcagtaacagatgggagcagaagttactgaaacacactctgtgctaaccagggagttgtgggactggtgcactcacacgacggcgtgggcagaaatcagcaccatctcactcgggaaagctatcgtggcagttcgtaccacgggtcataaatctgtatctattcctggtgtccggagacacatgctgaggaaagaatccaaaaggtggacaacagcttctaggcatgaagaggtagcatcataacttaagaaactaggagccaccgtaaatatccaatgggaaactgtttcatcaaatcacccatggtcactttaatgagacagcatgacatctcacagagaagagattacaagactttccagcaacatggaacaatgcacagccccaacatatgagcttaaaaagcaggaatccacattgtgtgctcactacatgcc

SEQ ID NO: 169019 - DNA, 271 bp, Homo Sapiens
atgatctagaggatccgccaaagagaacaagaaatgtaactttcagagtgctgacacagaagtgggaatgggttcatgtataacacagctgaggtaaaataactaatttctaaaaatataaaaatgatcaacagggttgaataaaaccagtaaaagtggtataaaataagtctagtaaggaatttcagctccaagcaatttctccagcttagttcgtaagaaaacccaataaccataccactgtcctcactacatgccatatggcatgtag

SEQ ID NO: 169020 - DNA, 377 bp, Homo Sapiens
atggcatgtatgtgaggacattcattcatttagtaaatatatactatatgctagacattgagattagggagggagcaaaacaaaccatctgtcctcatggaacttataatctaattgtgactaacaataaaaaagcacatcctataacacaatgcagcaatgacgcagtaggttctgaggtgtagtaacaggaagaaaataatttaccacatcctttatgcattagggtgtaacaggcaagcttgaggcagaacaaggcttgtttgtgttgtgttcgaagaacgtctcactcgtggtcacccgaggcgggaagtgcaggtggcacaatctgggactcacgtgaaagctccgacctcccagggtgcacgcacattcgt

SEQ ID NO: 169021 - DNA, 274 bp, Homo Sapiens
atggcatgtaatgaggacaactaaatgttttctgatatctctccctaacattactggccactccaacttttgtgcccccaacaaacctctttctataatcctctcatatttgccaatttatctgcccccccgatccccacagtagaataagatcagtatactgtggatttgttcaccacgcaacaccagaattgttcatctagtggccatttctcagctccttacctaacttttgtgtattgaccacatcctcctcccggatcctctagatcac

SEQ ID NO: 169022 - DNA, 282 bp, Homo Sapiens
gctcggtacccctggcactgtcatgaggatacggagaaaggtaactgtggaaggtttctatgccaaccatagcatattatcttgtctattttgtaggcatgacatttgggactgagtggaagctaattctgcagtggacatggaagctggcttggagggagggaggcctggaagggaatccagatctgcagaccctcaggccccagcgagctgtcctaggctggttttaccttagcctagtgtcctcaactacatgccatgggatcctctagatcgaagcag

SEQ ID NO: 169023 - DNA, 345 bp, Homo Sapiens
atggcatgtagtgagacatacagtgaacaagatagaaatccatacacatataaatgtaatttcccatggaatatgtgtcagatcacttcgggaaaagaaagatacctttctatggtcggagccatacacttcataccaactaatgtaatcctagtatttatctatacagtatagagtagtccaaagctaatttatattcaagatgtggggaatgccagcttatattattattgagattctcaagtgggaatgacgcatgtcctctaatccggctagtgcacttgggagtcatgccagaaattgggatgtgattcttctgtcctcacgacatgccatgggtaccga

SEQ ID NO: 169024 - DNA, 595 bp, Homo Sapiens
tggcatgtagtgaggacaggactgaacaaaaatcagtggtgggggcttggagccgtaaataactgtaccaggcttagccccagttagacacataacaaatctgcaagagagaatttagcctaacttgaatcaccaaaggacaacggtaagtcagcatttcaggctctggaatattacttgcataccgcactgggtaagagaacctgtggagtctgagagatggcaagtcatgagactaggagctcggttaactcaaaaggtgtcagcggtcaccggcttggtaagtcacggtgaactcctcattaaaaagtaaagtgctggactcctccccagaagtttctgcacaaggagacaggaactttgcatctttggcaaggctccggggacagcagggagtggggaggtaaattgttatgcacagtcaagtttgaaatccactagtctgtacttccagtcaagctcatgcaaaaatcggtcccaaaatatgtttgcattcttaactcccatcagctctcctacacattctttttacaacacttgcccaaggtgaggactcttctcctggacattgatatggaggttctctgtcctcact

SEQ ID NO: 169025 - DNA, 364 bp, Homo Sapiens
gttgatctagaggccccttcttatctccacccaccagaaaactttctacaatagactatggtattacttttgagtaagggaaacatagtcaaacatcatgtttgaaggtgaagttaatataatgggaacacgggataagcaccttaaattctcaaaatgggctgataacctacaactatgaaatgcaaatattggtgaaattaacaaaacagaactcactcctaactaaacctagcaatggcaagttgccctgggagagctgatttcttctctacactaagcctaagcaatatctacaggcatcagggttgagtctgcacactacggctcacctcctatgtcctcactacatgccatgggtacc

SEQ ID NO: 169026 - DNA, 298 bp, Homo Sapiens
cggctgtagtgaggcaaccggatgggatgtgttgtgtggtggggcggggacatttatgttctatggtgcgcacgggcgaaacggtatgtatctggtaacattgcgattgggaatgtaagtaatacttaatggtaattttggttttctctttcacatatggagaatgttgccttataaggattggagtattagaaatggatcaaatcactaagttagtttaataaattaaaaaagtctatgcttcattattatagctatttcctaataggtctctgcatatgtcctcactacatgccat

SEQ ID NO: 169027 - DNA, 371 bp, Homo Sapiens
tcggtacccatggcatgtagtgaggacactgaggctgacccaaaaagggacagtggagcccttaggtcccttagacactgagagaagtgaactgaaacaaaggggtttggttccatcatttgtgaggtatttgtcctcagagggtacaaggattcctaccaccctccagggcccagaaaggagggcagccaagagagccagggagggggctgggaaaggggccttggaggtcatcttggccctcagaaggggagcctgtgctagtgtttccttgctcagaatcagaaatctctaccgtagaacacttgatatattttatttgttcatttcctttgattttgctaaatttcagtgtcctcactacatgccat

SEQ ID NO: 169028 - DNA, 479 bp, Homo Sapiens
  misc_feature (323)..(341): n is a, c, g, or t
atggcatgtagtgaggacaactggcatgtagtgaggacatcaatgcaatctgaaaagactgaaggggatttcacagagcagtgaagatttgagtataaattttatttcaaaagtttggtaagaaggacaccaccagtgtatttcacaaagacataaatgtatacaccccagcaacacaaaaagaataaatcttcaaaaatgtttacacccggattattaacatttttctaatataaatttaggacctacagaatgtaaataaatatacattactatgtataccttactagtgcggcttaccaacaaatcagctgaacttgaannnnnnnnnnnnnnnnnnnaaataagagcaggtttgctttggaggggcgggaagggatggacaacaggaaaagcactagaaccggtccatttcacatcagtaatccgccagacataccttgcgagcttgtggaaggtgtcacacgtgggggggaaca

SEQ ID NO: 169029 - DNA, 968 bp, Homo Sapiens
cccgctcagagccagtttctcccgctcttcctgcagcctgggaacttcagccggctggaggtcagttcccctccccagggaaggaggaagtgagggaagctgcgaagccccaccatggctgcaatccgaaagaagctggtgatcgttggggatggtgcctgtgggaagacctgcctcctcatcgtcttcagcaaggatcagtttccggaggtctacgtccctactgtctttgagaactatattgcggacattgaggtggacggcaagcaggtggagctggctctgtgggacacagcagggcaggaagactatgatcgactgcggcctctctcctacccggacactgatgtcatcctcatgtgcttctccatcgacagccctgacagcctggaaaacattcctgagaagtggaccccagaggtgaagcacttctgccccaacgtgcccatcatcctggtggggaataagaaggacctgaggcaagacgagcacaccaggagagagctggccaagatgaagcaggagcccgttcggtctgaggaaggccgggacatggcgaaccggatcagtgcctttggctaccttgagtgctcagccaagaccaaggagggagtgcgggaggtgtttgagatggccactcgggctggcctccaggtccgcaagaacaagcgtcggaggggctgtcccattctctgagatccccaaggcctttcctacatgccccctcccttcacaggggtacacgaaattatccccctacaaacccagcctcctgagggctccatgctgaaggctcccattttcagttcactcctgaccaggactgcattgctttctagccccgaggtggtggcaagggccctccctcacagcgctctggagagccacgcctataccctggccttcctcagggccctggggatcgggcccctttgacttcccaaagatggtccccggcttattcatcg

SEQ ID NO: 169030 - DNA, 571 bp, Homo Sapiens
gggaggggcggccgtcccgggccacccccccacaccacacctctccatgccgcacgtctggagtggcgaattccgcacgagggaggtgtttgagatggccactcgggctggcctccaggtccgcaagaacaagcgtcggaggggctgtcccattctctgagatccccaaggcctttcctacatgccccctcccttcacaggggtacagaaattatccccctacaaccccagcctcctgagggctccatgctgaaggctcccattttcagttccctcctgcccaggactgcattgttttctagccccgaggtggtggcacgggccctccctcccagcgctctgggagccacgcctatgccctgcccttcctcagggcccctggggatcttgccccctttgaccttcccaaaaggatggtcacacaccagcactttatacacttctggctcacaggaaagtgtctgcagtaggggacccagagtcccaggcccctggagttgttttcggcaggggccttgtctctcactgcatttggtcaggggggcatgaataaaggctacaggctccaaaa

SEQ ID NO: 169031 - DNA, 516 bp, Homo Sapiens
ctcacccatgaccagggagctagtcggtattctttgacatgccaatctgggcttctctcaaggaccacagatcactcgtgggagggctgtcctattatctgagatccccaaggccttcactacatgccccctcacttcacaggggtacagaaattatccccctacaaccccagcctcctgagggctccatgctgaaggctcccattttcagttccctcctgcccaggactgcattgttttctagccccgaggtggtggcacgggccctccctcccagcgctctgggagccacgcctatgccctgcccttcctcagggcccctggggatcttgccccctttgaccttccccaaaggatggtcacacaccagcactttatacacttctggctcacaggaaagtgtctgcagtaggggacccagagtcccaggcccctggagttgtttgtcggcaggggccttgtctctcactgcatttggtcaggggggcatgaataaaggctacaggctccaaaaaa

SEQ ID NO: 169032 - DNA, 726 bp, Homo Sapiens
agcctggaaaacattcctgagaaggtggaccccagaggtgaagcaacttctgccccaacgtgcccatcatcctggtggggaataagaaggacctgaggcaagacgagcacaccaggagagagctggccaagatgaagcaggagcccgttcggtctgaggaaggccgggacatggcgaaccggatcagtgcctttggctaccttgagtgctcagccaagaccaaggagggagtgcgggaggtgtttgagatggccactcgggctggcctccaggtccgcaagaacaagcgtcggaggggctgtcccattctctgagatccccaaggcctttcctacatgccccctcccttcacaggggtacagaaattatccccctacaaccccagcctcctgagggctccatgctgaaggctcccattttcagttccctcctgcccaggactgcattgttttctagccccgaggtggtggcacgggccctccctcccagcgctctgggagccacgcctatgccctgcccttcctcagggcccctggggatcttgccccctttgaccttccccaaaggatggtcacacaccagcactttatacacttctggctcacaggaaagtgtctgcagtaggggacccagagtcccaggcccctggagttgttttcggcaggggccttgtctctcactgcatttggtcaggggggcatgaataaaggctacaggctccaacgt

SEQ ID NO: 169033 - DNA, 789 bp, Homo Sapiens
  misc_feature (652)..(652): n is a, c, g, or t
gatcgttggggatggtgcctgtgggaagacctgcctcctcatcgtcttcagcaaggatcagtttccggaggtctacgtccctactgtctttgagaactatattgcggacattgaggtggacggcaagcaggtggagctggctctgtgggacacagcagggcaggaagactatgatcgactgcggcctctctcctacccggacactgatgtcatcctcatgtgcttctccatcgacagccctgacagcctggaaaacattcctgagaagtggaccccagaggtgaagcacttctgccccaacgtgcccatcatcctggtggggaataagaaggacctgaggcaagacgagcacaccaggagagagctggccaagatgaagcaggagcccgttcggtctgaggaaggccgggacatggcgaaccggatcagtgcctttggctaccttgagtgctcagccaagaccaaggagggagtgcgggaggtgtttgagatggccactcgggctggcctccaggtccgcaagaacaagcgtcggaggggctgtcccattctctgagatccccaaggcctttcctacatgcccccctcccttcacaggggtacagaaattatccccctacaaccccagcctcctgagggctccatgctgaanggctccattttcagttccctcctgcccaggactgcattgtttttctagccccgaggtggtgggcacgggcccctcccttcccagcgttcttgggagccaccccttatggccctggccctttcctcaagggccccctg

SEQ ID NO: 169034 - DNA, 992 bp, Homo Sapiens
caaggctggtccggtccggagttcccgggatatcgtcgacccacgcgtccgaacttcagccggctggagccccaccatggctgcaatccggaaagaagctggtgatcgttggggatggtgcctgtgggaagacctgcctcctcatcgtcttcagcaaggatcagtttccggaggtctacgtccctactgtctttgagaactatattgcggacattgaggtggacggcaagcaggtggagctggctctgtgggacacagcagggcaggaagactatgatcgactgcggcctctctcctacccggacactgatgtcatcctcatgtgcttctccatcgacagccctgacagcctggaaaacattcctgagaagtggaccccagaggtgaagcacttctgccccaacgtgcccatcatcctggtggggaataagaaggacctgaggcaagacgagcacaccaggagagagctggccaagatgaagcaggagcccgttcggtctgaggaaggccgggacatggcgaaccggatcagtgcctttggctaccttgagtgctcagccaagaccaaggagggagtgcgggaggtgtttgagatggccactcgggctggcctccaggtccgcaagaacaagcgtcggaggggctgtcccattctctgagatccccaaggcctttcctacatgccccctcccttcacaggggtacagaaattatccccctacatacccagcctcctgagggctccatgctgaagggctcccatttccagttccctcctgcccaggactgccattgttttctagccccgaggttggtggcacgggcctccctcccagcgctctggggagccacgcctatgccctgccctttcctcagggccccgggggatcttggccccctttgaccttcccaaaggatggtcacacaccagcacttttatacacttctggctcacgggcacgttgtctgcgaagggaccagagtccaggccc

SEQ ID NO: 169035 - DNA, 242 bp, Homo Sapiens
atggcatgtagtgaggacaggcagggagtggcatggcacacagtaatcccaaggctcctcccaggccagtgtcttcagggggtaggaggggaaaaaaacggaaataactaggaagaacaagaaaaggaattccaggggcaaaggacaagcagaggggccaggagacttacaaaggtcaggaagttgacagacgactcagtaactgtttgagtcagcaaatggatgtcctcactacatgccat

SEQ ID NO: 169036 - DNA, 488 bp, Homo Sapiens
catggcattgtagtgagtaccagcgggtgttccctgtgccaaggcagataatacttcgtgatcttcaagccaatggttggggtgctagtgtccttgagggaggagtgggacacttctagagacccagagcactcaaggtgatgtggggttttaaggttctcaagtgcagtgacccagatgccccatctaaagtgtcagggtcccacttctgcaactatgctcctgaccttggtatagtacactcactagggcggaaaacctttagggcgttcttctgctcttataattaaatcctgagcttcatcttccgctgtggctgcctgatgcagctcctacttccttgatatggctgctaaggaggcacactggctttcgtccttagcctttaattggagagccatcatcctcaacctttcatcgtctctctccaaagcacaggtttactccatcagtagccatccaatgtcatagtccacacgacatgccag

SEQ ID NO: 169037 - DNA, 910 bp, Homo Sapiens
atgccatgtagtgaggacagtgtatccgtgtgtgcatctgtgtatctgtccatgtatccgatggcatgtagtgaggacagggaagacatgcactcaagtctcttcagacataagataatctactgttcttaaagacctccagaaggtcaaccatatgatcctttcaatgaatactgcagtgttcaacaacgctcactctcagcaaatgcattctggacttcccatgggtcacaagaccatgtggggcccagagctccttgccatgatactgattatgtcatccctataggggcagaaagtttcctttcaatttttcagaagacataatactatagtctgggctttgaatatatactcctcctatccttcaaactcccaccaccactagcagcagcagcaacagcgatctgccaagcagaaagcaacttgctactaaacttttggttactttaagctcaacctgggcaagtaagataaaataccactaaccaggaacctgaaaacattccagtttccaaagttaatatgcaccaagttttactcttctccatataaattattacatttgagaaatctgcttcattcatctagcaaatgtatactgtgtcctcactacatgccatatggcatgtagtgaggacatactttaagatgccatccttgttagataccttttcccattttcatggtttcatttattctccagacttgctgacataagataaacccggtatcttcagttggctgctggacatttctccttggatagctttctgtcacctagaatttttcatatctaaaactaaatctaccttttcccccactgcacttccctttctctattataaatggtaccctgtcatcattttccccgtcatcccgtctccaatactggagaggcctgaagggt

SEQ ID NO: 169038 - DNA, 1955 bp, Homo Sapiens
ctggataaagattgactcggagcagctgtctgtacttgcttcatgctacaggagctcttcaaggcccggtttcgaggggaggtcctgctgaggagattactgaggagtccctggaggagtctgtaggaaagcctctgtacctaatattcaggaacctatgtcagatgcaggaagacaacagcagcttctctctacttctagaccttctctccgagctatatcagaagcagcccaagattggctaccacctgctctactacctgagggccagcaaagccgccgcagggcaagatgaaactgtacgagtcatttgcccaggctaaccagctgggcgatctgcacacctgcctgatgatggacatgaaggcctgccaggaggacgatgtgcggctcctgtgccacctcacgccctccatctacacagagtttccagacgaaaccttgaggagcggagagctgctgaacatgatcggggctgtaattgactctgcacagctcaaggagcctggtctgccacgtgatgatgggtaacctggttatgtttcgaaaagactcagttctcaacatactcattcagagcctagactgggagacctttgagcagtattgtgcctggcagctctttctggcccacaatattcccctggagaccataatccccatcctgcagcacctcaaatacaaggagcacccagaggccctgtcctgcctactgcttcaactccgaagagaaaagcccagcgaggagatggtgaagatggtgctgagccggccctgccatcctgacgaccagttcaccaccagcatcctgcggcactggtgcatgaaacatgacgagctgctggccgagcacatcaagtccctgctcatcaagaacaacagcctgcctcgcaagagacagagcctgaggagctctagcagcaagctggcccagctgactctggagcagatcctggagcacttggacaatctgcggctcaacctgaccaacaccaagcagaacttttttagccagacgccaattctccaggcgctgcagcatgtccaagcgagctgtgacgaagcccacaagatgaaattcagtgatctcttctccctggcggaggaatatgaggactcttccaccaagccacccaagagccggcgaaaagcagctctgtccagccctcgaagtcgaaagaatgccacacagccccccaatgccgaagaagagtcgggctccagcagtgcttcagaagaggaagacacgaaaccgaagcctaccaagcggaaacgaaaagggtcctctgcagtgggctctgacagagactgaggccctgcattccccatcccacccccggctggactgccctctccttcttggagattcaaaggttaatagaggctgaggagattgcaggggaaacacccttgctgcatccccaagctccccccgtggaaaggaggagctttctcctcaggctgagtttgagaagctgccatgcagcccctagccccttccctcctcctggggcctccagcccctcacactgctgttcccagtgatatttgggatctgactgaagccagaggctctgtaaaatcagaccatagtggaagtcctcagccccctggccccttccgcaatctcctcccccagtctcccaaagagccatttcaacagagaagggaaatgacaaaggggcagctggccagataagctaggatgagagcagagactcagtgtgtgggtgtcccttcctgcttccccttcaggtcttggtctgtctgaagggacgtttcatagtcactatccacatgccagcgtgccctgggcatctatgacgtggtcagggtgtccattccttaatcatggggcagatgccacaagcattcagacaggagtctgaaagggtggccacagcccacgtggtgcccctggaggcttaacgtggctgacgttggccctcaatcta

SEQ ID NO: 169039 - DNA, 365 bp, Homo Sapiens
ctcggtacctataacatctatgacgtggtcaggtgtccattcctaatcatggggcagatgccacaagcattcagaaaggagtctgaaagggtggccacagccccacgcggtgtgccctggaggcttaggttggtctgaggttggcacctcaatctacaccagagcccagggagtcccagaggcaagtttcacagaattgtcaaatgatcccatttccttgagtctgtttttttacatggtatattatggtctttataagggcagagataatcgtgtctaaaaagtggtcttacaatgacattaaaacacgccagaatgtctttggagcggaagtgtctgcgggcattggacccgagctaatctca

SEQ ID NO: 169040 - DNA, 660 bp, Homo Sapiens
cggtcctgaatacaagatgcaaatttatgcaacatagtgcaaatcactcatgtctcaaatgccatgaacaaaatctggtagccttgagataaaaaagcccctggccaggcatcatctctcctaattatcgctgaagttcctttttgtgccatagaagtcgggtgaggattttctttcatttgacccagaaggagtcctaactcttggagaatgggatttgacttgtgtattctaaaaatgggcaagatattgatatgcccagggaaatgatagggtattctgggcaagcagagctgctttaatgaaggtccagagataagaatgagcatggtatatttggggaatctgagaaaatcagcctgaatgaagtaaattgggaataagtaaattaggtgggtcataaaggaagaggtcagttcgggagtgagtataaactagataagagtcgaggcttgattaaaaggaaacaaagagtttctaaaattaaaataaagaaaaactacatctgtttaaaggcaaaattcgaaaagtctgcggcattaatcctgctcaggccggcatgacaaaaatctcacagactgggtggcttaaacaagagacatttattttctcacactcctgggggctagaagtccaagatcaaggtccgggcaattcggg

SEQ ID NO: 169041 - DNA, 773 bp, Homo Sapiens
tggcatgtagtgaggacacatgaaagagaattccagtcagagtaacagtatgtatgtaaaggcccagggtatcaagacgtcgagcatgtttaaataaaacagtgaccactgcagtcaagcaatctgggcacaagagtaccagtttaagaggagactacagatgtaggtagggctgctgatcacagggcctttggaaggagtttggacataaatatatatacacatatgtatttatttaaagtcactgttggctaacacctgtatttttctggcttcaataaatgtgttcctggcttatctgaagagaatgggcaagaaacttgtccagggcaatagtacataacatccaaagtaatcactagcagcaaggtcacaataatatgacctaggaaggtcagaatctgtcccagtgggacactaacccatagggaaagacaaatttcacaccactcaggtggctttttcctccatctggtaattgcttctctccacacctacagtggaaactcacctcaggtatcactaacaagccctatcttgcccaatcagagaataattaggctgattaacaactgcttcctgtatcttaatttcctataagtgaaaatgagtgtgacctaacaaagtcagactctgtttacgcctgggtgtcttggctaaaatacaagtaaacacttctcaaagtgtaatcactttcccctgtcctctaaacatgtaagcttcattttgccaaagataactcaatgtatcacatttatagacaaagggaaaca

SEQ ID NO: 169042 - DNA, 372 bp, Homo Sapiens
catcccaaggatgccattaaagaggatgaagcgagtgcagaatgagaaaagatatttgcagcacctatgacctggtgttaccaagaacccccacgaatcggcgagaaagaagataactctgtagaaaagagggaaaacacttgaacagtcactccacaaaagatgaaatccaatggtaagtgaacatatgagactggctcagcctcattcatagaaaagaaaaggagaccatggtgacctcccaccatgtagctgctccattggcagaagcgtcggccggggtgtggccctgggcagcatccacacacagcacatcccacggctcagaaatcccactcctgggtgtggacttgacacaaatgtggacttgtg

SEQ ID NO: 169043 - DNA, 920 bp, Homo Sapiens
  misc_feature (15)..(15): n is a, c, g, or t
  misc_feature (48)..(48): n is a, c, g, or t
aaccaaaaacactgnaattaacacccccatcccgccgtgcctaacccnggtcctctgctccctgcctgaactgactagctatctgaaggtggtatgaaagagtaaacaaattcatagcaaatcttcattaaagaagtagttaatcaatctagctctgtaactaacttctcttatatacatttgatttctaagcaagatttgggagataaactaaatatgctaaactttctaaaaaaggcatcttcctatttaacttctcaaaatcatgttttatgttagtctgaagaatctaaatttacgctaacttcagacttgaaactgaattatatattatatgcacttaattttaatacccattcctttagcgtgaataaaatcataacaaacaacatgtactgagattgtccatggcattcataactgtcttcctaaaaacaaagcaatggctcaccaacgagccagccttcatgcttacatgtgacactgtaagtggaagtttagaaggatgtcctgacattaaaaagtagcctatcatcagattccagagctgaacagctgtgtttttctgtcagattttgattgttttggccttgcttgggaaaacctgcaggagtattgtatttttggcattgtagagcatttgagtagttggttccctttaaaaaggctttgaatactgtcctaaaaactcatccctaccactcacaagaaccaagttttacctggctaatagtactaaaaaggaaaggtctgagacctctacagtagctaaaactcagattcaagtaggaagtgatggcagagtaagtgaaagagctgaataaaatagagtaagttgaacttgtaaacctttagacactgaattaaaactgagggatcccaagtaactccatgttgaagttccctggaagacaagaatg

SEQ ID NO: 169044 - DNA, 495 bp, Homo Sapiens
  misc_feature (378)..(378): n is a, c, g, or t
  misc_feature (380)..(380): n is a, c, g, or t
gagctccgtacccctacgccagggaatgctgggcccttagctcccaaatggatcagcagctcccccagctggcagtgcatttaatcccacctcgaatagtagttctacaaatcctgcagcaagtagttctgcatctgggtcctctgtgccaccggtctcaacgtccgcctctgctcctggtattagccagataagcactacctcttcttcaggattcagtggtagtgttggagggcagaaccccagcactgggggcaattctgcggatagaacgcaagggaacataggctgtggtggagacactgaccctgggcagagctcttctcaagccttacacgagggacaagagagtggttccagaaaggagagaataggaantnccacggaggctgactctgagacaggcattgccacacctcagctgttgtgattacattgggggcccgtcacgatgccgagaggaggctcacttctggggacatttgggtgtgggct

SEQ ID NO: 169045 - DNA, 497 bp, Homo Sapiens
tggagtggttcagagtcaatgacaaatggacacctaccagagaacggagatgtgtatcaagaaaggctggcatgtttagaaaacgataaagaatccctcgttcttcaggtaagtgtgttaacagaccaggtggaggctcagggagagaagatacgagattgggagtttagtctgtgaagagcacagagagaagtggaatgccacagaagaaatgctgcagcaggagcttctaagtaggacatccttagaaactcagaagtgggatctgagggctgaaatatctaactggaagtggaaactgacagcggtagagaaggacagatgggattatgaagataagtccagagacacagaggggcgtgatcaggagatcaaggattggaggttaaaagttagtgaaagggacagtgagagacttcagttatgaaaaaaagcttaaatcaaccaaagatgaacgggcatctttaaaagaacaactagaagaaaagaggggtacc

SEQ ID NO: 169046 - DNA, 305 bp, Homo Sapiens
agctccggtaccccttcatataatgttcatgaagtgctccatggcatcctccttggacggcatctgttcccgtttgttgctaccgatcaccgaacccacacggccccaggacctgaatatccaatacctgttttccttgtcgtcctcccagaagctgcagcttgtagtaggagttggttcctttaacgatgtccaccaggccaagggtggcactgaagaccttcccacctttctccaggacatgcgcagagtgttccagtccagaatcaggatccacagctgctcctcctttaagagttaatttc

SEQ ID NO: 169047 - DNA, 644 bp, Homo Sapiens
gagggcacaagtgtggagtggaaggcacttagaaagctatgcagtagatccctgattcctgactcctagaccaaagctcctttcccaggtctctgctgcttcctctcacacaaggactccgctccagagaaaatagagtaagtaaaaagcatgtgaacttgtcgtagttactggaaattttcttaaatgcaaatgaaaatgagagagacgggaaggaaaaatcattgaaaaaattcagactgcagcagcagcctacctgaaaagtcacagcaacaggcaaaaaataaaacaaccttgggaaaacctcaggttgcacctggacagatagacagctttaagcacagataaacaagcacaggagtgggagagtctcgacttcatactcatacaatgggccccagtaaaaactgtgagacttaataagtacattcctttccgtttaggcacactaagatacggaagcgagaagcttatacagggagggtggggggatgcctgcagctgcaagaaaatgtctgggaacagacacagaaacttaagcaacacaaagcagcacagagcagcataaactaaaagcctgcttatgtgatcaaggaattgggtaaaggctgttaggaactctgctctatgcggatagcacactg

SEQ ID NO: 169048 - DNA, 1203 bp, Homo Sapiens
gagtaagaacacctcgtggcatatttcacaggaacttgcacccagtgcaatcctcacagggacatcttctgctttctgccccttggttctgggtgatggtgcaacaaccaccgagggtgagccctgggaggacctggtcacgggggtggcagagctgggctcataagtcctcttgtcctttcctgggtttggcttttactttttctgttcatctagaatgtgtactgtcactctttggacgatttcatcaatactcaatcctgagagtgagttcttgttttggcttcgcacttttttaataaaaccagcaagctcagtgctgttgtaacatgggaataccactgacagatgctcaataatactattgaacggcttttttggagactggcttgaacgcgcagcacgtcctggaggaacaggctgcttccgatcagccacagggcttcgttctgacagagctgctggcagcccgtttggccctgtcagctgagtggcttcaggctgaccaggggtggccctggcaacagcgcagaaggagcctcccctggggaatcaccagcagagaacacactaggatccctgtgaagtgctgcgtggtttccagtcacgtcgcttgcagaagtcacaagcccttggccatcgtggcctgaagactcagggagtaactcgggatgaaccgtgttacaggcaggaaatgaaagctcagaaatctgcactttagaaagttcactgagccgagaaccatttttaatggccttaatttgttcttcaaactgagattttgttttctcaatttctttggtaacattagaaagaaacaattcccatgaacgtatatcagactccatgtcaggatatgctgcaggatcacggctaatacagccccagattcttcagaaaggcttctgcttgtgactccattgatctgtagcttatacacttcacctctccttccagttttcaagtacggatacctctgcagccacagctctctgatgactctcttcataatcctctttccctttctttatatactcttctattttcaatttctcatttgtaagtgtgttgctgtattcacagggactgatccagatgtacatcatgttccgttttcctttccatcatttttctgggtataccatttcactggcatttgaaccctttccaatctactatcttcagtgattttagtctttctgg

SEQ ID NO: 169049 - DNA, 678 bp, Homo Sapiens
tgcacactgctggagttgactgttacagtgcgtcggagagtatctggagctcctgattaacagtcctgcgttatctgtaatagagagtcaccctggtaccttactgagaaattcatcagctttttcctaccaaaggcagacatctaaccgttccgaaccctcaggggagatcaacatagacagcagtggtgaaacagttggatctggagaaagatgtgtcatggcaatgctgagaaggaggatcagggatgagaagaccaacgttaggaagtctgcactgcaggtattagtgagtattttgaaacactgtgatgtctcaggcatgaaggaagacctgtggattctgcaggaccagtgtcgggaccctgcagtgtctgtccggaagcaggccctccagtctcttactgaactccttatggctcagcctagatgcgtgcagatccagaaagcctggttgcggggggtggtcccggtggtgatggactgcgagagcactgtgcaggagaaggccctggagttcctggaccagctgctgctgcagaacatccggcatcacagtcattttcactctggggacgacagccaggtcctcgcctgggcgcttcttactctcctcaccaccgaaagccaggaactgagccgatatttaaataaggcttttcatatctggtccaagaa

SEQ ID NO: 169050 - DNA, 558 bp, Homo Sapiens
  misc_feature (41)..(93): n is a, c, g, or t
gatccatggaaaatatcaatagtggttatgagaccagacgnnnnnnnnnnnnnnnnnnnnnnnnnnnnnnnnnnnnnnnnnnnnnnnnnnnnntcagaatattacttgggagtgtgaaggaacgaccaacaaaatgaagagcccagaaactaaacaaagaaagctttctccactgagactatcagtatcaaataatcaggaaccagattttatggatgatatagaagaaaaaactcctattagtaatgaagtagaaatggaatcagaggagcagatggcagaaaggaaaaggaagatggtaagtggggaagccagaagttggggcttagtgacagctgctctgcatatggtaatagtggctgcctttacatgggcttttacattattcttggaagttagcgaatgatgtgccattgagcatttttatttggttgggtcatggccatttaaataaattccattaatctggtattttgataggtggttcattagagatctaagaatgtatgacatttaagaaatatgaacatttgggaagtaataatattttaataatgc

SEQ ID NO: 169051 - DNA, 795 bp, Homo Sapiens
  misc_feature (97)..(142): n is a, c, g, or t
gatcaactggactactcagtgacacattaaccttatctgtgaaataatatctactttgcaggatacttccaataatttactagatcatagtgctccnnnnnnnnnnnnnnnnnnnnnnnnnnnnnnnnnnnnnnnnnnnnnnattgccatcattgttattatgattattattcagaggaggagagtatcaggaaaggctgaagagaaatcacgaagtcttagaactggattggacctaggagattatttgggctaaactaccaaacacaggatccttctgtgacatcctctgacagatgaaacatctagtctctgcttgagaacatgcagtgataatgatctcacagcttaagaactaccaaagactgcattaaatctctcagaaaatcaagttgtgcaacttgatcagagccctgatagagaagacagagtattctagactaggaatgaagacacagaggggtcaatgagacagtctgtaaacatgtgcaattgcactaccatggttcaacgtctagagcatttcaggtttgtcaaaccatctaaaatgatatatacacttgaagcggggagcaaccataagatcacctcttgtaccatctggcaatatatagtaccacagatttagatagcttttcacataagttattcatttgtcttcacaactctcctaggatgtaggtagaaggaatattcatatcccttgtacatatacagtaagtgtgagatcattgttaatgacccacaggatggtgtgtgattatgtatcatcctatggatatcatcataatgtct

SEQ ID NO: 169052 - DNA, 600 bp, Homo Sapiens
gagatgccgagccaatatcagagagttccaatggcagaaagaccagttcactatgggtagtgaacgatagccctctgatatggtccttcatcagatgtgaggagaaatacagagtttatgaaattagagaaagaatcaatattgaaagcatcgttacctcaccctttactatcccagtagtttggtgggcaagctccataactatacatacttcagggcagatatgtagctgagtggtgccagaagaatcagtttgccacgtacatctgcctcttaggtcacagcatatgaagttctcaaggccctcttctgctcatataattcatggctcagagtgtgccacaagtttctctaaagattatagttgaagcatttttatgtggtgatagtttggccactggttgtgtaaaaactgtctcataaggctttctgaataactcattttagtacctaactgtatttctggacattgtctttgtgaaatttgtaaggatttgtacaagttggcctcctgccaaattatctggcattataataatggcagcaagcatctatatagcatcgtgtgctaataaacaggtactcttctgagagctttac

SEQ ID NO: 169053 - DNA, 1088 bp, Homo Sapiens
  misc_feature (121)..(121): n is a, c, g, or t
gtatgcaatccatgtctaaggtgcatggctgtgatcacttaacaattacgcaccttgactgtccaaatgtgagagtcttatggagtgggcactccctgctggaagggaaaggtgagactgnaggtatgtgaagaggaccctcctttttctagtgcataggatcccagacgattataatcacacacaacatgccaagaaaaggggactgcgttatcagcaaccctttctgtattgcaaaaggggccggagagtaggaccttattcacatggaatgagcagtgtgcgattacgcacataaatgtccaagatgcatgcttgtggtcacttacaactgtgcacctagactctccaaataaaagggtcttatggggtgggcacttcctggctgaaagggaaaagtggggatgaggggagcactttccttctctagtgcatagcaacctcgacaaatacaatcacacatattgggaggccaagaaatggggccttaggtgtcaccaaccatgctgtccttcaaaaggaaggatactgatgtaattgtcattaggcacattaacagtttgagaaaggggccttaagtgaatagtaccccatgcaataaagcaaagagggtgtgataggtcagaaacccaagtctaattgaaggaccattgacaactgcaattacatgccatctacagttcgaagagaagggcttaatattgattagcactctctgctttgataagtacaggagtcctgataaaaggcacaactgtatgcaactgaaaatgtgtatataacacctaagattatgcacgctaactttactagtctaagggtcttaagtagtaggtacttccagctgggatgtaaatacagtgggtggggtccttacatggtaaaaaagtacagcagcaaatataagtatgcacattaacagtccaagagagtgaattcaggctagttagaagctcctgcagtaatgcaaatggagcaaggaagcgggattctactctaacataggggcacatcaactactgctaattatgcgcatttaagcagtataagagaaaaagcactagctagttagcatcctgctgctttgc

SEQ ID NO: 169054 - DNA, 284 bp, Homo Sapiens
tataaaatctagagagaagcattctcaggaacttctttgtgatgtttgcattcacgtcacacaactgaacattccctttcatagagcatgtttgaaacactctttctgtagtatctgcaaacggacatttccaaagccttcaggcctctggtgagaaaggaaatatcttccaaataaaaactagtcagcagcattctcagaaacctctttgtgatgtgtgtactcaactaacagagttgaccttccttttcacagagcagtttggacactctatgggtcctctg

SEQ ID NO: 169055 - DNA, 1074 bp, Homo Sapiens
gggcgcccggggtgatgcagttgccccccgcgctgtgcgcccgcctcgctgcggggcccggggcggcggagccgctgcctgtagagcgggatcccgcggctggggccgcgccctttcgcttcgttgcgcgccccgtgcgcttcccgcgggagcaccagttcttcgaggatggggacgtgcagcgccacctctacctccaggacgtgatcatgcaggtggccgacgtgcctgagaagcccagggtgcccgcgtttgcctgccaggtggccggctgctgccaggtgttcgatgccctggacgactacgagcaccactaccacacgctgcacggaaatgtttgctccttttgcaagcgggccttcccttccggacacctgctggacgcccacatcctggagtggcacgattcgctcttccagatcctgtctgagaggcaggacatgtatcagtgcttggtagaaggctgcacagagaagttcaagaccagcagagaccggaaggatcacatggtgaggatgcacctgtaccccgcggacttccggtttgataagccaaagaaaagcagaagcccagcctcagcagaagccccaggggacagtggagagcggtcagaaggggaggccatggaaatctgctctgaacctgtggcagcctcccctgcaccggcaggtgagaggcggatctacagacatagaataccctctaccatctgctttggtcagggtgccgctcgaggatttaaaagcaacaagaagaaaaccaaacaatgctgatagactcagaaaaggagtggggggcagtcaccactgctgggcgtggcatccgccttgggcctttctccgaccttctggtgtggccgcccctgggggccaggccctcgccatcctccccatccttgttcctcagcaaatggcattagcagctgtcatcagaagctgtgagggacccacagattttggaaacgacctggacacactattgggaaggagatgtggacggcctgtctcctcctgcagggcccaccctaagaatgtatttttaaacacatgaaataagtatttttcactgataaaa

SEQ ID NO: 169056 - DNA, 657 bp, Homo Sapiens
actactcaccgttcgagggcactgagctagagcaggttcggcagctggaccagcagtacacgatcctccgctcgcccctgatatacggtggcgtggctgtttctctgggtctgggggtcctcaccatgggtgttttactccaaggagccaagagtcgaacaatgttgtcagggaagtggctcctcacggaggccgccttcagcctcctagcggcagtgggctactgcacaggcattggtgtttacctccacgtggctctgcagatcaatagcaccgacacttgcaaaacaagagagaggctctatgcccgcaagggtctcacctggatggactgccagctggcaggcaccgacggagcagcagccacctttgcttgtcttctcgtgatcatgtacggcgccagcgtggtgctggccctgcgtagctaccgagaacagaagcgctacaaaggcagccgagaacagcccggaagttacagtgatgcaccggaatatctgtggtctggaactctttgagatcttccggaacctaaatgtgaacgcacattgtttctctcaaaaagacaggtcttttaaaactccgcattagacaactatggttttcacacacttgactttataaatgctctctttggactgaggcaaagttaaagattga

SEQ ID NO: 169057 - DNA, 496 bp, Homo Sapiens
tcatcggtcggccatgattcggatctgatgtgactttgggtttggtggcagtgtctctggccagttccagcagcaagatcatctctaccaccaccctgaacaagagacgatagaggagacgaggtccctgcagctcactgtgtccagctgggcccagcactggtgtctctgtgcttccttcacttcacctccatcctctgtctctggggctcatcttactagtatcccctccactatcccatgggctctctctgccccaggatgatcttctgtgctgggacagggactctgcctcttggagtttggtagctacttcttgatttgggcctggtgacccacctggaatgggaaggatgtcagctgacctctcacctcccatgggcagagaagaaaatgaccaggagtgtcatctccagaattattggggtcacatatgtcccttcccagtccaatgccatctcccactagatcctgtattatccatcacatcagatcc

SEQ ID NO: 169058 - DNA, 375 bp, Homo Sapiens
gcggccgcctactactactaaattcgcggccgcgtcgacgggaggtgagaggtcagctgacatccttcccattccaggtgggtcaccaggcccaaatcaagaagtagctaccaaactccaagaggcagagtcgaaaatgaccaggagtgtcatctccagaattattggggtcacatatgttccttcccagtccaatgccatctcccactagatcctgtattatccatctacatcagaaccaaactacttctccaacacccggcagcacttggccctgcaagcttaggatgagaaccacttagtgtcccattctactcctctcattccctcttatccatctgcaggtgaatcttcaataaaatgcttttgtcattc

SEQ ID NO: 169059 - DNA, 369 bp, Homo Sapiens
agcggccgcctactactactaaattcgcggccgcgtcgacggtagctacttcttgatttgggcctggtgacccacctggaatgggaaggatgtcagctgacctctcacctcccatgggcagagaagaaaatgaccaggagtgtcatctccagaattattggggtcacatatgtcccttcccagtccaatgccatctcccactagatcctgtattatccatctacatcagaaccaaactacttctccaacacccggcagcacttggccctgcaagcttaggatgagaaccacttagtgtcccattctactcctctcattccctcttatccatctgcaggtgaatcttcaataaaatgcttttgtcattcg

SEQ ID NO: 169060 - DNA, 1282 bp, Homo Sapiens
  misc_feature (614)..(664): n is a, c, g, or t
  misc_feature (685)..(735): n is a, c, g, or t
tgaaccactgtgcctggcctgtttgtttgtttgtttaaaacatttctccatcactcattccaggtcccagagcaaactctctctgctctcggagcctgtgacactggctatgtgctccacagtttcagtcccaggtcatactctccaacagttttcagagctccatatatatgtagatgccatcctttctaaaaacttctcacgacctcccggaatattcctattgatctcattttatttagcatcagctcaagaaactaagtcttagtgcacagtatcacaacaaagaaaaagctttgtttttataactggtaaaaacaagaaaagattctcatcaaaatgaaaatataaaattaatcatttctcaccaaagagtatgcctgggagcctccagctgttaaaagacaatgctattactacttcttatcaaaaatctgtaatgccctgtgatttttatgatacttcttcaatacaaagtgttaatatgtgtcatcagtataataacaaccaacaaaatgccactttcagaaaactgtatgtaaattttttgtaacaatgtaaaaaagaaatggggagtaagtgttcacatcattaaaaggctttgaattcatggnnnnnnnnnnnnnnnnnnnnnnnnnnnnnnnnnnnnnnnnnnnnnnnnnnngaagaccgcaaacaacccacnnnnnnnnnnnnnnnnnnnnnnnnnnnnnnnnnnnnnnnnnnnnnnnnnnnggaaaatggccataagctgtttccaaagaaaatcctggggcatgaactaaggcattggattcctcaccaataacaaagggcccgggcgccaacgcgggcgtgtaaagaaattattccaaaatgtgtttttgtggggggcggtcactgcaataatataagaaaggaaaggcaaattctaggcttcaaataataaaattaacgccccccgcccgggcccgttcttccccatccaccgaaagaaaaatacctcccggggttcctgcccaaaattggaaaacaaataccaaaaaggggggtggattgaaccttggaattcccgcgggggcaatacaagagcccttcgccggccttttgcattaaaaaaatatttcccccccggccgccaaaacgggggtttaaagaaaagttgtcccataatttgtgccccggtttaacctcccggagggggagagaaccttcccccacagggttttggggtaaaaacacaaacaccgctgttttccaaaaaccaccccttttaggcgagaataggaaaaaatattcccct

SEQ ID NO: 169061 - DNA, 925 bp, Homo Sapiens
agctgtacggtccgcactgctttggatatcgtcgacccacgcgtcgggggcggagcggactgcgtgtccgcggacgggcagcgagagatgttagccttcgctgccaggaccgtggtgaagcctctgggcttcctgaagcccttctccttgatgaaggcttccagccgcttcaaggcacaccaggatgcactgccacggctgcccgtgccccctctccagcagtccctggaccactacctgaatggccgctgcagcccatcgtgagtgagtgaggagtgggcccacaccaagcagctggtggatgagtttcaggcctcaggaggtgtaggggagcgcctgcagaaggggctggagcgtcgggccaggaagacggagaactggctgtctgagtggtggctcaagaccgcctacctccagtaccgccagcctgtggtcatctactcgagcccaggcgtgatgctacccaagcaggacttcgtggacctgcagggtcagctccgatttgctgccaaactcattgagggtgtgttggatttcaaggtcatgattgacaacgagaccctgcccgtggagtacctgggggggaagccactgtgcatgaaccagtactatcagatcttgtcctcctgccgagtgcctgggccccaagcaggacacagtcagcaacttcagcaagaccaagaagcctcccacgcacatcaccgtggtacacaactaccagttttttgagctggatgtgtaccacagtgacgggacaccctcactgcggatcagatctttgtgccagctggagaagatctggaactcatccctacagaccaacaaggagcctgtggggcatctcacctccaacaacgcaaatccggggccaggcatcgaaacctcttccaagaccaggtgaacgggattccggggctccaccaga

SEQ ID NO: 169062 - DNA, 743 bp, Homo Sapiens
taaagcaggctggtacggtccggaattctctcgggatatcgtcgacccacgcgtcgcaaggagcctgtgggcatcctcacctccaaccaccgcaactcctgggccaaggcatacaacaccctcatcaaagacaaggtgaaccgggattccgtgcgctccatccagaagagcatcttcaccgtgtgcctagatgcaaccatgcccagggtctcagaagacgtgtaccgcagccacgtggcaggccagatgctgcatgggggcggcagcaggctcaacagcggcaaccgctggttcgacaagacgctgcagttcatcgtggcagaagatggctcctgtgggcttgtgtacgagcatgctgcagcggaggggccccctattgtcacccttctggactatgtcatcgagtacacgaagaaacccgagcttgtgcggtctcccatggtgcccctgcccatgcccaagaagctgcggttcaacatcacccccgagatcaagagcgacatcgagaaggccaagcagaacctcagcatcatgatccaggacctggatatcaccgtgatggtgttccaccattgtggaaaagacttccccaagtcggagaagctaagcccagatgccttcatccagatggctttgcagctggcctactacaggatctacggacaggcatgtgccacctatgaaagtgcctccctgcgcatgtttcacctgggccgcaccgacaccatccgctcggcttccac

SEQ ID NO: 169063 - DNA, 889 bp, Homo Sapiens
accctgcccgtggagtacctgggggggaagccactgtgcatgaaccagtactatcagatcttgtcctcctgccgagtgccgggccccaagcaggacacagtcagcaacttcagcaagaccaagagagcctcccagcgcacatcaccgtggtacacaactaccagttttttgagctggatgtgtaccacagtgacgggacacccctcactgcggatcagatctttgtgcagctggagaagatctggaactcatccctacagaccaacaaggagcctgtgggcatcctcacctccaaccaccgcaactcctgggccaaggcatacaacaccctcatcaaagacaaggtgaaccgggattccgtgcgctccatccagaagagcatcttcaccgtgtgcctagatgcaaccatgcccagggtctcacaagacgtgtaccgcagccacgtggcaggccagatgctgcatgggggcggcagcaggctcaacagcggcaaccgctggttcgacaagacgctgcagttcatcgtggcagaagatggctcctgtgggcttgtgtacgagcatgctgcagcggaggggccccctattgtcaccccttctggactatgtcatacgagtacacgaagaaacccgagcttgtgcggtctcccatggtgcccctgcccatgcccaagaaggctgcggttcaacaatcacccccgagatcaagaagcgacatcgagaaggccaagcagaacctcagcatcaatgatccaggacctggatatcaccgtgatggtgttccaccaatttggaaaaagacttcccccagtcggaaagctaagcccagaatgcttatccagatggcttagcactggcctactacaggatctaggaacagcctgttgcac

SEQ ID NO: 169064 - DNA, 504 bp, Homo Sapiens
cccatgtgtagatctgatagtgataagtagacgaaaatgttcaagagtctggcacgcccagcttagcctgccattcgctgcaaggttgaacacccccatgggccctggacgaactgtcgtcgttaaaggagaagtgaatgcaaatgccaaaagctttaatgttgacctactagcaggaaaatcaaaggatattgctctacacttgaacccacgcctgaatattaaagcatttgtaagaaattcttttcttcaggagtcctggggagaagaagagagaaatattacctctttcccatttagtcctgggatgtactttgagatgataatttattgtgatgttagagaattcaaggttgcagtaaatggcgtacacagcctggagtacaaacacagatttaaagagctcagcagtattgacacgctggaaattaatggagacatccacttactggaagtaaggagctggtagcctacctacacagctgctacaaaaaccaaaataca

SEQ ID NO: 169065 - DNA, 482 bp, Homo Sapiens
gggaggtccgggcagagacgccgcgtctgcggccagggggtcacgaatgcggccgcacatattcaccctcagcgtgcctttcccgacccccttggaggcggaaatcgcccatgggtccctggcaccagatgccgagccccaccaaagggtggttgggaaggatctcacagtgagtggcaggatcctggtcgtccgctggaaagctgaagactgtcgcctgctccgaatttccgtcatcaactttcttgaccagctttccctggtggtgcggaccatgcagcgctttgggccccccgtttcccgctaagcctggcctgggcaaatggagcgaggtcccactttgcgtctccttgtaggcagtgcgtccatccttccctagggcaggaattcccacagttgctactttcctgggagggcctcatgttttatctggttcttaaatgtttgttactacagaaaataaaactgcgctactaaaacaa

SEQ ID NO: 169066 - DNA, 556 bp, Homo Sapiens
ggcaagatgttagaaagttcaagccagaagtttcttcagggtttggtctatctcattgggaacctgatgggtttggcattggctgtttacaagtgccagtccatgggactgttacctacacatgcatcggattggttagccttcattgagccccctgagagaatggagttcagtggtggaggactgcttttgtgaacatgagaaagcagcgcctggtccctatgtatttgggtcttatttacatccttctttaagcccagtggctcctcagcatactcttaaactaatcacttatgttaaaaagaaccaaaagactcttttctccatggtggggtgacaggtcctagaaggacaatgtgcatattacgacaaacacaaagaaactataccataacccaaggctgaaaataatgtagaaaactttatttttgtttccagtacagagcaaaacaacaacaaaaaaacataactatgtaaacaagagaataactgctgctaaatcaagaactgttgcagcatctcctttcaataaattaaatggttgagaacaatgcat

SEQ ID NO: 169067 - DNA, 951 bp, Homo Sapiens
ggggcatttgcagagtgagacaaagcggagaacgctggtgggcctgttgtggagtacgctttggactgagaagcatcgaggctataggacgcagctgttgccatgacggcccaggggggcctggtggctaaccgaggccggcgcttcaagtgggccattgagctaagcgggcctggaggaggcagcaggggtcgaagtgaccggggcagtggccagggagactcgctctacccagtcggttacttggacaagcaagtgcctgataccagcgtgcaagagacagaccggatcctggtggagaagcgctgctgggacatcgccttgggtcccctcaaacagattcccatgaatctcttcatcatgtacatggcaggcaatactatctccatcttccctactatgatggtgtgtatgatggcctggcgacccattcaggcacttatggccatttcagccactttcaagatgttagaaagttcaagccagaagtttcttcagggtttggtctatctcattgggaacctgatgggtttggcattggctgtttacaagtgccagtccatgggactgttacctacacatgcatcggattggttagccttcattgagccccctgagagaatggagttcagtggtggaggactgcttttgtgaacatgagaaagcagcgcctggtccctatgtatttgggtcttatttacatccttctttaagcccagtggctcctcatgcatactcttaaactaatcacttatgttaaaaagaaccaaaagactcttttctccatggtggggtgacaggtccctagaaaggacatgtgcatattaaccacaaaccccaaggaaactatacccctaccccaaggctggaaaataagtgtaggaaaacctttatttttgggttcccggtaccggaggcaaaaccacccaccaaaaaacccttaattatgtt

SEQ ID NO: 169068 - DNA, 482 bp, Homo Sapiens
  misc_feature (355)..(410): n is a, c, g, or t
tatttgatagtgaacataagtggtgtggccaggtattggccgtcagctgccttacggtcctctgactgcgcccgatgccctgggtgagacgagttgttgaagagccactgcccagtgtcagagaactgtggtctgcatggcgcaccatcagtggatgggtggtagggatatttcctggggatggggggatgtctgtagcactggagaacatgttgtcaaactcaatgatgagatcatcctcccggtcaaagcgctcaaatcggaccaagggagaagcgttcatatcaggataatcctcactccaattccatctcagagccatcgtcgtcatcgtcttcaatctccctcttcaccnnnnnnnnnnnnnnnnnnnnnnnnnnnnnnnnnnnnnnnnnnnnnnnnnnnnnnnngactatcatcctcatcctcgttactgccactgctgtcctcttcctgagtgtgctcctcctcatcctcagggt

SEQ ID NO: 169069 - DNA, 457 bp, Homo Sapiens
  misc_feature (418)..(418): n is a, c, g, or t
gtaacaaggaggtgggggtacaaatcctcagctcctgcttccgcaagcactaacctgctctgaagtgagccaggcagctctggccatcttttcccagccacagaatcaggtgatggtccagaattaagagctgtcacctgtgtcattcactcacaatggaagaaatgaagaagactgccatccggctgcccaaaggcaaacagaagcctataaagacggaatggaattcccggtgtgtccttttcacctacttccaaggggacatcagcagcgtagtgggatgaacacttctccagagctctgagcaatatcaagagcccccagggaattgaccccctcggagttcagagtggaaggtgtggatggctggaaaaacggttgatagcatgttttccaaatcagtgggcgtttattcgtnttccatgggacaaagccacaaccaggaagttacctgttt

SEQ ID NO: 169070 - DNA, 894 bp, Homo Sapiens
tgatagtgaggagcatggcggccaccaggtgcctgcgctggggcctgagccgagccggagtctggctgctcccaccgcccgcacggtgcccacgccgggcgctgcacaagcagaaagacggcactgagttcaagagcatctacagcctggacaagctctaccccgaatctcagggctcggacaccgcctggagggtcccgaatggtgcaaagcaagccgacagtgacatccctctagatcgcttgacaatatcttattgtcggagtagtggtcctggggggcagaatgtgaacaaagtgaattccaaggcagaagtcaggttccatttggcaactgccgagtggatcgcggagcccgtgcggcagaagatagccatcacgcataaaaacaagatcaacaggttaggagagttgatcctcacctctgagagcagccgctatcagttccggaatctggcagattgcctgcagaaaattcgagacatgatcactgaggccagccagacaccgaaggagccaacaaaagaagatgttaaacttcatagaatcaggatagaaaacatgaatcgggaaaggctgagacaaaagagaattcattctgctgtaaagacaagcaggagggtcgacatggactgaaatcaccctctgcagctgggagggctcttctgggcgtccgggcagctgcagctgagaggactttcacaccataaggagatttctgtttttctttttggctgttaatgcttgtctataacattggagccatcacaagaatgttcatttggaatgaaggctgcaggcactggttgcagacgtctttataggcagtcaccatgttgtcaaaccttaataatgcacctcatgtattagtcacaataaaaatcagaactcaaaa

SEQ ID NO: 169071 - DNA, 899 bp, Homo Sapiens
  misc_feature (88)..(88): n is a, c, g, or t
ttttaaaaatgtttttatttaattaaaaaaaagacagaacaaccaacccaaaaccagtagtaggtactggagtcacaggtgcttaacntggcgaaacacacaggggtgggggcgagggggcgggtcgggaggagggagagaaggtgggcacaggccaccacatccccccgttgggtgtcaggtctgagatgcagcgggagggccaggaatgggcggcccagggcccagggtccccggagacccagctggccgcggggagaaggctgagaaggcccgggtgtctgaggtggttttgctcccggctcgtccccttcttcctactctttcttggtccctaggtgggccctgcttactctgcctgggactgggcaagaggtaggattcattggaacacagctttctccatggaatgatagaaacttctggggcagcgggaggggaggtggcggatggagaggaactagaacagcacggctgccttgcttttggaaatcacagaagaaaagtctcggggccttgctggacagcgggactggggagggcgttccctgccttcggcctggtcatggcagtggaggtggtgacagggctggcctagagcaggtgaaggccttgagctctggtgcttcagcatccgctgctgggcacacttggacatgccatcagatgatgccaaccctgatgggagcgaaggctctggagcacagcacacaggggccctggcaggcctcatttcagatccccagcacccgggcgacagtcagcttggggccgctaccggggggatgccgtccctttcccggtttgaaaacttgggtaccttctgggggactgttacaggtttgaaaatacttatttttttaatccaggtttttattaaaaaatgccaaaaatttttt

SEQ ID NO: 169072 - DNA, 982 bp, Homo Sapiens
gggccgcgagctggaccagccgtgcaaatctctagaagatgacggtgttctttaaaacgcttcgaaatcactggaagaaaactacagctgggctctgcctgctgacctggggaggccattggctctatggaaaacactgtgataacctcctaaggagagcagcctgtcaagaagctcaggtgtttggcaatcaactcattcctcccaatgcacaagtgaagaaggccactgtttttctcaatcctgcagcttgcaaaggaaaagccaggactctatttgaaaaaaatgctgccccgattttacatttatctggcatggatgtgactattgttaagacagattatgagggacaagccaagaaactcctggaactgatggaaaacacggatgtgatcattgttgcaggaggagatgggacactgcaggaggctgttactggtgttcttcgacgaacagatgaagctaccttcagtaagattcccattggaattatcccactggggagagaccagtagttttgagccataccctctttgccgaaagtggaaacaaagtccaacatattactgatgccacacttgccattgtgaaaggagagacagttccacttgatgtcttgcagatcaagggtgaaaaggaacagcctgtatttgcaatgaccggccttcgatggggatctttcagagatgctggcgtcaaagttagcaagtactggtatcttgggcctctaaaatcaaagcagcccactttttcagcactcttaaggagtggcctcagactcatcaagcctctatctcatacacgggacctacagagagacctcccaatgaaccagaggagacccctgtacaaaggccttctttgtacaggagaatattacgaaggcttgcgtcctactgggcacaaccacaggatgccctttcccaagaggtgagcccggaggtctggaaagatgtgcagctgtccaccattgaactgtcca

SEQ ID NO: 169073 - DNA, 980 bp, Homo Sapiens
tggtttagaggatccctgtctgcgtgtaggttagtctttattgcgctgcttcgaagattcgactgcaactttgacctcaaggtcctaaatgcccagaaggctggatatggtgccgctgtagtacacaatgtgaattccaactgaacttctgaacatggtgtggaatagtgaggaaatccagcagcagatctggatcccgtctgtatttattggggagagaagctccgagtacctgcgtgccctctttgtctacgagaagggggctcgggtgcttctggttccagacaataccttccccttgggctattacctcatccctttcacagggattgtgggactgctggttttggccatgggagcagtaatgatagctcgttgtatccagcaccggaaacggctccagcggaatcgacttaccaaagagcaactgaaacagattcctacacatgactatcagaagggagaccagtatgatgtctgtgccatttgcctggatgaatatgaggatggggacaagctgcgggtactcccctgtgctcatgcctaccacagccgctgcgtggacccctggctcactcagacccggaagacctgccccatttgcaagcagcctgttcatcggggtcctggggacgaagaccaagaggaagaaactcaagggcaagaggagggtgatgaaggggagccaagggaccaccctgcctcagaaaggaccccacttttgggttctagccccactcttcccacctcctttggttccttagccccagctccccttgtttttcctgggccttcaacagatcccccactgtcccctccctcttcccctgttatcctggtctaataaccccccacacatacaccctctggtgacctatttgcacagaccgtcgtctttccctccagtcttctggagggatagggggacatttccatccccaagctttctcccctttacccacaaccttatccctttttga

SEQ ID NO: 169074 - DNA, 1027 bp, Homo Sapiens
  misc_feature (127)..(127): n is a, c, g, or t
  misc_feature (366)..(367): n is a, c, g, or t
  misc_feature (978)..(978): n is a, c, g, or t
tttttggaaaaagccaaaggggttagggaaattggtttttcccaggtttgcttttttgggttaagttgagattcccccctggaacccctttttccggttgcggggttccaagggagctattcatttnctgcttcccatcgccccaaacccagcaagttccaacaatcccttgtgaaaggggatggaggtaatagcccaaaggggaagggtattgtcttggaacccaggaagccaccccgaggcccccttctcgtagacaaagagggcacgcaggtactcggagcttctctccccaataaatacagacgggatccagatctgctgctggatttcctcactattccacaccatgttcagaagttcatnntgggaattcacattgtgtactacagcggcaccatatccagccttctgggcatttaggaccttgaggtcaaagttgcagtcgaatcttcgaagcagcgcaataaagactgacccattgaccggggctggggctggtggggcaatggggctgcaggcattgtctgggtgagcctccacaaggaacccctggaggccctcctggctcaaggtagccccaaacagagctggaaggtctgcaaagtccatgctggcattgtggtccgaggtcgctcgaatgagcccccgggtcggggccgctccccacagcacagcggccacaaccacaggaagcgggaaggctgcagggtgcatggcagcgggaggaaagaggctgaggaggccgcgcgtcctggtagcaaggagcagaagcggagttctgcgcccgtccctgcccctcctttaggatcccaggggtccaaccacccccaggtcccacttcccagctacatgggggcgccggggaaggaacaccaactcaaagaatgagatatccaacccgtttagtggagctgggtgggaggcactaaatgtatccttttctggtacggggataaaacgcggaaaggggaccgnacgcgtgggtcgacgatatcccggacttccgaccgtatccaggcgctga

SEQ ID NO: 169075 - DNA, 805 bp, Homo Sapiens
ttccagacaataccttccccttgggctattacctcatccctttcacagggattgtgggactgctggttttggccatgggagcagtaatgatagctcgttgtatccagcaccggaaacggctccagcggaatcgacttaccaaagagcaactgaaacagattcctacacatgactatcagaagggagaccagtatgatgtctgtgccatttgcctggatgaatatgaggatggggacaagctgcgggtactcccctgtgctcatgcctaccacagccgctgcgtggacccctggctcactcagacccggaagacctgccccatttgcaagcagcctgttcatcggggtcctggggacgaagaccaagaggaagaaactcaagggcaagaggagggtgatgaaggggagccaagggaccaccctgcctcagaaaggaccccacttttgggttctagccccactcttcccacctcctttggttccttagccccagctccccttgtttttcctgggccttcaacagatcccccactgtcccctccctcttcccctgttatcctggtctaataaccccccacacatacacctctggtgacctatttgcacagaccgtcgtcttccctccagtcttctgagggataggggacattccatcccaagcttctcccttacccacacctatccttttgaggggctttggggtggggctggggcaagcagagggactgggtcttcacttcttgggctaataaaattgtttctttgtggactacccccaaacataaatctattaaaaacccccttgt

SEQ ID NO: 169076 - DNA, 578 bp, Homo Sapiens
catgtgctgtaggccagcgtgaggaagaccacggtcctggatgtcatgaggcggctgctgcagcccaaggacgtgatggtgtccacaggccgagaccgccagaccaaccactgctacatcgccatcctcaacatcatccagggagaggtggaccccacccaggtccacaagagcttgcagaggatccgggaacgcaagttggccaacttcatcccgtggggccccgccagcatccaggtggccctgtcgaggaagtctccctacctgccctcggcccaccgggtcagcgggctcatgatggccaaccacaccagcatctcctcgctcttcgaaagaacctgccaccagtatgacaagctgcggaagcaggaggccttcctcgagcagttccgcaagaaggacatgttcaaggacaactttgatgagatgggacacatccagggagattgtgcagcagctcatcgatgagtaccatgcggccacacagccagactacatctcctgggggcacccggaggcagttgattttccctccccattattcctttcttccttcttaggatgggtaaccacagctt

SEQ ID NO: 169077 - DNA, 1269 bp, Homo Sapiens
  misc_feature (1198)..(1198): n is a, c, g, or t
gatacatagtgcgccgagcatggatatcagccccgtaacatcgtggaggagttcgccaccgaggacactgaccgcaaggacgtcttttaactaccaggcagacgatgagcactacatcccccgggccgtgctgctggacttggaaccccgggtgatccactccatcctcaactccccctatgccaagctctacaacccagagaacatctacctgtcggaacatggaggaggagctggcaacaactgggccagcggattctcccagggagaaaagatccatgaggacatttttgacatcatagaccgggaggcagaatagtagtgacagtctagagggctttgtgctgtgtcactccattgctggggggacaggctctggactgggttcctacctcttagaacggctgaatgacaggtatcctaagaagctggtgcagacatactcagtgtttcccaaccaggacgagatgagcgatgtggtggtccagccttacaattcactcctcacactcaagaggctgacgcagaatgcagactgtgtggtggtgctggacaacacagccctgaaccggattgccacagaccgcctgcacatccagaacccatccttctcccagatcaaccagctggtgtctaccatcatgtcagccagcaccaccaccctgcgctaccctggctacatgaacaatgacctcatcggcctcatcgcctcgctcattcccaccccacggctccacttcctcatgaccggctacacccctctcactacggaccagtcagtggccagcgtgaggaagaccacggtcctggatgtcatgaggcggctgctgcagcccaagaacgtgatggtgtccacaggccgagaccgccagaccaaccactgctacatcgccatcctcaacatcatccagggagaggtggaccccacccaggtccacaagagcttgcagaggatccgggaacgcaagttggccaacttcatcccgtggggccccgccagcatccaggtggccctgtcgaggaagtctccctacctgccctcggcccaccgggtcagcgggctcatgatggccaaccacaccagcatctcctcgctcttcgagagaacctgtcgccagtatgacaagctgcgtaagcgggaggccttcctggagcagttccgcaaggaggacatgtttcagggacaactttgatgagnatggacacatccaggggagattgttgcagccagctcatccgatgaagtaccaatgcgggccaccacgggcc

SEQ ID NO: 169078 - DNA, 749 bp, Homo Sapiens
  misc_feature (24)..(24): n is a, c, g, or t
  misc_feature (52)..(52): n is a, c, g, or t
  misc_feature (76)..(76): n is a, c, g, or t
aataagtcttgcactagcttcttnggggtacctgtcattcagtcgctccagnaggtaggagcccaggccagaaccngtacccccagcgatggagtgacacagcacgaagccctccaaactgtcacttccatctgcttctcggtctatgatgtcaaagatgtcttcatgaattttctcaccctgggagaatccgctggcccagttgttgccagctcctcctccatgttccgacaggtagatgttctctgggttgtagagcttggcatagggtggagttgaggatggagtggatcacccgggggttccaagtccagcagcacggcccgggggatgtagtgctcatcgtctgcctggtagaaaaagacgtccttgcggtcagtgccctcggtggcgaattcctccacgatgccctcggggctgataccatgctcggcgcacagctgtttccagaactcgaacccaatctggttgccgcactggcccagctgcagggtgatgatctcccggggcatcgctcttcagacgtgggcgcgccagccccggcctggcgagagtcacggctgagacgaatgcccggcagccaggagcgcaggacgtggggagcgcgcgctctcttcgcctcttgacgcggatgctcggtctgcgcgtgtgcagcgcaggcctctcctcggccggtgggccggggagcccaacctgggcatcattttctccctcagcagtcgcagctggaattccgcacaggcgccccc

SEQ ID NO: 169079 - DNA, 554 bp, Homo Sapiens
  misc_feature (41)..(41): n is a, c, g, or t
  misc_feature (47)..(47): n is a, c, g, or t
agcctcaaaggatccgggacggaattggccaacttcatccngtgggncccgccagatccaggtggcccctgtcgaagaaagtctccctacctgccctgggcccaccgggtcagcgggctcatgatggccaacccacaccagcatctcctcgctctttgaaagttcctgccagcagtttgacaagctgcggaagcgggatgccttcctcgagcagttccgtaaggaggacatgttcaaggacaactttgatgagatggacaggtctagggaggttgttcaggagctcattgatgagtaccatgcggccacccagccagactacatttcctggggcacccaggagcagtgatttccctccccactactccttctccttctagatggtaaccacagcctcgaccatgcctgctccctctgacccagcttcacctcatggacaacccttcttggttcatctccagcccgtgagctggtcctgcttcctcccttccatgccctaacttttaatatgcttgttcagctctaataaagtaataaagcttggttgtcagtat

SEQ ID NO: 169080 - DNA, 1281 bp, Homo Sapiens
  misc_feature (27)..(28): n is a, c, g, or t
  misc_feature (91)..(91): n is a, c, g, or t
  misc_feature (100)..(100): n is a, c, g, or t
  misc_feature (103)..(104): n is a, c, g, or t
  misc_feature (108)..(108): n is a, c, g, or t
  misc_feature (116)..(116): n is a, c, g, or t
gcttaacgccaggcttgtcattactgnncgaccagggttcctcttcaaagagcgagggaagatgctggtgtgggttgccccatcatgagcnccgctgacncgnntggncgaggcanggtaggagacttttcctcgacagggcccacctggatgctggcggggccccacgggatgaagttggccaactgcgtttcccggatcctctgcaagctcttgtggacctgggtggggtccacctctcccctggatgatgttgaggatggcgatgtagcagtggttggtctggcggtctcggcctgtggacaccatcacgttcttgggctgcagcagccgcctcatgacatccaggaccgtggtcttcctcacgctggccactgactggtccgtagtgagaggggtgtagccggtcatgaggaagtggagccgtggggtgggaatgagcgaggcgatgaggccgatgaggtcattgttcatgtagccagggtagcgcagggtggtggtgctggctgacatgatggtagacaccagctggttgatctgggagaaggatgggttctggatgtgcaggcggtctgtggcaatccggttcagggctgtgttgtccagcaccaccacacagtctgcattctgcgtcagcctcttgagtgtgaggagtgaattgtaaggctggaccaccacatcgctcatctcgtcctggttgggaaacactgagtatgtctgcaccagcttcttaggatacctgtcattcagccgttctaagaggtaggaacccagtccagagcctgtccccccagcaatggagtgacacagcacaaagccctctagactgtcactaccatctgcctcccggtctatgatgtcaaaaatgtcctcatggatcttttctccctgggagaatccgctggcccagttgttgccagctcctcctccatgttccgacaggtagatgttctctgggttgtagagcttggcatagggggagttgaggatggagtggatcacccggggttccaagtccagcagcacggcccgggggatgtagtgctcatcgtctgcctggtagaaaaagacgtccttgcggtcagtgccctcggtggcgaactcctccacgatgccctcggggctgataccatgctcggcgcacagctgtttccagaactcgaacccaatctgattgccgcactggcccaactgtagggtgatgatttccctcggcatcgctcctcaggcaccggcgttgcagccgctcccgcccgcaacggcgccgcacgccagcccccc

SEQ ID NO: 169081 - DNA, 179 bp, Homo Sapiens
actgagccgggaggcaggttgaagagcaaccctgtgcttccagctatctggccagggttgccattccccctggcggcagattcctgaggacgggctaggcatctgtcttgctggaggagacctaggagaggctcacctttcccatcaggcctgggccctgggaacagctccgtaactgg

SEQ ID NO: 169082 - DNA, 472 bp, Homo Sapiens
ggtctggttcctcagtgagctggtgactggcaggtgactccctcagcagtgtatgccctttctcagcatcctaggtccatcccaggcctggaggctgacagttgggaatccagcttcccccacaccttcccaaaggctgctctgagcacctccacaccccactgcctctgtccccagcaaactgaatccggttcctctccacttttcaatactgaaagattaaaatggggaggttgcagggagcagagcttttccctagcacccactttcccaaaccagtctctgcagaagccccagagaatctaactcatgcctgtccagtctacagcaaaaatatttattgagtgcctgttgcatacaggcacaatcctaggcaccggcaaatacagacaatagaccaaagtccctgccctcgaggagctttcattctgatggagagaaaacataataaacaagcaaaatgcaccacgtc

SEQ ID NO: 169083 - DNA, 434 bp, Homo Sapiens
ctttcaacatctcatttctctcagcacgggaggtcaaccccccttctaccttcctatcctgtgcctgtgtacccagacagcagccgctccactttcttctcggtatccatcagcctctatttaacaacaaactgaaggcatttacctgccagcccttgtccgcagtcctgtagtagggataatttttagtgatgtgtgtataaatcccgttcagggtgagctgtttgtcgggagccatcgtaatcgcctgaactatcagctgcgcgtaggagtaaggcggctttgaatcatcctgtatttaaaaaacaaacacaaaacgaatattgaagttaccatattttgtattaaatttactagatttaaagattctcagtgcttttaagtgtacctctgatacctcatttgtcttatggttatttgtgtcctgtcttttt

SEQ ID NO: 169084 - DNA, 511 bp, Homo Sapiens
  misc_feature (112)..(112): n is a, c, g, or t
ttcatctagagtgggcaactgcatgccagcagagaacatcgcttctttccacttcataaactcactttcggtgaattcttggtttgagacaaactctaaacggaacacgcgntggtcattgccatgccgtagttgcagccctttgtttgttctggtgccacctagttggtaaactttggcagtttccacaacacccgtaatctcagcgacccggtaaactggtttgctgttgtggtttccgatgccaatccgcacaaaacatcctgtgacagttttagcaaagaagggcatgtgacaccagcgttctagcttatgccgtgataatcgaacccgattcaattcttcaggtaaggaaactggttgggatttgggagggatctcttctttctcctcttcttcatcagacgatgatgttcgtgatgagcggtctgacttttcactggatttgtcaccctcttcctcctcttcatcatcagagtagacctcactggtttttaatggctgttttttg

SEQ ID NO: 169085 - DNA, 509 bp, Homo Sapiens
  misc_feature (75)..(75): n is a, c, g, or t
  misc_feature (110)..(110): n is a, c, g, or t
aagatattcacggattctgatagtggatcccgcactgcttcagcccatcaaagtgcatggggatatacaggctantgagccacatgcgcccaggccacatgtggttaatnttggttgagagcgggctcgatgtgattttattgatgataatgtcttcaatgtgccttgccctcagtacaaagcagcatgttgtaccaagggttctgggctgagggacataactagggaagactgagctgtgaatttgtcccctcagtagaggatcaccctggccaagttccagttcatcttggagccttattttacatcagatgggaaaagaccttgcaggtcattcattgtcttacatgcagagctcgcatacctgccacagggttacccagcccccagtggacagagaatttgtcccataccaaaatggctgagccacccaatccctctagacagcccctatgttggaaaattctttatgttgaatcgacatctgtttctctacaatttgcactcat

SEQ ID NO: 169086 - DNA, 431 bp, Homo Sapiens
acggcgcggagctggacgtccgcgacgcgacgggtacacggccgccgacctgtcggacttcaacggccacagccactgcacccgctacctgcgcacggtggagaacctgagcgtggagcaccgcgtgctttcccgggatccatccgcagagctggaggctaagcagccggattcaggcatgtcctcacccaataccacggtgtcggtccagccgctgaactttgacctcagctcgcctaccagcaccctctccaactacgactcctgctcctccagccactccagcatcaagggccagcaccctccatgtgggctttccagcgctagagctgcagacatacagagctacatggacatgctgaacccggagctgggcctgcctcggggcacgattgggaagcccacacccccgccaattttacaccaaccct

SEQ ID NO: 169087 - DNA, 964 bp, Homo Sapiens
  misc_feature (265)..(267): n is a, c, g, or t
  misc_feature (269)..(269): n is a, c, g, or t
  misc_feature (271)..(281): n is a, c, g, or t
  misc_feature (283)..(289): n is a, c, g, or t
  misc_feature (291)..(618): n is a, c, g, or t
  misc_feature (810)..(811): n is a, c, g, or t
  misc_feature (813)..(817): n is a, c, g, or t
  misc_feature (820)..(820): n is a, c, g, or t
  misc_feature (825)..(825): n is a, c, g, or t
  misc_feature (849)..(849): n is a, c, g, or t
  misc_feature (929)..(929): n is a, c, g, or t
ggagaggacgcagagctcccagcctgctgtggaggcagctgagaagtggtggcctcaggactgagagcccggacgttgctgtactgtcttgtttagtgtagaagggaagagaattggtgctgcagaagtgtacccgccatgaagccgatgagaaacctcgtgttagtctgacatgcactcactcatccatttctataggatgcacaatgcatgtgggccctaatattgaggccttatccctgcagctaggagggggaggggttgnnncngnnnnnnnnnnncnnnnnnncnnnnnnnnnnnnnnnnnnnnnnnnnnnnnnnnnnnnnnnnnnnnnnnnnnnnnnnnnnnnnnnnnnnnnnnnnnnnnnnnnnnnnnnnnnnnnnnnnnnnnnnnnnnnnnnnnnnnnnnnnnnnnnnnnnnnnnnnnnnnnnnnnnnnnnnnnnnnnnnnnnnnnnnnnnnnnnnnnnnnnnnnnnnnnnnnnnnnnnnnnnnnnnnnnnnnnnnnnnnnnnnnnnnnnnnnnnnnnnnnnnnnnnnnnnnnnnnnnnnnnnnnnnnnnnnnnnnnnnnnnnnnnnnnnnnnnnnnnnnnnnnnnnnnnnnnnnnnnnnnnnnnnnnngcgccacggcgaccgccaaaagccccagcccaacccagagccacaaagcacgaccacaagacagcacgccccgccgccccacccgccggagcgccacaacaacgccaagcgggcgccgccaccacacaacacgacaacccaggaaagcaaaacccccacctcggagacggcgcgacactagcgcgctatttnncnnnnnccnacccngccacccccaccccacgcacctcncgaacaccacacaagaaagacacaggaaactcacacgcggagcccccaacctagaccccgcactcgcctaaatagcaagnatctttaacaacacccgtcacgcacatcttctccg

SEQ ID NO: 169088 - DNA, 861 bp, Homo Sapiens
  misc_feature (23)..(23): n is a, c, g, or t
  misc_feature (28)..(28): n is a, c, g, or t
  misc_feature (50)..(50): n is a, c, g, or t
  misc_feature (265)..(292): n is a, c, g, or t
  misc_feature (446)..(454): n is a, c, g, or t
aaacgaaataaaggctagagggnacaanggtagggccacagtatcctatngttaataatgtactggaacacttaaaatttgcctaaggtagtagatcttaagtgttttcacccacacatgaaaaaatggtaactatgtcaaggtgacagatacgtaattagcctgaccttaattgtggaatcattacacaaggaatgctgatatcaaaacaccatattgtacaccttaaatatatgcaattttttatttgtcataactcaatttnnnnnnnnnnnnnnnnnnnnnnnnnnnngtaggctatgtatcttaagcatataaacatttgaccctttcttaaaaggtgccacaggtaatactaatctattttctatgtggaaagtgtttatgaatacagaaccaatttaggcaaaatgagatgcaaattattctagatgtaaaggttgaannnnnnnnnaaagtacacagttttaacatactatccactctatcaagcagacttagagggattccggaaggcagagctttcagtaaccttctaaaaaattattcaatattattacacagaatcagagattgctgtgatttttattcaatttgacatcttgattagaatgaaactagtaagaatgaaggtttacaaacattgcaatattactgtatcattgtgatatggctttacattgattgtatgtagagaacaaaataaaattagaattaaggcaataacaacatgtgcaaaccaagcacattaccctgatacggtccttgacagaaagctctttcggttagctgatgtttgatattgctgcatgcaggtcattgctctgaaggataagctgtgctactcgacacacggaccgg

SEQ ID NO: 169089 - DNA, 348 bp, Homo Sapiens
tggcggctgtgaatgtttgtctcagcacctccctgtgtggcggcgtcgtgtctggggaacccccctcgtgtcaggctcccggccagtgactggcagtgtctgcagcgctccgtgcaacgggaacgtggcggtgagcaccggcctgtgtgcgccctgcggccaattgaacaccacctgcggagggggttcctgcggcgtgggctcctgtggtatcagctccctgggtgtggggtcttgcggcagcagctgccggaaatgttaggcaccccaactcaagtcccaggccccaggcatctttcctgccctgccttgcttggcccatccagtccaggcgcctggagcaagtgc

SEQ ID NO: 169090 - DNA, 651 bp, Homo Sapiens
tcgtctctgcaggatcccccgtgtatcgaggctacattaatttcttgaaacacagatctatcagctagtaggaggaagcgcgagaggcaggtcggctgttgccgtgtcgcacggtttctggtcctggcccttcctgctcctgaggccccttcctatcggtgccagcggacttctttctagggtggcctttcccactgtggggtggcagagcccagaagtgggggatcacacagagaaatgtgaggccagtgagtgggaggggtctttcaaagtgcaggagaagtagctgagcacttgctccaggcgcctggactggatcggccaagcaaggcagggcaggaaagatgcctggggcctgggacttgagttggggtgcctaacatttccggcagctgctgccgcaagaccccacacccagggagctgataccacaggagcccacgccgcaggaaccccctccgcaggtggtgttcaattggccgcagggcgcacacaggccggtgctcaccgccacgttcccgttgcacggagcgctgcagacactgccagtcactggccgggagccgtgacacgcagaggtccccgcacacgactcgccgtctccgggagcatgcgacacgagacattcacagccccaatgcctacacatgg

SEQ ID NO: 169091 - DNA, 480 bp, Homo Sapiens
ggcagagcccagaagtgggggatcacatagagaaatgtgagtccaggtgtgggaggggtctttcaaagtgcaggagaagtagctgagcacttgctccaggcgcctggactggatggcccaagcaaggcagggcaggaaatatgcctgggggcctgggacttgagttggggtgcctaacatttccggcatctgctgccgcaagaccccacacctagggagctgataccacaggagcccactccgcaggaaccccctaccgcaggtgcgtgttctaattggccgcagggcgcacacagccaggtgctaaccgccacgttcccggtgcacggagcgcacgcagacactgccagtcaactggcacgggagccggacacgtcagaggtccccgcacacgaccccgccccgggatctgctgacacagacattcacagccccaaatccttcacagtagcctcgaaccggggatgctcttgagtctac

SEQ ID NO: 169092 - DNA, 628 bp, Homo Sapiens
atataaagcattggagctgtacatatctgtgtcgcaatctcccggggcggcagtcgtgtgcggggacctctgcgtgtcaggctcccggccagtgactggcagtgtctgcagcgctccgtgcaacgggcacgtggcggtgagcaccggcctgtgtgcgccctgcggccaattgaacaccacctgcggagggggttcctgcggcgtgggctcctgtggtatcagctccctgggtgtggggtcttgcggcagcagcagccggaaatgtaaggcaccccaactcaagtcccaggccccaggcgtctttcctgccctgccttgcttggcccatccagtccaggcgcctggagcaagtagctcagctacttctcctccactttgaaagacccctcccactcctggcctcacatttctctgtgtgatcccccacttctgggctctgccacaccacagatgggaaaggccaccctagaaagaagtccgcgtggcacccataggaaggggccatcaggagcaggaagggccaggaccagaaccttgcccacggcaactgccttccagcctctcgacgcttcctcacacagcatgattgatctgtgtcttcaataaattaatgtagcctctgtattaa

SEQ ID NO: 169093 - DNA, 414 bp, Homo Sapiens
ttcagagctacccggccagtgactaggacagatgtctgcagccctaccgtgcaacgaggaacgtggcggtgagcaccggcctgtgtgcgccctgcggacaattgaacaccacctgcggagggggttcctgcggcgtgggctcctgtggtatcagctccctgggtgtggggtcttgcggcagcagctgccaggaaatgttaggcaccccaactcaagtcccaggccccaggcatctttcctgccctgccttgcttggcccatccagtccaggcgcctggagcaagtgctcagctacttctcactgcactttgaaagacccctccaactcctggcactcacatttctctgtgtgatccccaacttctgggctctgcaaccaccgtcgggagcgggataccatcaaggagtcaacaa

SEQ ID NO: 169094 - DNA, 410 bp, Homo Sapiens
gggacctctgcgtatacgggctcccggaccagtagactaggcagtcgtctagcagcgctccgtcgcaacggagaacgtaggcggtcgagcaccgagcctagtgtagcgccctgacggccaattagaacaccacctagcggagggggttcctagcggcgtgggctcctcgtggtatcagctccctgggtagtaggggtcttgcaggaagacagctgacggaaatgtataggcaccccaactcaagtcccaggccccaggcatctttcctagccctgccttgctaggcccatccagtccaggcgcctggagcaagtgctcagctacttctcctgcactttgaaagacccctcccactcctggcctcacatttctctgtgtttaaattccttcccccaccccgtcgggtggag

SEQ ID NO: 169095 - DNA, 588 bp, Homo Sapiens
caaaaaggaaggggagaggcagagaaggcaaatgcagagaacaacgttctggtcctggccctatcctgctcctgaggccccttcctatgggtgccagcggactatctttctagggtggcctttcccactgtggggtggcagagcccagaagtgggggatcacacagagaaatgtgaggccaggagtgggaggggtctttcaaagtgcaggagaagtagctgagcacttgctccaggcgcctggactggatgggccaagcaaggcagggcaggaaagatgcctggggcctgggacttgagttggggtgcctaacatttccggcagctgctgccgcaagaccccacacccagggagctgataccacaggagcccacgccgcaggaaccccctccgcaggtggtgttcaattggccgcagggcgcacacaggccggtgctcaccgccacgttcccgttgcacggagcgctgcagacactgccagtcactggccgggagcctgacacgaggagtgttccccacacacgaccccgccacgggagctgcagaacatgacatgtacagcccaaggccgttcacaatagcgatcga

SEQ ID NO: 169096 - DNA, 867 bp, Homo Sapiens
gagaatgccaagtgccagaactccaagctggaggccgcggtggctcagtctgagcagcagggtgaggcagccctcagtgatgcccgctgcaagctggccgagctggagggcgccctgcagaaggccaagcaggacatggcctgcctgatcagggagtaccaggaggtgatgaactccaagctgggcctggacatcgagatcgccacctacaggcgcctgctggagggcgaggagcagaggctatgtgaaggcattggggctgtgaatgtctgtgtcagcagctcccggggcggggtcgtgtgcggggacctctgcgtgtcaggctcccggccagtgactggcagtgtctgcagcgctccgtgcaacgggaacgtggcggtgagcaccggcctgtgtgcgccctgcggccaattgaacaccacctgcggagggggttcctgcggcgtgggctcctgtggtatcagctccctgggtgtggggtcttgcggcagcagctgccggaaatgttaggcaccccaactcaagtcccaggccccaggcatctttcctgccctgccttgcttggcccatccagtccaggcgcctggagcaagtgctcagctacttctcctgcactttgaaagacccctcccactcctggcctcacatttctctgtgtgatcccccacttctgggctctgccaccccacagtgggaaaggccaccctagaaagaagtccgctggcacccataggaaggggcctcaggagcaggaagggccaggaccagaaccttgcccacggcaactgccttcctgcctctccccttcctcctctgctcttgatctgtgtttcaataaattaatgtatgcttctgatatctggtatc

SEQ ID NO: 169097 - DNA, 952 bp, Homo Sapiens
gatcccctccagactgccttcagactcctcacaacagccgggacctgaacatggactgcatcattgccgagatcaaggcacagtacgatgacattgtcacccgtagccgggctgaggccgagtcctggtaccgcagcaagtgtgaggagatgaaggccacggtgatcaggcacggggagaccctgcgccgcaccaaggaggagatcaatgagctgaaccgcatgatccaaaggctgacggccgaggtggagaatgccaagtgccagaactccaagctggaggccgcggtggctcagtctgagcagcagggtgaggcagccctcagtgatgcccgctgcaagctggccgagctggagggcgccctgcagaaggccaagcaggacatggcctgcctgatcagggagtaccaggaggtgatgaactccaagctgggcctggacatcgagatcgccacctacaggcgcctgctggagggcgaggagcagaggctgtgcgagggcgtcggctcggtgaatgtctgcgtcagcagctcccgcggtggcgttgtctgtggcgatctctgcgcctccactactgcccctgttgtctccaccagagtcagtagcgtccccagcaacagcaacgtggtggtgggcactactaacgcctgcgccccctccgcccgggttggcgtctgcggcggcagctgtaataagtgctaggaggctgccgcctccgcccgcgcctgtcgccggtactcctcaccccagccaggtacctccgcgccaaccagaacagcgccgccccggcgcccggacctccaaattagcccgcccccccgccctggcctgtgacctcctaaaacggcttcttaccccaacccgggcttcccgcgttctcggggaagacccattcccacccggtgctcccgaggaggaattcccccgagggggacagaggcccacacgagcca

SEQ ID NO: 169098 - DNA, 420 bp, Homo Sapiens
tgaaagcacaccctacatttccactgcatacatatccgtggctcttgacccttccattcttgcatatccttggatctgggtggactggcctgcctctcctcccttgtcctgtctcaccctaagcgaaggacagagctctgttctcagataatgacagataatatcagagcttagcagtatatctgactgcagggatgctgatggaattgttgggttgtctcagttgatacacacatttaggtttcaagaacttagacatgaaagtcatggctgccggcctgtctccctgcagccttgtcctttttccatatgtgacttcatccagtcctctcctaaattccgtggcaagagtattgccacctacttcacagatgggaagactgaggctcaggagttaggtaaccagcccgaggtctcaaa

SEQ ID NO: 169099 - DNA, 944 bp, Homo Sapiens
  misc_feature (848)..(867): n is a, c, g, or t
ggggctttgaggcagtaccggaggagaaagatggcggctaccttactagctgctcggggagccgggccagcaccggcttgggggccggaggcattcactccagactgggaaagccgagaagtttccactgggaccactatcatggccgtgcagtttgacgggggcgtggttctgggggcggactccagaacaaccactgggtcctacatcgccaatcgagtgactgacaagctgacacctattcacgaccgcattttctgctgtcgctcaggctcagctgctgatacccaggcagtagctgatgctgtcacctaccagctcggtttccacagcattgaactgaatgagcctccactggtccacacagcagccagcctctttaaggagatgtgttaccgataccgggaagacctgatggcgggaatcatcatcgcaggctgggaccctcaagaaggagggcaggtgtactcagtgcctatggggggtatgatggtaaggcagtcctttgccattggaggctccgggagctcctacatctatggctatgttgatgctacctaccgggaaggcatgaccaaggaagagtgtctgcaattcactgccaatgctctcgctttggccatggagcgggatggctccagtggaggagtgatccgcctggcagccattgcagagtcaggggtagagcggcaagtacttttgggagaccagatacccaaattcgccgttgccactttaccacccgcctgaatcctgggattctagtatgcaataagagatgccctgtactgatgcaaaatttaataaagtttgtccccgagaaatgaataaccaccccaactccaagnnnnnnnnnnnnnnnnnnnngacaggtccaggcccttttttttaaaaaccaccccgggccatggccccgggggggtaatcgcccgcttcccgggcag

SEQ ID NO: 169100 - DNA, 1014 bp, Homo Sapiens
tacaatgctcctgatgtgggaatgtctggcgtgactgcgccctgggctgcagcagagctcacagctgctggaggagttcctgtcccttcagatggagatcttgacagagctgggcttgcacttccgggtcctggatatgcccacccaagaactgggcctccccgcctaccgcaagtttgacattgaggcctggatgccaggccgaggccgcttcggacgaggtcaccagtgcttccaactgcacagacttccagagccgccgcctccacatcatgttccagaccgaggctggggagctgcagtttgcccacacggtgaacgccaccgcctgtgctgtcccccgccttctcatcgcgctcctggagagtaaccagcagaaggacggctcagtgctcgtgccccctgccctccagtcctacctcggcactgatcggatcacagcccctacccacgtgcctctccagtacatcggccccaaccagccccggaagcctgggctgcctggccagcctgctgtaagctaagaacccacccacagcagccctcgggggtgtcactgcttcctggagttcaggagaccccggacacctgggacctgtgttcctgagcccgtcctgacatctgtgttcttcctgtcagctccacgcccgggcccctggaccacggggtccacctctcctctgtccttgctgcctcagagtcagtcactgaccctgttatcattgagggtcccagtgggaagcaggacgtctgggctttacggttctagggacaggagaagcagaggaagaggcttccatccctccttccttctttcctcctacagtgctgagcaaaaagtccccaataaatgggccggaccctctcctaacttatccgcccccacttactccctaccacaccacccaccccaatacttatctcccaaggcttcttttggcgggggtggcggaaaaacacagctaaggaaagtgggcaccgggggacaatagctgggtttcccggaacccaaac

SEQ ID NO: 169101 - DNA, 682 bp, Homo Sapiens
gccgtgcctcctcgctggccgcgctccctcccggtgccggcttctctgagtcaccaacctgaggctgccccggccgcctgcgcacccggcagcaccatgacagatcaggcctttgtgacactaaccacaaacgatgcctacgccaaaggtgccctggtcctgggatcatctctgaaacagcacaggaccaccaggaggctggtcgtgctcgccacccctcaggtctcagactccatgagaaaagttttagagacagtctttgatgaagtcatcatggtagatgtcttggacagtggcgattctgctcatctaaccttaatgaagaggccagagttgggtgtcacgctgacaaagctccactgctggtcgcttacacagtattcaaaatgtgtattcatggatgcagatactctggtcctagcaaatattgatgatctttttgacagagaagaattgtcagcagcaccagacccagggtggcctgactgcttcaattcacggagtcttcgtttatcagccttcagttgaaacatacaatcagctgttgcatcttgcttctgagcaaggtagttttgatggtggggaccaaggcatactgaacacattttttagcagctgggcaacaacagatatcagaaaacacctgccgtttatttataacctaagcagcatctctatatac

SEQ ID NO: 169102 - DNA, 832 bp, Homo Sapiens
cagcacctccttgataatcatagtagtctgggttgtcgatctggtcgctatagtgggggctccggcgggcggactcggagcgggcggcggagtgacccggacagctgtcctctctgacaccaccccggcctgcctctttgttgccatgagagctgcctacctcttcctgctattcctgcctgcaggcttgctggctcagggccagtatgacctggacccacttccgttacttgctgcggaggaccgtgggcagccagggtcggtgaaggatcccaaaatggctgggcgaaaacttgctctaaaaaccattgactgggtagcttttgcagagatcataccccagaaccaaaaggccattgctagttccctgaaatcctggaatgagaccctcacctccaggttggctgctttacctgagaatccaccagctatcgactgggcttactacaaggccaatgtggccaaggctggcttggtggatgactttgagaagaagtttaatgcgctgaaggttcccgtgccagaggataaatatactgcccaggtggatgccgaagaaaaagaagatgtgaaatcttgtgctgagtgggtgtctctctcaaaggccaggattgtagaatatgagaaagagatggagaagatgaagaacttaattccatttgatcagatgaccattgaggacttgaatgaagctttcccagaaaccaaattagacaagaaaaagtatccctattggcctcaccaaccaattgagaatttataaaattgagtccaggaggaagctctggcccttgtattacacattctggacattaaaaataataattatacc

SEQ ID NO: 169103 - DNA, 817 bp, Homo Sapiens; identical to SEQ ID NO: 74070
  misc_feature (737)..(770): n is a, c, g, or t

SEQ ID NO: 169104 - DNA, 966 bp, Homo Sapiens
tcttcttctgtgagttcccagactgaactgacagtgagcggagtctgaggtcgctgtggactgcccactgggccttgcccgagatggacagccggattccttatgatgactacccggtggttttcttgcctgcctatgagaatcctccagcatggattcctcctcatgagagggtacaccacccggactacaacaatgagttgacccagtttctgccccgaaccatcacactgaagaagcctcctggagctcagttgggatttaacatccgaggaggaaaggcctcccagctaggcatcttcatctccaaggtgattcctgactctgatgcacatagagcaggactgcaggaaggggaccaagttctagctgtgaatgatgtggatttccaagatattgagcacagcaaggctgttgagatcctgaagacagctcgtgaaatcagcatgcgtgtgcgcttctttccctacaattatcatcgccaaaaagagaggactgtgcactagaaagttgcagcccacagcccttcatgtggactctgtcatgacatgctaactagacttcaggggagccacttctgttttcagcccctccctggaatagtgagttgggaggatggggagacagctaaccaactgcattacccaaaccatattgcacttttagttccctagttttctaggtgagcttcattccctgaaaggaggatgatgatatctaggcataacctagcctgtgaggaacctaagttaggaacagacaactgacatttattgaatatcatgcactagtcccttacatatgtcatatgtaacttatagaaatcagtagcaaaaagaatcttggggatttcccatctgacttccctggccatcttatcccatccttgcacttaccagaagatcataccctttttgagacttccgtgagaacgctgttcaccctttcctcatctagctctttcca

SEQ ID NO: 169105 - DNA, 817 bp, Homo Sapiens
  misc_feature (758)..(758): n is a, c, g, or t
tacaccacccggactaaacaatgagttgacccagtttctgccccgaaccatcacactgaagaagcctcctggagctcagttgggatttaacatccgaggaggaaaggcctcccagctaggcatcttcatctccaaggtgattcctgactctgatgcacatagagcaggactgcaggaaggggaccaagttctagctgtgaatgatgtggatttccaagatattgagcacagcaaggctgttgagatcctgaagacagctcgtgaaatcagcatgcgtgtgcgcttctttccctacaattatcatcgccaaaaagagaggactgtgcactagaaagttgcagcccacagcccttcatgtggactctgtcatgacatgctaactagacttcaggggagccacttctgttttcagcccctccctggaatagtgagttgggaggatggggagacagctaaccaactgcattacccaaaccatattgcacttttagttccctagttttctaggtgagcttcattccctgaaaggaggatgatgatatctaggcataacctagcctgtgaggaacctagttaggaaagacaactgacatttattgaatatcatgcactagtcccttacatatgtcatattttaattatagaaatcagtagcaaaaagaatcttggggattttccatctgacttccctggccatcttatcccatccttgcactaccagaaagatcatacacttttgagactccagtgagacgctngtttcaccccttcctccctctagcctctctcccaaaaagtaaaacacaatgctgaagga

SEQ ID NO: 169106 - DNA, 481 bp, Homo Sapiens
  misc_feature (98)..(98): n is a, c, g, or t
gctatagacatccccatggccggtgaagaggtggaaaggggccttgaggtggaggtggtccctgttgtgggggtggtgggccaggaggggggccctancctggaactggaggtggagggccaggaggaagtggacccaatggaggctgcccaaaaggttgtccaggaaaaagaactggtggtggagggcgatctcctcgattaggaggcccagctagaggaggaggcagaacctgaccaggaggtggaggacctggtggaccaggtgggcctggaggacctaagggtggacgtggtggagtctgtccagctggaaaaggtgggggtggccctcctggtcctgctggcccaggaaatctgtccccaccaggaacagcccctggaaaacgggcccgtcctttaccaccttgtggaaatgctgcacgggaactgcctcctggaggaccagctttacctttcccagacatttggcctgaatgggt

SEQ ID NO: 169107 - DNA, 298 bp, Homo Sapiens
ctggtgcttgcagcagctggggcagtggtggggggccttggcggctacatgctgggaagtgccatgagcaggcccatcatacatttcggcagtgactatgaggaccgttactatcgtgaaaacatgcaccgttaccccaaccaagtgtactacaggcccatggatgagtacagcaaccagaacaactttgtgcacgactgcgtcaatatcacaatcaagcagcacacggtcaccaccaccaccaagggggagaacttcaccgagaccgatgtgaagatgatggagcgcgtggcgagcg

SEQ ID NO: 169108 - DNA, 1208 bp, Homo Sapiens
  misc_feature (553)..(587): n is a, c, g, or t
tcggtacccggctcatttcagtttctagcctggctgggtaccgcctgtcgctgacccaggagaagctgcctgtctacatcagcctgggcttcagcgcgctgcccccgcgggggccggcagccatgtccaaggacatcctgggtgaagcagggctacactttgatgaactgaacaagctgagggtgttggacccagaggttacccagcagaccatagagctgaaggaagagtgcaaagactttgtggacaaaattggccagtttcagaaaatagttggtggtttaattgagcttgttgatcaacttgcaaaagaagcagaaaatgaaaagatgaaggccatcggtgctcggaacttgctcaaatctatagcaaagcagagagaagctcaacagcagcaacttcaagccctaatagcagaaaagaaaatgcagctagaaaggtatcgggttgaatatgaagctttgtgtaaagtagaagcagaacaaaatgaatttattgaccaatttatttttcagaaatgaactgaaaatttcgcttttatagtaggaaggcnnnnnnnnnnnnnnnnnnnnnnnnnnnnnnnnnnnctctgtagcattccagcggcttgaccaatgacctatgtcacaagaggtggcgtgtaaggaatgcagccccctgaagacagcactacaagtctgggggagccagttttaacatcagtgcacagctgctgctggtggccctgcagtgtacgttctcacctcttatgcttagttggaactaagcagtttgtaaactttcatccttttttttgtaaattcacaaagctttggaaggagaagcaataaatttttgttttcaaatggcttgatgtaccttttttcctgttgctcttgaaatatgtttaactcctcatgagagaaccctggattctctatcccctagtccacaaaacaaaccaggcagtggtcagcagctacctttatttggatcacacacgtgagtcagacagtaccactaatcgggccaatatggcttgtgagcaaaatgggtgaaaatagagggaactgactgggacctgttgtctaacatcattttaaggttgaacttgagcaaagacttagagaaagctgatggaatgccaagcatcaacgtgaagagaccctctatgcacacagtggatatgttatgcctggctgtagccaccttctcttctgaaaacaaga

SEQ ID NO: 169109 - DNA, 1421 bp, Homo Sapiens
  misc_feature (59)..(93): n is a, c, g, or t
  misc_feature (874)..(896): n is a, c, g, or t
attgaccaatttatttttcagaaatgaactgaaaatttcgcttttatagtaggaaggcnnnnnnnnnnnnnnnnnnnnnnnnnnnnnnnnnnnctctgtagcattccagcggcttgaccaatgacctatgtcacaagaggtggcgtgtaaggaatgcagccccctgaagacagcactacaagtctgggggagccagttttaacatcagtgcacagctgctgctggtggccctgcagtgtacgttctcacctcttatgcttagttggaactaagcagtttgtaaactttcatccttttttttgtaaattcacaaagctttggaaggagaagcaataaatttttgttttcaaatggcttgatgtaccttttttcctgttgctcttgaaatatgtttaactcctcatgagagaaccctggattctctatcccctagtccacaaaacaaaccaggcagtggtcagcagctacctttatttggatcacacacgtgagtcagacagtaccactaatcgggccaatatggcttgtgagcaaaatgggtgaaaatagagggaactgactgggacctgttgtctaacatcattttaaggttgaacttgagcaaagacttagagaaagctgatggaatgccaagcatcaacgtgaagagaccctctatgcacacagtggatatgttatgcctggctgtagccaccttctcttctgaaaacaagatgggaatgacggaactgtattaaaagattaagttatccactagggagcatactagcacacttccagatcagccttgagatgctagacttcagatacagggacttgtgtcaggtggcctctagaaatgtggaagactaagatttagaaataaactaatttnnnnnnnnnnnnnnnnnnnnnnntttcgcctaggatgatctgtttacaacagaaacaaaaacattttccagtttaatccatttgactgaaagtcattgttgggctgacccttaaggaaaacttaagtttaaacttcctttgcatagtatgttttctcttttttccttgggttagaggtgggaacaagaaaacattgatatagttttgaattaacattaaagaggcaaaatttcacatttaaaatggcccaaaatatcccactattcattttgctgacaggtgatacactcttgagaatcaggagtggagggtttagtcataagcatatatgctgtgggtcaggtgactcatgaacatgtcaaacaggccatgttctttagcagtttctggtctggtcctgcttttagtaatcttgcggtggaactcaggcacacagttatttggtaccacttccttataacctagcccacacccctttgcccaccctcaagccgatcggtctgttcatcccagtgcccttagaaggtgaaggtttgggctgggccccc

SEQ ID NO: 169110 - DNA, 810 bp, Homo Sapiens
gggacgtggggccggggcggagagaggcgagcaccgggaaggggagcgtggggccgctggaatccgctgtgtggcttacaataaccagtcaaacagattggctgtttcacgaacagatggcactgtggaaatttataacttgtcagcaaactactttcaggagaaatttttcccaggtcatgagtctcgggctacagaagctttgtgctgggcagaaggacagcgactctttagtgctgggctcaatggcgagattatggagtatgatttacaggcgttaaacatcaagtatgctatggatgcctttggaggacctatttggagcatggctgccagccccagtggctctcaacttttggttggttgtgaagatggatctgtgaaactatttcaaattaccccagacaaaatccagtttgaaagaaattttgatcggcagaaaagtcgcatcctgagtctcagctggcatccctctggtacccacattgcagctggttccatagactacattagtgtgtttgatgtcaaatcaggcagcgctgttcataagatgattgtggacaggcagtatatgggcgtgtctaagcggaagtgcatcgtgtggggtgtcgccttcttgtccgatggcactatcataagtgtggactctgctgggaaggtgcagttctgggactcagccactgggacgcttgtggaagagccatctcatcgctaatgctgacgtgcagtccatttgctgtagctgaccaagaagacagttttcgtggtggggcacagccgagggaacagtcttccattttcagctggtcc

SEQ ID NO: 169111 - DNA, 1057 bp, Homo Sapiens
aagggccggatatcaagcggtgccgctttgtctcctcgcacccctctgtagtgagctgtctccccactagtgcgtctgtcatcacagcttgtatcaatcatttgtgccgcgtatctgtcttggcccttgcgtgtgtctattcactctcgccagtgccaccgtaacgtgatgtggttcccaccccccctgggcataccgtcccgaagtgtcccggcccttgtcttaggcccgcaatgatccacatttaagagagggaaagagtacccctgtctgccggtggcaccgggggatccccgttccccaagttccaagtgatgagcaagctggaagaggagaactccctcttttaagaacaggagatgagacatcggtggggaaaggtgatttttcggagacggcatcgtaattcttacttccaccttctccatgagaggacgaaagactaagtgggtgtcagtgcctccagatatcagcgctgttgggctgtgggccacagtgcgcacgtcatgagtgtgatgctggaacggttttgtccgcacccactgcttctcactgctgttagatgtcacagggaccagctgaaaatggaagactgttccctcgactgtgcccaccacgaaactgtcttcttggtcagctacagcaatggactgcacgtcagcattagcgatgagatggctcttcacaagcgtcccagtggctgagtcccagaactgcaccttcccagcagagtccacacttatgatagtgccatcggacaagaaggcgacaccccacacgatgcacttccgcttagacacgcccatatactgcctgtccacaatcatcttatgaacagcgctgcctgatttgacatcaaacacactaatgtagtcatatggaaccagctgcaatgtgggtaccagagggatgccagctgagactcaggatgcgacttttctgccgatcaaaatttctttcaaactggattttgtctggggtaatttgaaatagtttcacagatccatccgacgcgtgggtcgacgatatcccaaggaatgccggaccgtaccagcct

SEQ ID NO: 169112 - DNA, 871 bp, Homo Sapiens
gtgattgacagtcgccttatatgcggtggtacggtcggaatcccgggatatcgtcgacccacgcgtcgaaaatccagtttgaaagaaattttgatcggcagaaaagtcgcatcctgagtcacagctggaatccctctggtacccacattgcagctggttccatagactacattagtgtgtaagatgtcaaatcaggcagcgctgttcataagatgattgtggacaggcagtatatgggcgtgtctaagcggaagtgcatcgtgtggggtgtcgccttcttgtccgatggcactatcataagtgtggactctgctgggaaggtgcagttctgggactcacccactgggacgcttgtgaagagccatctcatcgctaatgctgacgtgcagtccattgctgtagctgaccaagaagacagtttcgtggtgggcacagccgagggaacagtcttccattttcagctggtccctgtgacatctaacagcagtgagaagcagtgggtgcggacaaaaccgttccagcatcacactcatgacgtgcgcactgtggcccacagcccaacagcgctgatatctggaggcactgacacccacttagtctatcgtactctcatggagaaggtggaagtaaagaataacgatgccgctctccgaaaaatcacctttccccaccgatgtctcatctcctgttctaaaaagaggcagcttctcctcttccagtttgctcatcacttagaacttttggcgactgggatccacagttgcaacaggcaagaatggggatactcttccactctctaaaaatgcagatcatttactgcacctaaagaccaagggtcctgagaacattatctgtagctgtatctcccatg

SEQ ID NO: 169113 - DNA, 637 bp, Homo Sapiens
catcttgtactggctgagtcatggaagtgcaaaaagcactcactggctgcttctggtaccatctgatgatgatgtgacacacactgctgaaaaggtccaagcagggcaagtgggatggctgaaggaggtaaggagggggttcagaacccactggcctggatgggagaactgggtggcggcttccccaagagggaagacagataaacaaaacaaaacaaaaactgggtaaagaggaatgaatcactcagccctgatgtttcaattctacactgcattcctggccagtcgcatttgtattaatgcaggcatggacacagctctcctagagaattatctcaaagaccagaagggacctggagaggcctatttcttaggtttttccagttggacaaggaaggagtggtttcactcagcttctagaaggagttggagcctaagtttatctgcctccgggagctgcttgctttgtattggctccgaagaggtatcagatagttttgacacctcaggaaacttgaaccaagctgtgaaaccaagacctccctgcgtgaaaatcaaggtggtctccttgtggcttcaccaggatgtttgtgtcaggctgtctcagcagggtggggaatgaccagccagggagcac

SEQ ID NO: 169114 - DNA, 1184 bp, Homo Sapiens
  misc_feature (552)..(560): n is a, c, g, or t
  misc_feature (683)..(683): n is a, c, g, or t
  misc_feature (748)..(748): n is a, c, g, or t
  misc_feature (866)..(866): n is a, c, g, or t
  misc_feature (950)..(950): n is a, c, g, or t
  misc_feature (968)..(968): n is a, c, g, or t
caagtcgatgaactgccagccaaaggacgtggacctgacactacctggctggggcgagtggggtggtgtgggcctaaagcccagtgccaagaaaagacgccggtttctcattaaagcccctgagggtcctccaagaaaagataagaatttgccaaatgtgattatcaatgagaagcgcaacatccacgcagctgctcatcaggtacgagtgcttccatatccatttacccaccattggcaatttgaaaggaccatccagacccccataggatccacatggaacacccagagggctttccaaaagctgactactcccaaggtcgtcaccaagccaggccatatcattaaccccataaaagcagaagacgtgggctaccggtcttcctcaaggtcggacctgtctgtcatacagaggaatccaaaacgaatcaccacaccgtcaaaaaaaacagctgaagaaatgctctgtagattgagttgctggaggagtgaccgcccaggagccctggacttcagcttcctttggggcccagttttaactcctggatacannnnnnnnnatctcccgaaaaactggggctcccggaaaccattggccattgtgaagtctaaaccccaacaattttctgtaaaaaaataaaaggggcgagtctctcctgtaaagtcgcccacgccagcgagcngcgcgccgaccgggcgagagataggtcggagagaatcgccagacatgtgctagccccgcgcttcnacgacgggtacgaccggacacagcccgcctccgccagattcgggggcgtacgcgcgtcccggggggtgctgacccggttccaggctgtcacacgcgtactgagagcgaatcgacgtanatagatgggcgacgcgcgcgccgggcgtggtgtgtatgccccccgtgtgttagcgccccgctcgtccacgtgcgccgctgcccntggtgttgcagccctgcnttccgtggcgacccgtcaatgggatcggcagagctgagttcattacgcctgaccccacgcgcggtgggggggtgtccgcgcgccttctcgtatcggcaccacggctcaacatagaggcagattctgatatgctgaccagtgtcgcgcctccccccttcttttagggggggcgcgcgtggccctcccccccgctcgtctagtccggcctcatttaat

SEQ ID NO: 169115 - DNA, 478 bp, Homo Sapiens
acaagcaggaagccaaagaaccagcccagtgcacagagcaggccacggtggacacgaactcactgcagaatggggacaagctccaaaagagacctgagaagcggcagcagtcccttgggggcttctttaaaggcctgggaccaaagcggatgttggatgctcaagtgcaaacagacccagtatccatcggaccagttggcaaatccaagtaaacaaatcagcacggttcccaccaggttctcctgccaccaagatgtgttctccttactccatctcctccccaaacacgctccatgtatatattcttctgatggccagcaaatgaaattctgcctagaaattaagcccgagctgttgtatattgaggtgtattatttacgtctctggtccagtcttttctggcaaataacagtaaagatggtttagcaggtcacctagttgggtcagaagagtcgatgatcaccgtgcttatctcaat

SEQ ID NO: 169116 - DNA, 1219 bp, Homo Sapiens
gtgttagagtaagggctctgcccacaggatgttaccggctggcgcgcgcggccacagatgtagctggtcctccctgtgccggctccgtctgcgatgcagggcggcggcctgtaatcccagcgaccgccaggagtggcagaatttagcgacatttggaagcttttcaaacatggttccctgtagtcatccatatattggtaccctgagtcaagtaaagttgtactccacaaatgttcagaaagaaggacagggatcacaaacactcagagtggaaaaagtaccatcatttgaaacagcagaaggtataggcacagaactcaaagctccacttaagcaagaacctctccaagtaagagttaaagcagtccttaagaaaagggagtatggatcaaagtacactcagaataatttcatcactggagtcagagcgataaatgagttctgcctcaaatccagtgatctagaacaacttcgaaaaatcagacgacgaagtccccatgaagatactgagtcttttactgtatacttgagatcagatgtggaagcaaaatctttggaagtttggggaagccctgaagctcttgccagagagaaaaaattgcgtaaggaagcagaaatagaatacagagaaaggctatttagaaaccaaaaaatattaagagaatacagagatttcttgggaaataccaagccacgctccagaacagcatcagtgttttttaagggaccaggaaaagtggtgatggttgcaatttgcatcaatggattaaactgcttctttaaatttcttgcctggatttataccggttcagcaagtatgttctcagaagctatacactcattatctgatacttgtaatcagggtttactagcattgggcatcagtaagtctgttcaaacaccagatcccttctcatccgtacggattttccaaatatgcgctatattttcttcgctatttaggggtgttgggattttcatgatgggtgcaggaatatcttggtaccatgggagtcatggggattgctttctccctcaacccattaaaattcgccttctaatggggaatattggaatttttaaccaagggaaccattaaagtatccctgaaagggagcacaaacccttctccttggggtggcccgggaaaaaatggaaacccttcccccaaaaggaaatggggctcccgcgggcctttaagaggggaaattggtcccaa

SEQ ID NO: 169117 - DNA, 392 bp, Homo Sapiens
gagaggctcaagcttcccagaatcccttgtccctccccactttgggcacttaggggtggggctggggagtgagagggacaaggcagggcatgattgattaaagctaacgagcagacagaaggcactggtgggtcacatctcgggcctgggagagggagggcgtgggccaggccccatgtgacaccaggggctccttggcatccaggcttggcgtctagtcctttcccttccctttcttggctttggcctttgctttggtcttgggggtgcagggcttggtgacgcggatggtctcctggcactgagcattgtagcgcgccttcttcagggtgccttggcggactttggtgcctgtgcccccatcacacgcaccccgtcggtgagcggaccgc

SEQ ID NO: 169118 - DNA, 384 bp, Homo Sapiens
cagacggtctgtggcaggctcctgtttgatttacgctagcggagtccaacaacaaggcccgtgttgggtcatctgtcgggccatgcaagaggtagggcgttcgccagtgcgctcattgtgactcctaggtcttccttggtgtccaaggcttggcgtctagtcctttcccttccctttcttggctttggcctttgctttggtcttgggggtgcagggcttggtgacgcggatggtctcctggcactgagcattgtagcgcgccttcttcagggtgccttggcggactttggtgcctgtgcccccatcacacgcaccccagttctcaaacttgtaccttgcaggcggctccaaactccttcttccaattcagggcacctgcaccga

SEQ ID NO: 169119 - DNA, 818 bp, Homo Sapiens
  misc_feature (548)..(683): n is a, c, g, or t
  misc_feature (695)..(706): n is a, c, g, or t
  misc_feature (733)..(742): n is a, c, g, or t
gggcccggatctgcgcattccgtgcaggtgccctgcaactggaagaaggagtttggaccgacttcaactacaagtttgcgaatgggctgcatctgatggagcacaggcaccacagtccgtcaaggcaccatgacgaaggcgcgctacaatgctcagtgtcaggagaccatccgcgtcaccaagcctgcacccccaagaccaaagcataggccaaagccaagaaagggaagggaaaggactagacgccaagcttggatgccaaggagcccctggtgtcacatgtggcctggcccacgccctgcgtcttttaggcccgagatgtgacccaccagtgccttctgtctgctcgttagctttaatcaatcatgccctgccttgtccctctcactccccagccccacccctaagtgcccaaagtggggagggacaagggattctgggaagcttgagcctcccccaaagcaatgtgagtcccagagcccgcttttgttcttccccacaattccattactaagaaacacatcaaataaactgactttttccccccnnnnnnnnnnnnnnnnnnnnnnnnnnnnnnnnnnnnnnnnnnnnnnnnnnnnnnnnnnnnnnnnnnnnnnnnnnnnnnnnnnnnnnnnnnnnnnnnnnnnnnnnnnnnnnnnnnnnnnnnnnnnnnnnnnnnnnnnccctgggggcgnnnnnnnnnnnntaaaaaattttttaaaccctttttttnnnnnnnnnnccccaaaggtaaaggaaaatgggcaatacttttctccaaaaaaacccgggacataaaaggggttggtttccccccc

SEQ ID NO: 169120 - DNA, 600 bp, Homo Sapiens
  misc_feature (515)..(515): n is a, c, g, or t
  misc_feature (540)..(540): n is a, c, g, or t
tcctcacatacctaggccgggagagggagaacacatgttggagaaaatcggcagctgagacggccttggccggacttagcactcaggcctgtgaatcaggagatacaaagacctccaaaaaaggaccagttcctcggatgtgccccctcacagagagatgaaggggcagcagaaaacagctgaaacggaagaggggacagtgcagattcaggaaggtgcagtggctactggggaagacccaaccagtgtggctattgccagcatccagtcagctgccaccttccctgaccccaacgtcaagtacgtcttccgaactgagaatgggggccaggtgatgtacagggtgatccaggtgtctgaggggcagctggatggccaaactgagggaactggcgccatcagtggctaccctgccactcaatccatgacccaggcggtgatccagggtgctttcaccagtgatgatgcagttgacaccggaggggacaagcttcttgagaccccttatacttacnttcccaacaccggcaattgggaaanttgggccagggggtaaccaaaatcgggggaagtacaagcttcttgtttggttctaaccca

SEQ ID NO: 169121 - DNA, 321 bp, Homo Sapiens
ccagttgcctggtaccgcagctgctccacatcgtagatcttcttcaacggaaccacggagggtgcaaaacagtggcccagcttggccagcagcactccattccgaaggctctcctccagctccaccggggaaggaagctcctccttcaggcaggcctccatccagcgcttggcctcctccagccggcacaggtactgataggcaacattctgccgcctctgctcatccatctcctcagctgtgaggcgttcataggctgcccagcctgggcccgctgctctcctctccatgttcctccttcccttactcgacacacggtac

SEQ ID NO: 169122 - DNA, 928 bp, Homo Sapiens
ttgcatatggcaaggccaaggccgtcatgagccagtggatcttgaagacgctgtacgtgttcctgcagaggatggacacccagaagatgccagcggccaggaagcaggcggacatgaccatgtagagcttgaaaaggggcatctccgctgccgacaggaagccatcggggttcttctcccggatcatcaccgtgatgtcgaatggatgctcctttcctggcactgaattgttgcagttgtggaagttcaggctgtactggccttcttccgcctgagagccgatcaccacgtggaaactgaagttgtaggagttgttgaggtggctcaggcccaacaccaggtccttgtccttcccactaggaccctgaatcactgcgggtgttgacttgggcttgctggctgcagaggtccctccgccatccaccttgcgggggactgtggcctgtggcttcgggagcctggtttggagggtgcttccgggaggagcccgggaaagataaacaacgtcttctgctctccatacttccgcacctggacctgcagatccttggtgttgatgaggaacaggaccaggaaactgctactgtttttctggagagggcagtcctggaaatcccgggttgaataggagcgaactctgccagaccgaacccggctgagactgaaccccaccagcagggacttctcttctgcctcccggaggcccagccgcaggacgctcaactccacctccagagagccattggtgtagaaaccgaagctgttcagctggatgtccgctcgcttctcccccgtcagcgccagctggtggatgcgcccggagcagccacccagcagcagcaccagaagtagccgctgcccccactccgcggggctccccggacgcgtgggtcgacgatatcccgggaactccggcctgtacagcctg

SEQ ID NO: 169123 - DNA, 947 bp, Homo Sapiens
gagatggcagtgagcgagaggagggggctcggccgcgggagccccgcggagtgggggcagcggctacttctggtgctgctgttgggtggctgctccgggcgcatccaccggctggcgctgacgggggagaagcgagcggacatccagctgaacagcttcggtttctacaccaatggctctctggagagtggagttgagcgtcctgcggctgggcctccgggaggcagaagagaagtccctgctggtggggttcagtctcagccgggttcggtctggcagagttcgctcctattcaaccagggatttccaggactgccctctccagaaaaacagtagcagtttcctggtcctgttcctcatcaacaccaaggatctgcaggtccaggtgcggaagtatggagagcagaagacgttgtttatctttcccgggctcctcccggaagcaccctccaaaccagggctcccgaagccacaggccacagtcccccgcaaggtggatggcggagggacctctgcagccagcaagcccaagtcaacacccgcagtgattcagggtccctagtgggaaggacaaggaccctggtgttgggccctgagccacctcaacaactcctacaacttcagtttccacgggggtgatcggctctccaggcggaagaaggccagtacagccctgaacttccacaactgcaacaattcagtggccaggaaaggagcatccattcgacatcccggtgatgatcccgggagaaaaaccccgatgggcttcctggccggcaggggaaaatgccccccttttcagactctacaatgggtcatggcccgcccctgctttcctgggccgctggcaatccttcctggggggtcccatcccccctgccaggaacccccctaaccgcggtccttccaaaaaatccacctgggtctcactggccggggccttgggt

SEQ ID NO: 169124 - DNA, 1247 bp, Homo Sapiens
  misc_feature (1196)..(1196): n is a, c, g, or t
gtgaacaaagcatcagctcacaacaaaaacctggatgtaggggccaacattttcattgggaacctggaccctgagattgatgagaagttgctttatgatactttcagcgcctttggggtcatcttacaaacccccaaaattatgcgggaccctgacacaggcaactccaaaggttatgcctttattaattttgcttcatttgatgcttcggatgcagcaattgaagccatgaatgggcagtacctctgtaaccgtcctatcaccgtatcttatgccttcaagaaggactccaagggtgagcgccatggctcagcagccgaacgacttctggcagctcagaacccgctctcccaggctgatcgccctcatcagctgtttgcagatgcacctcctccaccctctgctcccaatcctgtggtatcatcattggggtctgggcttcctccaccaggcatgcctcctcctggctccttcccacccccagtgccacctcctggagccctcccacctgggatacccccagccatgcccccaccacctatgcctcctggggctgcaggacatggccccccatcggcaggaaccccaggggcaggacatcctggtcatggacactcacatcctcacccattcccaccgggtgggatgccccatccagggcatgtctcagatgcagcttgcacaccatggccctcatggcttaggacatccccacgctggacccccaggctctgggggccagccaccgccccgaccaccacctggaatgcctcatcctggacctcctccaatgggcatgcccccccgagggcctccattcggatctcccatgggtcacccaggtcctatgcctccgcatggtatgcgtggacctcctccactgatgcccccccatggatacactggccctccacgacccccaccctatggctaccagcgggggcctctccctccacccagacccactccccggccaccagttccccctcgaggcccacttcgaggccctctccctcagtaaattcacattttccttcctcctgttacattttcccaatatcttttctattccttggaccaatcagagatgctgtagctccttggggcaaaggtactaatccctttcagcacccccactccattcccctttttaatgtaactttttccacaggaggtatttcttttttatgttggtncctgagtattttgcaaatggcacagagaaaataaaactaaactccttgttt

SEQ ID NO: 169125 - DNA, 823 bp, Homo Sapiens
ctgggagacggcgggatctctttcgccatggctgccgggccgatctccgagcggaatcaggatgccactgtgtacgtggggggcctggatgagaaggttagtgaaccgctgctgtgggaactgtttctccaggctggaccagtagtcaacacccacatgccaaaggatagagtcactggccagcaccaaggctatggctttgtggaattcttgagtgaggaagatgctgactatgccattaagatcatgaacatgatcaaactctatgggaagccaatacgggtgaacaaagcatcagctcacaacaaaaacctggatgtaggggccaacattttcattgggaacctggaccctgagattgatgagaagttgctttatgatactttcagcgcctttggggtcatcttacaaacccccaaaattatgcgggaccctgacacaggcaactccaaaggttatgcctttattaattttgcttcatttgatgcttcggatgcagcaattgaagccatgaatgggcagtacctctgtaaccgtcctatcaccgtatcttatgccttcaagaaggactccaagggtgagcgccatggctcagcagccgaacgacttctggcagctcagaacccgctctcccaggctgatcgccctcatcagctgtttgcagatgcacctcctccaccctctgctcccaatcctgtggtatcatcattggggtctgggcttcctccaccaggcatgcctcctcctggctcctttcccaacccccaagtgcactactggaggcctcccaactgagaaaacccagagaccaaagaatgactac

SEQ ID NO: 169126 - DNA, 941 bp, Homo Sapiens
  misc_feature (623)..(679): n is a, c, g, or t
  misc_feature (803)..(855): n is a, c, g, or t
tcatcagctcggtccagagttaggccatgtgtgaggcaagacctgggcctgtttaggctgctgggagacaggcaggaatctggccagggaaggttgccatgagacaaaagttgggcctggaaaggcccttgtgaagcatgagcttggcctaaagaggccactgggtggcaggagctgggtgtgtagaagctgctgaaaggttgggagcttggcttggggggtccacagtgaggcagatgctgggcgctgaagaatctgctgtgaggcagatgttgggactgtagaggccgacgggaggcagaggctgggcctggaggggccaccaagatgcaggagctgggcctggagaggctgcaaagaagcatgagctgggcctggtgaggtcgacttgagaaagttcagggcctggagagaaggctgggaggcaggagctgggtctaaagaggccattgtaacgatggagctgtgcctgtggaggctgttgtggggcagtaggctcatctgcggagactgccgtgacgtagggtatgggcctaaataggccattgtgagtcatgagcttggtctgtagaggctgactggagaaagttctgggcctggagaggctgccgggaggtaggagnnnnnnnnnnnnnnnnnnnnnnnnnnnnnnnnnnnnnnnnnnnnnnnnnnnnnnnnncgtttcgctgtcacccctctggaatccacgtatacgaaaattccaaatgtcagttgggcatagtggcaagcacctgtagtctcagccacgtgggaggttgaggtgggaggatcgattcagccannnnnnnnnnnnnnnnnnnnnnnnnnnnnnnnnnnnnnnnnnnnnnnnnnnnnacaacagagggagacctgagaatgttcaagggcctggagagaaggctgggagcaggagcgggtcacagagccattcacgcctccgg

SEQ ID NO: 169127 - DNA, 1179 bp, Homo Sapiens
  misc_feature (59)..(59): n is a, c, g, or t
  misc_feature (74)..(75): n is a, c, g, or t
aggtaaggcaaaattttttacggaaaaagtccagatttccaccccgttggagcccagancccttcttttctcanncggaaagacctgtggtacccagtgcgtgttggtcggggtggttcatcattagtaagctccccgtgggccagcggcagcctgaccaccgccacctctggggaggggcttttcccacgggaatccttatgccggaagacaaagtctctgcaggcaccgaaggagacagaggcaatggggctcccaggggccagttctctttcatcatctcggtgctccccgatgtggtcacagccatctttatacctgttgatgagcacaaagttgaaggtctgtccagtcaccccagagacgtgatcccggatgcgctctagaactgggatccagggctttggagacagcgtgaggcctgaaaatgtgtaggtcagcccagcgtcgccatacgttgcctgcttcctgggcacactggtgccacgttcccgaataccttggactctggccagtgctcctgtaaaatattctacttctttctccaactcttggaaaatctcatctgcctcagctttgccataacaggactgtgtaactgcagtccaggccctcagcccgaatgtgccgccagctagggcctgctgagtggcctccattccctggggcctctctcctgggcctcttccttgtgctttctttgtctcctcccaacacagctggctcttctccagttggctcttgctcctcctgcttcctcaaaaggcccccttgagcccctttcaccaggaatctgtccatcctgtccccacaggaaagaagggacgtcagtggcgaggccaagacagaaattgctcaagttctatccccagtgcaaaaatctgtttgtccaaggggtctcacagcaacattcctagtttcacattttcattttaaagtttaaaaccatgtcctcgctgccccccaccagtgttaaaatagatcagtctagtgatgctcaagtggatacgattcagaagcgagacgcaaagaggttaaacacgggtaaaccgcacgcaaaattctgatatcactgcacacgtccgtggggtgggggtggcaagagtgctctagcatcgcagctccggcgcagatcggaactcccgcagtcaccgatcgcgtgggtcgacccacgcgtcc

SEQ ID NO: 169128 - DNA, 710 bp, Homo Sapiens
tgtttaacctctttgcgtctcgcttctgaatcgtatccacttgagcatcactagactgatctattttaacactggtggggggcagcgaggatggacagattcctggtgaaaggggctcaagggggccttttgaggaagcaggaggagcaagagccaactggagaagagccagctgtgttgggaggagacaaagaaagcacaaggaagaggcccaggagagaggccccagggaatggaggccactcagcaggccctagctggcggcacattcgggctgagggcctggactgcagttacacagtcctgtttggcaaagctgaggcagatgagattttccaagagttggagaaagaagtagaatattttacaggtataaagatggctgtgaccacatcggggagcaccgagatgatgaaagagaactggcccctgggagccccattgcctctgtctccttcggtgcctgcagagactttgtcttccggcataaggattcccgtgggaaaagcccctccaggagggtggcggtggtcaggctgccgctggcccacgggagcttactaatgatgaaccacccgaccaacacgcactggtaccacagtcttcccgtgagaaagaaggttctggctccacgggtgaatctgacttttcgtaaaattttgcttactagaaaataaaaacatttttaacagttacaaacacaaaaaagc

SEQ ID NO: 169129 - DNA, 253 bp, Homo Sapiens
ctgtgtgtagagtaaggttggctgtaagaagatcgtattacatgcgcccttaattacggagggatatggacaatctcccaatagcaaacactgaacaaatttggtgataaaggttattggatggcagtcagtaggccactcaataacttaattataaaacaattcactattactttaaagggctttctaggcctaggactgtccctaggtgtctggtgacttctcttctagccctgtggcttctaaagatttc

SEQ ID NO: 169130 - DNA, 821 bp, Homo Sapiens
ggggtgccagggaccgggacgagaagaagggccccctggagaatggggatggggacaaagagaaaacaggggtgcgcttcctgcgatgcccagcagccatgaccgtcatgcatcttgccaagtttctccgcaacaagatggatgtgcccagcaagtacaaggtggaggttctgtacgaggacgagccactgaaggaatactacaccctcatggacatcgcctacatctacccctggcggcggaacgggcctctccccctcaagtaccgtgtccagccagcctgcaagcggctcaccctagccacaggtgcccaccccctccgagggcaccaacaccagcggggcgtccgagtgtgagtcagtcagcgacaaggctcccagccctgccaccctgccagccacctcctcctccctgcccagcccagccaccccatcccatggctctcccagttcccatgggcctccagccacccaccctacctcccccactcccccttcgacagccagtggggccaccacagctgccaacgggggtagcttgaactgcctgcagacaccatcctccaccagcaggggggcgcaagatgactgtcaacggcggctcccgtgcccccccttaactttgagcccagggacccctctccccttcttccagccaaggcctctccactcctttccactttttctggggcccttttttccccctcttctacttttccccagctcttcccaccttgggaggtgggggggcggcttttttaaattaactttttcatttatttggtacttaggaaaaaccaaatattcctactttattttcca

SEQ ID NO: 169131 - DNA, 493 bp, Homo Sapiens
  misc_feature (415)..(415): n is a, c, g, or t
ctccaggatacaaaagagcagaaggaagatggactcatgtatcctttgacaattatagatatatgttgaggatcaagtggctttcaagcagcatggacgggtgtgaaaatgtttgcagtttagatcatatctgttgcgttaatgggttggtgagtctgtaatgacatcgccacactgggctgaggtacgctttctagttccaccattgtccaagtggagtgccatttcttctgatatgaaagtgttcaaatcgacatcatggagtccatttctccttcgactagcattcgatccactgcttacatgtgtagggagagcctgggggtactcgaacgcacgcttatactagtcattgcaccactaaggaccatgcagagctatgggcttcccgggaagggtttggcaaatcagtctnctacagatgaggctagttttcccttgaaggtagctccggttaggggggacactacagttagtctttgggggggagctc

SEQ ID NO: 169132 - DNA, 199 bp, Homo Sapiens
ggtactcgaacgcacgcttatactagccattgcaccactaagaccatgcagagctatggcttcccggaaggccaccattgtccaagtggagtgccatttcttctgatatgaaagtgttcaaatcgacatcatggagtccatttctccttcgactagcattcgatccactgggtaccacactcgagtcgtatcatgtcaa

SEQ ID NO: 169133 - DNA, 357 bp, Homo Sapiens
ccggtcaggaaatatcacttcctccgatttacgtgggctgcatgagctctacttctcttcttattctagtgccagtggcctctggagtcgtggtccttcttactggaagtagccctcctctcctgttacagaggcaataattctccagccttccggtcgccgccaaagcctcctgcctaatcacttcctgtattgtctccctgcggctctttgcacagaccttgggctctgtcgtctgtggattcttactgatctcttcctcttctcccaaccgccttgtcatgtctctttgagctatgtcaggaggaacggaagggcactttcttactacttttgttagccaaacggacaaactgt

SEQ ID NO: 169134 - DNA, 767 bp, Homo Sapiens
gggggggacgacaaggagggcatgatcaacctcgtcatgtcctacgcgctgcttccagctgccatggtgatgccaccccagcccgtggtcctgatgccaacagtgtaccagcagggcgttggctatgtgcccatcacagggatgcccgctgtctgtagccccggcatggtgcccgtggccctgcacccggccgccgtgaacgcccagccccgctgtagcgaggaggacctgaaagccatccaggacatgttccccaacatggaccaggaggtgatccgctccgtgctggaagcacagcgagggaacaaggatgccgccatcaactccctgctgcagatgggggaggagccatagagcctctgcctcgatgccgttttgcccccgctctttggacacgccgacccggcgctccccaaggaatgctgtcccaacaagattcccgtgaaagagcacccgtgtcgccccctcccgtggacttctgtgccgccccgtccacacctgttcttgggtgcatgtgggttttcggttcctggcggtccaggacggggcgggggctcccctcccatctcgtgctgggaggtctcagcgcgctctcctgtccctgggacgtgcgtctctccttctcatgccgttctggaaaatgctcttgctgtagagagcagctgcttctgccagggtgttggaagtggtggagcgccttccgattccatcatggcattttgtgatgtgatgtaaatggaatagagctgttgattttaggcccactt

SEQ ID NO: 169135 - DNA, 951 bp, Homo Sapiens
cgacccacgcgtccgccggcgcgtcactgtcgggtcggcgagccacgggggccgccgcagcaccatggcgaccaccgtcagcactcagcgcgggccggtgtacatcggtgagctcccgcaggacttcctccgcatcacgcccacacagcagcagcggcaggtccagctggacgcccaggcggcccagcagctgcagtacggaggcgcagtgggcaccgtgggccgactgaacatcacggtggaacaggcaaagtcggccaagaatcacggcatgacccgcatggacccctactgccgactgcgcctgggctacgcggtgtacgagacgcccacgacacacaatggccccaagaatccccgctggaataaggtcatccactgcacggtgcccccaggcgtggactctttctatctcgagatcttcgatgagagagccttctccatggacgaccgcattgcctggacccacatcaccatcccggagtccctgaggcagggcaaggtggaggacaagtggtacagcctgagcgggaggcagggggacgacaaggagggcatgatcaaacctcgtcatgtcctacgcgctgcttccagcttgccataggtgatgccacccaagccgtggtcctgatgccaacagtgtaccagcagggcggtggctaatgtgcccatcacagggatgccgctgtctggtagcccggcattgttgcacgtgggcctgcccccggcgccgtgaacgcccagcccgctgtagcgagggaggacttgaaagccatccagggacatgttccccaaacatggaccagggaggtgagaccgatccgagcttggaaggccagcgagggacacgggttgtcgccattaaatcccttgttgacaatgaggggaagacgccgaaaaactctagccaatgcgggttgccccgcgctttggaaaccgaccggagttctc

SEQ ID NO: 169136 - DNA, 1690 bp, Homo Sapiens
  misc_feature (1148)..(1292): n is a, c, g, or t
  misc_feature (1301)..(1314): n is a, c, g, or t
  misc_feature (1340)..(1348): n is a, c, g, or t
  misc_feature (1424)..(1516): n is a, c, g, or t
  misc_feature (1533)..(1542): n is a, c, g, or t
agtacagaaagttggatttcttggaattttggcctgtgcttcaattccaaatcctttatttgatctggctggaataacgtgtggacactttctggtacctttttggaccttctttggtgcaaccctaattggaaaagcaataataaaaatgcatatccagaaaatttttgttataataacattcagcaagcacatagtggagcaaatggtggctttcattggtgctgtccccggcataggtccatctctgcagaagccatttcaggagtacctggaggctcaacggcagaagcttcaccacaaaagcgaaatgggcacaccacagggagaaaactggttgtcctggatgtttgaaaagttggtcgttgtcatggtgtgttacttcatcctatctatcattaactccatggcacaaagttatgccaaacgaatccagcagcggttgaactcagaggagaaaactaaataagtagagaaagttttaaactgcagaaattggagtggatgggttctgccttaaattgggaggactccaagccgggaaggaaaattcccttttccaacctgtatcaatttttacaacttttttcctgaaagcagtttagtccatactttgcactgacatactttttccttctgtgctaaggtaaggtatccaccctcgatgcaatccaccttgtgttttcttagggtggaatgtgatgttcagcagcaaacttgcaacagactggccttctgtttgttactttcaaaaggcccacatgatacaattagagaattcccaccgcacaaaaaaagttcctaagtatgttaaatatgtcaagctttttaggcttgtcacaaatgattgctttgttttcctaagtcatcaaaatgtatataaattatctagattggataacagtcttgcatgtttatcatgttacaatttaatattccatcctgcccaacccttcctctcccatcctcaaaaaagggccattttatgatgcattgcacaccctctggggaaattgatctttaaattttgagacagtataaggaaaatctggttggtgtcttacaagtgagctgacaccattttttattctgtgtatttagaatgaagtcttgaaaaaaactttataaagacatctttaatcattccnnnnnnnnnnnnnnnnnnnnnnnnnnnnnnnnnnnnnnnnnnnnnnnnnnnnnnnnnnnnnnnnnnnnnnnnnnnnnnnnnnnnnnnnnnnnnnnnnnnnnnnnnnnnnnnnnnnnnnnnnnnnnnnnnnnnnnnnnnnnnnnnntttggcggnnnnnnnnnnnnnnaaaaaattttttaaaacttttgtttnnnnnnnnncccccggaggaaagggaaaaggggctatcgtggtcccaaaaaaacccgggtaaaagctgggggttggtttccccannnnnnnnnnnnnnnnnnnnnnnnnnnnnnnnnnnnnnnnnnnnnnnnnnnnnnnnnnnnnnnnnnnnnnnnnnnnnnnnnnnnnnnnnnnnnggtcttatttaaaattnnnnnnnnnntggctttttttggagaactggggggaatctttaaaagttttcccgcccggtggggaacccccccacaacgggtttaataaacccttaaaacccccccgggatataaaaaacccttggggcgcgttggggaaaaataatttttccccca

SEQ ID NO: 169137 - DNA, 815 bp, Homo Sapiens
ctctacaggatctctagggtcttagggaggacccccctgtgtgtgcatataaatatgtacatgtgtatatagatttttaggggaaggagagagggaagggtcagggtagagacacccctcccttgcccctttcctgggcccagaagttggggggagggagggaaaggatttttacattttttaaactgctattttctgaatggaacaagctgggccaaggggcccaggccctgtcctctgtccctcacacccctttgctccgttcattcattcaaaaaaacatttcttgagcaccttctgtgcccagcatatgctaggcccaccagctaagtgtgtgtggggggtctctacgccagctcatcagtgcctccttgcccatccttcaccggtgcctttgggggatctgtaggaggtgggaccttctgtggggtttggggatctccaggaagcccgaccaagctgtccccttcccctgtgccaacccatctcctacagccccctgcctgatcccctgctggctgggggcagctcccaggatatcctgccttccaactgtttctgaagcccctcctcctaacatggcgattccggaggtcaaggccttgggctctccccagggtctaacggttaaggggacccacataccagtgccaagggggatgtcaagtggtgatgtcgttgtgctcccctcccccagagcgggtgggcggggggtgaatatggttggcctgcatcaggtggccttcccatttaagtgccttctctgtgactgagagccctagtgtgatgagaactaaagagaaagccagacccct

SEQ ID NO: 169138 - DNA, 235 bp, Homo Sapiens
ctgctggccacttacgcgcctgccccttacgcctctgctggcccttacgcgcgggggcgctggtggcacttactctatggttggtctcaagactatccctccccttggtctggttgtccctcctaggcctgtctggcagccccctagacagtacgtagtctcactgggagtctcgctcactggcaaccttggaagagccaagctgacattgtttagctcttcagcacactggttg

SEQ ID NO: 169139 - DNA, 1046 bp, Homo Sapiens
tctgaaatcagatcactggtgggggctgactcctaggctgaggactgcaagaacctgtggctacaattacaaacaacttccgtgctgggagactgtcctgggccaggaaatgtacaaacttctgctctttgatctgctgactgtcttggcagtcgcgctgctcatccagtttcctagaaagctcctctgtggcctctgtcctggggcgctgggtcgtctggcggggacccaggagttccaggtgcccgacgaggtgctggggctcatctacgcgcagacggtggtctgggtggggagttttttctgccctttactgcccctgcttaacacggtcaagttcctgctgctttactacctgaagaagcttaccctcttctccacctgctccccggctgcccgcaccttccgggcctccgcggcgaatttcttttaccccttggtccttctcctgggtctggccatctccagcgttcccctgctttacagcatcttcctgatcccgccttctaagctttgtggtccattccgggggcagtcgtccatctgggcccagatccctgagtctatttccagcctccctgagaccacccagaatttcctcttcttcctggggacccaggcttttgctgtgccccttctgctgatctccagcatcctgatggcgtacactgtggctctggctaactcctacggacgcctcatctctgagctcaaacgtcagagacagacggaggcgcgagaataaagtcttcctggcacggcgcgctgtggcgctgacctccaccaaaccggctctttgacccccgcaacccacgtccccgctttcagaccccaggcccatttgtaagccctaaggtcaccacattctggtaaactagggagaactggaagaaagaatcccaccgcccctttccaagcttttgggtaattctgggaagaatttccaaggggcccccttttcgacgtgccaaaagtttcccctgggactttcttcccgggggggaaatccttttccctttgggggaatccccccgttaacacataat

SEQ ID NO: 169140 - DNA, 273 bp, Homo Sapiens
tcagtcggtaccagcagtacgctcatcaactacatggcaagttgcatatcggggagtcctgaatagccctgtgaaggctgttcgtgacacgctcatcacccagtgtgcccagatcctggcctgttacagaaagaactgtgctagcccctcctctgcaggacagttgatccttcctgagtgcatgaagctactcccagtttacctgaactgtgtgttgaagagtgatgtcctgcagccgggagctgaagtcactactgatgagcgttactgctg

SEQ ID NO: 169141 - DNA, 805 bp, Homo Sapiens
gatacgactcgagctagtaccgtctcatcttctgacatccatataccagcagctcacatcattcacacagttacattggtttgccctatgcggaccataattatggtgctcgtcctcctccgacacctccggcttcccctcctccatcagtccttattagcaaaaatgaagtaggcatatttaccactcctaattttgatgaaacttccagtgctactacaatcagcacatctgaggatggaagttatggtactgatgtaaccaggtgcatatgtggttttacacatgatgatggatacatgatctgttgtgacaaatgcagcgtttggcaacatattgactgcatggggattgataggcagcatattcctgatacatatctatgtgaacgttgtcagcctaggaatttggataaagagagggcagtgctactacaacgccggaaaagggaaaatatgtcagatggtgataccagtgcaactgagagtggtgatgaggttcctgtggaattatatactgcatttcagcatactccaacatcaattactttaactgcttcaagagtatccaaagttaatgataaaagaaggaaaaaaagtcggggagaaagaacaacacatttcaaaatgtaaaaaggcatttcgtgaaggatctaggaagtcatccaagagttaagggttcagctccagagattgatccttcatctgatggttcaattatggatgggagacaaagatcgaagcatggatggactcgatatgaagaacgctaatacaaccagctacatgaggatcagaagatgaga

SEQ ID NO: 169142 - DNA, 214 bp, Homo Sapiens
agtttattgtctatttcagttattacacttttcatttgaagcatctcattgtaagccagtcttaacccttctctcacactttgcttggctgtttctcaggtagaactcagtaagtctggtagcctccaggactgccgcttagattattaaacaacatgtcagtggttggaagagtcaatgttattttgatttttctgttttgttttgactgagc

SEQ ID NO: 169143 - DNA, 220 bp, Homo Sapiens
caagtcggtacgctgctggccttacgcgctcggcctcccgccgcagagtctcgatgtagccagcaaacaggagctccaggttactctggcagcactcgcagttttggtagaactgcagctttgtctccagcagcttgttctgctgctccaggaagcgcaccttgtcgatgaaggccgcgaatctgctgttgagggacttgatctgctccttctcctcctg

SEQ ID NO: 169144 - DNA, 1038 bp, Homo Sapiens
  misc_feature (858)..(917): n is a, c, g, or t
  misc_feature (968)..(968): n is a, c, g, or t
accaaaagtcttcaagccacgagcggagggcattcctgcaggccatcttggagcatgaggaggaaaatgaggaagaagatgaagtaccggacgatgagactctgaaccaaatgattgctcgacgagaagaagaatttgacctttttatgcggatggacatggaccggcggagggaagatgcccggaacccgaaacggaagccccgtttaatggaggaggatgagctgccctcctggatcattaaggatgacgctgaagtagaaaggctcacctgtgaagaagaggaggagaaaatatttgggagggggtcccgccagcgccgtgacgtggactacagtgacgccctcacggagaagcagtggctaagggccatcgaagacggcaatttggaggaaatggaagaggaagtacggcttaagaagcgaaaaagacgaagaaatgtggataaagatcctgcaaaagaagatgtggaaaaagctaagaagagaagaggccgccctcccgctgagaaactgtcaccaaatccccccaaactgacaaagcagatgaacgctatcatcgatactgtgataaactacaaagatagttcagggcgaacagctcagtgaagtcttcattcagttaccttcaaggaaagaattaccagaatactatgaattaattaggaagccagtggatttcaaaaaaataaaggaaaggattcgtaatcataagtaccggagcctaggcgacctgggagaaggatgtcatgcttctctgtcacaacgctcagacgttcaacctgggagggatcccagatctatgaagactccatcgtcttacagtcagtgtttaagagtgcccggcagaaaattgccnnnnnnnnnnnnnnnnnnnnnnnnnnnnnnnnnnnnnnnnnnnnnnnnnnnnnnnnnnnntcagagtccgaggcaaaatcagtcaaggtgaaaattaagctcaataaaaangatgccaaaggccgggacaaaggggaaggcaagaaaaggccaaattgaggaaagccaacctgttgtggcg

SEQ ID NO: 169145 - DNA, 389 bp, Homo Sapiens
  misc_feature (200)..(200): n is a, c, g, or t
  misc_feature (233)..(233): n is a, c, g, or t
  misc_feature (270)..(270): n is a, c, g, or t
  misc_feature (357)..(357): n is a, c, g, or t
  misc_feature (374)..(374): n is a, c, g, or t
ataattaattggaagccagtggatttcaaaaaaataaaggaaaggattcgtaatcataagtaccggagcctaggcgacctggagaaggatgtaatgcttctctgtcacaacgctcagacgttcaacctggagggatcccagatctatgaagactccatcgtcttacagtcagtgtttaagagtgcccggcagaaaattgnccaaagaggaagagaatgaggatgaaagcaatnaagaggaggaagaggaagatgaagaagagtcagagtnccgaggcaaaatcagtacaaggtgaaaattaagactcaataaaaaagatgacaaaggccgggacaaagggaaaaggcaagaaaaggnccaaatcgaggaaaagnccaaacctgttagtg

SEQ ID NO: 169146 - DNA, 245 bp, Homo Sapiens
gcatcagctatagaatgacgaaaatgagcgcattggcatgggataagaatggactaaagtatagagcagcccatgtaattcagtgtggctttagtaagtggtatccagatacctgtctatacttggtaagactcatggtgcctgcctttttttacagggaaaatgacagcaacttcccctcattcttttgactaggtttgtgaggatagaatgtgaccagaggaaaatagttttggtaaagacaa

SEQ ID NO: 169147 - DNA, 854 bp, Homo Sapiens
gaatatgttcactggctaacacttccgattcaggaagttcttcaggtacggggaggaggtgaatcttcactagacatcacgatctttcttcagcaccctgaatgctgttgttcctgctatacttattgtctagcacatggacacttggcaatactttccctagtagaaatgctttcagtaactagtggcagcagaaactgtggcacttgctgttgaaatattagttttattctgggtcacagcaccatcagagtttctttcatctgagtctgagtcatcagagtgaagtggattagtaaaactgaggggtgttctgaagagtggtgaagtgttatcatgatccacaagatcaggtgtttcaacttgtgttgcaggacttggtgttaaactcacagttttcctagtttgatagttgatatctgaggaattgccttcagataaatcaggtatgggtatggcattttcaggtccatgaaatgaccacgttacatgtcctttctcatcaagaggcaagcggtctggccttggaggtgtgtctgaattctgggattcttctggtggagtaactgaaactttgtttgattgtgttacactgcagtccacacaagaattctgggaagtatcaccgacatttagatctgaacttaattcctgtggcttagagattttatcagctatacaaggtgaagcagatttaattttaattgcatgtcccctattcaaaagtgtgttcccatcaaaactttttggtccctcttggagagggaccttcttaatctcaaaacttaaatttcgttccaattttttatctatctgttcaattgttgattcatttttccctggaagttccgttg

SEQ ID NO: 169148 - DNA, 926 bp, Homo Sapiens
  misc_feature (26)..(26): n is a, c, g, or t
  misc_feature (38)..(38): n is a, c, g, or t
  misc_feature (69)..(69): n is a, c, g, or t
  misc_feature (83)..(83): n is a, c, g, or t
cttttatttatattctatatttttgnaatttcagtagntaaaatttgttaacaattttaaaagccaggntaacacctaccagntccagttagcatgatttgctttcagaagtgagctgggttttccaaagtggtataatgtgtgtactgtatattttaacaaagtaatatttttgtattgcatttttctattaaaaaattaacagttaatgtttcagtcaatgtatgatctgtagcatttcacaaataatgtttgctttgaaccaaaatgctcagtgcctatcaacatttggactcaagcatcaacaccaaattattcctcccttctcgtataaatagagtgactatccacaggagaaaagtgtgtcctttagtattagaggagataggcagagaagtcttgcttagttccttcgtgcagcttcttgcccctgttgacgtggaatgctgtgtctgctttagcacgcacgctccgaatgactcctggtgctaggccatgctggctgctgtcactgagcgggactcaggccaagaggcgtgacctcgggccagcctgtctgttgtgcagacgcctcctctgcagaacgcatcagtttctattctgcagttgcagagccagccccgcgtgagaacgctgcataatgagtgcacaccatcatgtcaaggtgcatacttagtgagcgccatcctgctgaacgtgtatttcagtgtttcacttactggacggataacaagaaaaaaatcctaacacaggcagtcaccagaaataaatgtctcagcactttacagatgactaaaaatgttaattttatgacttagccaaatatgttctaggttgcatatatcccccatgtgaaagtgatttcttcccaagcttctcaaactgttagctgctgtctgacttcatcaataaagtatttttatttt

SEQ ID NO: 169149 - DNA, 573 bp, Homo Sapiens
tgagtgtcccctgaacattcgtgtcacctcggctacgtctcgcacagagcgctcacctcactgcagctgctggtagagctcgcggtcgatgaccctgctctccagcagctcggcggctggcaccaggctgcgcaggccctcaaagcaaagccggcccttctgctcctgctcctccaccaccgtgatgatgatcttgatgatcttctccactgtgatccggcccgtgcggaactgccgcagcaggtcccgccgctgctctgccgtgaagtattccgagttgatgatctcccaaatggtcaccgtcttgccctggaacttgccgaacggcgcagacacggtggccttctcaaagacgtcccgggcctcggagtcagtgtagaccagctccccgcccttggcagccttatccgtgagtggcagaaggcacaggcccgtctcggggtcctccacgcagcgctccagtagctgcaggtacgtgaggttctcgtgcgtgttggggtcaaagaagcccttggtgtcgtcgctggggtccgccaggacgcggttcatctcctcgtcgaagtagccgcgccg

SEQ ID NO: 169150 - DNA, 321 bp, Homo Sapiens
cagcagtaacgctcatcacaaggtgacagaactccagcctcgtgtggtgccccaaacccaggagtcccagcccgacagcaacctctgtggcagccacctggccttcagctctgccccagcccagggcttgctgaggcccatccttttcctgcctctgggcctggctctgggcctcctctccccatggctcagcgagcactgagctggccctacttccaggatggatgcatcacactcaaggacaggagcctggtccttcactgatggccatttgacccagggcctgacttgaccactccttccatcagactggtacgacta

SEQ ID NO: 169151 - DNA, 508 bp, Homo Sapiens
acctcgcttagtgctccctcacctcgcttagtgctccctggaggcatagctggaggccagagtgtacacaccaagcctgttgcgggcccccaacaagcatctcccccagctcaaaatgcccgtcaaggtaccagagaccctcccacagggcaaggaagagtgggccccccagagtcacccctggcaggcgtccttgcccccctcccacatagccagcacacaccatgtcctcttggacaaagtgcggctcctcaggcttggcgtcgatgttgtacaggcagttacaactctcacgactgatcagaggcacctcgagttgctgcagtggcttgggcgtcaggaggctcactgagggggccacatgaccccagccagtgacagtgcagtggaggccgttggggaaggaggcgttggctgcagggaggcagatgggcccggatgtagcgggagaaggtgatgggtctgctgagttggaggagtgcaatgtcgcccaaggagcactaacgag

SEQ ID NO: 169152 - DNA, 1199 bp, Homo Sapiens
cactcctcaactagcagacccatcaccttctcccgctacatccggcccatctgcctccctgcagccaacgcctccttccccaacggcctccactgcactgtcactggctggggtcatgtggccccctcagtgagcctcctgacgcccaagccactgcagcaactcgaggtgcctctgatcagtcgtgagacgtgtaactgcctgtacaacatcgacgccaagcctgaggagccgcactttgtccaagaggacatggtgtgtgctggctatgtggaggggggcaaggacgcctgccagggtgactctgggggcccactctcctgccctgtggagggtctctggtacctgacgggcattgtgagctggggagatgcctgtggggcccgcaacaggcctggtgtgtacactctggcctccagctatgcctcctggatccaaagcaaggtgacagaactccagcctcgtgtggtgccccaaacccaggagtcccagcccgacagcaacctctgtggcagccacctggccttcagctctgccccagcccagggcttgctgaggcccatccttttcctgcctctgggcctggctctgggcctcctctccccatggctcagcgagcactgagctggccctacttccaggatggatgcatcacactcaaggacaggagcctggtccttccctgatggcctttggacccagggcctgacttgagccactccttccttcaggactctgcgggaggctggggccccatcttgatctttgagcccattcttctgggtgtgctttttgggaccatcactgagagtcaggagttttactgcctgtagcaatggccagagcctctggcccctcacccaccatggaccagcccattggccgagctcctggggagctcctgggacccttggctatgaaaatgagccctggctcccacctgtttctggaagactgctcccggcccgcctgcccagactgatgagcacatctctctgccctctccctgtgttctgggctggggccacctttgtgcagcttcgaggacaggaaaggccccaatcttgcccactggccgctgagcgcccccgagccctgactcctggactccggaggactgagcccccaccggaactggggctggcgcttggatctggggtgggagtaacagggcagaaatgattaaaatgtttgagcac

SEQ ID NO: 169153 - DNA, 1024 bp, Homo Sapiens
ttaccggtcggaagccgcgtgtgatatcgtcgacccacgcgtcggggagaaggtgctgatgcaggagcttgtgaccctcattgaggcagcgcaacgctatcatcaactgcctggatgaggaccggcagagggaggaagaggaagacaagatgttggaagccatgatcaagaagaaagagttccagcagggcaggctgaacctgagggcacagcacagcaaggggaagttcaagaccatgaagatgttgaaactgctaggaaacaaacgtgatgccacagagcaagtcccccagagacaagagctaacagcacgagaagccagttggggactgcacccctccatggagcagctcctgggctgtgctctgtttgaagtgggtgcgccctgactccacctcagatcagtcaggaggaagatgacataaggggagggatccatctggggtgatggcctctatcctacactcagggaacctctgacgtgctctgggacacaaagaactctctatgatttctatatccgagaccccaggcagcggatgattcagaacctgaacaaaaactgaattctgatgacatgcgggatgatgtgacggacccaaagggagcaaaatagggatacaccagggataccagggaaggaaggcgacatgactgaagcaacattacagaacacatacaaacacttgacccaagaacacatgaccaatgaagcatcattgagaaatgggatatcacgacatacaagggtatcatgacttcatatcaaaaggacaagggccaaagagaaaagtgagaaaaagatgggagacaacaaattgggagttatacataatacagtgagacaaatacaagcatggtagaatacttgaagggtactcaatggatcatacaattggttaattgatgcaggtggtaggcacatatgggaataatagaagataataacacatacaatatcaaggaaaaattagtggatattatatggcagatattaacaagtatataaatagttataaaagta

SEQ ID NO: 169154 - DNA, 988 bp, Homo Sapiens
  misc_feature (704)..(738): n is a, c, g, or t
  misc_feature (833)..(850): n is a, c, g, or t
gcctgggtggcgattcggacgaggccccccggccggtcccgcacggctccgggtagccatggaggaccccacgctctatattgtcgagcggccgcttcccgggtaccccgacgccgaggccccggagccttcctccgctggggctcaggcagcggaggagccgtcgggggccggctcagaagagctgatcaagtcggaccaggtgaacggcgtgctggtgctgagcctcctggacaaaatcatcggggccgtagaccagatccagctgactcaagcacagctggaggagcggcaggcggagatggagggcgcagtgcagagcatccagggcgagctgagcaagctgggcaaggcgcacgcaaccacgagcaatacggtgagcaagctgctggagaaggtgcgcaaggtcagcgtcaacgtgaagaccgtgcgcggcagcctggagcgccaggcggggcagatcaagaagctggaggtcaacgaggccgagctgctgcggcgccgcaactttaaagtcatgatctaccaggatgaagtgaagctgccggccaaactgagcatcagcaaatcgctgaaagagtcggaggcgctgccagagaaggagggcgaggagctgggcgagggcgagcggccccaggaggacgcagcggcgctggagctttcgtccgacgaggccgtggagggttgaggaagttcctggcggnnnnnnnnnnnnnnnnnnnnnnnnnnnnnnnnnnnttgcgtttcgcggtcccatttccaccacgtctccctcccaggagcaacaccgctttacgccttcccggccgcccccggcccccttttctgtaccnnnnnnnnnnnnnnnnnngccccctcccgctccaccctttggttcgatcgccgggcggaccccgtctgctctataatcgccgcgaactgcgccgccgttgtccgccgcgcgttaggtgggcttcctacacgccgtattccccgttcccgcgccact

SEQ ID NO: 169155 - DNA, 842 bp, Homo Sapiens
ggggtctctggccggctgggcgcgggcgactgctggcgaggcgcgtgggaccttacgctggttccccttcgtctcctctcccggcccgggccactagagagttcgctgacgccgggtgagctgagcctgccgccaagatgccggcctattttcagaggccggaaaatgccctcaaacgcgccaacgaatttcttgaggttggcaaaaagcagcctgctctggatgtactttatgatgttatgaaaagtaaaaaacatagaacatggcaaaagatacacgaaccaattatgttgaaatacttggaactttgcgtggatcttcgcaagagccacttggcaaaggaggggttataccagatataagaacatttgtcaacaggtgaacataaaatctctggcaggatgttgttagggcatatttgaaaatggcagaggaaaaaaactgaagctgctaaagaagaatctcagcagatggtcttagatatagaggatctagataatattcaaactcctgagagtgttctcctaagtgctgtaagtggtgaagacactcaggatcgtactgacagattacttttaactccatgggttaaatttcctgtgggagtcttacaggcagtgtttggacctttcttagaaacaattctagagtagagcgcctgtaccatgatattgcccagcaagctttcaaattctgcctccaatacacgccgtaaggcttgaatccggtaaactgtgtgaccattttgagaatgcacttatcgccgattcaccgccaccattaaccaaagtacgggaattcattcttaataatccagagagcccggccctgcattttggaaa

SEQ ID NO: 169156 - DNA, 250 bp, Homo Sapiens
cgtcggacgcttacgcgcatccttcacatagtagaagatgagagtcctgcaaagcagaattttttcagcatttgattgaagaccggacagaggctgcattttcttactatgaattttggcttcatgttcagcagcagatttgtaagtgaagtagaataaaattgaataagaaaaagatctataacctaggtaaagcataatctgtcagagaagcgcgtaagggccagcagacgcgcgtaagggccagcag

SEQ ID NO: 169157 - DNA, 330 bp, Homo Sapiens
tcttcatcactgcttggtgctgtgtattccaggtcctgagcaggcatctcctggggagcatgcagttcaccggccattgccagcccaggatgggaccctccaggtggtggggcaggtgcttccatagcccctcctggctccttggcttcccactctgccaagcttttccagcagcattgactctcctggggctgaatgtgacaggcttgtggtgttcctgtgccactccacaatggcctcctttaagagggcccccctctcactccctcctctccccacagaccctacgtccgctccaagggccggaagttcgcgcgtaagggccagcag

SEQ ID NO: 169158 - DNA, 485 bp, Homo Sapiens
gccagacaagaagatcgtgcggacggtgaccatatgatcatccgcacgctgagcacttttaggaactacatcatggacttccaggttgggaaggagtttgaggaggatctgacaggcatagatgaccgcaagtgcatgacaacagtgagctgggacggagacaagctccagtgtgtgcagaagggtgagaaggaggggcgtggctggacccagtggatcgagggtgatgagctgcacctggagatgagagtggaaggtgtggtctgcaagcaagtattcaagaaggtgcagtgaggcccaggcagacaaccttgtcccaaggaatcagcaggatgtgtgggccaggatccccctctttgcacagcatgaggcaaaaatgtccagccacccccaggcatctgttagcagagtctgtctcttggctttgtcacttttccttttcttaaaacaaagccatgccaataaagtgatctgtgttcgaaaaa

SEQ ID NO: 169159 - DNA, 322 bp, Homo Sapiens
tgattgcggtcgatagtccaatccaatatgggctcagtaaacacttgctgccatcctgaagattcttcgattctgtaacacgacagcaaaatgggcatatgcagctacaatccagttgtgatggccagctactattagcacctttcgtggatccacaggaaatcctagcctaacagtttcttctcccgttccagagagaacaggctgtgtaccatttccccgggcttcaccttctgtagaatttagaccattcctagaatcagcagatctgactgtgttgtttattttacgactaggaatacctggtgggggcaagtattta

SEQ ID NO: 169160 - DNA, 615 bp, Homo Sapiens
attaagcgctgacattgaaaaagcccagacaggtgttctcgaagccggagctccatctccaggcccccaggatacggtcaacatcctactccccggtatctgcagcatgtgagctgcatcccagcttccttagtcttcaccatctggtaggtcacaatggtgcatacggtgctgcctgagcccatgtcatagaacatgatattctgggcagtggtgttaatatctttccggcggaagacaccatagctgagggcagtggcggtgttgtcattgatgagctgcagcactttgaggccagccatacgagcagcctgcagtcacagctcggcgctcggcctggttgaagaagactggcacggtgatcactgcatccttgatgggctgctctgccaaatcttcagctagagaacgagaataattgagaaccatgcccaacacttcctcaggtgagaactgcaactgcgagctgatctgaaagtgcacagtcatgcctctgtggtcagaaagtcaactcagtgctccaggaagcgggcctggtaaagagctacatggggtttatctgccagcttcctaaaaggaagttgctgtagacggaggatactcatagaacagctc

SEQ ID NO: 169161 - DNA, 1895 bp, Homo Sapiens
  misc_feature (243)..(257): n is a, c, g, or t
  misc_feature (1297)..(1306): n is a, c, g, or t
  misc_feature (1516)..(1516): n is a, c, g, or t
  misc_feature (1589)..(1589): n is a, c, g, or t
  misc_feature (1666)..(1666): n is a, c, g, or t
gggctcgccgccgtgtgtgctgcgctgagtgagttatgaggtgcctttcccggaaccctcctctcgcctggacccaagagaggcgacagctgtggctggggctcttggtttccagagggtctggactggtttgggtgctttaaaatagatatttagttcagtggtgcttatgggggagatgggactagaacttaagtgtgagacttgggtggatgggaaagttaaatattggtctcttcaagnnnnnnnnnnnnnnngctttgttaccacttgtcactgtctccatgttaaaatgccaaaaatgatgtagttgttgttgcttttttccctattttccaccccagtcgctccttaccgtgactcctgcccttggagggcatgtagcagtgtctgtcctgccagtcccaaggccctgtgggaggagactggcctgcatctctctaagacttagtctgacgccacgcgcatctcttgttctgtgttcaatcagtagtccaggggagaagcttctgctacttcagagctttgctaaactaacctaatttgtccaaatcaccccaaaaccaccatctctgacgtaagcttccatgcgacagcctgatccgtttccctggacaggtctctttcctggaatgcagcccaggcacctgtgctcctggcacccttgaggtctctcctttgagccgtggtcaccgagagggttgaggacgcagcacccgaggtcccagcctttgcaggagcctccctgggcttagctggacttagatcttcggtggcctcatgtaaacgtggcagccagcctcttctagaaccctagcccagggactggagcaggaaagggaccttcaaagtgaagactgccttgtcccgcagctccttctggcttagattgaaacatgggcttcctaatgggttaaatcctttaaaacaaggagttgtgggggaagggtgtcgtgcactcctagagaaaggtacacagttgcccggttgggaatgtgcttggcgctgaccctgcgggcatctgactggtcttccagctcaggaaaaagaatttgaaagaggcttagcgtgaaggggaatcaaagaggaggttgtgatttggtcgaaggtgcctggtttagtgctgtaattgtcttattattttttttatatatatatttcttggagtaaacattttaaataaacaacaacattgtctactgaaaaactgacaacacccccatcaaaccaccatctcttctatagtgcacgcccctatacacaatcctttaccaactcaccccattcaccaccaagnnnnnnnnnntggcgacccaaccgttacgccccaacgggaatctcctctcttaaacccttacccccttagcgtattcctttccctccgtcttctatacccccacacacggccccctttattatcatctcccggcataccccccagtgaaatctttaaccacccgccgcctccaaacatctcacactataaattcaccccgcacccgcccattcccgtganagacccagcgccatcgaacgcgttcgcaatatagccccacactaaggacggtcacccctcccacccaaagccnctccaacccaaatgccgagagatttcccgctgaagcctgacggagtacgccccgcgcggcacgcaatgccacgctgnatacacccgccggcatacacgcacgctcgagtcaccaatcacccctcgcttctctctcgccctctatacaactcaacgtcagacatcatcctctcaccagttctccccctcgtattacaacaccgccgcactcccccccaactcaattgcccgcgtaaggagcctcaacacacccgccattattctaatccacgcaacccacatacaccccgacctgactatacctccc

SEQ ID NO: 169162 - DNA, 678 bp, Homo Sapiens
gggaacggcgcattcggcaagagctgcctttcatggccacagagaacatcatcatggccatggtcaaagctggaggtagccgccaggattgccatgagaaaatcagagtgctttctcagcaggcagcttctgtggttaagcaggaagggggtgacaatgacctcatagagcgtatccaggttgatgcctacttcagtcccattcactcccagttggatcatttactggatccttcttctttcactggtcgtgcctcccagcaggtgcagagattcttagaagaggaggtgtatcccctgttaaaaccatatgaaagcgtgatgaaggtgaaagcagaattatgtctgtagagttggaagagaattaaacgaaaatcattgttaattgctgaggcatgaacacagaagacaacccgaagggcgccagcggagagggagaggggaacagggagcgggcgcgggtccggccgtagggagccgaagaacagaagacgcttgtggggccccccgggcccctgaaaggtttttcaaaaccatttcgttgggccgcgcgggccccataagggaaggggaccatggcccaagcttgtttccaaggaaaaacctggcccatggactaggggcttggaattcctcacccaataaaaaaagcccccgggggggaaacgcaggggtttct

SEQ ID NO: 169163 - DNA, 930 bp, Homo Sapiens
ttgataatcattgatcgccggtgactgggtgtccacatgcagggggcagtccttcgtcgtggcgggagccatcgtggcagccatggggatagtgtgctttctcttcctcattgaacatccgaacgacgtcaggtgctcctccaccctggtgacgcactcaaaagggtatgagaatggtacaaacagattgagactccagaagcaaatcttgaagagcgaaaagaacaagcctctggacccagagatgcagtgcctgctgctctcagatgggaagggctccatccacccgaaccacgtcgtcattctccccggggacggtgggagtggcacggccgccatcagcttcacaggggccttgaaaattccaggcgtgatagagttctcactgtgtctgctgtttgccaagctggtcagctatactttcctcttctggctgcccctgtacatcacgaatgtggatcaccttgatgccaaaaaggcgggggagctctccaccctgtttgacgtgggcggaatctttggtgggatcctggcaggtgtgatctcagaccgactggagaaaagggcctccacctgcggcctgatgctgctgctcgcggcccccacgctctacatcttctccaccatcagcaagatggggcttgaggccaccatcgccatgctgctgctcagcggagccctggtcagtgggccctacacactcatcaccaccgccgtctccgccgacctggggactcataaaagtctgaaaggcaacgcgcacgccctctccaccgtgacggccatcattgacgggacgggctctgtagaagcagccctgggccccctgctggctgggctcctctccccgtccggctggagcaatgtgttttacatgctgatgtttgcagatgcctgtgccttactgttcctgatccgcctcatacacaa

SEQ ID NO: 169164 - DNA, 763 bp, Homo Sapiens
gggcttctgcgacggcgcggacctggagcttccgcgcgggggcttcactctcctgtaaaacgctagagcggcgagttgttacctgcgtcctctgacctgagagcgaaggggaaagcggcgagatgactgaccgctacaccatccatagccagctggagcacctgcagtccaagtacatcggcacgggccacgccgacaccaccaagtgggagtggctggtgaaccaacaccgcgactcgtactgctcctacatgggccacttcgaccttctcaactacttcgccattgcggagaatgagagcaaagcgcgagtccgcttcaacttgatggaaaagatgcttcagccttgtggaccgccagccgacaagcccgaggagaactgagactctgccttaccaccgcagtgcggggcacctctcccagcgtttctccggtttgccaatcctcttaagtattcctgtctccaaaggaccggctctccatggctcctgcgcctcgtgctttccgcgtacagaagtgcttgcccggggagtcccgcctgacctgccttcatgtggacccttagaacagcactgggagaccagcaggactcctgagaactgtgctggtggagaggtcctagagccggcgagcgtttgagaagagggcatggcgctggagtgagatgggatttggcgtctcgtttttggctaattgattgtcattggctttttccataaagtttagaaactcgtttcaagtacaaataacacaaaaaaagagg

SEQ ID NO: 169165 - DNA, 548 bp, Homo Sapiens
  misc_feature (20)..(20): n is a, c, g, or t
  misc_feature (462)..(462): n is a, c, g, or t
  misc_feature (491)..(491): n is a, c, g, or t
  misc_feature (506)..(506): n is a, c, g, or t
  misc_feature (515)..(515): n is a, c, g, or t
  misc_feature (520)..(520): n is a, c, g, or t
gtgtaaaacgctagagcggncgagttgttacctgcgtcctctgacctgagagcgaaggggaaagcggcgagatgactgaccgctacaccatccatagccagctggagcacctgcagtccaagtacatcggcacgggccacgccgacaccaccaagtgggagtggctggtgaaccaacaccgcgactcgtactgctcctacatgggccacttcgaccttctcaactacttcgccattgcggagaatgagagcaaagcgcgagtccgcttcaacttgatggaaaagatgcttcagccttgtgggaccgccagccgacaagcccgaggagaacttgagactcttgccttaccaccgcagtggggggccaccttcttcccagcgttttcttccggttttgccaatcctcttaaagtatttcctgtcttccaaagggaccgggttttccatgggctcctgcggcttngtggttttccgcgttacagaagtgttttnccgggggagttccgnttgaactgnctttnatgttggacctttaggaacagcatttgg

SEQ ID NO: 169166 - DNA, 311 bp, Homo Sapiens
tgatcaagcgtcggcaaccgtgcaacccagctcagcgctgcgcaccagtggctcctggctgcagagccaggcctctgccatccctgcatctcttccaaacacaagcacctcccaaaccagctgtaagccagtccatcttctccggccacttctcagctgtctcctggcgccgtgcctgcagctgagacagcttctctgagatctcctcggccgcatagtggctcctggccagcagctccgtgccccatgtcgatgcaggaggagaagcggtctgcccgggcctctatctcggccgtatgcctgccgaagcg

SEQ ID NO: 169167 - DNA, 941 bp, Homo Sapiens
  misc_feature (876)..(876): n is a, c, g, or t
tgatcaagcttcggcaagaacaaccagttccaggccctgctgcagtatgcggaccccgtgagcgcccagcacgccaagctgtcgctggacgggcagaacatctacaacgcctgctgcacgctgcgcatcgacttttccaagctcaccagcctcaacgtcaagtacaacaatgacaagagccgtgactacacacgcccagacctgccttccggggacagccagccctcgctggaccagaccatggccgcggccttcggcctttccgttccgaacgtccacggcgccctggcccccctggccatcccctcggcggcggcggcagctgcggcggcaggtcggatcgccatcccgggcctggcgggggcaggaaattctgtattgctggtcagcaacctcaacccagagagagtcacaccccaaagcctctttattcttttcggcgtctacggtgacgtgcagcgcgtgaagatcctgttcaataagaacggagaacgccctagtgcagatggcggacggcaaccaggcccagctggccatgagccacctgaacgggcacaagctgcacgggaagcccatccgcatcacgctctcgaagcaccagaacgtgcagctgccccgcgaggccaggaggaccagggcctgaccaaggactacggcaactcacccctgcaccgcttcaagaagccggggctccaagaacttccagaacatattcccgccctcggccacgctggcacctctccaacatcccgccctcagtctccgaggaggatcttcaaggtcctgttttccagcaatggggggcgtcgtcaaaggatttcaagttctttccagaaggaccgcaagatgggcattgattccagatggggttccgtnggaggagggcggttccagggccttcatttgaccttgcacaaccacgacttgggggagaaccacca

SEQ ID NO: 169168 - DNA, 857 bp, Homo Sapiens
  misc_feature (38)..(38): n is a, c, g, or t
  misc_feature (63)..(63): n is a, c, g, or t
  misc_feature (187)..(187): n is a, c, g, or t
aattgtcccttgtaacccgcaaggttaaacaaagttgnaactaaatttaatttttttaaaaancaggtaaactgattctctctttaaaaaaataaaatctctggtctgctaaggtcacttcaagctgtttttaaagtggcttttctctggaatgatggaagttgtcgccagggggcccggccgtggnggcctgtgcccctagatggtggacttggagaaggagacccgcaggtggtggttctccccgaggtcgtggttgtgcaggtcaatgagggcctggaccgcctcctccacggagcccatctggatcagtgccatcttgcggtccttctggaagaacttgaatcctttgacgacgcccccattgctggaaaacaggaccttgagatcctcctcggagactgagggcgggatgttggagaggtgcagcgtggccgagggcgggaatatgttctggaagttcttggagcccggcttcttgaagcggtgcaggggtgagttgccgtagtccttggtcaggccctggtcctcctggccctcgcggggcagctgcacgttctggtgcttcgagagcgtgatgcggatgggattcccgtgcagcttgtgcccgttcaggtggctcatggccagctgggcctggttgccgtccgccatctgcactagggcgttctccttcttattgaacaggatcttcacgcgctgcacgtcaccgtagacgccgaaaagaataaagaggctttggggtgtgactctctctgggttgaggttgctgaccagcaatacagaatttcctgcccccgccaggcccgggatggcgatccgacctttcacagttcgctaggatcctctaaatcagc

SEQ ID NO: 169169 - DNA, 1469 bp, Homo Sapiens
gtccagcctccatgaccgcacaaccagtactcgggagaaccaccactgcggttctctgctccaagtccaccatcttagacaccagaccctacggctcgtctccctggcgacaacttccatcattccagagaacactcacctgtcacaaccgctgatgcgaccttagcagaccagagcttttatttttcttaacgagaaatcagtttacctgtttttacaaaaattaactctagctcactcttgctcaacctgcggtgacatggacagctcaggctcttgctgactgtggcagcgtgagtccccggcctctacacccggggccagacccttggggccatgccatgctggtgcctgtgtcgggcgtggggcctgcagctgggcgccccgaccacgacttggcttccttgtgccttaaaaaacctgccttcctgcagccacacacccacccggggtgtcctggggacccaaggggtggcggggtcacaccagagagaggcagggggcctggccggctcctgcaggatcatgcagctggggcgcggcggccgcggctgcgacaccccaaccccagccctctaatcaagtcacgtgattctcccttcaccccgcccccagggccttcccttctgcccccaggcgggctccccgctgctccagctgcggagctggtcgacataatctctgtattatatactttgcagttgcagacgtctgtgcctagcaatatttccagttgaccaaatattctaatcttttttcatttatatgcaaaagaaatagttttaagtaactttttatagcaagatgatacaatggtatgagtgtaatctaaacttccttgtggtattaccttgtatgctgctacttttattttattccttgtaattaagtcacaggcaggacccagtttccagagagcaggcggggccgcccagtgggtcaggcacagggagccccggtcctatcttagagcccctgagcttcagggaaggggcgggcgtgtcgccgcctctggcatcgcctccggttgccttacaccacgccttcacctgcagtcgcctagaaaacttgctctcaaacttcagggttttttcttccttcaaattttggaccaaagtctcatttctgtgttttgcctgcctctgatgctggggaccccgaaggcggggcgctcctcctgtcttctctgtgctctttctaccgcccccgcgtccctggcccggggggctctcctaggatcccctttccgtaaaagcgtgtaacaagggtggtaatatttataattttttatacctgttgtgaaacccgagggccggcggcgcggttttttatggtgacacaaatgtatatttttgctaacagccatttcagggctcagtaatggtgacccgcggagccaccagggggaccccacgccacattttccggttgcccttaacccgatggggcttgtgaaccccgggaaaaaa

SEQ ID NO: 169170 - DNA, 950 bp, Homo Sapiens
  misc_feature (894)..(894): n is a, c, g, or t
  misc_feature (905)..(905): n is a, c, g, or t
acaacggcccggccccctttccccttaaagtttcagggggcttttaagataaggaccggggggcttcccctgtgccctgacccccctgggccggccccgccctgctctctgggaaactgggtccctgcctgtgacttaattacaaggaataaaataaaagtaccagcatacaaggtaataccacaaggaagtttagattacactcatacccattgtatcatcttgctataaaaagttacttaaaactatttcttttgcatataaatgaaaaaagattagaatatttggtcaactggaaatattgctaggcacagacgtctgcaactgcaaagtatataatacagagattatgtcgaccagctccgcagctggagcagcggggagcccgcctgggggcagaagggaaggccctgggggcggggtgaagggagaatcacgtgacttgattagagggctggggttggggtgtcgcagccgcggccgccgcgccccagctgcatgatcctgcaggagccggccatgccccctgcctctctctggtgtgacccccccaccccttgggtccccaggacaccccgggtgggtgtgtggctgcaggaaggcaggttttttaaggcacaaggaagccaagtcgtggtcggggcgcccacctgcaggccccacgcccgacacaggccccaccaaggcatggccccgagggtctggccccgggtgtggagggccgggaactcccgctgccacagtcaccaagagcctgagctgtccctgtcaccgcaggtgaggcaaggtgaactagatttaatttttttaaaaacaggtaaactgatttctctttaaaaaaataaaatctctggtctgctaaggtcatttcagtgttttttaaagtggcttttnttttgggattnatgggagttttttcgccaggggggccccggccttgggggcttttt

SEQ ID NO: 169171 - DNA, 1093 bp, Homo Sapiens
  misc_feature (52)..(52): n is a, c, g, or t
  misc_feature (122)..(122): n is a, c, g, or t
gctcccaagttgaaaggctgtggtgtaaaggccaacccggaaggcggatgcnagaaggcgggggaacaccgcccgcccccttccctgaagcctcagggcctccttaagataggaaccggggnctcccctgtgcctgaacccactgggcgggccccgcctgctctctggaaactgggtccctgccctgtgaccttaattacaaggaataaaataaaagtaacagcatacaaggtaatacccacaaggaagtttagattacactcataccattgtatcatcttgctataaaaagttacttaaaactatttcttttgcatataaatgaaaaaagattagaatatttggtcaactggaaatattgctaggcacagacgtctgcaactgcaaagtatataatacagagattatgtcgaccagctccgcagctggagcagcggggagcccgcctgggggcagaagggaaggccctgggggcggggtgaagggagaatcacgtgacttgattagagggctggggttggggtgtcgcagccgcggccgccgcgccccagctgcatgatcctgcaggagccggccagcccccctgcctctccctggtgtgacccccccacaccgtgggtccccaggacaccccgggtgggtgtgtggctgcaggaaggcaggttgtttaaggcacaaggaagccaagtcgtggtcggggcgcccacctgcaggccccacgcccgacacaggccccaccaaggcatggccccgagggtctggccccgggtgtggaaggccgggaactcccgctgccacagtcaccaagagcctgagctgtccctgtcaccgcagggtgagcaaggtgaactagatttaatttttttaaaaacaggtaaactgatttctctttaaaaaaataaaatctctggtctgctaaggtcacttcagctgtttttaaagtggcttttctctggaatgatgcaagttgtcgccagggggcccggccgtggggcctgtgcccctagatggtggacttggagaaggagacccgcaggtggtggttctccccgaggtcgtggttgtgcaggtcaatgagggcctggaccgcctc

SEQ ID NO: 169172 - DNA, 762 bp, Homo Sapiens
aatggtatgagtgtaatctaaacttccttgtggtattaccttgtatgctgttacttttattttattccttgtaattaagtcacaggcaggacccagtttccagagagcaggcggggccgcccagtgggtcaggcacagggagccccggtcctatcttagagcccctgagcttcagggaaggggcgggcgtgtcgccgcctctggcatcgcctccggttgccttacaccacgccttcacctgcagtcgcctagaaaacttgctctcaaacttcagggttttttcttccttcaaattttggaccaaagtctcatttctgtgttttgcctgcctctgatgctgggacccggaaggcgggcgctcctcctgtcttctctgtgctctttctaccgcccccgcgtcctgtcccgggggctctcctaggatcccctttccgtaaaagcgtgtaacaagggtgtaaatatttataattttttatacctgttgtgagacccgaggggcggcggcgcggttttttatggtgacacaaatgtatattttgctaacagcaattccaggctcagtattgtgaccgcggagccacaggggaccccacgcacattccgttgccttacccgatggcttgtgacgcggagagaaccgattaaaaccgtttgagaaactcctcccttgtctagccctgtgttcgctgtggacgctgtagaggcaggttggccagtctgtacctggacttcgaataaatcttctgtatcctcgcctccgtt

SEQ ID NO: 169173 - DNA, 499 bp, Homo Sapiens
  misc_feature (16)..(16): n is a, c, g, or t
  misc_feature (41)..(41): n is a, c, g, or t
  misc_feature (468)..(468): n is a, c, g, or t
aatttgaaaggaaagnaaaaaacccctggaaatttgaagancaaagttttcctaggcgaactgccaggtgaaaggccgtggtgtaaaggcaaaccggaaggcgaatgccagaaggcgcgacacgcccgccccttccctgaagctcaggggctctaagataggaccggggctccctgtgcctgacccactgggcgccccgcctgctctctggaaactgggtcctgcctgtgacttaattacaaggaataaaataaaagtaacagcatacaaggtaataccacaaggaagtttagattacactcataccattgtatcatcttgctataaaaagttacttaaaactatttcttttgcatataaatgaaaaaagattagaatatttggtcaactggaaatattgctaggcacagacgtctgcaactgcaaagtatataatacagagattatgtcgaccagtcgcagctggangtcacggggagccccctgggggcagaaggga

SEQ ID NO: 169174 - DNA, 741 bp, Homo Sapiens
ggagagcaacaatatgtggatcgagaaagatggagaggggataagactgagggagccactctaagagttctatatacccctggccacacggatgatcacatggctctactcttagaagaggaaaaggctatcttttctggagatagcatcctaggggaaggaacaacggtattggaagacctctatgattatatgaactctttaaaagagttattgaaaatcaaagctgatattatatatccaggacatggcccagtaattcataatgctgaagctaaaattcaacaatacatttctcacagaaatattcgagagcagcaaattcttacattatttcgtgagaactttgagaaatcatttacagtaatggagcttgtaaaaattatttacaagaatactcctgagaatttacatgaaatggctaaacataatctcttacttcatttgaaaaaactagaaaaagaaggaaaaatatttagcaacacagatcctgacaaggaaatggaaagctcatctttagtttcagattaaagaaagctttgttttattttgctttcagagaatggtatgttttcttaactataggttattttatagagaatataaaagtataaaacattaaaaataaccctagatatactttaaaataatgttatatttatgctaaaatatgtaaattacactatacaaccatatgataggttatttctctaaccttgtcttctaacgttttaccaaaaa

SEQ ID NO: 169175 - DNA, 556 bp, Homo Sapiens
gactagttctagatcgcgacacggcatcatcccatctctaatttcccctctgtcctccatccagcggcttcttccgcttcattctctaccataccacttgtgcatgcatgtgatgttctaataccaattgaagaaccgctgtaggtacctccctaataagatttctaaacctatagttagtgtgatcatgactttgtcaaaggcaagtctccacccataaccgttctcttgtattcctgttgcttgagctacattaagtagaatgtgcatgttgtagtcctatgatgatgtaaacttggtactacataatgacttgctccacacatgcagtaaactacataatgatgtactgggtaaactagaaacaaagaatgcatgcaggatctgtcgtagcttattaaagatgaaactgaattggaaaaatagctccattttttggtgcttgggaagcacagtgaccaaaaaagttgtatggctgcttattcattagtctttcctactgatgtcaaatccatggtacctagagttaaataaaattccaatgctcttactcttt

SEQ ID NO: 169176 - DNA, 359 bp, Homo Sapiens
tatcggaagtgtgtcattatcggggctatgtggagggagtcataattcatccatggctcttagcgacagttggggactcagaggatcgcgtgcatttagagaatgcgaggttatgggatagaaccccggacagaacagctctcatgtgtagagcacatcatttatcgaagggatgatgtctacaaagagcctctgaaatgtggagtttccaacaaggatatagagaaagaaacggcaaaggatgaagaggaagagcctcccagcatgactcagctacttcgaagaagaagagctgtcttgccacagacccggtatgtggagctgtacattgtcgtagacaaggaaagtcagtgcgtatg

SEQ ID NO: 169177 - DNA, 1042 bp, Homo Sapiens
ggggcgctccgccggtcccgttctgcaggtgggcgtcgccgccgacttaccaacaaccgggtcgggggctcccggaagtgctcttgcggcttactgcctggcacagctgtcattcttctctacagaagagcttctcctcatcaactggggatgattacagttcttcctaaaaaaggatggctgctctttttctaaagaggttaacactacaaactgtaaagtctgaaaatagttgcattagatgttttggtaaacacatcctgcaaaagacagcaccagcacagttgtcccctattgcttctgccccaagactctccttcctaattcatgcaaaagcctttagtaccgctgaagacacccagaatgaaggaaaaaagacaaaaaagaataaaacagcttttagtaacgttggaagaaaaattagtcagcgagttattcacttatttgatgagaagggcaatgatttgggaaacatgcaccgagcaaatgtgattagacttatggatgagcgagacctgcgactggttcaaaggaacaccagcacagaacctgcagagtatcagctcatgacaggattgcagatcctccaggagcggcagaggctgagggagatggagaaggcgaaccccaaaactggaccaaccctgagaaaggaactgattttgtcttcaaatattggacaacatgatttggacacaaagactaaacagattcagcagtggattaagaaaaaacacctagtccagattaccataaagaaaggaaaaaatgtagacgtgtcagaaaatgaaatggaggagatatttcatcaaatactccagactatgcctggaatagctacattctcatctaggccacaagctgttcaaggaggaaaagctttaatgtgtgttcttcgtgctttgagcaaaaatgaggagaaggcatataaagaaactcaagagacccaggaaagagacactttgaacaaagaccatggaaatgataaggaatcaaatgttctgcatcagtaattttaataaagaaaagcatgctctgagag

SEQ ID NO: 169178 - DNA, 298 bp, Homo Sapiens
tcggtcggtaccatacgcactgatttcccctggtgagtcctgagaactggacgtccagctgcctttgccagcagctttggcatttactgtgaagtgggtgggcttgccaagctcgacaccagtgcgactgaggccagggccctcggccttcaccttactggcgtcatgagagggctccaccttgactcggatggggctggtgggcgtggcctggtcagcaaagaggaccataatggtgtagctgccagccccccggggcgtgtacttgaccgtgaaggtgtcattgtcattgcgtatt

SEQ ID NO: 169179 - DNA, 449 bp, Homo Sapiens
gcatatcaggaaggtacggctgatgccgacaagaagggtcttagagttctggggaaggaaaggggctgcaactgccaccctcaccgttctccctacgggtctcttgatggtccccagtgactttctgtacccagcttcgcggggcttctcttagctagcaaacctggctttgggttctgaagtgctgggatctgagaatcctgtaccgaaatctaatcatggataatttctcatacatcataagaggagataattttatccttctatgttggttaagtgggaactttttgggaatcaagggtcccccattcctgtggtgctccggcccttggcagcagccgtaacaaaagccctttctcttatggttgttcaaggtgaccacaatcgtgccactctcacctggacttgggctctccccattgaacttcatgggaaagtcagtgcgtatg

SEQ ID NO: 169180 - DNA, 600 bp, Homo Sapiens
atgcagcaatatggagagaaaaggaattcctaacttccgagggaacacctatcaaacatcagaaagccattaggaaattattattggctgtacagaaacctaaagaggtagcagtcttacactgctggggtcatcagaaaggaaaggaaagagaaatagaagggaaccaccaagcagatattgaagcaaaaagagccgcaaccgcaggaccctccatcagaaatgcttatagaaggacccctaatatggggtaatcccctctgggaaaccaagcccctgtactcaaaagaagaaatagaatggggaacctcaggaggacatagtttcctcccctcaggatggctagccactgaagaaggaaaaatacttttgcctgcagctaaccaatggaaattatttaaaacccttcaccaaacctttcacttaggcattgataacacccatcagatggccaaatcattactggaccaggccttttcaaaactatcaagcagatagtcagggcctgtaaagtgtgccaaagaaataatcccctgcactgcaggccatgcatttcaatccctgtatctctaacctccttgttaagtttatctcttccag

SEQ ID NO: 169181 - DNA, 954 bp, Homo Sapiens
gaagtctacgatgccgtgaaaagaccttgctgcttggctaacacatctcaacccctctgcaaagcttctactgtcacagatgaagacatcaggaaacagcaagagcgagtacaccaaggtacgcaagaaatggaaacaagcactgatggcagacatcttgtcgcgagcagctgatacagaagagatgcatattgaaatggacagtggagatgaagcctaagaatatgatcaggtaactttcgaccgactttccccaagagaaaattcctagaaattgaacaaaaatgtttccactggcttttgcctgtaagaaaaaaaatgtacccgagcacatagagctttttaatagcactaaccaatgcctttttagatgtatttttgatgtatatatctattattcaaaaaatcatgtttattttgagtcctaggacttaaaattagtcttttgtaatatcaagcaggaccctaagatgaagctgagcttttgatgccaggtgcaatctactggaaatgtagcacttacgtaaaacatttgtttcccccacagttttaataagaacagatcaggaattctaaataaatttcccagttaaagattattgtgacttcactgtatataaacatatttttatactttattgaaaggggacacctgtacattcttccatcatcactgtaaagacaaataaatgattatattcacagactgattggaattctttctgttgaaaagcacacacaataaagaacccctcgttagccttcctctgatttacattcaactctgtatccctggggccttaggttttgacatgggaggtgggaggaagatagcgcatatatttgcagtatgaactattgcctctgggacgttgtgaggaattgtgctttcaccagaatttctaaggatttctggcttaaatatcacctagcctgtggtaattttttttccct

SEQ ID NO: 169182 - DNA, 476 bp, Homo Sapiens
catacgcactgactttcccttcccacctttcccccactcccttggaggaactgaagttggggttgaggagagccagatggctggagtgggtatttgaaggtctttctgtcacctgttcagtgtggtctgccccacccctgctgaccaagactgactgaaatgtaaaataatacagaccaactcacactcagaaagctggcacatttttgaaagcccaagtgtgggtaagtgcgtggaacaacgataattcacactgctttatgagtagaaattgtgagaaatattgcgccaggcaatttgcaaaatcttggaaggttgtgtgcacttaaccacccagcaactactcctggatgcatcctagagaagtgccatgtgaacagagaatgattttaagacttcactgaagtattgtttaggtagcaagattgagaaaagcctgcatttcatcagcagaagaatggataaataaatggttg

SEQ ID NO: 169183 - DNA, 702 bp, Homo Sapiens
aagccatcactacccatctcatccttcccaactagctgggattacgcgatctgggccatcatgcctgagtaaattcttaataaatgcttctgaatggatggacggaagtatgaatgaatggcgaagtgaatgaaggaatcaacttctttctccttagtgggtgtgtgtgggcacagcaggctgaccctcgcctgtcagcgaacccaccccctcctccccggcacagggagctacagctctgtgtgtctctcttcaggctcctcgagctcctggatcttttggggcagcgccttcttccagaactggagcctgtgggccttcagagcccggcccaccgcaggctgtaggttcagctgcaggtattgctcctcctggtcgaacagcggccagtgtggcagaccctcgccattggggttcccatttctcgcaaagttggcccagtacttcatcatcttcctgcttagctgctcctcttcctcagtgaatttaacatggtctgccttcatgtgcggtggcctgatgttcttgagccagctgggctgatgctggaactcgtagaagtacacaggggcccgggaacactgaaaatgtgctacttggagcgcagggatcacaaacatggagtccgccatcatctcctggaactgcgcttggagggtctggggatccccattgtccccaatgtactcctccctcagcagg

SEQ ID NO: 169184 - DNA, 1404 bp, Homo Sapiens
  misc_feature (86)..(86): n is a, c, g, or t
  misc_feature (209)..(209): n is a, c, g, or t
  misc_feature (233)..(233): n is a, c, g, or t
  misc_feature (240)..(240): n is a, c, g, or t
  misc_feature (367)..(367): n is a, c, g, or t
  misc_feature (596)..(596): n is a, c, g, or t
tgtgtgtagcgagatgtgcactcactctggcatcgctgggctcattatgagggcggctggcccagtcgagacgatgaggtgggcgngcgacgtcactcatattgagtgagtggtcagccacattaagaggagcagagctgtagtctaggtaacttcttgcggtaagctgtgctctgtctgcggcgcttagtgatagtagaccgcgtgcngtacgtctcagcacatccgtcagngggccgnggttgttgtaagggatgtcttggtatacgagcgtcgcaggtagctacgaagtgggtttcgggaagtagagggagtgtgaggggtacatcgggtggttatgcagcgcagactaccatgtcctgcttanaaatgggatgcggggggactgcagttctccctgaccacctgcggctgcggtgtcaccttcaccagtacaacgagtgaggcgaggtgttgcggcgaccagaggagaacgaaaagataataggtggagcgagagtgcgccggcgcatctgggggtggtggggtagcagacggcgtggaccgctgacatggctgtgcgtccggctggcggcgtgatatcagcgtcaccagcnagttgagtggtgtgggcatctggagggagagaaggagataccgaggcgacggcggaagataccacagcttctcagtcagaagatatggctggagagactctagcgttatggcgcatgatgggtgtacgatgtggagtctgtgtcgagccgcaggaaacaaagaatggggtgacgtggtagtggaaggagaatgggtgggagagaaagtgtgcgaggtggaggagagggtaccagttggagcgatatggggggttggtgcatctgtctcggcacgagtgtgagttcgaggttcttacagtcggtattggaagcggggggtgtacgtgtgtcgttcagcgacatctaacgatggtgtgcgttacatgtgcggtggcctgatgttccggacccagctgggctgatactggaactcgtagaagtacacaggggcccgggaacactgaaaatgtgctacttggagtgcagggatcacaaacatggagtccgccatcatctcctggaactgcgcttggagggtctggggatccccattgtccccaatgtactcctccctcagcaggtcaccaaatgtaggaggcaacatcagcagcgttaacattttctgcagagcagcctgggaggcctctctgtccatttccttctgggtatcatagatcctcatgaccttggggatgagccagccgaattcattgttgttgacaccaacaatgctagggacaggctgaaagtcggcagaggccagcagctcctgggggtgcctgggcaggaacataccatccaccactacggggaccatcctgaagacact

SEQ ID NO: 169185 - DNA, 805 bp, Homo Sapiens
gggccccgcgccctcccgacgcgcagagccatggcctcccacctgcgcccgccgtccccgctcctcgtgcgggtgtacaagtccggcccccgagtacgaaggaagctggagagctacttccagagctctaagtcctcgggcggcggggagtgcacggtcagcacccaggaacacgaagccccgggcaccttccgggtggagttcagtgaaagggcagctaaggagagagtgctgaaaaaaggagagcaccaaatacttgttgacgaaaaacctgtgcccattttcctggtacccactgaaaattcaataaagaagaacacgagacctcaaatttcttcactgacacaatcacaagcagaaacaccgtctggtgatatgcatcaacatgaaggacatattcctaatgctgtggattcctgtctccaaaagatctttcttactgtaacagctgacctgaactgtaacctgtttctccaaagagcagagggcatacataaccacactgtgccctagtatcagaaaaatggaaggtcacgatggaattgagaaggtgtgtggtgacttcccaagacattgaaaagaatacatcaaatttttgagtgagcagttccctggaaagtgagcagaaacaacaattttcccccttcaatgacagagaggaagccactccgtcagcaggagagggacagctgcatttcttccttctgaaccagaaccaagggcagaaccaaaaaagcaactatttttaaagttcccctggccttaactttgaatactttaaatatatctggcccggaaaaaatca

SEQ ID NO: 169186 - DNA, 809 bp, Homo Sapiens
cgcctggaaacccgggggccgggcccccagagggctttcgcgagcctggccgcccgaagctcacctgccctttcactgaactccacccggaaggtgcccggggcttcgtgttcctgggtgctgaccgtgcactccccgccgcccgaggacttagagctctggaagtagctctccagcttccttcgtactcgggggccggacttgtacacccgcacgaggagcggggacggcgggcgcagaagtgggccaccatatctggaaactacagtctatgctttgaagcgcaaaagggaataaacatttaaagactcccccggggacctggaggatggacttttccatggtggccggagcagcagcttacaatgaaaaatcagagactggtgctcttggagaaaactatagttggcaaattcccattaaccacaatgacttcaaaattttaaaaaataatgagcgtcagctgtgtgaagtcctccagaataagtttggctgtatctctaccctggtctctccagttcaggaaggcaacagcaaatctctgcaagtgttcagaaaaatgctgactcctaggatagagttatcagtctggaaagatgacctcaccacacatgctgttgatgctgtggtgaatgcagccaatgaagatcttctgcatgggggaggcctggccctggccctggtaaaagctggtggatttgaaatccaagaagagagcaaacagtttgttgccagatatggtacaagtgtcagctggtgagatagctgtcacgggagcagggaggcttccctgcaaacagatcatccat

SEQ ID NO: 169187 - DNA, 634 bp, Homo Sapiens
ccagggcagagattccataacattcctggatcaccagttataatgtttcttaatagtaagaacacagtctaatcttatctttcctgtggccacatctgaaatccatcctctcttatcttgcactgacttccatccattctcttcttccaatcctccactcctagctcttgctcagcttttgctgtacaataagtggtaactatgattatttctgaagtggaggaatacagaatagcatttggaaagatggtagagagctcggcagaaaagggtatccccagtaactagcttgagtgagggtgagagggaaagagaaagcgtgcgaggcagacagcaggtctgcttgcctgagagagggggctggagtgcgggggtcatggaagggagaggaagtgacggggtcagtggactcccctcacctgtccagctccacttccttcgtcagcactttctcactgatggtctggatgtcatcctctagctccaggatgcgtgccacatggtctccctgttgccggctcaggatgtccctctcttctgtgatctccccatgggaccgggaaatcccctgaaattaagtttcccccagaagaaaagggaggttgggactcatctctcaagtggtggaacaaag

SEQ ID NO: 169188 - DNA, 566 bp, Homo Sapiens
agaggatccccagttccactcatccattgctagaggatgacatccagaccatcagtgagaaagtgctgacgaaggaagtggagctggacaggcttagagacacagtgaaggccctgactcgggaacaagagaagctccttgggcaactgaaagaagtacaagcaagacaaggagcaaagtgaggctgagctccaagtggcacaacaggagaaccatcacttaaatttggacctgaaggaggcgaagaagctggcaagaggagcagagtgctcaggctcagcgactgaaagacaaggtggcccagatgaaggacaccctaggccaggcccagcagcgggtggccgagctggagcccttgaaggagcagcttctaggggcccaggagcttgcagcctcaagccagcagaaagccacccttcttggggaggagttggccagcgcagcagcagccagggaccgcaccatagccgaactacaccgcagccgcctggaagtggctgaagttaacgcaagctggctgagctcggtttgcacttgaaggaagaaaaatgccactgagcatggaa

SEQ ID NO: 169189 - DNA, 876 bp, Homo Sapiens
  misc_feature (615)..(615): n is a, c, g, or t
  misc_feature (663)..(705): n is a, c, g, or t
  misc_feature (717)..(717): n is a, c, g, or t
  misc_feature (761)..(762): n is a, c, g, or t
  misc_feature (786)..(786): n is a, c, g, or t
  misc_feature (840)..(840): n is a, c, g, or t
  misc_feature (849)..(849): n is a, c, g, or t
  misc_feature (864)..(864): n is a, c, g, or t
gggagtgacgcgtattgcctggaggatggcggacgccggcattcgccgcgtggttcccagcgacctgtatcccctcgtgctcggcttcctgcgcgataaccaactctcagaggtggccaataagttcgccaaagcgacaggagctacacagcaggatgccaatgcctcttccctcttagacatctatagcttctggctcaagtctgccaaggtcccagagcgaaagttacaggcaaatggaccagtggctaagaaagctaagaagaaggcctcatccagtgacagtgaggacagcagcgaggaggaggaggaagttcaagggcctccagcaaagaaggctgctgtacctgccaagcgagtcggtctgcctcctgggaaggctgcagccaaagcatcagagagtagcagcagtgaagagtccagtgatgatgatgatgaggaggaccaaaagaaacagcctgtccagaagggagttaagccccaagccaaggcagccaaagctcctcctaagaaggccaagagctctgattctgattctgactcaagctccgaggatgagccaccaaagaaccagaagccaaagataacacctgtgacagttaaagctcagactanagcccctcccaaaccagctcgagcagcacctaaaatagccaatggtannnnnnnnnnnnnnnnnnnnnnnnnnnnnnnnnnnnnnnnnnntgatgactcagnaggagggagaggcagcagccacccccaagaagactgtacctaannaagcagttgtggccaaggccccangtgaagcagctacacccccctacccgaaaagagttctaagcagtgaggattccntcccagggnacgagggaagagggnagcaaaaaaacc

SEQ ID NO: 169190 - DNA, 823 bp, Homo Sapiens
tgatgactcagaggaggagaaggcagcagccacccccaagaagactgtacctaaaaagcaacatatggcaaagctgccccagagtaaagcagctaccaccaatacccggaagagttctagcagtgaggattcctccagtgacgaggaagaggagcaaaaaaaacccatgaaaaataaaccaggtccctacagttcagtccccccgccttctgctcccccaccaaagaagtctctgggaacccagcctcccaagaaggctgtggagaagcagcagcctgtggaaagcagtgaagacagcagtgatgagtctgattcaagttctgaagaagagaagaaacccccaactaaggcagtagtctctaaagcaaccactaaaccacctccagcaaagaaagcagcagagagctcttcagacagctcagactctgacagctctgaggatgatgaagctccttctaagccagctggtaccaccaagaattcttcaaataagccagctgtcaccaccaagtcacctgcagtgaagccagctgcagcccccaagcaacctgtgggcggtggccagaagcttcttgacgagaaaggctgacagcagctccagtgaggaaagagagcagctcccagtgaggaggagaagaccacagaagatggtggcaccactaagcccaaggcgactggcaaaagcagtctatctctgcctgcaagcaggctcctcagggtagtagggaccggcagttcgatccagacagtccagcagtgaggagggggaagaagaactctagttggcggtagaagagccccgagggtcgggggagccttcaaa

SEQ ID NO: 169191 - DNA, 1185 bp, Homo Sapiens
  misc_feature (42)..(42): n is a, c, g, or t
tgggtacggtccggaatctccgggatatcgtcgacccacgcngtcggcagcagcagcagtagcagtgatgactcagaggaggagaaggcagcagccacccccaagaagactgtacctaaaaagcaagttgtggccaaggccccagtgaaagcagctaccacccctacccggaagagtctagcagtgaggattcctccagtgacgaggaagaggagcaaaaaaaacccatgaaaaataaaccaggtccctacagttcagtccccccgccttctgctcccccaccaaagaagtctctgggaacccagcctcccaagaaggctgtggagaagcagcagcctgtggaaagcagtgaagacagcagtgatgagtctgattcaagttctgaagaagagaagaaacccccaactaaggcagtagtctctaaagcaaccactaaaccacctccagcaaagaaagcagcagagagctcttcagacagctcagactctgacagctctgaggatgatgaagctccttctaagccagctggtaccaccaagaattcttcaaataagccagctgtcaccaccaagtcacctgcagtgaagccagctgcagcccccaagcaacctgtgggcggtggccagaagcttctgacgagaaaggctgacagcagctccagtgaggaagagagcagctccagtgaggaggagaagacaaagaagatggtggcaccactaagccaaggcgaatggcaaagcaggtctatctctgactgccagacagggtactccaggtaaagggacagaagctccggatcagacaggtccagcgtgaggaggaggacacaaagacagttaagcatcggcgataaaggaagcccagatggtgcccgagggagagcccatatcagagaagtcggtgaacacagagaagggtgaaggaacacgttttctaggtagctcgcgctaggagaacaacaaaaccacagggcgagggctagaaacgaagacacgagaaaggaatctcaagagcacaaaggaaagaccaacaaagagagaaacaacaaagcggggggaacactacgcataagaagagatcgtgactcacgacaaaagacagccatcaaaggaagaccagtcgagagcgaaaatacaggcatcgagcgattcgcctcgtatcagagttctactcgcttgtagtgag

SEQ ID NO: 169192 - DNA, 408 bp, Homo Sapiens
  misc_feature (356)..(356): n is a, c, g, or t
  misc_feature (390)..(390): n is a, c, g, or t
ttggaaatctcctgcaaagaagctgagccatgcaattagtaaatctttggggtgtgtacccacgagagaacccccgcatcctgtgttttcctgagcaaccagagaaaccacttgaccttgcacatatagttcctcctcgccctctgactaatatgaatgacaccatggttagccacatgtcctctggagtgcccactcccaccaagaggttaccagtatagccaggatatacccagtcacttggccgatgagcatgcgctgatagcctcctatgtggcccgtctagcagcactgtgcacgtgttctgggacagtcctaggccgactgggatggagggaacaccgtcttattaggtncggttatggttgcccggcttggctggcaggaagnagggaaacgtggattcgt

SEQ ID NO: 169193 - DNA, 812 bp, Homo Sapiens
  misc_feature (420)..(429): n is a, c, g, or t
  misc_feature (797)..(797): n is a, c, g, or t
ggggcatttgcatttcattattcaaagagagagagaagaaattatcaacagccttcagttacaaaactgaacatatgctttctgagattcaactttatgatttcttataatttgcccagtatttgcatcctgttgctctattaatttaaaaaccttttattttggggaaaggccaacatttgcatcattcaaagtctcattaattctggaaaaccatccattctgatctctagggtatatacacccacaggcatagagctcttccacgtggtggaatctatgcaatgatagatattcacactctaaatatgaggtgtgtgtatgtgtatgggtggccacagccatgcttacctatgccatttagttggtcttacttaatctgcttaagatttgcatctgtgtacctttgttcagattagnnnnnnnnnnccagccgagttcctcttagtggctaatgctgttagtgaattttccaactaatttcctctcattggttaatgttgttaatgaattgagagaggtaattgaggaaaggaaatgagtaaatcactgttcagcaacactgatttccgttaacacatcagttatgaatttcagggaattcatctcgccagattcttcgataacatgccattcattgcccttaggtgattgaccctattttcttacatgggctcaaataaactagtatgctggtgtatgaatcttttactgaccacaccatccaactataaaaatataacgggacagcttttaaacaaagatcatggcttagaacaatgaaaaatttatttggntggatctaaatacac

SEQ ID NO: 169194 - DNA, 569 bp, Homo Sapiens
  misc_feature (482)..(482): n is a, c, g, or t
  misc_feature (532)..(532): n is a, c, g, or t
  misc_feature (552)..(552): n is a, c, g, or t
atgggggtgtcagccccccaggtgtttcagaacaaggcctcgggcactcccaagtctgcctcttggctcccaccctcaaagcccatgttctgtgaggcccaagagaacacatggagtcttagcaaatgcactaatgtattccgggggactgtcacctggcaccactggggcactctgctggctacaactcatacgtcctgtggtggcattgggagagttcccccatgatgagggccaagatagaatctgtaccactcagtgctaccatccccacccctacaccacttccacacaggggcctcatggcatggtcagggtcccagctgtgggtgagagcagggcactgtccagctgtccactggggaagtcaagatgtcctaaggcccaggccagggcatctggagtctgaaggaccctagttcctagaggcatctgcatgcaagaaggtgaggcatcagggaacgggaatcaggctgggactnatcagaggtgaagggacagagagaggagaggaggaagatttagcttgggnaacagcaagcttaccttggnaggtttttcacctcttc

SEQ ID NO: 169195 - DNA, 544 bp, Homo Sapiens
ggttccactcatacgtcctgtggtggcattggaagagttcccccatgataaggcccaagatagaatctgtaccactcagtgctaccatccccacccttacaccacttccacacaggggcctcatggcatggtcagggtcccagctgtgggtgagagcagggcactgtccagctgtccactggggaagtcaagatgtcctaaggcccaggccagggcatctggagtctgaaggaccctagttcctagaggcatctggcagcaagaaggtgaggcatcagggaacgggaatcaggctgggactgatcagaggtgaagggacagagagaggagaggaggaagattgagctgggggcaacagccaagctcacctgggcaggtctctgccacctccttgctctgtgagctgtcagtctaggttattctctttttttgtggctatttttaattgctttggatttgttaaatgttttctgtcttctgttaagtgtgttttctctggagatagaatgtaaaccatattaaaaggaaaaagtttcagacaagc

SEQ ID NO: 169196 - DNA, 204 bp, Homo Sapiens
gtggtgctctagaggatccacgctggacgatggtgtactgctggtcccagtacttgtcgttgtaatcctcctggatcctctccttccgcagctcgtgctcctcgagcataaactcactgtatgggtcgtggatgatgcccctgtagatccacttctccagaacctcgaagtagggagcactgggaactcggtcagaggtggggt

SEQ ID NO: 169197 - DNA, 966 bp, Homo Sapiens
atctagagagcttcttgatcgataagatgatgtggaacttctcgatcgacttcttgagtgactataggagacagaccttgttctgtgtcttgatttggtttcagatttacttcgagatctacttggactcctggactggctatcatcatcccgactaggcgtctgctcatcacttgaactctcctgatttcttggtctacggtttaagcgtgctgtctttcttacttcatcaaagagagacccaggccgaactttatttttgcttttaatttctattctcaagccttgtggtttcatttcaggcacagtggtcaacaccgtaacttccacagcactggatgtggcagcattaggtgctgccaggttccccacaccttgcaggggcttccatttcttatcaatgagcttgatctggctcttctcagccacctccttcttcccggtactttctccagcactaagccaagctaacagagctgctgtcctgtttccccacttcacccaacactttactttcggacatgctgctttcctgttttactacctcttgcttgaggatgttccgttgccatatcctgcttcaaaacaatgtttatatctggggtatcaagccgtgcatttcctagaggggaagtctcctctacttttgctggggaactcctatcaggagtgcagatctccatgttgtcatctgtttgaagcacatcttccactccacttgggaacactttcttcaacgtgctgaatgttttgtaaacaggccacattttcctcagtatttaaagctgtgggagaaatactgagtttactatcatctttagtaaactgatcaagatctgatgaaacagtcacctgtatcatgtttacctgaaaggtcctcttcactggatttctcagtttttagaatattatcttttatggtttcattgttttcagaaacttttttcctgacttcgactaacttcg

SEQ ID NO: 169198 - DNA, 802 bp, Homo Sapiens
gccaacgaggtgcggaaggtcaagaagtttgaacagggcttcatcacggaccctgtggtgctgagcccctcgcacactgtgggcgatgtgctggaggccaagatgcggcatggcttctctggcatccccatcactgagacgggcaccatgggcagcaagctggtgggcatcgtcacctcccgagacatcgactttcttgctgagaaggaccacaccaccctcctcagtgaggtgatgacgccaaggattgaactggtggtggctccagcaggtgtgacgttgaaagaggcaaatgagatcctgcagcgtagcaagaaagggaagctgcctatcgtcaatgattgcgatgagctggtggccatcatcgcccgcaccgacctgaagaagaaccgagactaccctctggcctccaaggattcccagaagcagctgctctgtggggcagctgtgggcacccgtgaggatgacaaataccgtctggacctgctcacccaggcgggcgtcgacgtcatagtcttggactcgtcccaagggaattcggtgtatcagatcgccatggtgcattacatcaaacagaagtacccccacctccaggtgattggggggaacgtggtgacagcagcccaggccaagaacctgattgatgctggtgtggacgggctgcgcgtgggcatgggctgcggctccatctgcatcacccaggaagtgatggcctgtggtcggccccagggcactgctgtgtacaaggtggctgagtatgcccggcgctttggtgtgcccatcatagccgatggcggcatcc

SEQ ID NO: 169199 - DNA, 608 bp, Homo Sapiens
ttcgagtctcggtaaccccttatggatgcaaagtgtcaggcattgatcctatacagcttgcattagtttggtgcatcatgctcaaatcaagtctaaatagacatcaaggatggcttacatcggctcaggcagcatcatgatgagtatagaagatagaaattcgcatgatgtctaccggctccaagaagtccctcctaagccatgagttccaggatgaaacagacactttgcatccagagacactttgcatccagagacactttgcatccagagacactttgcatccagagacactttgcatccagagacactttgcatccagagacactttgcatccagagacacttggcatccagagctctggatgcaaagtgtcagattctatctatgggagcaatgggggagcaggtggtcagggtgctgcatgaccctcgattagttggcagctgcggggaaatgagtcagagcacaccagtgcatgctggttgatgcctgactacaatacaagcctaaagcctggcttgtaattctcattaaccctgtgagggtgggttttcccttgggctttggccccattctaagcaacacttctatggatattttggact

SEQ ID NO: 169200 - DNA, 992 bp, Homo Sapiens
tgctttgctgaataccggggacgacaaagatggcggcagggaccagcagttactgggaagatctcaggaaacaggctcgacagctggaaaatgaacttgacctgaaactagtttccttcagcaaactatgtacaagttacagtcatagcagtacccgagatggaagacgcgacagttctgatacaacaccccttttaaatggatcaagccaagacagaatgtttgagacaatggcgattgagattgaacaacttttggcaaggcttacaggggtaaatgataaaatggcagaatataccaacagtgcaggtgtcccctccttgaatgcagccctgatgcatacattacagcggcatagagacatattgcaggattatacacatgaattccataaaaccaaagcaaactttatggcaatacgggaaagggagaatcttatgggatcagtacgaaaagatattgagtcatataaaagtgggtctggagtaaacaacagaagaactgagctatttttgaaagaacatgaccaccttcgaaactcagatcgtctgatagaagagacaataagcattgctatggcaacaaaagaaaatatgacttcacagagaggaatgttgaagtcaattcacagcaaaatgaacactttggccaatcgttttcctgctgtaaacagcctgatccagaggatcaacctgaggaagcggcgggactcgctcatcctagggggtggtattgggatctgtaccatcctgttgctgctgtatgcgttccattgatgggacatctccagggactcttgacagccacccgctttcacaccctgggctggaataaggaaacatcggagggagaagttgactgtcttgataattagcctgaccagcaggatgaatgcaagactgacagtgatggactctgtgacatggtcaggttgagctgaagccacagtttctctgtgctgtgttttctaacacatttttctgtttttaacc

SEQ ID NO: 169201 - DNA, 1697 bp, Homo Sapiens
  misc_feature (845)..(853): n is a, c, g, or t
  misc_feature (922)..(939): n is a, c, g, or t
  misc_feature (1000)..(1012): n is a, c, g, or t
  misc_feature (1534)..(1534): n is a, c, g, or t
  misc_feature (1601)..(1601): n is a, c, g, or t
  misc_feature (1642)..(1642): n is a, c, g, or t
  misc_feature (1661)..(1661): n is a, c, g, or t
  misc_feature (1672)..(1672): n is a, c, g, or t
  misc_feature (1687)..(1687): n is a, c, g, or t
aaatcctgaaaagctttccaaccttcttttgatgatgatgaaactggaaagatttcgttcaaaaatttgaaacggcgtggccaaggagttgggtgagaacctgacttgatgaggagctgcaggaaatgattgatgaagcttgatcgagatggagatggagaggtcagtgagcaagagttcctgcgcatcatgaaaaagaccagcctctattaagatcagtgtcttctttttctactgcaagcacatgtaactagatttagtgcctgccatggtgtgaaatctggcttttgagaacacaaacttttcccccacggacctccctttatcactttaatagtgaccttgagcctattttagccgtttggaagtgttctttgatattacagttctttgtaaaatgacctgcgaattaccctaattctcaaaagcaaaacaagagcacacaagcgtgaagaaaaggatcttaaagctttgagcacctgccattttgccttgcatcgtttccctcgtcatgcatttccacatatccacaaacacagaacgactttagacaagcacatgttacacctgtgttgccacaagcagtcattcttgacggctccagtttttatttgacacttgagtttagttttctcttttataaacccagtgaactcctgcactggcatttggatgtgtgttaatgctatttgttttgtcttaaaagtaaaacctttctcagtttgaccaccccaacgaagatgcaagcccccggcaactaaaacaaaccaccctaaaaagccgatgacaaaaccctatgaacatataagccaacagcctgacggcttattcctccccacgcggtnnnnnnnnnactttttttgctccccatacccgcattatcgggcggcgtgttccatttcttcccccttctattattccnnnnnnnnnnnnnnnnnnaaatcgcatattattcgttcctcccgcccgcccgtatcccccgcagtatcatttacaccannnnnnnnnnnnnattgtttcaccccccttatacccaaatgttcttctgatccaccgcccccgaaaaaacacgagaaccaacgcctcgcagacaacataaccaccagagcattcccctttcgccgtaggatccgctacaatcggcggacgccccgcataatgcaagcacccacacacgtcaactacagccggcctggcgaataatattcgccacagcagcttaacgtttaatacgcgccgccgcatactcgcgagaaatacacacacacccccgccgcgccagattaaacacagagaatattcctgagcgtcctccgccgcccgtaacacggcgcagatcaggtgaataacgccgccccgcccacctgtcatataatattaaaacacaccctcgggaccgcagttccgccgcgcggtagccccgcccggcctattaataaaccgccgcttatttacgccacagcgcgccgtcacactgtatctatattttgtattccccccgtcgcgactcgtatcttatcatacccaaaattancgcgcccgccccagcagctagacacaaccacgacatcgtatatatggggcgctatattagtgacatnctaacagctcgcgagttcggtgcgtcgccgccgggaagtcntgaacagcacgattatgtntttacttactntcgcccacgccctgngcacgcccgc

SEQ ID NO: 169202 - DNA, 1117 bp, Homo Sapiens
  misc_feature (36)..(36): n is a, c, g, or t
ggcctgggtggcgaattcggcacgaggggactcctnttggctatgcataacatataaaggcctccaactttaagaaggcaaacatggcatcaagttctcagcgaaaaagaatgagccctaagcctgagcttactgaagagcaaaagcaggagatccgggaagcttttgatcttttcgatgcggatggaactggcaccatagatgttaaagaactgaaggtggcaatgagggccctgggctttgaacccaagaaagaagaaattaagaaaatgataagtgaaattgataaggaagggacaggaaaaatgaactttggtgactttttaactgtgatgacccagaaaatgtctgagaaagatactaaagaagaaatcctgaaagctttcaagctctttgatgatgatgaaactgggaagatttcgttcaaaaatctgaaacgcgtggccaaggagttgggtgagaacctgactgatgaggagctgcaggaaatgattgatgaagctgatcgagatggagatggagaggtcagtgagcaagagttcctgcgcatcatgaaaaagaccagcctctattaagatcagtgtcttctttttctactgcaagcacatgtaactagatttagtgcctgccatggtgtgaaatctggcttttgagaacacaaacttttcccccacggacctcccctttatcactttaatagtgaccttgagccctattttagccgtttggaagtgttctttgatattaccagttctttgtaaaatgacctgcgaattaccctaatttctcaaaagcaaaacaagaggcaccccagcgtgaagaaaaagggattctttaaaggctttgaagcacctggccattttgcccttgcatcggtttcccctcggtcatgcattttcccccttattcccccaaccccggaccgactttaaaacaagcaccttgtttacacctggtggttgcccaccagccagttcctttcttggacggcctccaggttttttattttggaccactggaggcttaagctttcccctttttaaaaaccccggtggaacctcccggcccggggccattttggaaggggggggtaaaggccaaattgggttttggcctc

SEQ ID NO: 169203 - DNA, 663 bp, Homo Sapiens
  misc_feature (55)..(72): n is a, c, g, or t
cttggtcgatcactgtactctagcctggaagacagagcgagaccccatctcaggnnnnnnnnnnnnnnnnnngatgtcattcagcaggttaatggataaactgtggaacatccagaaagctttaacattcttcaaagaaatagaaaacacaatcctaaaatttatatgggaaccacaaaagacttagaatagtcagctatcctgagcaaaaggaaccaaactggaggaatcatagtacctgacttccaattattcaacagagctacagtaaccaaaacagcatgatactggcataacaacagacacataggaacagtatagacaacccagaaacaaattcatacatctatggtgaccacttttgacaaaggaatgaagaacatacactggggaaaagataatgtctttaataaatggtgctgggaaaactggatatccatatgcagaagaatgaaactagacccccatctcttagcatatacaaaaatcaaaattaattaaaaagttaaatctaagacctcaaactatgaaacagctaaaagaaaacatcggggaatctctccaggacattggagtgggcaaagatttcttgtgtaatacctgacaaacaggcaaccaaagcaaaagtggacaatgggaccacatcaagttaaaacttatgca

SEQ ID NO: 169204 - DNA, 220 bp, Homo Sapiens
agtgctggccagggtggctctgatatagcagccctggtgtattttcgatatttcaggaagactggcagattggaccagaccctgaattcttctagctcctccaatcccattttatcccatggaaccactaaaaacgaggtctgctctgctcctgaagccctatatgctggagatggacaactcaatgaaaatttgaggggaaaagacctggggtaccgag

SEQ ID NO: 169205 - DNA, 1002 bp, Homo Sapiens
  misc_feature (659)..(659): n is a, c, g, or t
attgcaaaaattaaataagataattggggaatgtttttaaacataaagcattacataaatctatgttacatgtgcaaattgctcctggaaggcagtgagggacagagacagccaccacagcctctccctcagagagcagcaattccagctggagggagaccagcctcccagatgtgctcaccaccatctctgcagtgggcctgaccagagagagaaggctggagaggaagtcgcctcttagggaaagtctcccagagactgtggaattggaggatgttctgaattttggtaaaattctgatcagctagagaaaatgcgagaaggcctcctaggcaaaggaggaggaagggtgcaggcaagagcagagacagaggagtgctgggggcaggcgacatggccaccaggccaacctgggaattcacacagcaggacagcgaggggaagctggaggacagggcagggaggtggtctgggagtgacatgctggtgggaaagcatgggcttcagctcctgaacaggtggagcccctgggaggtgtttcagcaggagcgggatgacagaagagcggcatcatgggaaggatggttcatgtgtgggctgtgcaagggacattgcagacggaggaagccactagggagctgttcctccaaagacgtaanatgcaggataataaccaaggacaggatggtcatgccagggaggaaagcattaagaagtggatcgattccctgctactgttgcttttttaagttctctccctcctgtggaaagctaagatgacttcgaaactttggaatcctggagaatccctttgttcattgaagtgagttttcaagctctgtaaaataaaattcggtcttcggacactaacttctggctggggatgtgtatggaaaatacaagcagatggaaagttctccaagaatatgtctcccttcctcagtgaggtgtcagtctcactttgcctgcagcacctctcaggagagccgcttcagggtcaat

SEQ ID NO: 169206 - DNA, 1131 bp, Homo Sapiens
agtactacgcgatgaacggagtacaaagtgtccgtacaaggggccaggaccaggcatcaagttcagtgcagaggccctgacgctgccacctccgggaccatgtgaatggtatccatggtagaggtcacagattttcccttcaatacctctgaatgggagggttatctgcccaaggagagcattaggaccaaggctgggccttggggcaggtgtgctgttgtgtcgtcagcgggatctctgaagtcctcccaactaggcagagaaatcgatgatcatgacgcagtcctgaggtttaatggggcacccacagccaacttccaacaagatgtgggcacaaaaactaccattcgcctgatgaactctcagttggttaccacagagaagcgcttcctcaaagacagtttgtacaatgaaggaatcctaattgtatgggacccatctgtataccactcagatatcccaaagtggtaccagaatccggattataatttctttaacaactacaagacttatcgtaagctgcaccccaatcagcccttttacatcctcaagccccagatgccttgggagctatgggacattcttcaagaaatctccccagaagagattcagccaaaccccccatcctctgggatgcttggtatcatcatcatgatgacgctgtgtgaccaggtggatatttatgagttcctcccatccaagcgcaagactgacgtgtgctactactaccagaagttcttcgatagtgcctgcacgatgggtgcctaccacccgctgctctatgagaagaattcggtgaagcatctcaaccagggcacagatgaggacatctacctgcttggcaacaagccacactgcctggcttccggaccattcactgctaagcacaggctcctcactcttctccatcaggcattacatgactggtctcttggcaccccagcctggcgaagaacattcttcctgaacaattccagcctgctcctaacactctaggggcctctgcccagcaagaccatggaaggcttcacgagccctgtggacaggaaatcaggtccagcctccctgctagcagacagtcatgaccccagaggccctgacacacacaatgcacacatatctagcacccca

SEQ ID NO: 169207 - DNA, 775 bp, Homo Sapiens
  misc_feature (683)..(683): n is a, c, g, or t
  misc_feature (727)..(727): n is a, c, g, or t
  misc_feature (759)..(759): n is a, c, g, or t
ggtggctccaggcgtcaggaagcccaaaggctagggcgggtgcttcgagctaaaaaagggatggttgcagaagagtacaatgcctttttctactcactggtatcccaggacacacaggaaatggcttactcaaccaagcggcagagattcttggtagatcaaggttatagcttcaaggtgatcacgaaactcgctggcatggaggaggaagacttggcgttttcgacaaaagaagagcaacagcagctcttacagaaagtcctggcagccactgacctggatgccgaggaggaggtggtggctggggaatttgactccagatccagccaggcatctcggccctttggcaccatgaggtccatgtctggggccgacgacactgtgtacatggagtaccactcatcgcggagcaaggcgcccagcaaacatgtacacccgctcttcaagccctttaggaaatgatgcttaggcagggtacttcgttcaagaccggcgcttggcacccttgttggaaagggattttcagcataacattttccttccacctctttgaccttccctccagcgttggccaaattgtgctgaggaagatgcatcaagggcttggctgtgccttcataggtcatctagggttttataaaggaggaggagacaatattttttcaaactttttggggagtggnggtcatttctgtatataaaaaatgttaataatttaaggtgtatnttatgttacccgttctgaataaacaggatggnaccattggaaaaaaat

SEQ ID NO: 169208 - DNA, 1940 bp, Homo Sapiens
  misc_feature (1521)..(1570): n is a, c, g, or t
tcggccaatctgtagaagacgctgaatcagcaacagaccgaccacatccgggagtcgctgccggccctacgtagctaactacagagccagctgctgtacctggagaaggaggtggaggagtacaagaactttcggcccgacgaccccacccgcaaaaccaaagccctgctgcagatggtccagcagtatggggtggattttgagaagaggatcgagggctcaggagataaggtggacactctggagctctccgggggcgcccgaatcaatcgcatcttccacgagcggttcccactttgagctggtgaagatggagtttgacgagaaggaccttacgacgggagatcagctatgccatgaagaacatccacggagtcaggaccgggcttttcaccccggacttggcaatacgaggcccatctgtgaaaaagcaggatcgtacaagactgaaagagccctgtctagaaatgtgtcgacctggttattcaggagctaatcgaatacagttaggcagtgtaccagtaagctcagttcctacccccggttgcgagaggagacagagcgaatcgtcaccacttacatccgggaacgggaggggagaacgaaggaccagattcttctgctgatcgacattgagcagtcctacatcaacacgaaccatgaggacttcatcgggtttgccaatgcccagcagaggagcacgcagctgaacaagaagagagccatccccaatcagggggagatcctggtgatccgcaggggctggctgaccatcaacaacatcagcctgatgaaaggcggctccaaggagtactggtttgtgctgactgccgagtcactgtcctggtacaaggatgaggaggagaaagagaagaagtacatgctgcctctggacaacctcaagatccgtgatgtggagaagggcttcatgtccaacaagcacgtcttcgccatcttcaacacggagcagagaaacgtctacaaggacctgcggcagatcgagctggcctgtgactcccaggaagacgtggacagctggaaggcctcgttccctccgagctggcgtctaccccgagacaggaccaggcagaaaacgaggatgggccccaggagaacaccttctccatggacccccaactggagcggcaggtggagaccattcgcaacatggtggactcatacgtggccatcatcaacaagtccatccgcgacctcatgccaaagaccatcatgcacctcatgatcaacaatacgaaggccttcatccaccacgagctgctggcctacctatactcctcggcagaccagagcagcctcatggaggagtcggccgaccaggcacagcggcgggacgacatgctgcgcatgtaccatgccctcaaggaggcgctcaacatcatcggtgacatcagcaccagcactgtgtccacgcctgtacccccgcctgtcgatgacacctggctccagagcgccagcagccacagccccactccacagcgccgaccggtgtccagcatacannnnnnnnnnnnnnnnnnnnnnnnnnnnnnnnnnnnnnnnnnnnnnnnnntgattcctgttcccgtgggggcagcagcctccttctcggcgcccccaatcccatcccggcctggaccccagagcgtgtttgccaacagtgacctcttcccagccccgcctcagatcccatctcggcagttcggatccccccaggaattcccccaggagtgccagcagaaggacccctgctgcgcccagccggcccacattatccgccagcgagccatcctgtcgactaggctcgaggcgggcgtgctctaggggggcctccgcaccgcgcgctggacctcagggtcggggcctcccgccctatgctggaccggccccatgggcatcctggctttccttacgtggcccggccaggccgcccttccggtgcc

SEQ ID NO: 169209 - DNA, 507 bp, Homo Sapiens
  misc_feature (41)..(73): n is a, c, g, or t
agggagtgctcgtctttggcataggaatgtcttaacaattnnnnnnnnnnnnnnnnnnnnnnnnnnnnnnnnnttggtcactgttgcatgataccaaggaactaactcattattttgaaagtaagtacataaaagaagaatcagcatttattctcgtttcctatataaactgtaccactgggaaaccaatagtagataagggcaagtttcatggttcagctcataaatgaaaagcaatgactgcatcaaaatatcatgagtttgcaaaccttagttgactgatggaatgaggcactgagcttcaacagtctgctaattatcacaaaagacgagcactccctagggagtgctcgtcttttgagagacagatgaagtaaccaagactgaggacagagagttggtgctaaggaaagactgtcctaagatagtggaaccacatgggaaaatgtttaatgagcagacctgggaggtatcacagcaggatccctcacatggagaagttggtga

SEQ ID NO: 169210 - DNA, 498 bp, Homo Sapiens
tctgaggtcccctctggatgcaagtgtctctggatgcagttctggatcggtgcctgcacaacttgagtgcctgatacaggctgggctaagcggatatactgcagctggccggcattcagcatgcaccgggatctgctggatctctcctgtgttagtgatgatctgctgcatcacctgcaaggtctgtccatgtgccactctgggcctgttgggcttgaccctgaggctgagcctggacaatctgcacctgctgaccttctccaacctgcattgtcacaggtgtggtctggccctgctgaggctgtgcgatgatgatctgccctggctggatggtggtcgtggagctggtggtctgctggccttgctgctggccctggacttggacagcggtgggttgctgagccagcgtgaaatagtactggactggctcggcaggagtaacagactggcgcaccttctcctgacactttgcatccagaggacactttgcatccagag

SEQ ID NO: 169211 - DNA, 608 bp, Homo Sapiens
  misc_feature (509)..(537): n is a, c, g, or t
gcagatcatcactaacacaggagagatccagcagatcccggtgcagctgaatgccggccagctgcagtatatccgcttagcccagcctgtatcaggcactcaagttgtgcagggacagatccagacacttgccaccaatgctcaacagattacacagacagaggtccagcaaggacagcagcagttcagccagttcacagatggacagcagctctaccagatccagcaagtcaccatgcctgcgggccaggacctcgcccagcccatgttcatccagtcagccaaccagccctccgacgggcaggccccccaggtgaccggcgactgagggcctgagctggcaaggccaaggacacccaacacaatttttgccatacagccccaggcaatgggcacagccttcctccccagaggacccggccgacctcagcgcctcctgcaggctaggacactggtgcactacaccccatgcctgggggccgagattctccagcagaaagatgcaatannnnnnnnnnnnnnnnnnnnnnnnnnnnnctctaaggaatcaatatttcaatatgttgagtgtgtgtccaatgctatgaaattaaaatattaaataacat

SEQ ID NO: 169212 - DNA, 367 bp, Homo Sapiens
  misc_feature (205)..(205): n is a, c, g, or t
  misc_feature (244)..(244): n is a, c, g, or t
  misc_feature (309)..(309): n is a, c, g, or t
  misc_feature (317)..(317): n is a, c, g, or t
  misc_feature (336)..(337): n is a, c, g, or t
  misc_feature (341)..(341): n is a, c, g, or t
gggatacagttgagctagctgtagcatctaatgtttacttactttgatgactgaatagtaagtgttggttaagtcttattagtaatataatgtttggcagatgatctgcttaaatggttaacacatctgtggttctttctttgaatatcgctgtaatacttgaacatttcattacaagtcaaaactttaacgaaattaagaatgnctgattacccacatggtggaaaacaaactctgaagtganctttggatttagcattgcacataaatggaaactgttggtttctacagaaaagaaagaattaaagncatgcatnctgggggcaaaggcaccgnnactnaccacttacacatgggaacagcaaaa

SEQ ID NO: 169213 - DNA, 549 bp, Homo Sapiens
ccacgcgggatgtccaaaccaaaatgagtacaacaaccccatataaaaagatgaactggcggcttcacacactcacacacagacagcatacacacggatgaaatgtttggacagaggcaaatttcacgtggtcatttctgtttctttttaaatacaggtttgtagggtggtattttgttttttccagctataaaaaaaggcccaaaagtgcatgtgtgaggggggcaaggcagaaattaagcaataaagtcattttccctggagggacatgagagggagaaaacaggaggcagtgctgggagaacgcactttcctcaccactgggcttctttgttattcttagaatgggggttcggcgtgtgcatgcacacgccgaggacccaaaccctacagctgtccaggagtggtatacagtgacagcacatatgactaaagaggacttgaatagagtcaccttgataaacgatgacatttcctcatagaatctctctttaaatcaggggttatactcatcagaataatcctgcacacttttgcaaaatgaacatg

SEQ ID NO: 169214 - DNA, 472 bp, Homo Sapiens
  misc_feature (261)..(290): n is a, c, g, or t
gggaccaatactaagaataacaagaagcccagtggtgaggaaaagtgcgttctccccagcactgccctcctgttttctccctctcatgtccccccagggaaaatgactttattgcttaatttctgcctttcccccctcacacatgcacttttgggcctttttttatagctggaaaaaacaaaataccaccctacaaacctgtatttaaaaagaaacagaaatgaccacgtgaaatttgcctctgtccaaacatttcatccnnnnnnnnnnnnnnnnnnnnnnnnnnnnnnagccgccagttcatctttttatatggggttgttgtctcattttggtctgttttggtcccctccctcgtgggcttgtgctcgggatcaaacctttctggcctgttatgattctgaacatttgacttgaaccacaagtgaatctttctcctggtgactcaaataaaagtataatttttactgcg

SEQ ID NO: 169215 - DNA, 907 bp, Homo Sapiens
  misc_feature (726)..(726): n is a, c, g, or t
  misc_feature (873)..(873): n is a, c, g, or t
  misc_feature (891)..(891): n is a, c, g, or t
gcctgggtggcgattccggcacgagggaaattcctccttccccccatctctgagtggaggaagcccaccaatctgccctttgcagtgtgcagggtggaaggtaagaggttggtgtggagttggggctgccatagggtctgcagcctgctggggctaagcggtggaggaaggctctgtcactccaggcatatgtttcccgcatctctgtctggggctacagaatagggtggcagaagtgtcaccctgtgggtgtctccctcgggggctcttcccctagacctccccctcacttacataaagctcccttgaagcaagaaagagggtcccagagctgcaaaactggaagcacagcctcggggatggggagggaaagacggtgctatatccagttcctgctctctgctcatgggtggctgtgacaaccctggcctcacttgattcatctctggttttcttgccaccctctgggagtccccatcccattttcatcctgagcccaaccaggccctgccattggcctcttgtcccttggcacacttgtacccacaggtgaggggcaggacctgaaggtattggcctgttcaacaatcagtcatcatgggtgtttttgtcaactgcttgttaattgatttggggatgtttgccccgaatgagaggttgaggaaaagactgtgggtggggaggccctgcctgacccatcccttttcctttctggccccagcctangtggaggcaagtgggatatcttatattgggcgatttgggggctcggggaggcagagaatctcttgggagtcttgggtggcgctggtgcattctgtttcctcctgatctcaaagcacaatgtggaatttgggggacccaagggtcagnggaaccattccccttaanaggacctggaatttgt

SEQ ID NO: 169216 - DNA, 858 bp, Homo Sapiens
ccccctcacgtagacgctgcactgtaaagaaccaccatcaatgtcccaccaaatctcctagggccaaagaagaatgtcgcagctccccccacagtcttttcctcaacctctcattcggggcaaaccatccccaaatcaattaaccaagcaggtgacaaaaacacccatgatgactgattgttgaacaggccaataccttcaggtcctgcccctcacctgtgggtacaagtgtgccaagggacaagaggccaatgggcagggcctggttgggctcaggatgaaaatgggatggggactcccagagggtggcaagaaaaccagagatgaatcaagtgaggccagggttgtcacagccacccatgagcagagagcaggaactggatatagcaccgtctttccctccccatccccgaggctgtgcttccagttttgcagccctgggaccctctttcttgcttcaagggagctttatgtaagtgagggggaggtctaggggaagagcccccgagggagacacccacagggtgacacttctgccaccctattctgtagccccagacagagatggggaaacatatgcctggagtgacagagccttcctccaccgcttagccccagcaggctgcagaccctatggcagccccaactccacaccaacctcttaccttccaccctgcacactgcaaagggcagattggtgggcttcctctactcagagatggggggaaggaggaatttcattccaaagaaaacctaaggaacttctctgccccaggagccctcccctctcactgtgggttctgaggaaactctcaggggaagacagctcttcataccctcacataaccccacccaccc

SEQ ID NO: 169217 - DNA, 1393 bp, Homo Sapiens
ggtggggagggaaagacggtgctatatccagttcctgctctctgctcatgggtggctgtgacaaccctggcctcacttgattcatctctggttttcttgccaccctctgggagtccccatcccattttcatcctgagcccaaccaggccctgccattggcctcttgtcccttggcacacttgtacccacaggtgaggggcaggacctgaaggtattggcctgttcaacaatcagtcatcatgggtgtttttgtcaactgcttgttaattgatttggggatgtttgccccgaatgagaggttgaggaaaagactgtgggtggggaggccctgcctgacccatcccttttcctttctggccccagcctaggtggaggcaagtggaatatcttatattgggcgatttgggggctcggggaggcagagaatctcttgggagtcttgggtggcgctggtgcattctgtttcctcttgatctcaaagcacaatgtggatttggggaccaaaggtcagggacacatccccttagaggacctgagtttgggagagtggtgagtggaagggaggagcagcaagaagcagcctgttttcactcagcttaattctccttcccagataaggcaagccagtcatggaatcttgctgcaggccctccctctactcttcctgtcctaaaaataggggccgttttcttacacacccccagagagaggagggactgtcacactggtgctgagtgaccgggggctgctgggcgtctgttctttaccaaaaccatccatccctagaagagcacagagccctgaggggctgggctgggctgggctgagcccctggtcttctctacagttcacagaggtctttcagctcatttaatcccaggaaagaggcatcaaagctagaatgtgaatataacttttgtggaccaatactaagaataacaagaagcccagttggtgaggaaagtgcgttctcccagcaactgccccctgttttctccctctcatgtccctccagggaaaatgactttattgcttaatttctgccttttcccccctcacacatgcacttttgggcccttttttatagctggaaaaaacaaaataccaccctacaaacctgtatttttaaagaaacagaaatgaccacgtgaaatttgcctctgtccaaacttttcatccgtgggtatgtgtatgtgtgtgaatgtgggaaaccgccaagtcatctttttaaatgggggtgttgccccattttgaacctggttgggccccctccctcgggggttggtgctcgggattcaacctttctggcccgttatgaatctgaacatttgactttgaacccaaaggaaacttttccccgggggacccaaataaaagaatattttttacccgc

SEQ ID NO: 169218 - DNA, 1412 bp, Homo Sapiens
  misc_feature (65)..(65): n is a, c, g, or t
caccttagtaagcaccttctaatgctgcattttttttgttgttgttaaaaacataccagctgccntataatattgttctccacgtccttgtgatgattctgagcctggcactcccaaatctgggaagcatagtttatttgcaagtgttcaccttccaaatcatgaggcatagcatgacttattcttgttttgaaaactcttttcaaaactgaccatcttaaacacatgatggccaagtgcccaaaagccctcttgcagagcaaatttcagaatatatatgtggatccaagctctgatagttcaggtgctggagggaagacagacctgtgtgtttagaggccaggaccacagttaggattgggttgtttcaatactgagagacagctacaataaaaggagagcaattgcctccctggggctgttcaatcttctgcatttgtgagtggttcagtcatgaggttttccaaaagatgtttttagagttgtaaaaaccatatttgcagcaaagatttacaaaggcgtatcagactatgattgttcaccaaaataggggaatggtttgatccgccagttgcaagtagaggcctttctgactcttaatattcactttggtgctactacccccattacctgagggaaactggccaggtcctttgatcatggaactatagagctaccaggacatatcctgctctctaagggaatttattgctatcttgcaccttctttaaaactcacatatgcagacctgacactcaagagtggctagctacacagagtccatctaatttttgcaacttcctgtggccagtgtgtataaccccttccactatctcacagatagtcacagcgtccattccatagtctgtctcctcacatctgttagtattgacacagcacagacaccacaagccatcaggttcttcatggggcaggtgaaatacttctaccccatgggtaaatgtatttacatattaccaagagaagaagcacattatctatgatcttttggcccagttcttatttagcatttttattccagcctacttggaaacatgtttttatttgcaatatatgcctgactggaattaagcttgcttgttttaaacaaccaaatcattggaacagaacaggatttaaaaaacaagaatgcatgatctcagcgtgattaacaaaaaatcagtggaaataaatgatcatagaaggtgcttttcaaaacaactgctattataattctcaaagtcctactctgccaaaagaagattacaagtcatacattacattacaaggaaatgttcatgtgggaagagggttgctgaaaatcaacaacgcttgaagttaaaaagtgtgtcttggtagatttcatggtataatgtgtaattcttaggagatggctgacttgattgatctag

SEQ ID NO: 169219 - DNA, 577 bp, Homo Sapiens
aaccaaagacttggtttcccggaagctgggtgtgctcagaggctcatggcccggcgggcgaagctccttccaggtgcaggcaagcctgaggcgtcagggcagcaggcggccgccaggaaggattcagacaactctgcctgggagtgagggctctgctcagcggcctagacctgggcacaacggaacaggccactccgtttgggatcacagacctgaaggcagatggcctgggcgtcgggcttcctctgctctctggcggggcgattttcacggtcaccaggctgcggacaggctgtgggggtggcgggcggtccaaagccaccgcttcacgtaggccaggggagccttggagaaatcaggcctgatgttgctcagcagcggcagactgttgggaaagcacctccaggcctcggggaccatctctctcaggacgcggatggggcgtgggaccatctctctctggatgcagatgcgggtgtagtcccagctgggaggagtagtgcggaggggccggatgcggaccgagtgcttcctgtggaagtaggtgaccgttgcagttctcctggacctgggagct

SEQ ID NO: 169220 - DNA, 479 bp, Homo Sapiens
cccgctggatgcaagtgtctagacatgggtgggatgtggaaaaagatgcaccactctttagaaactgggcaatccatacaggaaagcatcaaccaggagtagataaacctgatcccaaaacatggaaggcgaatttcagatgcgccatgaattccttgcctgatagttgaagaagtcaaggataaaagcataaagaaaggaaataatgccttcagggtctaccgaatgctgcccctatcagaacggccttctaagaaaggaaagaaaccaaagacagaaaaagaagacaaagttaagcacatcaagcaagaaccagttgagtcatctctggggcttagtaatggagtaagtgatctttctcctgagtatgcggtcctgacttcaactataaaaaatgaagtggatagtacggtgaacatcatagttgtaggacagtcccatctggacagcaacattgagaatcaagagattgtcaccaa

SEQ ID NO: 169221 - DNA, 917 bp, Homo Sapiens
gaacacaggtctagtttctaaaggacaaattttttgttccttgtcttttttctgtaagggacaagatttgttgtttttgtaagaaatgagatgcaggaaagaaaaccaaatcccattcctgcaccccagtccaataagcagataccacttaagataggagtctaaactccacagaaaaggataataccaagagcttgtattgttaccttagtcacttgcctagcagtgtgtggctttaaaaactagagatttttcagtcttagtctgcaaactggcatttccgattttccagcataaaaatccacctgtgtctgctgaatgtgtatgtatgtgctcactgtggctttagattctgtccctggggttagccctgtgggccctgacaggaagggaggaagcctggtgaatttagtgagcagctggcctgggtcacagtgacctgacctcaaaccagcttaaggctttaagtcctctctcagaacttggcatttccaacttcttcctttccgggtgagagaagaagcggagaagggttcagtgtagccactctgggctcatagggacacttggtcactccagagtttttaaatagctcccagggaggtgatattattttcagtgctcagctgaaataccaacccccaggaataagaactcccattttcaacaggtcctgggccattctgagcctgctttttgtgaattggtcatccatttggcctccactaggaggggctaaagcttgaatggccccttaacccaggcaaggcacaggaaaggggggtttttgttcagcatttatttatggcaaaaattccctaaattgaaagagggtttggtttttggggaaagggaaatggaaattgccctcccccgggaaaggggaggggccccagaccggctttccaattttggaa

SEQ ID NO: 169222 - DNA, 437 bp, Homo Sapiens
ctctggatgcaaagtgtcctagtgagctaagagctttgagtcagggtctgactcgggcgtgtgagtttggatctggaaaaacagcgggtgcagtgtttaggggagtgttcccgtggctgggccgcaaggcctgaagaaacttgcttagtggttctgggcctctgagcctcatctatagaaggaggctatgatgaagcctacccatagggcttctggggctgaaacgagctaatgatgtcgaagctgctagaactgtacctgtgtcagagcgagtgtgcagcatacgttatcatcactgtcatcactccagcattctgactgtgcctttaaactagtgtgggattttgcccaaacctctaaaccctcccctagccgtggtttcccccgcagtctgaagactctaatacttgacacttgcatccagaggggtaccgagc

SEQ ID NO: 169223 - DNA, 1518 bp, Homo Sapiens
aatctacttctagaatcgctcaccctcagacaaaagaagtaaacgtggagatgacagacggtctagaagtagagatagagataggaggagagagaggtctcgtagcagggataaaagaagatctcggtcaagggacaggaagcgtctgagacgttcccagaaagtagatatagaagagtgcactttaaaagtgcactcttctatatctacaaggcaaattcatgaaggtgcaagtttaccgttttttgaagtatttgttgatgctcctctgcatgtttgtgaacagagggatgtcaaaggactctacaaaaaagcccgggcaggagaaattaaaggtttcactgggatcgattctgaatatgaaaagccagaggcccctgagttggtgctgaaaacagactcctgtgatgtaaatgactgtgtccagcaagttgtggaacttctacaggaacgggatattgtacctgtggatgcatcttatgaagtaaaagaactatatgtgccagaaaataaacttcatttggcaaaaacagatgcggaaacattaccagcactgaacaattaactaaagtggatatgcagtgggtgcaggttcttggcagaaggttgggcaaccccattgaatggctttatgacgagagagggagtacttgcagtgccttcatttcgattgtcttctggatggaggtgtcattaacttgtcagtacctatagttctgactgcgactcatgaagataacagagaggctggacggctgtacagcatttgctctgcatgtatgagggccgccgtgtggccattcttcgcaatccagagttttttgagcacaggaaagaggagcgctgtgccagacagtggggaacgacatgcaagaaccacccctatattaagatggtgatggaacaaggagattggctgattggaggagatcttcaagtcttggatcgagtttattggaatgatggtcttgatcagtatcgtcttactcctactgagctaaagcagaaatttaaagatatgaatgctgatgctgtctttgcatttccaactgcgcaaacccagtgcacaatggacatgccctgttaatgcaggatacccataacaaacttctagagaggggctaccggcgccctgtcctcctcctccaccctctgggtggctggacaaaggatgacgatgttcctttgatgtggcgtatgaagcagcatgctgcagtgttggaggaaggagttctgaatcctgagacgacagtggtggccatcttcccatctcccatgatgtatgctggaccaactgaagtccagtggcatatgcagagcacggatggttgcaggagccaactataaacatagttggacgagaccctgctggcatgcctcatccagaaacagggaaggatctctatgagccaagtcatggtgccaaagtgctgactgatggcccctggtttaatcactttggaaatagttcccttatcgagtatgcagctaacaacaagaaaaagaagcgtatggact

SEQ ID NO: 169224 - DNA, 539 bp, Homo Sapiens
ggggcccggagagagctgggtggtgtatggggtgacctcctgggggtatggctgtggagtcaaggattctcctggtgtttataccaaagtctcagcctttgtacctgggataaaaagtgtcaccaaactgtaattcttcatggaaacttcaaagcagcatttaaacaaatggaaaactttgaacccccactattagcactcagcagagatgacaacaaatggcaagatctgtttttgctttgtgttgtggtaaaaaattgtgtaccccctgctgcttttgagaaatttgtgaacattttcagaggcctcagtgtagtggaagtgataatccttaaatgaacattttctaccctaatttcactggagtgacttattctaagcctcatctatcccctacctatttctcaaaatcattctatgctgattttacaaaagatcatttttacatttgaactgagaaccccttttaattgaatcagtggtgtctgaaatcatattaaatacccacatttgacataaatgcggtaccctttactaca

SEQ ID NO: 169225 - DNA, 1716 bp, Homo Sapiens
gggaggacctggagaagttcaaggccctgagagtgatcgtgcggataggcagtggctatgacaacgtggacatcaaggctgccggcgagctcggaattgccgtgtgcaacatcccgtctgcagccgtggaagagacagcggactctaccatctgccacatcctcaacctgtaccggaggaacacgtggctgtaccaggcactgcgggaaggcacgcgggttcagagcgtggagcagatccgcgaggtggcctcgggagcggcccgcatccgtggggagacgctgggcctcattggctttggtcgcacggggcaggcggttgcagttcgagccaaggcctttggattcagcgtcatattttatgacccctacttgcaggatgggatcgagcggtccctgggcgtgcagagggtctacaccctgcaggatttgctgtatcagagcgactgcgtctccttgcactgcaatctcaacgaacataaccaccacctcatcaatgactttaccataaagcagatgaggcagggagcattccttgtgaacgcagcccgtggcggcctggtggacgagaaagccttagcacaagccctcaaggagggcaggatacgaggggcagccctcgtacgtgcatgagtcacgagcccttcagctttgctcagggtccgttgaaagatgccccgaatctcatctgcactcctcacactgcctggtacagtgagcaggcgtcactggagatgagggaggcagctgccaccgagatccgccgagccatcacaggtcgcatcccagaaagcttaagaaattgtgtgaacaaggaattctttgtcacatcagcgccttggtcagtaatagaccagcaagcaattcatcctgagctcaatggtgccacatacagatatcccccaggcatcctgggtgtggctccaggaggacttcctgcagccagtggaagggatcatccctggaggcatcccagtgactcacaacctcccgacagtggcacatccgtcccaagcgccctctcccaaccagcccacaaaacacggggacaatcgagagcaccccaacgagcaatagcagagaatgccagaaggtaatcactcagatacacttgggaccaagagacagtgaaaaatagatgaactaagagaaaaagaatcggatggtctttgtaactgattctggacatatgcatcattgatgttgcagtgttgaaactacaagagctagaaaactgaagatgtcgtctgcttacggaagcgctgaaagactaggatgtgatttattaacgaccaacttctgttattgtgtgttaagtttttcatctgtgcatcaaatcacaaaaagaataaatagagctttttcctttatcagtcccttgggcacagcaggtcctgaacaccctgctctacaatgttgcatcaagagttcaaacaacaaaataaaaaatattaagaggaaatccccatcctgtgacttgagtcccttaagtctacaggggctggtgacctctttttgctaataggaaaatcacattactacaaaatggggagaaaactgtttgcctgtggtagacaccctgcacgcataggattgaagacagtacaggctgctgtacagagaagcgcctctcacatctgaactgcatactgagcgggcaagtcggttgtaagttcagtaaaaccctctgatgatgcgaaaacccaatatacattta

SEQ ID NO: 169226 - DNA, 500 bp, Homo Sapiens
tctggatgcaagtgtcgaggagcacgaacgctgctgcttcggaggaagttcttttactcagaccagaatgtggagttcccgggaccctgtacagctgaacctcctgtatgtgcaggcacgagatgacatcctgaatggctcccaccctgtctcctttgacaaggcctgtgagtttgctggcttccaatgccagatccagtttgggccccacaatgagcagaagcacaaggctggcttccttgacctgaaggacttcctgcccaaggagtatgtgaagcagaagggagagcgtaagatcttccaggcacacaagaattgtgggcagatgagtgagattgaggccaaggtccgctacgtgaagctagcccgttctctcaagacttacggtgtctccttcttcctggtgaaggaaaaaatgaaatgggaagaacaagctagtgcccaggcttctgggcatcaccaaggagtgtgtgatgcgagtggatgagaagaccaaggat

SEQ ID NO: 169227 - DNA, 649 bp, Homo Sapiens
tgcccggatagtgaatggccccagccggacgggagataccattctatcagcaaaggggtcaaggcagaggaaagtttcccttaatatccccacaactgctccacatgtcttctgtggaaacacttcaccaggaactagctcaacactcttgctaacaatttagtgtctatacaggaaggctggtgtctctgttacaggtggcccgttccttaaagcctttagggttaatcgcagctgcactgagtggccaagcagacccacgagcttggactttctgggaaggttgtcggttttctggtcaaaaacattcttgaagtcatcaggaatggaggaatggagactcggcatcccgggaaagtgagttcctggtttcatcgctgggattcaagagccgaacagcacaatcatgcagaacatcatgaagatgttccacagggcgatgaagattcgaaagtatctgaggctcagcaagaattcccggatgttgtcacctgtgctgggctccctggactcctccccaaagccctgcgtgtccttctttttcagcttaaagttcagcaccgccccggcattcatcagcaacgtcccgaacagcaggatgtctccgatcatcgttacggccgaagcgtccgtcagaaccggaagcccc

SEQ ID NO: 169228 - DNA, 901 bp, Homo Sapiens
taacgatgatcggagacatcctgctgttcgggacgttgctgatgaatgccggggcggtgctgaactttaagctgaaaaagaaggacacgcagggctttggggaggagtccagggagcccagcacaggtgacaacatccgggaattcttgctgagcctcagatactttcgaatcttcatcgccctgtggaacatcttcatgatgttctgcatgattgtgctgttcggctcttgaatcccagcgatgaaaccaggaactcactttcccgggatgccgagtctccattcctccattcctgatgacttcaagaatgtttttgaccagaaaaccgacaaccttcccagaaagtccaagctcgtggtgggtggaaaagtgttcgccgaggtgtgcatggtttcccagccacgtccctgttttcaaagatagtttcactttggtctctgaattgaaatgctgtctactgaaagggtttcaggagcgtttatgtaaggggctgtgatgaaattgcattccccatagataaaagaaaaatcatttctatccagagatctgagcagaaggattggcttgttagtttaacacagccgtatttttggacattcagtgttacttgctgagtctgacagcctctgggcccggccaggggccctgttaacaaactgctttcacatcccaacagggtctgcttggccactcagtgcagctgcgattaaccctaaaggctttaaggaacggcccacctgtgacagagacaccagcccttcctgtatagacactaaattgtttagcaagagtggttgagccaggttcctggtggaagtgtttccaccggaagacatgggggaagcagttgtgggggaatattaaaggggaaacttttccctctggcctttgggacccca

SEQ ID NO: 169229 - DNA, 912 bp, Homo Sapiens
ggggcttccggttctgacggacgcttcggccgtaacgatgatcggagacatcctgctgttcgggacgttgctgatgaatgccggggcggtgctgaactttaagctgaaaaagaaggacacgcagggctttggggaggagtccagggagcccagcacaggtgacaacatccgggaattcttgctgagcctcagatactttcgaatcttcatcgccctgtggaacatcttcatgatgttctgcatgattgtgctgttcggctcttgaatcccagcgatgaaaccaggaactcactttcccgggatgccgagtctccattcctccattcctgatgacttcaagaatgtttttgaccagaaaaccgacaaccttcccagaaagtccaagctcgtggtgggtggaaaagtgttcgccgaggtgtgcatggtttcccagccacgtccctgttttcaaagatagtttcactttggtctctgaattgaaatgctgtctactgaaagggtttcaggagcgtttatgtaaggggctgtgatgaaattgcattccccatagataaaagaaaaatcatttctatccagagatctgagcagaaggattggcttgttagttaaacacagccgtatttttggacattcagtgttactttgctgagtctgacagccctctggggcccggccaaggggccctggttaacaaactggctttccacatcccaacaagggcctgcctgggccactcaggggcgagctggcgaattaccccttaaagggctttaaagggaaccgggccccaccctggggaaagaaaaaacccccggccctttcccggggaaataaaacacctaaaatttggttaacccaaaaaaaggggtttgagaccctaaaattccccccggggggaaaaaaggggttttt

SEQ ID NO: 169230 - DNA, 1210 bp, Homo Sapiens
ggggcttccggttctgacggacgcttcggccgtaacgatgatcggagacatcctgctgttcgggacgttgctgatgaatgccggggcggtgctgaactttaagctgaaaaagaaggacacgcagggctttggggaggagtccagggagcccagcacaggctgttcggctcttgaatcccagcgatgaaaccaggaactcactttcccgggatgccgagtctccattcctccattcctgatgacttcaagaatgtttttgaccagaaaaccgacaaccttcccagaaagtccaagctcgtggtgggtggaaaagtgttcgccgaggtgtgcatggtttcccagccacgtccctgttttcaaagatagtttcactttggtctctgaattgaaatgctgtctactgaaagggtttcaggagcgtttatgtaaggggctgtgatgaaattgcattccccatagataaaagaaaaatcatttctatccagagatctgagcagaaggattggcttgttagtttaacacagccgtatttttggacattcagtgttacttgctgagtctgacagcctctgggcccggccaggggccctgttaacaaactgctttcacatcccaacagggtctgcttggccactcagtgcagctgcgattaaccctaaaggctttaaggaacgggccacctgtaacagagacaccagccttcctgtatagacactaaattgttagcaagagtgttgagctagttcctggtgaagtgtttccacagaagacatgtggagcagttgtggggatattaagggaaactttcctctgccttgacccctttgttaaataaaatgactttgggagccattcattgtacagttgcaggaatgagagtgattttatgatgtggtacattgggaccatgttctaaaaccttgggtttctgagtctgctttttgagtaggtgattttgacggttgaaaaaccaggggccttcatctaggaaatacagcattttccagaagcttctttgaacagggaatcctggttttgttgccaaaatgaaacgcccggggttggcgctgaatcccacaactgtgtgatttgcttgttgagttttccgttgtctggtttcaacgtcgtttgtttataccaataagaatgagcctgaatgtcggtggttttgaaatcctgacttggaggtaaacctggaggcaggcaccca

SEQ ID NO: 169231 - DNA, 1769 bp, Homo Sapiens
caacccccaggaaaacaaagggaaaatgtccttggggaaacaagggggcccaacaacaattgttggcccacatggttacccccagggccgaacgcagggcccaacgggcaaagaggctgttatctcccagccctggcgcttccgggcctttcttgaggccaccatgggaatgtgatgtgtgagagaggggctaggagagacagagacacacgcaccctgggatcggcggtccggacaggggcagggaaaccacacgccctactttgccctttcctgtccatcccagacctactcagatccctcagtgcctaagaaaacaggacagtgaggactgggggttaggggacggggcttaggggcctgggcagggcccgtgagaggtggagggtgggaaagagggagggaggggtgactgtgtggtggtgctgcctctgaacaccctccccttccccagtccccagccctatggtgatttaaaggggctgagaagccaagaggcagcgggcccatggaaagcaggaagacctgggggtggcaggtggccactaacagcccagcagctccaggcgcagggcgatgcggttgtgccaggctacaggcaggatgcgcacatagcgagccaggatgggcgtctcaaacaagttcttcttgtgggagtggttgtcccagttgccagggaagatcttactgctgccagtcctggggtcctggtactcagtccagttcgcactgtcattactgtaggcaaccttgtaggatgccacaaactggacagagccaaagttacgggccccctgggtgatgatgcctgtcacctccttcgaggagcccaggtccacctgcagccactgatcgttaccgtagctccccgcaacccaggcgttgaagttgccctgcttgtccagccgtgcataggaggggttccagctgaagagatgcaagccccaggtcttgtagctgctggaggccgtgatctgcttgtcagggatgctgttattcttcaggcccaggggattggcgcatccgttcagctcacagcccagtagctcaaagcgcagagtgcagcccgtgtgccagctcgtggggtacaatctcacgtactgagcctccacaggggtctcaaacaggttgacatgcaccgcgtttttgttccagttacccacaaactccttgtgttttttattaacatcatggatgaaatcgaattcgtgtccattaaggctgtaggccaccttgaaggccttcaggtactcatgactggccaagcggctggcaccctgcgtcaccacacctgttacccacatcctccgcagcaggttcacctggatccaggggttatcgtcattgctgctgggtgtccaggcattgaccatgcctgcgcggttcaggcgggccagctccgggacccaatgctgcaaacccaagaaggtcacacgcacagacgaggcggcgatctgtgagttggcaatgttcccattctccaggcccagtggctcgacacatttcgtctcacagtggttgcccgcgtagcccttaaggcacgtgcaggtgtacgaggggaagacatctcctcgcacttcttgggaaatctcctcgcataaaccaccgttgtggcaggggtttttggaacagatatccagggcgacgaggaggctgggggcgcagagcagcgcgccgcacagcgcggccagcaggcgggggcgcggcatgctgcggggacgcgggcgctggaatgggcacgctgggctgctcagaccccgcggggttct

SEQ ID NO: 169232 - DNA, 563 bp, Homo Sapiens
  misc_feature (20)..(20): n is a, c, g, or t
  misc_feature (24)..(24): n is a, c, g, or t
  misc_feature (56)..(56): n is a, c, g, or t
ttcccaccttccacttttcngggnccttgccccagcccttaagcccggtcccttancccccagtcctcactgtcctgttttcttaggcactaagggatctgagtaggtctgggatggacaggaaagggcaaagtagggcgtgtggtttccctgcccctgtccggaccgccgatccccaggtgcgtgtgtctctgtctctcctagcccctctctcaaacatcacattcccatggtggcctcaagaaaggcccggaaacgccaggctggagataacagcctcttgcccgtcggccctgcgtcggccctggggtacccatgtggccacaactgctgtggccccctgtccccaagacacttccccttgtctccctggttgcctctcttgccccttgtcctgaagcccagcgacacagaagggggtggggcgggtctatggggagaaagggagcgaggtcagaggagggcatgggttggcagggtgggcgtttggggccctctatgctggcttttcaccccagaggacacaggcagcttccaaaatatatttatcttcttcacgggaa

SEQ ID NO: 169233 - DNA, 388 bp, Homo Sapiens
  misc_feature (37)..(37): n is a, c, g, or t
  misc_feature (67)..(67): n is a, c, g, or t
  misc_feature (87)..(87): n is a, c, g, or t
  misc_feature (99)..(99): n is a, c, g, or t
  misc_feature (182)..(182): n is a, c, g, or t
  misc_feature (236)..(236): n is a, c, g, or t
  misc_feature (244)..(244): n is a, c, g, or t
  misc_feature (271)..(271): n is a, c, g, or t
  misc_feature (279)..(279): n is a, c, g, or t
  misc_feature (288)..(288): n is a, c, g, or t
gtgtgtcctctgtctctcccctaaaccccctcttctnaaaaacatcaaattccccatggtggccctnaaaaaaaggcccggaaaacncccaggctgganataaaagcctcttgcccgttcggccctgcgtcggccctggggtacccatgtggccaaaactgctgtggccccctgtccccaanaaacttccccttgtctccctggttgcctctcttgccccttgtcctgaaacccancgacacanaagggggtggggcgggtctatgggganaaagggancgaggtcanaggagggcatgggttggcagggtgggcgtttggggccctctatgctggcttttcaccccagaggacacaggcagcttccaaaatatatttatcttcttca

SEQ ID NO: 169234 - DNA, 513 bp, Homo Sapiens
  misc_feature (383)..(383): n is a, c, g, or t
  misc_feature (478)..(478): n is a, c, g, or t
  misc_feature (486)..(486): n is a, c, g, or t
ctctttcccaccctccacctctcacgggccctgcccaggcccctaacccccgtcccctaacccccagtcctcactgtcctgttttcttaggcactgagggatctgagtaggtctgggatggacaggaaagggcaaagtagggcgtgtggtttccctgcccctgtccggaccgccgatcccaggtgcgtgtgtctctgtctctcctagcccctctctcacacatcacattcccatggtggcctcaagaaaggcccggaagcgccaggctgggagataacagcctcttgcccgtcggccctgcgtcggccctggggtaccatgtggccacaactgctgtggccccctgtccccaagacaattccccttgtctcctgggtttgctntttttgcccttgttcctgaagcccagcgaacaaagaagggggttgggccggtttttggggagaaagggagcgaagtcagaggaaggcatgggttngcaaggtnggctttggggctttatgttggtttttg

SEQ ID NO: 169235 - DNA, 713 bp, Homo Sapiens
aattggactctccgcctcccccgacagggcgaagtggaagaagcagtttgggccaaccaaggagaccccaccttgagccttaaacctaatgggtccacctactcatatagcatcttacacacctcccagcttctgcccaaccttcagcagtgacaagtccccaagagactcgcctgagcagcttgggctgcttttcacttccacctgtcaggatgcctgtgatcatgctctcagctccacctggcatgagaagggatcctggcctctggcatattcatcaagtatgagtactggggatgagtcactgtaatgatgtgagcagggagccttcctccctgggccacctgcagagagctttcccaccaactttgtaccttgattgccttacaaagttatttgtttacaaacagcgaccatataaaagcctcctgccccaaagcttgtgggcacatgggcacatacagactcacatacagacacacacatatatgtacagacatgtactctcacacacacaggcaccagcatacacacgtttttctaggtacagctcccaggaacagctaggtgggaaagtcccatcactgagggagcctaaccatgtccctgaacaaaaattgggcactcatctattccttttctcttgtgtccctactcattgaaaccaaactctggaaaggacccaatgtaccagtatttatacctctaatgaa

SEQ ID NO: 169236 - DNA, 884 bp, Homo Sapiens
  misc_feature (65)..(125): n is a, c, g, or t
  misc_feature (790)..(793): n is a, c, g, or t
  misc_feature (797)..(798): n is a, c, g, or t
  misc_feature (800)..(802): n is a, c, g, or t
  misc_feature (806)..(807): n is a, c, g, or t
  misc_feature (809)..(814): n is a, c, g, or t
gggaccatataaaagcccgctgccccaaagcttgtgggcacatgggcacatacagactcacatannnnnnnnnnnnnnnnnnnnnnnnnnnnnnnnnnnnnnnnnnnnnnnnnnnnnnnnnnnnngtttttctaggtacagctcccaggaacagctaggtgggaaagtcccatcactgagggagcctaaccatgtccctgaacaaaaattgggcactcatctattccttttctcttgtgtccctactcattgaaaccaaactctggaaaggacccaatgtaccagtatttatacctctaatgaagcacagagagaggaagagagctgcttaaactcacacaacaatgaactgcagacacagctgttctctccctctctccttcccagagcaatttatactttaccctcaggctgtcctctggggagaaggtgccatggtcttaggtgtctgtgccccaggacagaccctaggaccctaaatccaatagaaaatgcatatctttgctccactttcagccaggctggagcaaggtaccttttcttaggatcttgggagggaatggatgcccctctctgcatgatcttgttgaggcatttagctgccatgcacctgtccccctttaatactgggcattttaaagccatctcaagaggcatcttctacatgttttgtacgcattaaaataatttcaaagatatctgagaaaagccgatatttgccattcttcctatatcctggaatatatcttgcatcctgagtttataataataaataatattctaccttggnnnnaaanngnnngaannannnnnnccctgtccggccgccctcggcccctcaagaaagctttcctagaccaattctttttggcgccgcggggccc

SEQ ID NO: 169237 - DNA, 709 bp, Homo Sapiens
cccagtgccagtgtgcacgtgggcagggtttgatggtgccctccgatgcaatggagatgcaaactgccaggacaaatcagatgagaagaactgtgaagtgcttgtttaattgatcagttccgctgtgccaatggtcagtgcattggaaagcacaagaagtgtgatcataatgtggattgcagtgacaagtcagatgaactggattgttatccgactgaagaaccagcaccacaggccaccaatacagttggttctgttattggcgtaattgtcaccatttttgtgtctggaactgtatactttatctgccagaggatgttgtgtccacgtatgaagggagatggggaaactatgactaatgactatgtagttcatggaccagcttctgtgcctcttggttatgtgccacacccaagttctttgtcaggatctcttccaggaatgtctcgaggtaaatcaatgatcagctccctcagtatcatggggggaagcagtggacccccctatgaccgagcccatgttacaggagcatcatcaagtagttcttcaagcaccaaaggcacttacttccctgcaattttgaaccctccaccatccccagccacagagcgatcacattacactatggaatttggatattcttcaaacagtccttccactcataggtcatacagctacaggccatatagctaccgacacttgcatccga

SEQ ID NO: 169238 - DNA, 347 bp, Homo Sapiens
aaaagaaaaggttgtgggagactgaccagggtaagatcccacctggtccaaaagctttcgggccttactttttttattataaaaattctcacgtcgggtaatcttctatgtcagagctagtgttttcaaaaggtttcacattcccccaagacaaaagtgatttccgtccattataatagggtcacgtgatatgtgatccatagcaattttggatgtgaagaagggaaggcacatcatggacttaataatagtatcagtcggtgcaacagtgggcaacatgtgccttcacactttcaccataaagagacgggttggagggttggccttctaaagtctgcaactccaag

SEQ ID NO: 169239 - DNA, 496 bp, Homo Sapiens
  misc_feature (60)..(60): n is a, c, g, or t
aaatctggtctatccaacaggggtctggcctaagggaaaaaacggcccttagagagtgangaaccctaccttaaacactacctggtacctccaactccatgcctaaacattcctgaatttgaagcaaagcctaaatccatgggtccttagtctgtttagcaaaatctcccacaagatgaaatttagcttactaccccaaactgtacaatgtttggggtccaatttagacacaaaaaaatgttttataatcctagacattagattaatgaactttttaaaaacaaagtcatgtttgggcttagaagtttgcataatgttacacagaatgattatgatatcttccgaaacagcttggggttggggggaagttacacataggtgcatttgcataactatccaaactattttactgttttcacaagtacaacataaataacaaaggtgctaatttcaaagacaggtttcaaacaatgagaataagaatatattatttcat

SEQ ID NO: 169240 - DNA, 778 bp, Homo Sapiens
  misc_feature (707)..(707): n is a, c, g, or t
gggtccggcgggctggtgaggaatggagccggtaggctgctgcggcgagtgccgcggctcctccgtagacccgcggagcaccttcgtgttgagtaacctggcggaggtggtggagcgtgtgctcaccttcctgcccgccaaggcgttgctgcgggtggcctgaatgttcgcatcttaccacatacagttctttacatggctgattcagaaactttcattagtctggaagagtgtcgtggccataagagagcagaggaaaagaactagtatggaaacagcacttgcccttgagaagctattccccaagacaatgccaagtccttgggattgtgaccccaggaattgtagtgactccaatgggatcaggtagcaatcgacctcaggaaatagaaattggagaatctggttttgctttattattccctcaaattgaaggaataaaaatacaaccctttcattttattaaggatccaaagaatttaacattagaaagacatcaactcactgaagtaggtcttttagataaccctgaacttcgtgtggtccttgtctttggttataattgctgtaaggtgggagccagtaattatctgcagcaagtagtcagcactttcagtgatatgaatatcatcttggctggaggccaggtggacaacctgtcatcactgacttctgaaaagaaccctctggatattgatgcctcgggntggtggttggactgtcattttagtggacaccgaaatccagaagtgccactgttgctcctcaacgagggacg

SEQ ID NO: 169241 - DNA, 505 bp, Homo Sapiens
gtatatgtgtggccggtggtagcggaggcttggtggtacactgctgctctgcttgaagggagctcggtgccctgctcaggctcgatcaccgctcccctccagctgatgactgtcctctgcggatctccttccgggcggggtatccacaggggcttcttgcctttttgtggcctcctcctgggtcccatccttcaggtcttggcttgggggtctaatctgcaggtgaggtggtccccgctggatgtgtctttgtgtcttctgtgacgaaatctcaggtaagttctcagggtcggtgtccgccttctgaggagctggtaagacgggtggatttgccggttttaacccagcaatttctggcctcatcttctgctcttcctctagcctgaaagccagagctttccaatggtcagccaagttgatgtagaagaggagtccacagaaaagcagaaaggcaaggaggaagagaatcatataccgctgcaatctcgacactttgcatccagag

SEQ ID NO: 169242 - DNA, 986 bp, Homo Sapiens
  misc_feature (97)..(224): n is a, c, g, or t
ggcagctctctctgcacggtccaatgcaatctgctgttttatacgttctcgagctgccctatcttctgctttctctcagtttctttcctaccagcannnnnnnnnnnnnnnnnnnnnnnnnnnnnnnnnnnnnnnnnnnnnnnnnnnnnnnnnnnnnnnnnnnnnnnnnnnnnnnnnnnnnnnnnnnnnnnnnnnnnnnnnnnnnnnnnnnnnnnnnnnnnnnntcaagttttattgttagtctttccactcggatgttgaggtcctctgcaggtctctgatctgagcatccactaggctcctgagaggaagtgccatgccctgcactttctcctcctgttgcagtatctgactttgtatcagaagtgggtggtatctcacaaagctctgcatttctggactgagagtttccaccaagtgttgttaggttcaaatgacgcagatggagtagacactgaactttctgactgactgccatttgctactgatgtttcactttttagcaaatgcatctgtcggaccttgtgaattcttgtaacaagttcatctgcagaaacacttcctgctattacttccaagggaattccactgtctccaataaagaaactggatggaacacacactacaggatagatttgtgaaaactgtaggcaggcttcacttttggtatcgattttaatagcaacaaaactgtttgaagatgcttctgtaactttatcatcttcccaacttgcagccatctgtgtagactgttcatcatcacctgccacgaacaccacgaagaccgcgccgctccttttggccgtcgcgatggcggccggaatggcgccctggaaccacagcatcgctcccttcgggcccaggcgctcgctcggtgtgtagtctccgcagtcccgaagccggctccgccctccgtcttcgtccggctctgcggcccccgcaaccttggctggttcggcccccacctccggctccgcacaagcccc

SEQ ID NO: 169243 - DNA, 567 bp, Homo Sapiens
agaatttgcccctggagccacaaaattccgccgcgaggaagggactcgggccccaatttgtgccgtttttaaaccttcccgcccggaaacccggtgttccaaaggaagggcgggctttgctcccattagggtgaagattaagtcctggaacgccgtggccacttggctctgggtggccaacgatgagaactgtggcatctgcaggatggcatttaacggatgctgccctgactgcaaggtgcccggcgacgactgcccgctggtgtggggccagtgctcccactgcttccacatgcattgcatactcaagtggctgcacgcacagcaggtgcaacaacactgccccatgtgccgccaggaatggaagttcaaggagtgaggcccgacctggctctcgctggaggggcatcctgagactccttcctcatgtggcgccgatggctgctggggacagcgcccctgagctgcaacaaggtggaaacaagggctggagctgcgtttgttttgccatcactatgttgacacttttatccaataagtgaaaactcattaaactactcaaatctt

SEQ ID NO: 169244 - DNA, 2243 bp, Homo Sapiens
  misc_feature (158)..(158): n is a, c, g, or t
  misc_feature (278)..(278): n is a, c, g, or t
  misc_feature (733)..(793): n is a, c, g, or t
  misc_feature (818)..(911): n is a, c, g, or t
  misc_feature (1854)..(1854): n is a, c, g, or t
  misc_feature (2136)..(2144): n is a, c, g, or t
cggtgaggggggtcaccgagaggacgaagcgtgcgtctttatggaatttgaataagctatgaacctattgcgaccgtgtgtttacagctctctagtgatggacaaatacgaggcgtgagtgtctgacatattagtcggcggttctatttcaatttctnttgggcgtatgctacacaaacgcggatcgttgggaaataggtcaatgcgggctgcgctcggttgaagtcgcgctgttgaatcttacagttttggattgtgctactgccgcactattcggntgtgcctgacgccatatactgcagaacgctcatggtatgtgcgtcgtcaagtatctgttgtccccatttaggagactaagtaaagctcataccatgcgcgtctcgtgccacactactaagcagtctgatggttatagaattgtgcgagttgtagtgacctgcttgacgttgtcacctgcacgatattttgttccgcgttcggcaggatcatactcagtctgtctgtcactctcaggttatctgatcgcataaccaccgtcagctctcagctctcaactatattgaatactttctattatcttggtgggcgtgatatgaaggatgtgtgtgggcatttatattcgccgtgattacaatcgtgggggagtagcgctccaagaagtgtaaaaagttgcgcggcgataaggggaggggggaattaggggcggcgaattttggtggggtataaagtacannnnnnnnnnnnnnnnnnnnnnnnnnnnnnnnnnnnnnnnnnnnnnnnnnnnnnnnnnnnngaagtacggcgcgggcgaaaacgtnnnnnnnnnnnnnnnnnnnnnnnnnnnnnnnnnnnnnnnnnnnnnnnnnnnnnnnnnnnnnnnnnnnnnnnnnnnnnnnnnnnnnnnnnnnnnnttatggcgatcagggtgggggttgcgcacacgatcctcgattgttggaaaggggggcgggggcaccgcaaaacttcgcgccctgtggggcgagaccggtgtcggccccgtcccccgcaccggccacctagctggatccggttcagtttaatgatgtcgtccagagacatgtccattttgtcggccatggcgggcgcggaatcgggcatcggctcgagcccgcgcgtcagcacgccggcacgtcacttccggcgccgcgtgaggccttccggtgccacggcctcggagcggctgctgattggccgctggcggacggctgcgcgcgcgggacggggtgaggcggggaggcgcgtgcgcactggcgtgcgagactcggcgggcgctgttgagggagtcgggccgcgactgtggtcgtttttataccttcccgcgcggacgccggcgctgccaacggaagggcgggtagggcggctctgctgccatgaaggtgaagattaagtgctggaacggcgtggccacttggctctgggtggccaacgatgagaactgtggcatctgcaggatggcatttaacggatgctgccctgactgcaaggtgcccggcgacgactgcccgctggtgtggggccagtgctcccactgcttccacatgcattgcatcctcaagtggctgcacgcacagcaggtgcagcagcactgccccatgtgccgccaggaatggaaggtcaaggagtgaggcccgacctggctctcgctggaggggcatcctgagactccttcctcaggctggagccgatggctgctggggacagcggcccctgagctgcaacaaggggggaaacaagggcctggcagctggcgtctggttttgcccatcacccaatggttgacccctttcttacccccataaagccgaaataactccattctaaacctaactcccncgaacggaacgtccggcgcgtttcgccctaaccgcatatccccctttttgtccggggccccgtcccttcggggctccctccgaaggaaagcctttttccggaggacaccaatttcctgttggggggtggcggcgggggccccgtactacagggcgacggcgcgaagcgtgggggctactcacaccgtgggtttccctccagcgggaggacaccccggcggacccatggcaccacgagcggcccttggggaattttcgcgcccgctgatgtgaacgacatcannnnnnnnngggaggggtcgaacccctgatatcggagttcctccgaccaacacacctccaaagaggtgggaggtcttcctgccaggtggcttcgcctccccggcgtta

SEQ ID NO: 169245 - DNA, 2190 bp, Homo Sapiens
  misc_feature (158)..(158): n is a, c, g, or t
  misc_feature (278)..(278): n is a, c, g, or t
  misc_feature (733)..(793): n is a, c, g, or t
  misc_feature (818)..(911): n is a, c, g, or t
  misc_feature (1369)..(1400): n is a, c, g, or t
cggtgaggggggtcaccgagaggacgaagcgtgcgtctttatggaatttgaataagctatgaacctattgcgaccgtgtgtttacagctctctagtgatggacaaatacgaggcgtgagtgtctgacatattagtcggcggttctatttcaatttctnttgggcgtatgctacacaaacgcggatcgttgggaaataggtcaatgcgggctgcgctcggttgaagtcgcgctgttgaatcttacagttttggattgtgctactgccgcactattcggntgtgcctgacgccatatactgcagaacgctcatggtatgtgcgtcgtcaagtatctgttgtccccatttaggagactaagtaaagctcataccatgcgcgtctcgtgccacactactaagcagtctgatggttatagaattgtgcgagttgtagtgacctgcttgacgttgtcacctgcacgatattttgttccgcgttcggcaggatcatactcagtctgtctgtcactctcaggttatctgatcgcataaccaccgtcagctctcagctctcaactatattgaatactttctattatcttggtgggcgtgatatgaaggatgtgtgtgggcatttatattcgccgtgattacaatcgtgggggagtagcgctccaagaagtgtaaaaagttgcgcggcgataaggggaggggggaattaggggcggcgaattttggtggggtataaagtacannnnnnnnnnnnnnnnnnnnnnnnnnnnnnnnnnnnnnnnnnnnnnnnnnnnnnnnnnnnngaagtacggcgcgggcgaaaacgtnnnnnnnnnnnnnnnnnnnnnnnnnnnnnnnnnnnnnnnnnnnnnnnnnnnnnnnnnnnnnnnnnnnnnnnnnnnnnnnnnnnnnnnnnnnnnnttatggcgatcagggtgggggttgcgcacacgatcctcgattgttggaaaggggggcgggggcaccgcaaaacttcgcgccctgtggggcgagaccggtgtcggccccgtcccccgcaccggccacctagctggatccggttcagtttaatgatgtcgtccagagacatgtccattttgtcggccatggcgggcgcggaatcgggcatcggctcgagcccgcgcgtcagcacgccggcacgtcacttccggcgccgcgtgaggccttccggtgccacggcctcggagcggctgctgattggccgctggcggacggctgcgcgcgcgggacggggtgaggcggggaggcgcgtgcgcactggcgtgcgagactcggcgggcgctgttgagggagtcgggcaacgactgtggtcgtttttataccttcccgcgcggacgccggcgctgccaacggaaggnnnnnnnnnnnnnnnnnnnnnnnnnnnnnnnnccatttgagatctttgaagatatcctcaacgtgaggctctgctgccatgaaggtgaagattaagtgctggaacggcgtggccacttggctctgggtggccaaccatgataactgtggcatctgccggatgggatttcccggatgctgccctgactgcaaggtgcccggcgaccactgcccgctggtgtggggccagtgctcccactgcttccgcctggacttgcatcctccggtggctgcctcgcacaggcaggtgcccgcagcccctgcccccctgtggccgcccaggaatggcaaggtccggggaacggaggcgcggaacctgccctctcgccggggggggcgatcctggaaacgtctgtccctccatgcgtgggcccctatagactgctggggcgaaaaaccacccccgcaacctgccaacacacggcggaaaaacacggggcctcgcgggcctgccgttttgccgtctcgcccgtgccactcagcggcgggcccgctgtttttgccccctacaggccgcgagccgcttccgttccgcaccaaagtctgagatctttccataaggttggaagggcggtggccccggaattaccacagccgccgatagtggagcgcgcggcccttctgcgtgctcctgtcggacgcaaggcgctgtcagaggcacgccctccacgcgcttcttgctgcggaccaggagggccttacgcaatgcgcaccactcggcaagagtgaggctctcactccgcgcacgtgcttcttctcgagaggaacgccaccccgtcgcggg

SEQ ID NO: 169246 - DNA, 961 bp, Homo Sapiens
ggggtgcgagactcggcgggcgctgttgagggagtcgggccgcgactgtggtcgtttttataccttcccgcgcggacgccggcgctgccaacggaagggcgggtagggcgagacggagtttcgtcatgttggccaggcccatttgagatctttgaagatatcctcaacgtgaggctctgctgccatgaaggtgaagattaagtgctggaacggcgtggccacttggctctgggtggccaacgatgagaactgtggcatctgcaggatggcatttaacggatgctgccctgactgcaaggtgcccggcgacgactgcccgctggtgtggggccagtgctcccactgcttccacatgcattgcatcctcaagtggctgcacgcacagcaggtgcagcagcactgccccatgtgccgccaggaatggaagttcaaggagtgaggcccgacctggctctcgctggaggggcatcctgagactccttcctcatgctggcgccgatggctgctggggacagcgcccctgagctgcaacaaggtggaaacaagggctggagctgcgtttgttttgccatcactatgttgacacttttatccaataagtgaaaactcattaaactactcaaatcttaaaaacgcgaaaccaccgcctgtgataaccaagcaaaacctaacttgttcgcccgccctcgggcccccgaaaaaagctttctaaacaccatttcgttttgggcgcgcgggccccacattgaggctaaagtgaaacatggggccataacctggtttccctagaggaaaccccctgggcccatgaaataagtggcttggcgattccctcaccacaataaaaaaacagccccgggcgcgggaaaacccgaagacggtttcttgaaccaaaaactcaacaaattgtggagctcccttcgagggggcccatttacacgtgggaaatcctaaattcaat

SEQ ID NO: 169247 - DNA, 986 bp, Homo Sapiens
ggggtgcgagactcggcgggcgctgttgagggagtcgggccgcgactgtggtcgtttttataccttcccgcgcggacgccggcgctgccaacggaagggcgggtagggcggctctgctgccatgaaggtgaagattaagtgctggaacggcgtggccacttggctctgggtggccaacgatgagaactgtggcatctgcaggatggcatttaacggatgctgccctgactgcaaggtgcccggcgacgactgcccgctggtgtggggccagtgctcccactgcttccacatgcattgcatcctcaagtggctgcacgcacagcaggtgcagcagcactgccccatgtgccgccaggaatggaagttcaaggagtgaggcccgacctggctctcgctggaggggcatcctgagactccttcctcatgctggcgccgatggctgctggggacagcgcccctgagctgcaacaaggtggaaacaagggctggagctgcgtttgttttgccatcactatgttgacacttttatccaataagtgaaaactcattaaactactcaaatcttgggaaaaaccaccctgggggcacgaggggagccgcgatccccctttggcggcccgcctcgggccctcggaaaaacgtttccaggacccgttcggttgggcgggggcgggccccattaaggcaactggaacatgggcgcatagcggtgctcccagggaaatccctcgggcccggactagggcgcttgggcatccccctcccaataaaaaaaggccccgggggcgccaaccgtaaacggttcttggaacaaatcccggagggggagtcctcaggagcccgttacatgggatctaaatcacacgggggcgtctccagccgggcgtccgatatccaaattctccccccacgtcccggggcagtgtatcgcgggaggcgggtgtgggaaatgtgtgttagcgcatttcgtgccggacagaggagaa

SEQ ID NO: 169248 - DNA, 449 bp, Homo Sapiens
gtgtactgctaggtatataaattatacgaatatagtaaaaaatgatggaaagtaaataaaagacacttgccaatttagaagctaaaaatggcattggaagttaaggactggtaaagctgtctccagtcctgcccaggggagaaggacattttgaccagggcacctatgaatacaatctcttaggccaaggcatctctagagtggagaaaggaaactttcagttgttgtctggtgagaatacccctcagaatcactccaagccacctacatattaactggttcccacacagaagaaaatgtaatgcctggctggtatttagagaagccagcttggcaggtgagttccatgctgcaaataaagtcttcagcttcagaccctcatcaagtctaaatttgattgttagaattagatgtcagcttgataaaatccatcatctaaaatgcaaaag

SEQ ID NO: 169249 - DNA, 515 bp, Homo Sapiens
tcggtacccctctggatgcaaagtgtcagggaagaagatgaaaaaaccttccacttctggacaaaatttccattctgatgtggattacagagggccaaagaatccaagcaagccaataaaagccccatcagcactacctcctcgactgcagcatccttcaggagtaagacaacatgcgttctctagtcattcttcagggtcacagtctcagaaattctccagtgagcacaaaaatcttagccggacaccttcacagatcataagaaaacctgatcgtgaaagagttgaggattttgatcacacaagtcgagaatctaactatttcggcctttccccagaagagcgcagagagaagcaagctatagaagaatcccgtttactctatgagattcagaacagagatgaacaggctttcccagccctttccagctcatcagtcaatcagtcagcttctcagagtagcaatccatgtgtccagaggacacttgcatccagagctctggatgcaaagtgtc

SEQ ID NO: 169250 - DNA, 860 bp, Homo Sapiens
  misc_feature (637)..(748): n is a, c, g, or t
gggctgtctgaggatcccgtcggatgcaagtgtctctggatgcgtgtcgacattcatgcaagtggggaaatgggcatgtgacccctgaaaaaagattctggaatccataatctcacctcgctgagaagaaactgccatttcagcagaaagcgcaatgacagtttctgcacagggactggagactatctccatgaaaagagcttggagtgaggaaattagttaatgtggatgaatgacgttacccatggagaatgaagtaagtagctagaagacaaaagcctcagaacacataaatctcaacgggtactgagtagaggactcagagctctgagataattggagctcatggctatcccagaacttggataacataaagttcttgtttctacaaagtgtgtatcctttccatatgtgagaactctgaggaagtacaaacttggaacaaaagaaatagtaaggtaatcttagaaagatgttgaaaagaaagctatggtggcatcttaactgtttcactgcctggcaatctatatgtattgtcactttgggacgcttatgattccacatgaagtggataaccagctcatagttcttgtggtactgaaaaccaagtattcagccaggtacagtggctgacacnnnnnnnnnnnnnnnnnnnnnnnnnnnnnnnnnnnnnnnnnnnnnnnnnnnnnnnnnnnnnnnnnnnnnnnnnnnnnnnnnnnnnnnnnnnnnnnnnnnnnnnnnnnnnnnngaagtgcatctcccataaacgaggtactgcaggaagaaagcagaaaatgagacccgagtacacacatgtaaccgggcgcgcgcacactgggttaagtaatcagcgtcggcta

SEQ ID NO: 169251 - DNA, 839 bp, Homo Sapiens
gggaaaaacactttgtgtgactgcaggatcggctccctctctgatcaacagttctagtactcttctttgtcagtatatcaacctacagctcctgaatgcaaagccacaagagtgtttaatggggacagtgggcactctcctgcttgaaaacccacttgggcagaatggactcacccaccaaggtcttctgtatgaagcagccaaggtgtttggccttcggagcaggaagctaaagctctttctgaatgagacccaaacgcaggaaattacagaacacatccccgtgaagactttgaatatgaagactgtgtatgtttctgtgttaccaacaacagcagacttctagcatgtacttatcaatgttgttcggtcagcccttccctaattacacctatcccctacacatacatgcacatagacacacacatgaacacactgaagatatttccttcaggtgtgtgtaaaatatgctgcttggattgaaattcaaatgggattgattagtcaagtaacttgagacctcacagtaatcttcacacttaaccttagacacctatgcagtcatgttgggagcaggttacaatgttacttcagcccacagtttatttctatacttgagttcttaagtacagaagatagaagtgatttaaatggcatagtatatatatcattttctggccttttaaaatttatttgagacctcttgatgaaatggacatattatatatttctgccacctggattttcctggataatttgatggaatattttaagtttcagtaaatcagaacaataaacaaactcagatataaagaaaaaacaccaccaaacacaaaaac

SEQ ID NO: 169252 - DNA, 276 bp, Homo Sapiens
acctagaggatcccggctatcacattatcataattagaaagcaagtaaaagagagccatgttgtgtcctgaatcaaagattaagattgagatttacccagttctgtgtatttgagttccaacagagagaatattcttgccttacaggagtgttctagcctccatttaccagattttaaagcataatgaaaagtgatgatcattacattccattgcattttattaacaacaacaacaaaaactggagcctaaaatttccagaaatagatccagagag

SEQ ID NO: 169253 - DNA, 499 bp, Homo Sapiens
cagataagacttggtgtacagggcggccagtatctgctaaacatatgcagactgaactattcagtgttgcctaggcattagcctgcacaacatttcgaggctagaacatagaatattttcagaaatactgttgtagtttgtgagtgttgttcataagttacacattagctatagagtggatgcatgaagccccatgacaccagtaaacttctcttaccagtaggtaaaccaaacaccattctgtcattagcagccctcttaaatgttgcctctccgtatcctgcttgcattttggtgtgcattgtgtttgtactgatctctcttaggtttttacggaatcaaaggaaactaatttttccttaatagcaagaaagatgaagaggtaaagggcattgaagcagaaatgtatagtttggggctacgacttagcaaactcgtacaggatacagaagtccttatttctaactactgctcttcgttaagtgctcttaaggagggg

SEQ ID NO: 169254 - DNA, 696 bp, Homo Sapiens
  misc_feature (575)..(575): n is a, c, g, or t
  misc_feature (610)..(610): n is a, c, g, or t
  misc_feature (668)..(668): n is a, c, g, or t
cggaaggcagagaagcatcgaggccgagctggggccgatgaagatgacaaggggcctagggcaccccgcaccacctcaacctaagaagtccaagaaagcaagtggcagtgggggtggcagtgctgctttagagcccttctggctttggaccttctggaggaagtggcaccaagctccccaaaaaggccacaaagacagccccacctgccctgcctacaggttatgattcagaggaggaggaagagagcaggcccatgagttacgatgagaagcggcagctgagcctggacatcaacaaattacctggggagaagctgggccgagttgtgcatataatccaagccagggagccctctttacgtgattcaaacccagaagagattgagattgattttgaaacactcaagccatccacacttagagagcttgagcgctatgtcctttcctgcctacgtaagaaaccccggaagccctacaccattaagaagcctgtgggaaagacaaaggaggaactgggctttgggagaaaaagcgggaattaggaaaagcggttacaagatgtcagcggacagctncaattctacttaaaaagccccccaaggaaagcgantgaggaaaacagagtccttcctctggcacagcaagtgggcagtgttcacgccttgggnctttccagcttttaggttcagttttcca

SEQ ID NO: 169255 - DNA, 520 bp, Homo Sapiens
ggagggaagagtgtctggaggtgagagtgtctggaggtaaaggtcgctgtcaggaggtatcgatgacttcgcgtcagtcatgaggagaaatgaacagctgaccctacatgatgagaggttggagaagttttatcagcaatatgatgatgatgaaatgggagctctggataatgcagaattggaaggttctattcaagtggacagcaatcgcttacaggaagtttggaatgactactataaagagaaggcagagaatggtgtaaaattgaatacccttgaaccctgggaggatcaagacctgccaatgaatgagcttgatgagtctgaggaggaagaaatgattactgtagtccttgaagaagccaaagagaagtgggattgtgaatctattggtagtacatactcaaatttatataaccatccacagcttatcaagtatcaaccaaagcccaaacaaattcgaatatcttctaaaacaggaatacctctcaatgtcttaccaaagaaaggactcacagca

SEQ ID NO: 169256 - DNA, 329 bp, Homo Sapiens
tctggatgcaaagtgtcgagactactttcctttaaccataggggttaagtagggcagcccatttagtttacacgcgcataagactaatttacaaaatcactctatacagtcattagatgtaacatccttccctgagtagaaagtaatgcatgtgtttggagattattttctgtaatgctgggaacaaacctgttttaaaagcacactgctaaaagtaggtgatataagaccatttgctgtttttattaaagtatgtgtgtgtatcagtgtctcaatgtgaagattgtaacctcaagattaggaatcttaaaagagccactttgccagag

SEQ ID NO: 169257 - DNA, 753 bp, Homo Sapiens
  misc_feature (65)..(65): n is a, c, g, or t
tgttgtgatccagcgaggtcacaccttacaggagcagcgttcgaacttcaattgttggtatttanccacaacagaagtgtagaggccaccaacacttgcaagaaagatgacaaaccagacataatatgtgtaaccatagaaaaatcctttttctttaatttcagctccatctgacaagtagacgccagctaatgtcacaataatccctgatagatacatttgaatgtttctcacccaaagagaagtatctgaactctttaaaactttttcaaaatatactcctgcaaatcctgagcacaatacagcaatagctatagcgccaaaccctaataatggattttgttccaccaccacttttgtagcttgggctggtttccactgtacaagcgtaactccagcacacagcataaaaactgaaacccactgtaatttgctgagtgtccggtttaacattaaaacagtgcataaagcagtacacggaatcttcaactggtaggtcacctgggacactgctgcatccagattgctaagagctaggaaagccatgttgttctgaacagcatacactaacgatggcacacttaacttcaacagttccttggggctccccaagacattttctcttaaagatgctttgaatctacccagactaccagtttctttagctaaaattcccacacttagcaataactttataacttctgtgatacacacggctgtggttgaaaagtagagttctttgtctgatgtccc

SEQ ID NO: 169258 - DNA, 964 bp, Homo Sapiens
caggctggtaccggccggaatgcccgggatattcgtcgacccacgcgtccgattcataaatcctggtgtggagcttgcaaagctctaaagcccaaatttgcagaatctacggaaatttcagaactctcccataattttgttatggtaaatcttgaggatgaagaggaacccaaagatgaagatttcagccctgacgggggttatattccacgaatcctttttctggatcccagtggcaaggtgcatcctgaaatcatcaatgagaatggaaaccccagctacaagtatttttatgtcagtgccgagcaagttgttcaggggatgaaggaagctcaggaaaggctgacgggtgatgccttcagaaagaaacatcttgaagatgaattgtaacatgaatgtgccccttctttcatcagagttagtgtactaggaaggaaagcagcagggaagggaatattgaggaatcatctagaacaattaagccgaccaggaaacctcattcctacctacactggaaggagcgctctcactgtggaagagttctgctaacagaagctggtctgcatgtttgtggatccagcggagagtggcagactttcttctccttttccctctcacctaaatgtcaacttgtcattgaatgtaaagaatgaaaccttctgacacaaaacttgagccacttggatgtttactcctcgcacttaagtatttgagtcttttcccatttcctccccttactcacttatggtgaagggacctagtacctctttctcaacgttaatgccgaaggctttcttaacaccacccatacatatcttgtggacgtttccccaggtaacgggtcctttccgagaggggtcccataacctcctcatgggcggggcggtgaggtggcccggggccttaaaaggggtcggggccctactgtaggcttagttcttagtatgatagttgatgatatata

SEQ ID NO: 169259 - DNA, 933 bp, Homo Sapiens
  misc_feature (669)..(669): n is a, c, g, or t
  misc_feature (760)..(760): n is a, c, g, or t
tggggagcccccgggtccgcggatagcaccaggctactgcactggggaagtcaccctaccgccttcgttgtcagttatgcagcggcactgcccgcagcagccctgtggcacaaactcgggagcctctgggtgcccggcggtcagggcggctctggaaaccctgtgcgtcggcttctaggctgcctgggctcggagacgcgccgcctctcgctgttcctggtcctggtggtcctctcctctcttggggagatggccattccattctttacgggccgcctcactgactggattctacaagatggctcagccgataccttcactcgaaacttaactctcatgtccattctcaccatagccagtgcagtgctggagttcgtgggtgacgggatctataacaacaccatgggccacgtgcacagccacttgcagggagaggtgtttggggctgtcctgcgccaggagacggagtttttccaacagaaccagacaggtaacatcatgtctcgggtaacagaggacacgtccaccctgagtgattctctgagtgagaatctgagcttatttctgtggtacctggtgcgaggcctatgtctcttggggatcatgctctggggatcagtgtccctcaccatggtcaccctgatcaccctgcctctgcttttccttctngcccaagaaggtgggaaaatggtaccagttgctggaagtgcaggtgcgggaatctctggcaaagtccagccaggtggcaattgaggctccngtcggccatgcctacagttcgaagcttggccaaccgaggaggccgaaagccccaaaagttaagggaaaagctgcaagaataaagaacctcaacccaaaaggagggctgggggccttatgcaatcaactcctggaccacctaaaaattttcaggaatgcctgccttgaaaaagt

SEQ ID NO: 169260 - DNA, 801 bp, Homo Sapiens
ggcatgcagcgctgaggagcggcgacccagcacggcggcgccatgaacctcctgccgtgtaaccctcacggcaacgggctgctctacgccggcttcaaccaggaccacggatgctttgcgtgtggtgataggaaaatggattccgagtctataacactgatccactaaaagaaaaagagaaacaagaatttctagaaggaggagttggccatgttgaaatgttatttcgctgcaactatttagctttagttggtggtggaaaaaagccgaaataccctcccaacaaagtaatgatctgggatgacctgaagaagaagactgttattgaaatagaattttctacagaagtcaaggcagtcaaactgcggcgagatagaattgtggtggttttggactccatgattaaggtgttcacattcacacacaatccccatcagttgcacgtcttcgaaacctgctataaccccaaaggcctctgtgtcctttgtcccaatagtaacaactccctcctggcctttccgggcacgcacacgggccatgtgcagcttgtggacctggccagcacggagaagccacccgtggacattcctgcacacgagggtgtcctgagctgcattgcactcaacctgcagggaacaagaattgcaactgcatccgagaaagggaccgcttataagaatatcggatacttcatcagggcattttaattccaggaaactgagaagagggatctcaaggcagccaaataattaactggcatcaacttccaatcagggatgcgtccctcatctgcggtatcca

SEQ ID NO: 169261 - DNA, 999 bp, Homo Sapiens
ggggcgcaggcgcaacgcgactcccgaggcgcgggccgcccccttggctggtttggatccgggtcagtcgggtgccgagatttgggagagacgctctgaactgactgccccgcatcaccggagcgtcccagctgcgaggagtgtaaacaggaacatcgataagtagtgtaaaaacttgcacaatgaaatccgaagccaaggatggagaggaggagagtctacagactgctttcaaaaaattaagagtggatgcatcagggtctgtagcatctctgtctgttggagaaggcacaggtgtcagagcaccagtcagaacagcaacagatgataccaaacctaaaaccacatgtgcatctaaagacagttggcacgggtctacaaggaagtcttcacgaggagcagtgagaactcagcgtcgtcgacgttctaagtctcctgtccttcatcctccaaagtttatacattgcagtacaatagcgtcttcttccagcagtcaactcaagcacaaaagccagactgactcacctgatggcagcagtgggctgggaatttcatcccctaaagagttcagtgcaggagaaagctctacttctctcgatgctaatcacacaggggcagtcgttgagcctttgagaacttctgttccaaggctcccatcagagagtaagaaggaagactcctctgacgctacccaagtccccccaagcaagtctcaaagccagtgatctctctgactttcaatcagtttccaagctaaaccaggggcaagccatgcacatgcataggcaaggaatgccagtgtaagagatggcatgaaaatggaagtgtattcctttttcaggcctgcagaatggcccctccccttggctccagaacgaagatccacacttgaggactactctcagtcgctgcacgccagaactctgtctggctctccccccatcctgtttctgagccaacttccagtcttcgggggatgatgtggacccattgaaggac

SEQ ID NO: 169262 - DNA, 1533 bp, Homo Sapiens
gacgctctgaactgactgccccgcatcaccggagcgtcccagctgcgaggagtgtaaacaggaacatcgataagtagtgtaaaaacttgcacaatgaaatccgaagccaaggatggagaggaggagagtctacagactgctttcaaaaaattaagagtggatgcatcagggtctgtagcatctctgtctgttggagaaggcacaggtgtcagagcaccagtcagaacagcaacagatgataccaaacctaaaaccacatgtgcatctaaagacagttggcacgggtctacaaggaagtcttcacgaggagcagtgagaactcagcgtcgtcgacgttctaagtctcctgtccttcatcctccaaagtttatacattgcagtacaatagcgtcttcttccagcagtcaactcaagcacaaaagccagactgactcacctgatggcagcagtgggctgggaatttcatcccctaaagagttcagtgcaggagaaagctctacttctctcgatgctaatcacacaggggcagtcgttgagccttttgagaacttctgttccaaggctcccatcagagagtaagaaggaagactcctctgacgctacccaagtcccccaagcaagtctcaaaagccagtgatctctctgactttcaatcagttttccaagctaaaccaggggcaagccatgcacatgcataggcaaggaatgccagtgtaagagattggcatgatatgggaacgtatattccctttttcaggcctgcaggagtgtccctcccttggctccagaacgaagatccacacttgaggactactctcagtcgctgcacgccagaactctgtctggctctccccgatcctgttctgagcaagctcgagtcttcgtggatgatgtgaccattgaggacctgtcaggctacatggagtattacttgtatattcccaagaaaatgtcccacatggcagaaatgatgtacacctgatagcaagaagctaattcatatgctttaaaccaatgaaggcttgtcaaagagatttagttaatggcagaccttgtggccactttgtgtgagaagacatctctttctgctcactgtgcttgcaataaaaacttttcttggcatctcagttaatcttcattctttcaacttactctcttgagttcttacatacacttcaaggcgagcggatcaaagaaaaatcccccttatttagaaatgttcctgggggatgaagaaaccataattacttgagactggcagcagtgggtatatggtaaaagcctttgtaaaacagtgcatttttcagatttgtttaaggtttgctagccaaggaaagtaaaatgtgattttgtaactgcactaaacatttgtcatgctgtagttgccagcccagaatattagaagttacaagactgatttaaaccgtctctgatttaatgcaagatatattgtgtctataaaggtttctcttgttattgttaagccagagatctaaggtttagattcaatttgaataaactagctggcctgca

SEQ ID NO: 169263 - DNA, 692 bp, Homo Sapiens
cccacgcgtcgcggacgcgtgggtcgacccacgcgtccgagaggttcggcggctgatggcggatcaggatcggaagcctgcgtaactttctcccttgatccgggagtctttccactggattcacaatgacatcctttcaagaagtcccattgcagacttccaactttgcccatgtcatctttcaaaatgtggccaagagttaccttcctaatgcacacctggaatgtcattacaccttaactccatatattcatccacatccaaaagattgggttggtatattcaaggttggatggagtactgctcgtgattattacacgtttttatggtcccctatgcctgaacattatgtggaaggatcaacagtcaattgtgtactagcattccaagttgaaccattgagaaaaccatgaaagaaacaagaagaactgttaaagttaattgccgttctggaaaaagaaacagcacaacttcgagaacaagttgggagaatggaaagagaacttaaccatgagaaagaaagatgtgaccaactgcaagcagaacaaaacgggtcttactgaagtaacacaaagcttaaaaatggaaaatgaagagtttaagaagaggttcagtgatgctacatccaaagcccatcagccttgacggaacgatatcgtgtcagtaacacataaagcacttgaaaaagaaac

SEQ ID NO: 169264 - DNA, 1186 bp, Homo Sapiens
  misc_feature (1152)..(1152): n is a, c, g, or t
atcatcaggcatagtctacaaggtgcagtttgacacaaaaccactgaagtttgttcgctggcagaattccaaacgattgctctatgggtctttggtatgcatgtccaaggacaacttcgagacatttctttttgccaccgtatctaacagggagcaggaagatctctgccgaggaattgtccagctctgcttcaatgagcaaagccaacagctgctagcagaggtccagccctctgactctttcctcatggtagagacaactgcatactttgaggcctacaggcacgtcctggaaggactccaggaggtccaggaggaagatgttcccttccagaggaatatcgtggagtgtaactctcatgtgaaggagccaaggtacttgctaatggggggcagatatgactttacccccttaatagagaatccttcagccactggggaatttctaagaaatgtcgagggtttgagacatcccagaattaatgtcttagatcctggccagtggccctcaaaagaagccctgaagctggatgactcccagatggaagccttgcagtttgctctcacaagggaactggctattattcaaggacctcctggaacaggcaaaacctatgtgggtctaaaaattgttcaggccctcctaaccaacgagtctgtttggcaaattagcctccagaagttcccccatcttggttgtgtgttatactaatcatgctttggaccagtttctggaaggcatctacaattgtcagaagaccagcaattgtgcgggtgggtggaaggagcaacagtgaaatcctgaagcagttcaccctaagggagctgaggaacaagcgggaattccgccgcaacctccccatgcacctccgaagggcctacatgagtatcatgacacagatgaaggagtcagagcaagagcttcatgaaggagccaagaccctggagtgcaccatgcgtggtgtcctacgggaacagtacctgcagaagtacatctcaccccagcactgggaaagtctcatgaatggaccagtgcagcccaggcagaaggggatgaggaggaagaaggggaggaggagagttcgctgatagagatcgcagaggaagctgacctgattcaagcagaccgggtgattgaggaggaagaggtgntgaggccccagcggcggaagaaggaagagagtgg

SEQ ID NO: 169265 - DNA, 431 bp, Homo Sapiens
  misc_feature (337)..(337): n is a, c, g, or t
  misc_feature (363)..(363): n is a, c, g, or t
  misc_feature (382)..(382): n is a, c, g, or t
  misc_feature (412)..(412): n is a, c, g, or t
gcgcttggtctgccactctcctgtggcttgctcctgtccagctgctgtcccagtgccacaatggtctagcctcatggccagaagcattttagccaactcctggtctgctccactctcttccttcttccgccgctggggcctcaccacctcttcctcctcaatcacccggtctgcttgaatcagggtcagcttcctctgcgatctctatcagcgaactctcctcctccccttcttcctcctcatccccttctgcctggggctgcactgggtccattcatgaggactttcccagtgctgggggtgagatgtaattctgcaggtactgttcccgtagganaccacgaatgggtgcactccggggtnttgggctccttcatgaagnttttgctctgaactccttaaatctgtgtanaggataattcatgtaaggg

SEQ ID NO: 169266 - DNA, 467 bp, Homo Sapiens
  misc_feature (92)..(92): n is a, c, g, or t
  misc_feature (361)..(361): n is a, c, g, or t
  misc_feature (417)..(417): n is a, c, g, or t
  misc_feature (429)..(429): n is a, c, g, or t
  misc_feature (450)..(450): n is a, c, g, or t
agagaatccttcagccactggggaatttctaagaaatgtcgagggtttgagacatcccagaattaatgtcttagatcctggccagtggcctncaaaagaagccctgaagctggatgactcccagatggaagccttgcagtttgctctcacaagggaactggctattattcaaggacctcctggaacaggcaaaacctatgtgggtctaaaaattgttcaggccctcctaaccaacgagtctgtttggcaaattagcctccagaagttccccatcttggttgtgtgttatactaatcatgctttgggaccagtttctggaaaggcatctacaattgttcaggaagaccagccattgtgcggntggggtggaagggagcaacagtggaaattcctgaaggcagtttcaccctaaggggnagcttgagggancaaggcggggatttccgccgnaaccttccccttggcac

SEQ ID NO: 169267 - DNA, 1071 bp, Homo Sapiens
  misc_feature (52)..(52): n is a, c, g, or t
  misc_feature (256)..(256): n is a, c, g, or t
  misc_feature (261)..(261): n is a, c, g, or t
  misc_feature (340)..(340): n is a, c, g, or t
  misc_feature (499)..(618): n is a, c, g, or t
  misc_feature (639)..(663): n is a, c, g, or t
  misc_feature (749)..(758): n is a, c, g, or t
  misc_feature (911)..(1020): n is a, c, g, or t
ctgaggaggccctcttttccagtaggaagttagatgggggttctcagaagtngctgattggaaggggacaagcttcgtttcaggggtctgccgttccatcctggttcagagaaggccgagcgtggctttctctagccttgtcactgtctccctgcctgtcaatcaccacctttcctccagaggagaaaattatctcccctgcctgcctgattccatggctgttgtgctgattccaatgctttcacgttggttcctngcgtnggaactgctctcctttgcagccccatttcccaagttctgttcaagttaaacttatgtaagctttccgtggcatgcgggncgcgcacccacgtccccgttggcgtaaagactctgtaatttgggatgccaatccacaggcctgaagaaactgcttgttgtgtatcagtaatcattagtggcaatgatgacattctgaaaagctgcaatacttatacaataaattttacaattctttggnnnnnnnnnnnnnnnnnnnnnnnnnnnnnnnnnnnnnnnnnnnnnnnnnnnnnnnnnnnnnnnnnnnnnnnnnnnnnnnnnnnnnnnnnnnnnnnnnnnnnnnnnnnnnnnnnnnnnnnntggggggccccccggcccccnnnnnnnnnnnnnnnnnnnnnnnnnggggcccgggccccaaagggaaagggaactggggtttattttttccaaaagaaatccgggcaaaaaaaaggggttggtttcccccnnnnnnnnnncccccgggggaaccgggggtttttaaaaaaaccccaaggggggttccggggccttttgtggctccctacaagggggcccccggggggctttatttaaaatttggccccgggggcgggagattttcggaaaaggtgggtggaattctttatcannnnnnnnnnnnnnnnnnnnnnnnnnnnnnnnnnnnnnnnnnnnnnnnnnnnnnnnnnnnnnnnnnnnnnnnnnnnnnnnnnnnnnnnnnnnnnnnnnnnnnnnnnnnnnggggaaacaacggggcggcgaaaaaacttgtccctttttggcgcccgtttt

SEQ ID NO: 169268 - DNA, 449 bp, Homo Sapiens
cagtttgtcagtagaaggtgagttattggaaagtttagaaacatgtggcaacaagacaggtagatctctgcactgttactccccagaccgagagcttacataccatatagaaagagcataagtgcttcagaaggaatgtgtaggatcgctgaaattgacccctcagggaaaggcaagaatgctgtgtctcatagcccataatttgccaaaggacaggacttaggtaagtacatgtttatgataacatcaaggtagtcttggcttacacaagcaacagtaagtaaagtagaaatcttgaggcattccggggccgggggttaatcagaagtcaacatggcagattagcatccaagatgaaggggcatcatccggcacagtgtccaacgttgtacacttgattaggagggaataaacgagattgagcactaggagcaacagtggcaggacac

SEQ ID NO: 169269 - DNA, 1476 bp, Homo Sapiens
agctgatcttgaatcaacgtggataccaaattcattatggaatccacctggtcttaagagacaatttctgtggtaataatccagaacattactaagcacataacaactcatgctctttctggactcgtagtcaaagtactcaaagagtgggtgaaaatgttttaatttcaaagactgttaaaatattgttgtaagtgtcaactggtattttcaaaagtctggtgagttcctttgaaactgcactactggtagcaatatgttcaaggttgagcttattgaatatctccactgttgtttctagaactttatcaacatagtccacacgatcagggtaacatttcatggcaagattaatcagagagacttgtaaagatacaacatcctctgaaggcatgtcttgtctagactgtatcactgtagccacctgctgtgaaaatatatcaaaaagtttaatatccgctgggattccaggtccatcttcacggtgagcaaataaagctaatctatcaattaaagcaatgattatgttcttcacatttacattctggtgtaactcagcacaggcccgaagaaaaggattcaaagtctggaggtgaaattcatcagggaaaacctgaataatacactccatgagatattcttgagccaaagcatccctacagtttacaacttgctccaatatgccagtcaaaacaatctgtttgtaacgttccacatttacaccttccaactgactgaggcgcaccaaatttgttcccactaaaattctcagttcttgtctttctcgttctcattttgctctatctcggctatgtccctgatgctgcattcgcacccagagcttgttcatttctgcaaagttgagcagtacaaaatccatggaatcactgatgtcaccagttgtttcttcatctgttggctctccttcatcaggtaagatatttctggtacactgaagaaggtaatttcgaagaaaacagacccctcaagggatgttgcacaccacggcacatttctaccaaatctttcaaaatatccttcctggactgaggaaatgacttgacatatacaactccaactgtgatcaaaaggtaaagccttgggataatgtttccagcatactgtacaagttcgtagagatctgccactttccttcctttagcaaactcatctgtcaggtagacctccaagtagtgcagttcatcagaaatggccatataaagttcatagtaactctttggtgataacatagaagtccggagttcaccaagcatattagaagcatgttttagagcatccataagcttgtttttgtccaggcatctcttcatttggaatgactggaccttcacagcctgtatggcttcatccaagagcttttcctgctcatcctgaggggactgctgtgttgtaggcatggcgactccccagagcctgcagcaagcagcacccgccccgcgcgtagcctcccgcccc

SEQ ID NO: 169270 - DNA, 1001 bp, Homo Sapiens
  misc_feature (70)..(145): n is a, c, g, or t
  misc_feature (196)..(234): n is a, c, g, or t
  misc_feature (292)..(352): n is a, c, g, or t
  misc_feature (716)..(811): n is a, c, g, or t
tcgtggatactggagtattccgccgctgaagagaaagcagagactcccacagctgcagaagatgacaatnnnnnnnnnnnnnnnnnnnnnnnnnnnnnnnnnnnnnnnnnnnnnnnnnnnnnnnnnnnnnnnnnnnnnnnnnnnngacctagcaaagccactgttaaagctatgcaagaagctctgggtaagcttnnnnnnnnnnnnnnnnnnnnnnnnnnnnnnnnnnnnnnncgtgtaaaacggcttgaagaattagaagccaagcgtagagaagaggaacgatgggaannnnnnnnnnnnnnnnnnnnnnnnnnnnnnnnnnnnnnnnnnnnnnnnnnnnnnnnnnnnngaagggaaacttttaactaaatcccagagagaagccagagccagagccgaagctactcttaaactgctacaagctcagggtgttgaagtgccatcaaaagacactttgccaaagaagaggccaatttatgaagataaaaagaggaaaaaaataccacagcagctagaaagtaaagaagtgtctgaatcaatggaattatgtgctgctgtagaagttatggaacaaggagtaccagaaaaggaagagacaccacctcctgttgaaccagaagaagaagaagatactgaggatgctggattggatgattgggaagctatggccagtgatgaggagacagaaaaagtagaaggaaacaaagttcatnnnnnnnnnnnnnnnnnnnnnnnnnnnnnnnnnnnnnnnnnnnnnnnnnnnnnnnnnnnnnnnnnnnnnnnnnnnnnnnnnnnnnnnnnnnnnnnnagtgaaggcagtgaaggtgatgaggaagatgaaaaggtgtcagatgagaaggattcagggaagacattagataaaaagccaagtaaagaaatgagctcagattctgaatatgactctgatgatgatcggactaaagaagaaagggcttatgacaaagcaaaacggaggattgagaaacggcgatttgaac

SEQ ID NO: 169271 - DNA, 823 bp, Homo Sapiens
  misc_feature (656)..(656): n is a, c, g, or t
ggggctttggctcttcgggtaaagatggcggagcgcgggtacagcttttcgctgactacattcagcccgtctggtaaacttgtccagattgaatatgctttggctgctgtagctggaggagccccgtccgtgggaattaaagctgcaaatggtgtggtattagcaactgagaaaaaacagaaatccattctgtatgatgagcgaagtgtacacaaagtagaaccaattaccaagcatataggtttggtgtacagtggcatgggccccgattacagagtgcttgtgcacagagctcgaaaactagctcaacaatactatcttgtgtaccaagaacccattcctacagctcagctggtacagagagtagcttctgtgatgcaagaatatactcagtcaggtggtgttcgtccagttggagtttctttacttatttgtggttggaatgagggacgaccatatttatttcagtcagatccatctggagcttactttgcctggaaagctacagcaatggggaaagaactatgtgaatggggaagactttcccttgagaaaagatataatgaagatctggaacttgaagatgccattcatacagccatcctaaaccctaaaggaaagctttggaagggcaaatgacgcagcgaaaccataanaagttggaaatctgcaatcgaagctggaatttaggagagcttactcccaactggaagttaaaggattacttgggcttgcctaacataacaatgaaagtgacctggaaaaatccagaattttcagaataacctaatctactttaaacttggtttaaagaaatgttttg

SEQ ID NO: 169272 - DNA, 896 bp, Homo Sapiens
gggggctcttcgggtaaagatggcggagcgcgggtacagcttttcgctgactacattcagcccgtctggtaaacttgtccagattgaatatgctttggctgctgtagctggaggagccccgtccgtgggaattaaagctgcaaatggtgtggtattagcaactgagaaaaaacagaaatccattctgtatgatgagcgaagtgtacacaaagtagaaccaattaccaagcatataggtttggtgtacagtggcatgggccccgattacagagtgcttgtgcacagagctcgaaaactagctcaacaatactatcttgtgtaccaagaacccattcctacagctcagctggtacagagagtagcttctgtgatgcaagaatatactcagtcaggtggtgttcgtccatttggagtttctttacttatttgtggttggaatgagggacgaccatatttatttcagtcagatccatctggagcttactttgcctggaaagctacagcaatgggaaagaactatgtgaatgggaaagactttccttgagaaaagatataatggaagatctgggaacttgaaagatgcccattcatacagcccatctttaacccctaaagggaaagcctttgaaggggcaaaaggacccgagggataaccttagaaagtttgggaattctgccaatgaaagcctgggactttagggaaggcttaactcccaacctggaaggttaaagaatttacttgtgggctgcccattagcataaccaattggaaggtggactgggaaaaattccgagaaattttccgaaataaaccctaacccaacctttaaaactgtggtttaaaagagaattggtttttgtgtttttggcaaaaaccttttttgggcaataccttt

SEQ ID NO: 169273 - DNA, 1024 bp, Homo Sapiens
  misc_feature (933)..(935): n is a, c, g, or t
  misc_feature (1009)..(1009): n is a, c, g, or t
ggggcgcatgtgtgcgctgtgctttggctcttcgggtaaagatggcggagcgcgggtacagcttttcgctgactacattcagcccgtctggtaaacttgtccagattgaatatgctttggctgctgtagctggaggagccccgtccgtgggaattaaagctgcaaatggtgtggtattagcaactgagaaaaaacagaaatccattctgtatgatgagcgaagtgtacacaaagtagaaccaattaccaagcatataggtttggtgtacagtggcatgggccccgattacagagtgcttgtgcacagagctcgaaaactagctcaacaatactatcttgtgtaccaagaacccattcctacagctcagctggtacagagagtagcttctgtgatgcaagaatatactcagtcaggtggtgttcgtccatttggagtttctttacttatttgtggttggaatgagggacgaccatatttatttcagtcagatccatctggagcttactttgcctggaaagctacagcaatgggaaagaactatgtgaatgggaagactttccttgagaaaagatataatgaagatctggaacttgaagatgccattcatacagccatcttaaccctaaaggaaagctttgaagggcaaatgacagaggataacatagaagttggaatctgcaatgaagctggatttaggaggcttactccaactgaagttaaggattacttggctgccatagcataacaatgaagtgactgaaaaatccagaatttcagataatctatctacttaaacatgtttaaagtatgttttgttttgcagactttttgcatacttatttctacatggtttaaatcgactgtttttaaaatgacacttataaatcctaataaactgttaaaccccaaaaaaataccgaccaaaaaaacannncccttgtcgggccgccctcgggccctcgaaaaggctttcctagaccctttcgtttgggcgcgccgcggcccccntaagggtaaatggac

SEQ ID NO: 169274 - DNA, 555 bp, Homo Sapiens
cagagtcagttagatacttccacgtcctccatatatctgaccaggatacatatgggacatcaattgactatttccctgatggcactgggtctgatatcattcattgcctgcaagaaatccttcagagtaatcttcaccagtccagccaccttgacatcagggaggttaggctgttttttcaggattctccgcaaggcccagagacctgcttcattacacaagactttcaagtctgctccaacgtatccatgagcactatttgccagctgcagcagctcagcctcagtgagcaaatggggtacccttcgaagcagtatctggagaatatctagccggtcctgagcattgggaactccaatctcaatctctttatcaaatcgcccaggtcttcggagagcagcatccaaggcatgagggcgatttgtggccccaagaaccaacacttgtccttcacttacttctgaacctatgccatccatcccgtgttaagagtgaagccacaactcttttttccacttcagttctgggccccctctcttttcggacacttgcatc

SEQ ID NO: 169275 - DNA, 408 bp, Homo Sapiens
tgatctagaggatcccgagaggtgggacacggcgacaggctgggagggcccgaggctcttttcgcaagctgatgtgcaccgacaagtggccattgtgtccggacccctccctacgcagaccccagcctgcaggctcctgtgcgtgtctccatgcagctgcggcggccttccgaccgggagctcagtgagcccatggaattccagtacctgccagatacagacgatcgtcaccggattgaggagaaacgtaaaaggacatatgagaccttcaagagcatcatgaagaagagtcctttcagcggacccaccgacccccggcctccacctcgacgcattgctgtgccttcccgcagctcagcttctgtccccaagccagcaccccagccctcatccgcttatccaatgggg

SEQ ID NO: 169276 - DNA, 574 bp, Homo Sapiens
cttctagaggatcccgagaggtgggaccacggggcaccccaggagagtgaggctgggtcccttcctggggcaggaatgaggtaagaaaacatttcaaataaagcagcaccgttccctctcaccgttggggccccactcctcaccagccctgggtcagggaggagaggcagggggaggaattctgacacttctccctcttcctaccctccctttcccattccttgaagctgtagaggctggaggccctttcctggcacccaacaaaaggacagctcctgctgccaaggaggcccatggggactgaggggaaagggctgcccctgtgaggggcagggaaggtggcggcagttctggacgcccacctcagcagacagcactctgtgcctgcctacccctgggactgggggcatttgataagattctgcacacagacaggacatgcccagccttgcccctcagctccaagcaccggacccattcacattgctgaggcggccgaggcaggccccctccaggctcagcttccaacccacagcctcccgtgtcccacctctcgggatcctctagatcacca

SEQ ID NO: 169277 - DNA, 760 bp, Homo Sapiens
ggtctgggctggggccggggaccgagagctggctgaggacacggggctagccaggtctgcgtacatgtcctccgagtccacgctgtgtgcagagctgctgctcgacgtagcactggacactgaggagacgctgctcacgctcagggacctggatcgggagctggaaccactatagctgctaccactgccactgccgctgccgcttagcgtccgcctcctggggggggtcctggctggccgctccttcctcctggcttcccgagggtctcctggcttggtgggctcggggacaggagcagtggttttggtggcctgtggtggggctggaggcggggccggcttcttcactgacttctctcctgctttcccgggcggcggggccggctctcccttggttctgatggaaggtctatgtggggaaggtgttggggacggggacggggacgaagagaaggaccgggacctggaccggcttcctgagaacgagctgtgtctggaagagcggctggagtaggagctgtaggatgaagaccgggatcgcgaccgggaggagccggagccagagtaggacgatgaccgtgaagacgacctggaggaattagaggcagaggctgacgaggctgatgttttccgacgccttcgagcccggctcggggagaccgacaccccgagtttcttcttgggagacttggatcggcgccaagggtccttccactcatctgctctcttcacctgcggccccgtggtggcagcctccttc

SEQ ID NO: 169278 - DNA, 538 bp, Homo Sapiens
gtcgccgacatccactgcgagaactgcaagaccactttgggctggaaatatgaacaggcctttgagagcagccagaagtacaaagaggggaagtacatcattgaactcaaccacatgatcaaagacaacggctgggactgacccccgctcccccgacgcatgtggctccagcccggcctggccgccagggagcgccactggcttcccgccacccgaagggagctctggaccctcagagcccctgcagaggacggatctagctcctgtatatatattttattgcatgcactgtgaccttggggggagaacagaagggggacgacgcccccgcacctcctgcgatctggctggcttggatctcgtttttaacccgttcctgccccacctgccctatagttatggcctgtgttctgctctcctggtcccagtgcaccgtctgctctgtgaactcctcccaccaggcccttcttaccccacgcgtgtctgtccccctcgttctgtagcgtttgtacataataaaacaatggagtggagacaa

SEQ ID NO: 169279 - DNA, 417 bp, Homo Sapiens
gatagctgttctagaggataacgagagggtgggaccatggggagggggagtgagtcctagttgttgtagaagccgaaaacatacaagcaacagaggctttagaaatttattacaaggccctcatagtagaaataaaaatatagatatctatgcttcccatctcgctctcagtggttcgaataacaagtgcaagtaacaaaatagattgtctctataattcgcaaactgggagttcatgggtacagagcaacttcagccccagctcccaagtcccaaagtgtggtcttgtcgagggtgcagacaaggaccaaccaagttcaaccaagtctctcgtatgcagacgccagctccagtctcaaggagggtggggcttgcagtcagtctcactccacccccgagtggacagtctggaccccc

SEQ ID NO: 169280 - DNA, 784 bp, Homo Sapiens
gctgtacgcacagctggaggaggagtggggcctggcccggcatgccatggccgtgtacgagcgtgccaccagggccgtggagcccgcccagcagtatgacatgttcaacatctacatcaagcgggcggccgagatctatggggtcacccacacccgcggcatctaccagaaggccattgaggtgctgtcggacgagcacgcgcgtgagatgtgcctgcggtttgcagacatggagtgcaagctcggggagattgaccgcgcccgggccatctacagcttctgctcccagatctgtgacccccggacgaccggcgcgttctggcagacgtggaaggactttgaggtccggcatggcaatgaggacaccatcaaggaaatgctgcgtatccggcgcagcgtgcaggccacgtacaacacgcaggtcaacttcatggcctcgcagatgctcaaggtctcgggcactgccacgggcaccgtgtctgacctggcccctgggcagagtggcatggacgacatgaagctgctggaacagcgggcagagcacgctgccggctgaggcggagcgtgaccaccccttgcgcgcccaggagcaagatcctgttcgtgaggagtgacgcctcccgggaggagctggcagagctggcacagcaggtcaaccccgaggagatccagctgggcgaggacgaggacgaggacgagatggacctggagcccaaccgaggtcggctggagcagcagagcgtgccagccgcagtgtttgggagcctgaaagaagactgaccgt

SEQ ID NO: 169281 - DNA, 807 bp, Homo Sapiens
ccagaggatccgagagggtgggacacgggcgtgataatagtaacactttgcggctacaaggtctagggcccgccggttctgagtactgatcttctgcatcagatcatcagagatcttctgtgcctctttgtagcgcttgctgttcatcatgaagatgaccacgaggagttggagataggcttccacttcaggcaggaggggtgtcgacgcagcttttcccgtgcggggacggaactgtaaatcagcctctgtgtccatgggctcttccaggaaggggagcaaaaagtctcgagtggcattatttgaagtgaagaagccctgcacagccttatacagaacatagtggttgaggcggcgtgatgtggaaggcagcatccgcagggcccgcagcacgaatctcggctccttgcctgaaaccgctttctctagctgtttcacgtgctccttgatgtcctccaaggtgactgtgtccagctctcgctgggagtgctcagccgctgccgccgccgtcttgccgtctgcctcccccgtcgacccgccacccgtcgctgcctcctctttcatctccacatcctggggggccggcggcggtgggggttcttgttctcctccgccgggcggcggtttcgccttgtccgcgccgcggcgccgcgccgagccctcctgcttcatggcacccggggtcacggcctagtccggggaccgaggccggggcctcgcgttaaccctcgcaccggggaccaggagccgagccgggcctgcacacgagcgcgagatagcgtcgggccgcacgatgacggagcagct

SEQ ID NO: 169282 - DNA, 535 bp, Homo Sapiens
  misc_feature (11)..(11): n is a, c, g, or t
cccgagaggtnggacacgggacagcaagagcaagcgcgggacagccaggtgcagccagtgggggagcgggttgtgcccaacgctgccaatggctgggcaggccagcccccgcccacgtgcagcaaggatatggcccgcaaggaatgtgggtgccggcaggacaggcgattggtggctatggaccgccccctgcaggaagaggagcccccgcgagaccgacgttgactcctagatcgtgtcagccctcctggagagttgccccctgcgccaccagggacttcccgtcgagggtctactggatgcctccgcgaacaggtgtcacgatattaggcgtacagggaccgtccatgcgtaccgagccgcacgaggatcgagatattgccacgctcgcggagggcttccatgccgtccagcagaccagcgtccccgggggcagtcaccctctgtgacatgttcccaagagaccgtccgatcctcagggcatgccccggaacatgatgcaagcacccgaaagcttagccagaattaccctatg

SEQ ID NO: 169283 - DNA, 290 bp, Homo Sapiens
tggggggcgccctagaggatccgagaggtgggacacggggacctcccagaacagaccaccacacccatggccaccatgtccacaatccacccctcctccactccggagaccacccacacctccacagtgctgaccacgaaggccaccacgacaagggccaccagttccacgtccaccccctcctccactccggggacgacctggatcctcacagagctgaccacagcagccactacaactgcagccactggccccacggccaccccgtcccgtctaatctggcaaaacgt

SEQ ID NO: 169284 - DNA, 642 bp, Homo Sapiens
  misc_feature (40)..(40): n is a, c, g, or t
  misc_feature (559)..(567): n is a, c, g, or t
accccagcacagctgaggctgtgactcgttaaagccagtntagttctccaagaattagtgctgtccaacagatggaccatgctctcgctgtcagtacagtagccatgaactacatacagtgacgcctctagaaacgtggttagtgcaactgaggaaggaatttttaatcttatgtgattttaattggcttaactttaaacagccgcatgtggttactgtattggatagcacagccctagagcctgaagaaagcaaaccataagaacactcagctgggtcccaaacagaaggcagaaagggtagaaccatccacctcaactattccagccccatcagaaggcaccaggaacacggcaagagaaaaaggcaaaaacccacccagccacatgaaaattcactcactcaaccacccagcaacatcaaactggaaacaccacactatttcctgaaaaaaatatatttatctatttttctagaaccaaggaagaataataatatattataagaacacagacacaaatatcccaccatccccttcattatattttgggatctgctnnnnnnnnnctatgtttcggcaaaagctattttataagaggaagcagcttcagaaaggggatgggtggatatttgaatggttta

SEQ ID NO: 169285 - DNA, 452 bp, Homo Sapiens
gctgttctagaggatcccgagaggtgggacacggggaagcttgtggccctggaaggcacagcagttgcctgggtgcacatctggctggaggatgactcggggtgactgggagtggtaccacagggggatgccgaagaggctgaggagggccgtcttggtctcgtaggtctcagaacatcgggtgctgatgacgctggcccctcctgactccagggcgtagtctgccagcccgatgcggtcctcactgtagcgctgcagggcctgcttcacgatgtggtgcacccgctcctctgtcactccaatcacaccttctttctgcagcgtcaggctcagggaggccgcggcttccctggccgacttgccctgcatctctgccacatgggtgaggatcttgctctccagctctcgcagctgagcttgcatctcctctctctgaaggagccccccgtggt

SEQ ID NO: 169286 - DNA, 239 bp, Homo Sapiens
tggtaatgcatgaggaatgggtagttctggagtgtgatggagggagttagaggcagagcactgttcagccaggtgttttcaaaatgttttaaaaacaggagcgccctctgtgcaaacaatcatatataggagtgtgaacaaacaaaacttaaaaaggcagcacattctggagccacggccagtccttcccctagcagcttcccctgaggggcccagtggtccccgtggtcccacctctg

SEQ ID NO: 169287 - DNA, 1138 bp, Homo Sapiens
  misc_feature (62)..(62): n is a, c, g, or t
  misc_feature (189)..(189): n is a, c, g, or t
  misc_feature (192)..(192): n is a, c, g, or t
  misc_feature (200)..(200): n is a, c, g, or t
ccgcgctgcagaaacgctacggctccccaagaacggctgcaatcaactgctgcaaggtgctnatgaagggccggcccgtcgcgcctgcccctgcggcacggctccccctcctggaccagtcccccgcgagcccggagaaggggagacccgtgtcccacaaggaccccaccggcctgcctggcatctgtnctntgcacgcnctttgttgcgccaggacttggcgtgggcaccgggcgcccccatcccagtgtctgtgtgcgtccagctgtgttgcacaggcctgggctccccactgagtgccaagggtcccctgagcatgcttttctgaagagccgggcctcagagtgtgtggctgtgtgtctgttcgactcccctcgccccattttcaccccacccccgcctctgatccccgggggcgagattggcgcgggagtgtggccgcgccccatcagatgttctcccttcaccagcgggagcttgatatcccttgtctgtaacatagaccccgggtactgcgggaggggagggctgctggggaggatggggggatgttatataaatatagatataattttattttcggagctaagatggtgttatttaagggtggtgatgggtgagcgctctggcccaggctgggccagactcccgcccaagcatgaacaggacttgaccatctttccaacccctggggaagacatttgcaactgacttggggaggacacagcttcagcacagcctctcctgcgggccagcccgctgcgaaccctccaccagcttaacggagggaggagggaggatgcgctgtggggttggtttttgccataagcgaactttgtggcctgtcctagaagtgaaaattgttcagtccaagaaactgatgttatttgatttatttaacaggctaaaattggtgtttttattctttgcacaattgtttcatgtgtttgacacttaatgcactcgtcatttgcatacgacagtagcattctgaccacacttgtacgctgttaacctcatctactttctgaggttttaaaaaaatgacttttaacaaggagagggaaaagaaacccactaaattttgctttgtttccttgaagaatgtggcaacactgttttgtgattttatttgtgc

SEQ ID NO: 169288 - DNA, 555 bp, Homo Sapiens
  misc_feature (521)..(521): n is a, c, g, or t
cggccgctctcctacccggacaccgacgtcattctcatgtgcttctcggtggacagcccggactcgctggagaacatccccgagaagtgggtccccgaggtgaagcacttctgtcccaatgtgcccatcatcctggtggccaacaaaaaagacctgcgcagcgacgagcatgtccgcacagagctggcccgcatgaagcaggaacccgtgcgcacggatgacggccgcgccatggccgtgcgcatccaagcctacgactacctcgagtgctctgccaagaccaaggaaggcgtgcgcgaggtcttcgagacggccacgcgcgccgctggcagaagcgctaacggctcccagaacggctgcatcaactgctgcaaggtgctatgagggccgcgcccatcgcgcctgcccctgccggcacggctccccctcctggaccagtcccccgcgagcccggagaaggggagacccgtgtcccacaaggaccccaccggcctgcctgggatctgtcttgctgacgcctntggtttgcgccaggactttggcttggggcaacgg

SEQ ID NO: 169289 - DNA, 474 bp, Homo Sapiens
  misc_feature (24)..(24): n is a, c, g, or t
  misc_feature (26)..(26): n is a, c, g, or t
  misc_feature (141)..(141): n is a, c, g, or t
gcgctctggcccaggctggcagancntcccgcccaagcatgaacaggacttgaccatctttccaacccctggggaagacatttgcaactgacttggggaggacacagcttcagcacagcctctcctgcgggccagccctgncgaaccctccaccagctaccggaggaggagggaggatgcgctgtggggttgtttttgccataagcgaactttgtgcctgtcctagaagtgaaaattgttcagtccaagaaactgatgttatttgatttatttaaaggctaaaatttgtttttttattctttgcacaattgtttcattgtttgacacttaatgcactcgtcatttggcatacgacagtaggcatttctggaccacacttgttacgctgttaaccttcatctacttctggatggtttttaaaaaatgactttttaacaaggggaggggaaaagaaacccactaaatttgctttgt

SEQ ID NO: 169290 - DNA, 447 bp, Homo Sapiens
  misc_feature (22)..(22): n is a, c, g, or t
  misc_feature (91)..(91): n is a, c, g, or t
  misc_feature (266)..(266): n is a, c, g, or t
  misc_feature (403)..(403): n is a, c, g, or t
agtttaacaaccttaacaaatnttggttccaaaaatgcctactgtccgtatgccaaatgaacaagtgccattaagtgtcaaaaccaatganaacaaattgtgcaaaagaataaaaaaaacaaattttagcctttaaataaatcaaataacatcagtttcttggactgaacaattttcacttctaggacaggcacaaagttcgcttatggcaaaaacaaccccacagcgcatcctccctccctcctccggtagctggtggagggttncgacagggctggcccgcaggagaggctgtgctgaagctgtgtcctccccaagtcagttgcaaatgtcttccccaggggttggaaagatggtcaagtcctgttcatgcttgggcgggaagattgcagcctgggccagngggctcacccatcaccacccttaaataacaccatcttagctcct

SEQ ID NO: 169291 - DNA, 237 bp, Homo Sapiens
tggtggtgtctagaggatcccgaggtgggggcatctgggcaggaatccggggagctttgtggacagcagggccgttttcctggggagatgccttctcagcacttggagaccagggcacttccttctctgcctgcttccgggcctcacctgcctttcgtgcctgcttacacttctggtccagctgcttgagtttggcagcacaggcggccagcctctcctcccgtggtcccacctcgt

SEQ ID NO: 169292 - DNA, 225 bp, Homo Sapiens
catctagaggatatcggaggagaggctggcgactgtgctgcgaactcaagcagctggaccagaagtgtaagcaggcacgaaaggcaggtgaggcccggaagcaggcagagaaggaagtgccctggtctccaagtgctgagaaggcatctcctcaggaaaacggcactgctgtccacaaaggctccccagaattccctgcccaagagacccccaccacattcccag

SEQ ID NO: 169293 - DNA, 1284 bp, Homo Sapiens
  misc_feature (68)..(68): n is a, c, g, or t
gttgccttcccccataccaagaaatttaagccgccattaatttttaaaggacggaccccttggtttgnccaggaacgaaagaccatggagagggggcagatctgcccctttaggcaaccccttagtttcgttatctgcaaccaggaaagggagtgctgaggcacagggaaaagggggagccaaaagggctgcaggggtgggtgtgcagggcttgggaagaggtcctgccctgagaggctcatctcagtgtgagcagcttccttcagggaaacctgtcctggcagagcaccatgctggcagctgcccttgcctggggggaaggttggtgagaactggtgaggattctctgccagaatgccagggcactgacagagtttgaggtgtctggttgggcaggaggccaagaagtcgggctggggaaaggagtggtaagggaggaacagcactccaggtgtcattcgagtgagtggcccccacagcaccagcttcaccaacacatggtcccggcaccgcaagaagaagtgaaggctcttgctctcagggagctccgaaatgtttcatttattcacaggaactgttgagaaagcagtgaaaaaacaatgccccttttctctgtaaaaaacgactgtaaggaaacatgacacaggcctgtctacaatgtgtgtcctctgtacctcaagcacagccctggtcagctatgtggttttcatggtggcaaaggctcaccaggagtctcagcttgaaggatggtgacaatctcaacacccttcccctccaaacataagaggccttccaaaggctcctatagttttcaaaatagatgcccaaaaagttttaggatgcaaggcagagttgaccactttgtggaaatgtctcagggccagcactgtgtgtcactctcttgggctgggcctatgaacatggaaggcagcagggcaggcgtttttttctccattccacacagaacacagagcagacgctgcccagcttcagacatgtgtggtgaccaaacctgatccctgttgactcacacagatgtggcatgtaaggtggagcgttacaagaataacaaaaatagctcctcaaaaaacaaaaggcttcatgtatgcaacagcattagttttgaagctcatatgccctttatcttaccaccttgtgcacacctcaaaatctcaatcctgttttattccctttgtgaattctgttggaactcagccttcaaacatccccagaagatgacaagatgagaagaaaaagcagcagctcataatggactccaaaccc

SEQ ID NO: 169294 - DNA, 389 bp, Homo Sapiens
aaaaagatgtattaaaatattcacaaaaatacaactgaagatcaaaaaataataatgagcttgatggttttcccctagctgatatatttccattgaaaaactagagatagtttgaaatttcaatctctaagtaatgccttttgagtgctcccatacagaattagcgcataattttaagacgaccctgtttgccagggcgaagacatggagagggcagatctgccctttaggcaaccttagttcgttatctgcaaccgggaaaggagtgctgaggccagggaaaaggggagccaaaagggctgcaggggtgggtttgcagggcttggggaagaggtcctgccctgaggggcttcatctcagtgttgagcagctttccttccggggaaacc

SEQ ID NO: 169295 - DNA, 390 bp, Homo Sapiens
  misc_feature (240)..(248): n is a, c, g, or t
aaccctgttttaattcccctttgtgaattctgttggaactcagcccttcaaacatcccccagaagatgacaagatgagaagaaaaagcagcagcctcataatggactcccaaactacagggagaaaaagtaacattgcccctcactcccactcaccccaaacacgttctgcagaccatctagacagtaattctttccataactgtgggctttcgaacaattttaaaaggggggaaatttnnnnnnnnnttcagaaaatgggagaaatgacaacataagtgttgaatgatcttcaccacactttccattcccagtaaaaagtaaaaactcatagattttaagtgcggtggggagtagtgaataggagaaaacaagttttagggaaggacag

SEQ ID NO: 169296 - DNA, 977 bp, Homo Sapiens
  misc_feature (847)..(847): n is a, c, g, or t
  misc_feature (959)..(959): n is a, c, g, or t
tgctctgaggatcccgagaggtgggacacgggtgcacggggttcaggtcacgagcgggtgtgacctttgaccctgtgtgtctgtcggggatctccagagtgagcgtctccggcatcttctaccaggggaacaagctcaacttctctttttccgaggactccgtgaccgtggaggtcacagctcgagcagggccctgggctcctcacctggaggctgagctgtggccatcccagtcccggctctccctgttgccaggacacaaggtctcctttccccgctcggctggccggatacaaatgtcacccccgaagctgcctggaagttccagctccgagttccctgggaggactttttcagatgttagggacccgctccagagccccctctgggtcaccctgggttcctccagccccaccgagtcactcactgtggaccctgcctctgaataatcaggaacggtggcttcagagacgtctcttgggccttccctctggccacgtctgcacccacccctcctgggcaccctcctagcctgccatccctcacctgcagccaggctctcagggaaggtccatgctgcttggcctgagttcaaggctttctgcctgtagcctggactcccgtggacccccgtgggcaggtggcttccccgtggcatctccacaccgcctctgcctgcccctgtggactgatgctatcgcgcaccgtcccacgaccccaccccgagctcctgaagccggggtctgagcctgcatcacctctggcctctcatcccccactctcctgagagcagtggtcacagcggccggccgttctggctgagaaggcagagaggcaggcttcaggnctcagcgtgggacagcagggataaggggcacgaaggacggggattggccctttcagaattcctcaggattttcaggtgcagtttgccaaaaaggaatttttcatgttcatgncagtttgaggggatttag

SEQ ID NO: 169297 - DNA, 432 bp, Homo Sapiens
agctgcacttggtggggaaagccaggcaggtcaccctcacagccagataatgtggaggtcagaacccaaggaagggagtgagacctccactcccagtgggggacctggccacccatccttggggacctgagaaagcgtacttcaccttggggtgaaggctgggtggggccagagggaccagtgccctcctcagtgcttaggggcagagccacctgcagcaatggtatctgcatatcagcccctctccaccttctttctcccgctgaatcatttccctcaaagcccaagagctgtcactgcttctttctccctgggaagaatgcgtggactctgcctggtgatagactgaagccagaacagtgccacaccctcgccttaattccttgctaggtgttctcagatttatgagacttcttagtcaaatatgaggga

SEQ ID NO: 169298 - DNA, 1179 bp, Homo Sapiens
acgaggtggtgaacgggctcatggagcggcctgactgggagaccgccatccagaagccccatgtgtagcctcccagcaggctctggcaacgcgctggcagcttccttgaaccattatgctggctatgagcaggtcaccaatgaagacctcctgaccaactgcacgctagtgctgagccagccgactgctgtcacccatgaacctgctgtctctgcacacggcttcggggctgcgcctcttctctgtgctcagcctggcctggggcttcattgctgatgtggacctagagagtgagaagtatcggcgtctgggggagatgcgcttcactctgggcaccttcctgcgtctggcagccctgcgcacctaccgcggccgactggcctacctccctgtaggaagagtgggttccaagacacctgcctcccccgttgtggtccagcagggcccggtagatgcacaccttgtgccactggaggagccagtgccctctcactggacagtggtgcccgacgaggactttgtgctagtcctggcactgctgcactcgcacctgggcagtgagatgttgctgcacccatgggccgctgtgcagctggcgtcatgcatctgttctacgtgcgggcgggagtgtctcgtgccatgctgctgcgcctcttcctggacatggagaaggccaggcatatggagtatgaatgcccctacttggtatatgtgcccgtggtcgccttccgcttggagcccaaggatgcgaacaggtgtgtttgcagtggatgggcgaattgatggttagcgaggccgtgcagggccaggtgcacccaaactacttctggatggtcagcggttgcgtggagcccccgcccagctggaagccccagcagatgccaccgccagaagagcccttatgacccctgggccgcgctgtgccttagtgtctacttgcaggacccttcctccttccctagggctgcagggcctgtccacagctcctgtgggggtggaggagactcctctggagaagggtgagaaggtggaggctatgctttggggggacaggccagaatgaagtcctgggtcaggagcccagctggctgggcccagctgcctatgtaaggccttctagtttgttctgagacccccaccccacgaaccaaatccaaataaagtgacattcccagcctg

SEQ ID NO: 169299 - DNA, 1302 bp, Homo Sapiens
cccagtactacaaggccaagtcccacgctatgtggattaccccatctatggcggcttcagatggtgggccacgccaaccgccctttgcaggacgatgaggggcgttgtgtcatcatgtgtcagggctccaagaaggatttcctcaagaaggttattatatgagccattgccaagtagaatctcacctggcccactgtatgcagtgaccacttcaatgctgagatcgtcaccaagaccattgagaacaagcaggatgctgtggactacctcacctggacctttctgtaccgccgcatgacacagaaccccaattactacaacctgcagggcatctcccatcgtcacttgtcggaccacttgtcagagctggtggagcagaccctgagtgacctggagcagtccaagtgcatcagcatcgaggacgagatggacgtggcgcctctgaacctaggcatgatcgccgcctactattacatcaactacaccaccattgagctcttcagcatgtccctcaatgccaagaccaaggtgcgagggcttatcgagatcatctccaatgcagcagagtatgagaacattcccatccggcaccatgaagacaatctcctgaggcagttggctcagaaggtcccccacaagctgaataaccctaagttcaatgatccgcacgtcaagaccaacctgctcctgcaggctcacttgtctcgcatgcagctgagtgctgagttgcagtcagatacggaggaaatccttagtaaggcaatccggctcatccaggcctgcgtggatgtcctttccagcaatgggtggctcagccctgctctggcagctatggaactggcccagatggtcacccaagccatgtggtccaaggactcatacctgaagcagctgccacacttcacctctgagcatatcaaacgttgcacagacaagggagtggagagtgttttcgacatcatggagatggaggatgaagaacggaacgcgttgcttcagctgactgacagccagattgcagatgtggctcgctttggtaaccgctaccctaatatcgaactatcttatgaggtggtagataaggacagcatccgcagtggcgggccagttgtggtgctggtgcagctggagcgagaagaggaagtcacaggcccctgtcattgcgccctctcctttcccgcaaaaaacgtgaaaagggctggtggggttggtgaattgggaagatgcccaattcccaataagccctccatcttccattcaagaaggcctggaacttttggcagcagaaaaggccccaagggg

SEQ ID NO: 169300 - DNA, 883 bp, Homo Sapiens
cacttcacctctgagcatatcaaacgttgcacagacaagggagtggagagtgttttcgacatcatggagatggaggatgaagaacggaacgcgttgcttcagctgactgacagccagattgcagatgtggctcgcttttgtaaccgctaccctaatatcgaactatcttatgaggtggtagataaggacagcatccgcagtggcgggccagttgtggtgctggtgcagctggagcgagaggaggaagtcacaggccctgtcattgcgcctctcttcccgcagaaacgtgaagagggctggtgggtggtgattggagatgccaagtccaatagcctcatctccatcaagaggctgaccttgcagcagaaggccaaggtgaagttggactttgtggccccagccactggtgcccacaactacactctgtacttcatgagtgacgcttacatgggatgtgaccaggagtacaaattcagcgtggatgtgaagagaagctaagacagacagtgatccaaattgagtcctgaggccatttacttttgggtaaaggaaagttgagcctgaattaggaatgtgtacattgtaggaatcctggttgtggggaccaggtctggggggcctcaggtctggccagcccaggcctggggctggtccccgcctaacctccacttcctttcccttgctcactctggatcccgtgacagcaggtgtcatggggtcaagcctaaatcatatatagcatttttcagggacgccccccgggaaatcccttttgaggccggacacttcctaataaaaaccaattttggccggccacccacccccttttacccctctttcctccgcggggcatttttacatcgttcgggggtgccgggaaaaa

SEQ ID NO: 169301 - DNA, 620 bp, Homo Sapiens
ggacagcatccgcagtggcgggccagttgtggtgctggtgcagctggagcgagaggaggaagtcacaggccctgtcattgcgcctctcttcccgcagaaacgtgaagagggctggtgggtggtgattggagatgccaagtccaatagcctcatctccatcaagaggctgaccttgcagcagaaggccaaggtgaagttggactttgtggccccagccactggtgcccacaactacactctgtacttcatgagtgacgcttacatgggatgtgaccaggagtacaaattcagcgtggatgtgaaagaagctgagacagacagtgattcagattgagtcctgaggcatttacttttgggtaaaggagagttgagcctgaattaggaatgtgtacattgtaggaatcctggttgtggggaccaggtctgtgggcctcaggtctggccagccagggctggtgctgtccccgcctacctccacttcctttcccttgctcactctggatccagtgacagcaggtgtcatgggtcaagcataaatcatatatagcattttcaggcatgttcctggtagttcttttgagtctgacattctaataaaataatttgtagaaaaaaaccag

SEQ ID NO: 169302 - DNA, 1352 bp, Homo Sapiens
  misc_feature (228)..(228): n is a, c, g, or t
ggtcttcctggcatggtggataatccacacgtggataatcaagagttgactatatgggttcctccctcccctccccttccaccagggatccctgacagaggccacagcgagactcttcagcggatgtagatcatgtcggagatggctccaggcaactgggtcatgatctgcattcgcagccaccagtagtagtccactcggggtggtagcggctgtagggggtgttgncggtcagggcgtgtgtgacagcatcgatgacaggggacgtgtctgtggagccactgctgcagtaggtctccatcttggcgatcttttcatcaaagtacttcttgccgtagtccttgcgcacgacctcaggcagctcctcccacatcttcttggcgatggcctgaatgctctcagggctgtaaaggcctggtggcagcgatgaagttgccgggctccaccacgctgaccttcacgcccagggggtacatctcatagcgcaggcagtccgagaaagcctctaccccgaacttggtgatgcagtacggggaacggcccgggttgccaatgcggcccagcaatgctgctgatatggacggacgcggcctttggcccctcggatgaggggaagaaaggatttcgtcaatcccgcactgtgccccaaaggttcacttctgccacctgcttggtaggtctccaggctggtgaactccacctccccgaacgttgagatgccggcattgttaacgaggccccacatgcctttctcagggtccttcaggctcgagcggacaatgcgtccaccactttcgtccacctcttcgctgctgcagacattgagctggacggttctcaatcggtcactgtttaaggctgtccagctccttgaccccatcatggcctttgtccttcatcaagcagccagcaaacacaaggaagccttttgaatgcagatgcttggccaatgagaacccaaatccagagtcacagcctgtgaccaggatcagctttgcagccaaccggatccgccgcactggcagtaagtacgacggccaatcgggataaaggaagtagaaccaagcaatagtgggcgtcctcgctccattttctctatcacaggcactatagggtttttcctgcgacccgtgacaaggcatctggagaggcgggtgcccagcatgctagcaacggctgttagaatggcccagttcctcccggtggttccaaaaccaaatgggcagggggctccgctgcagagggctcgccgaggctctcgccttcacccggcgccgcgcaggtgcccgctctcctgcggggagagccgagggggggcgctgccgcagggtctttctggaagcccctccacc

SEQ ID NO: 169303 - DNA, 439 bp, Homo Sapiens
ttatgtctgaccacccatcttcttcacctcggaatagctcacagatcttccttaagtgcaggtgttggtctgcaagtcatatggggccagaaagtggttgtcaccaccacaaatctcttccatttttttggttgtatgtgtcctaggcagttgccacggctgctaaatggttagcttctgctgtggcctgtaacatggatttgggatgtggtaattcttcaccttgatagatctttatataagcctttcaattttccatcaaagttgggataggtagctacttttaagccaggatgaggtagcagaaaacaggaaatgtgggtgaaacaggaatggatgtgtattctgacgttctgtagttcttcatgctggttccctgagaccttgaggcgtttttccaagaattgggcaccaccatcggctccatatgaaaattcgt

SEQ ID NO: 169304 - DNA, 114 bp, Homo Sapiens
attgttgcatagaaatgtattatgatttagtcctccacaaatcaaagtaatttttttctttagaaatactcccagattggctgagtgcagtggctcgcacttgtaatcccagca

SEQ ID NO: 169305 - DNA, 432 bp, Homo Sapiens
gaaacggaggccgcccctgccagccgccctggccctggtcactgcatgatccgctctggtcaaacccttccaggccagccagagtggggatggtctgtgacctgctgggaaggcaggctgatggggcacacccttggcctctcgtccacgaggggagaaacctaaaccctgtttcacaatctgtgcggaagtagcttgcctcacttctgcttaggaaagcggctgttgctccataactctaaccagcacagggctgaggcctgcagtgcacacctgcagggaggcccttcccaaggtgtggtgactgtgccttactgtacatgctcggaggcctggccatataggagggtgggtgatgctgaaatcaccccccatcttaagtaattactttctggagtaatcaggtggaaatccatagacaaatgaaacatt

SEQ ID NO: 169306 - DNA, 573 bp, Homo Sapiens
ggccttgaacgcgtctaaaggcggtgactgggcgtccagctacaccgtcttagcgcacattcccctccatttcagctgcacagaatgcactgaagaaacaaattaactcagttaacaatgtttaagctgagaacaagcaatgaagcactatgacttgcacatttgcggaaatgggcaagttctcagtaacagccaccttgggacccttcgcctttatggttccccggccctctcccatctttgatgggcttggtatttggagcttctgttaacattatagagactcctaggatgtgtgttcatggcattatagctttcgaagaaaggccagtgatccagcaaagggggaaaaatatgcatttcaccccacatgactaggaatccacatcagaatgatacagagttagcaggtttttctaaggaaatgccattcaaatgcctcctaacttttatagttattttgttttatatttctaaattcttgtatcagatccaaagctctattgtacagcaaattattcttcaaaatgattataaccagttgcaccctgtatttctttttgcagccagcac

SEQ ID NO: 169307 - DNA, 1449 bp, Homo Sapiens
ttatgttctgacccaccatacacaaaaatcaatcagcatcttggttacacgacagatccgtgagcatgagcaggagaacgagttgcgggaacagatgtcaggttataagcggatgcggcgccagcaccagaagcagctgatcgccctggagaacaagctgaaggctgagatggacgagcaccgcctcaagctacagaaggaggtggagacgcatgccaacaactcgtccatcgagctggagaagctggccaagaagcaagtggctatcatagaaaaggaggcaaaggtagctgcagcagatgagaagaagttccagcaacagatcttggcccagcagaagaaagatttgacaactttcttagaaagtcagaagaagcagtataagatttgtaaggaaaaaataaaagaggaaatgaatgaggaccatagcacacccaagaaagagaagcaagagcggatctccaaacataaagagaacttgcagcacacacaggctgaagaggaagcccaccttctcactcaacagagactgtactacgacaaaaattgtcgtttcttcaagcggaaaataatgatcaagcggcacgaggtggagcagcagaacattcgggaggaactaaataaaaagaggacccagaaggagatggagcatgccatgctaatccggcacgacgagtccacccgagagctagagtacaggcagctgcacacgttacagaagctacgcatggatctgatccgtttacagcaccagacggaactggaaaaccagctggagtacaataagaggcgagaaagagaactgcacagaaagcatgtcatggaacttcggcaacagccaaaaaacttaaaggccatggaaatgcaaattaaaaaacagtttcaggacacttgcaaagtacagaccaacagtataaagcactcaagaatcaccagttggaagttactccaaagaatgagcacaaaacaatcttaaagacactgaaagatgagcagaaaagaaaacttgccattttggcagagcagtatgaacagagtataaatgaaatgatggcctctcaagcgttacggctagatgaggctcaagaagcagaatgccaggccttgaggctacagctccagcaggaaatggagctgctcaacgcctaccagagcaaaatcaagatgcaaacagaggcacaacatgaacgtgagctccagaagctagagcagagagtgtctctgcgcagagcacaccttgagcagaagattgaagaggagctggctgcccttcagaaggaacgcagcgagagaataaagaacctattggaaagtatttggagttcaacactgtctctcaatcagatcatcttgatctttttctttatctcccttccccttcctaagtcccatttcttggtcataaatattgcattattcacactttcaaactgtgtattttcttacaat

SEQ ID NO: 169308 - DNA, 1039 bp, Homo Sapiens
gaaaggcagagataatggaaagcatcaagcgcctttaccctggctctgtgtacggccgcctcattgacctatgccagcccacacaaaagaagtatcagattgctgtaaccaaggttttgggcaagaacatggatgccattattgtggactcggagaagacaggccgggactgtattcagtatatcaaggagcagcgtggggagcctgagaccttcttgcctcttgactacctggaggtgaagcctacagatgagaaactccgggagctgaagggggccaagctagtgattgatgtgattcgctatgagccacctcatatcaaaaaggccctgcagtatgcttgtggcaatgcccttgtctgtgacaacgtggaagatgcccgccgcattgcctttggaggccaccagcgccacaagacagtggcactggatggaaccctattccagaagtcaggagtgatctctggtggggccagtgacctgaaggccaaggcacggcgctgggatgagaaagcagtagacaagttgaaagagaagaaggagcgcttgacagaggagctgaaagagcagatgaaggcaaaacggaaagaggcagagctgcgtcaggtgcagtctcaggcccatggactgcagatgcggctcaagtactcccagagtgacctagaacagaccaagacacgacatctagccctgaatctgcaggaaaaatccaagctggagagtgagctagccaactttgggcctcgcattaatgatatcaagaggatcattcagagccgagagagggaaatgaaagacttgaaggagaagatgaaccaggtagaggatgaggtgtttgaagagttttgtcgggagattggtgtgcgcaacatccgggagtttgaggaagaaaaggtgaaacggcagaatgaaatcgccaagaagcgtttggagtttgagaatcagaagactcgcttgggcattcagttggattttgaaaagaaccaactgaaggaggaccaagataaagtacacatgtgggagcagatcccctattccgt

SEQ ID NO: 169309 - DNA, 523 bp, Homo Sapiens
ttgtctttctcacatagtgcttccggtatctgatttagaaataacatttaaatgccaagtatctgggggatggaaggaagggtctatatgagcaggtgaataagcagtactgttttggtttagtggatatagttagtgacttttggtgtgtgtttggctttgggacctttttattttggtgtggcaaaaagtaacatattttcatcattgcttcatacgacatggagttaggacagggaaaaatcattcaacactccttatgcattaaatgatcaaataaaccagtgtaggatatcaagactatcaattggtgggattaggcttgacattttatttttataaatatatattttttctgaatgtgtctgagtccaagagtgggcaaaaaataattttctactttggactaatctatagaggtttttgaaagtctgcattactaacttgttgaattcatgatattctgcctatggcacaaattgtaaacctttgtttttctaaaataaagtaattgaaaacctgc

SEQ ID NO: 169310 - DNA, 465 bp, Homo Sapiens
ttacccctgctgtgtgcttttgggaatgagatgttgatgttctccccctacccacaaccatgcccttgagggtagcagggcagcagcataccaaagagatgtgctgcaggactccggaggcggcctgggtgggtgagccatggggcagttgacctgggtcttgaaagagtcgggagtgacaagctcagagagcatgaactgatgctggcatgaaggattccaggaagatcatggagacctggctggtagctgtaacagagatggtggagtccaaggaaacagcctgtctctggtgaatgggactttctttggtggacacttggcaccagctctgagagcccttcccctgtgtcctgccaccatgtgggtcagatgtactctctgtcacatgaggagagtgctagttcatgtgttctccattcttgtgagcatcctaataaatctgttccattttggattgcacgg

SEQ ID NO: 169311 - DNA, 563 bp, Homo Sapiens
tgttcagaggagtccaggggctgactcctcgcgctctctgatcccactcgtacaagcatgtcaaaggtgatctgtttagtttttccttagtatcgaacatatcacagctactcaatgaagtttcttctcaactaaagaaacacagtctcttagagaattggttcctgtgtttccaccataagataaatgagataaagtgcacttgggtttacgtctttcaagcacttaagaacagcactttattcagttttaataaatttttactaaatgggtaaatgcaaaagaatcttttttttatggctcatatgtcttcctgtctctaagccagaccaatgagcaaatacctttaaaactagttgttacatcttgaaccatttaactgtaataaaagcagaatgtttagttaatgaattaaagaacaaaccctgagcccttttatcagtctcctggctttaaactaagccaatgaggaagtgatttgggggattcctgaaactaggaaaaatgtctctttattttgaaagaaacttgcatttttcttctttggtacgagctcgattgta

SEQ ID NO: 169312 - DNA, 400 bp, Homo Sapiens
tctagaggataccccttatgtctgacccacccttaccattagtaaaacgtaaatttgatcaatcataacctataaagtcatataacaaagggaagactaaagactgatcattatcagtaaatccattcaattccagatgccactttaggctgatgtgtctagtaccctaatgattgaaaaatcattaatctagaaaaagcatttgcaaactaaggataacttcgcagttgatgtgcctttttttgctattaaaagtgctatttaacatgctaaaatgtcttatggcacatgggactcaacagcatgttctgatgaggcatccatttttagcagtatttttccctagaatttggtttggcatagtaaacccctttgatatattaaaatagttctggtgaaa

SEQ ID NO: 169313 - DNA, 376 bp, Homo Sapiens
ttatgttctgacccaccaatggctccctgtgagcgctgcaggcacagtcggcaattcctacaagtgcaacgcggaggagcacgtccgtgtcacgaaggcgttttcagtcaatatattcaaagtgtgggtccaggctttcaaggtggaaggtggccagtttggctctgtggaggagtgtctgccggacgagaacagcatgctgatccccatcgctgtgggtggtgccctggcggggctggtcctcatcgtcctcatcgcctacctcgtcggcaggaagaggagtcacgcaggctaccagactatctagcctggtgcacgcaggcacagcagctgcaggggcctctgttcctttctctgggcttagggtcctgtcgaa

SEQ ID NO: 169314 - DNA, 567 bp, Homo Sapiens
ggcgttctagaggtccccgtgtgctgacccacccttcttacggtccaaagaatgtcagcccctactacggctcttgagtactctgccacggacaactacacccttcagatcaaccctaattcaggcctctgtaatgaggatcatttgtcctacttcacttttattggaagagttgctggtctggccgtatttcatgggaagcccttagatggtttcttcattagaccattttacaagatgatgtggggaaagcagataaccctgaatgacatggaatctgtggatagtgaatattacaactctttgaaatggatcctggagaatgaccctactgagctggacctcatgttctgcatagacgaagaaaacttgggacagacatatcaagtggattcgaagcccaatgggtcagaaataatggtcacaaatgaaaacaaaagggaatatatcgacttagtcatccagtggagatttgtgaacagggtccagaagcagatgaacgccttcttggagggattcacagaactacttcctattgatttgattaaaatttttgatgaaaatgag

SEQ ID NO: 169315 - DNA, 1420 bp, Homo Sapiens
  misc_feature (566)..(586): n is a, c, g, or t
tgcagccccaaaggggcaaaaagagactttaattaggggagggaggatccaccagaatcagaaaagggacagctagcgtgggagcagaggagccagaacaggcaggaggagggcccggccagggaagctctggaggactcacctcgccacctctggcacaggcactggcactgacggacaaggcgaaacagcggcccctctcaactgggagggcacccaatggcccctgtagccagaggttgcccggcttttgggccccaggtcctagggcatgactggtggtcaccaaatttggcccgttgtccccaaccagtgctggggggccatctttaggcagaactcaggaagctggcagagagttcccaacacttatactggggccaaggaggcttgggaataaaagggcaagggagaaactggagtctgaaacctccctccctccccacctggggtggcataggagagaaaaaataagtcgccttctggctccaggcccgcccagacccacagcaaccaataacgtataatcactgggaccagtcacagccactggaggtggaggtttnnnnnnnnnnnnnnnnnnnnngacaaaaaggttacagtatcctacaagcacagagtttaagtttcaagacgttaaaaaaaatctgtcccggcccaggggactgaacatcagaagccagcctgaccaggcacgtgtggccttggggcaggtccactgctgctttcttgcccagctagcaagcacaccacccacctcccgcatcaaatgcccaccccaacccaactccctgccgccgccgcgctgctcggggagtgactccaggacgccttcgtggagacatgggtagtctgagggggaaggccacgagatccagccagatggtttaaaaattcttaaggaactcttcagccacaatgcgggcacgggcattgactgacagcttcatctcactgatctccttgtcaatctcctccatgaagtggatcacaaagtccaccaacttgtgtttgtacatctgctctgtgtggaagttggtgatcagaaagctgatatcatacccctccacaggcttccttcgaaggataaagaagttctctgctcgcatcatcatgaagcgcatgaacttgtggcacaaaatcttctcgatctcatcagcctgtttcacagcaatgctgacccggacagagttgatggagccctcaatcagaaccttttccttctcattcctgctgatggtcacaggttgtaacaggagctctttgctactcctgacttccacttccggcttgttgtgtcgttccacaaactgggaggagaagttctccaggcagagggcagcctgcaatgtggcccgcacggcactcaggtaggggcggagagtggcagtcatcgcgggcgctggctgggccggaaagc

SEQ ID NO: 169316 - DNA, 1473 bp, Homo Sapiens
  misc_feature (55)..(55): n is a, c, g, or t
  misc_feature (165)..(165): n is a, c, g, or t
  misc_feature (185)..(185): n is a, c, g, or t
  misc_feature (255)..(255): n is a, c, g, or t
atggtgtgaatctagtgaacttcgcgtatacgtcattatagcagcacgagacgcnaagatggtatgtaggcgtgcagggagtaagagtacgtgcgtgcgttgagtagtcttattcaatagcagcggcctactgatacatgggcgagttgacagtggcgagacgtnacgatatagtggccactggngtagatgacggactagtgctccgcacgactgctgggatgaagggcattcgtaccggatacactcttgtancgcgcggtgaatacagcagagtcgtatacagtagatcgctattaaattgattgagtgtacggtgcgaggtgactgttgtgaggactgtacggcacttatattactagcgacatacgaaatagcacatcttgtctgcttgtttgagtagctattgtgactggtcgtctcttgcggctgcaccttcttcgcaagctcatacatttcatctttgtagcctccgggtcacggagcataacgagtctggtgtgcacaagtctcgatatcgtcattctacgtctgtagactagaacacagtgccagagtgtcgcctgagtcagagtccagttgtgaaacacaaaatctcgcttctacatggtctggagcacgctgcccacgcagtggggaggcgtcgaactgcgggaggcctctgttcctcaggggattcatgtgccttcgacgggcggggtctccggagggaactcggggttgagagcgtcccattccctccagcggcttgtggcggcccgatgttgcgctgtacctccgtgaagacctgcccgcggttctgctccgccagcagtcagttggcctggttaccgcggactttgtaggagaggtagaagccgtcataggggcccgtcaagcgccagcgacttggcaaaaggcgtcctcccaacttcaggccccggtccacgctgatcttgtagaagaccacctgcccgtcctgcgggtgcccgggacccaggaacacctgctggctctcctcgtagatctcctcgataccgggagcaaggtccaggatgcccatgtcgtatttgccctcccgcttgtccatctcgatgaggtggtcgaaggtgtctgagaagtactggaacagggcgttctgcttgtgcacctccagccccaggatgcggttcaggaacttggtgatggaacagtccttctccacgtccaggcagccattccgggactcccggccaccaatgcccacagacagcaggccctgcttcatgtcccggaagaaggtggggacccctaccagggtatccctggggcacaggcactttgttctcagtctggctcaggatggtggtgaggacacagtgcagggcccgggtgccatacttgttctcaaagttgtacttgctgaggtcacgggactccgtggcgcggcggtctccgtgggtcagggcccccggacgcgtgggtcgacccacgccgtccgcgacagcgtgggtc

SEQ ID NO: 169317 - DNA, 687 bp, Homo Sapiens
ctcagacaccttcgaccacctcatcgagatggacaagcgggagggcaaatacgacatgggcatcctggaccttgctcccggtatcgaggagatctacgaggagagccagcaggtgttcctggctcccgggcacccgcaggacgggcaggtggtcttctacaagatcagcgtggaccgcggcctgaagtgggaggacgcctttgccaagtcgctggcgctgacgggcccctatgacggcttctacctctcctacaaggtccgcggtaacaagcccagctgcctgctggcggagcagaaccgcggccagttcttcacggtgtacaagcccaacatcggccggcagagccagctggaggccctggacagcctccgccgcaagttccaccgggtcaccgcggaggaggccaaggagccctgggagagtggctacgctttgtcgctgacgcactgcagccacagcgcctggaaccggcactgccggctggcgcaggagggtaaggactgcctgcaggggctgcggctgcggcaccactacatgctgtgcggcgcgctgctgcgcgatgtggggccgcatcgccgccgtcatggccgacgtcagcagcagcagctaccatgcagatcgtgcggctgaagaccagggacaggaagaagcaagtgggcatcaagatccccgagggctgcgtgcgc

SEQ ID NO: 169318 - DNA, 1239 bp, Homo Sapiens
  misc_feature (264)..(264): n is a, c, g, or t
cccagggtgaacctgcctgtgaactctgaagtcactagtccagctgggtgcaggaggacttcaagtgtgtggacgaaagaaagactgatggctcaaagggtgtgaaaaagtcagtgatgctccccctttctactccagatcctgtccttcctgggagcaaggttgagggagtaggttttgaagagtcccttaatatgtggtggaacaggccagggagttagagaaagggctggcttctgtttacctgctcactggctctagccnaccccaggggaccacatcaatgtgagaggaagcctccacctcatgttttcaaacttaatactggagacgtggctgagaacttacggacaacatcctttctgtctgaaacaaacagtcacaagcacaggaagaggctgggggactagaaagaggccctgccctctagaaagctcagatcttggcttctgttactcatactcgggtgggctccttagtcagatgcctaaaacattttgcctaaagctcgatgggttctggaggacagtgtggcttgtcacaggcctagagtctgagggaggggagtgggagtctcagcaatctcttggtcttggcttcatggcaaccactgctcacccttcaaaatgcctggtttaggcagcagcttgggctgggaagaggtggtggcagagtctcaaagctgagatgctgagagagatagctccctgagctgggccatctgacttctacctcccatgtttgctctcccaactcattagctcctgggcagcatcctcctgagccacatgtgcaggtactggaaaacctccatcttggctcccagagctctaggaactcttcatcacaactagatttgcctcttctaagtgtctatgagcttgcaccatatttaataaattgggaatgggtttggggtattaatgcaatgtgtggtggttgtattggagcagggggaattgataaaggagagtggttgctgttaatattatcttatctattgggtgggtcagaacatagacctgatgagttgtgggaccagatgtcatctctggtcagagtttacttgctatatagactgtacttatgtgtgaagtttgcaagcttgctttagggctgagtcctggactcccagcagccgcacagttcagcattgtcgtggctggcttgtttcctcggcggtcccctgcaagtctaggatcggtggtcccacatatacgggaatcctcgggaacgcta

SEQ ID NO: 169319 - DNA, 801 bp, Homo Sapiens
gatcccttcctgccattctgcagcctgttagccaatgcatgcaggccagcggcacttactgcaaagccatcacagaaagcagcgaggcccttcagactcctaggagaaacagtgattccttctactgctccatccccactgctaactctgggtccccaacccctgtcctcccagagtcactctgatcctgctcatcacaccaggacatggagtctctacataaccacaggattcccctagagcctgctgttgccacagtgaccctgatgctgggctgttacccacttagcctcccttacctcttctgtctgcttccaccacttctatatccctgtttggaaaaaggatgggtgcctgagcctgtgcccagttgggtgtccactcacaacccaaagcagagcctggcactgcccactctgaccaagggccttctctccctgatctcactggcgtctgccctataaacccatcactgagtaagtgggttgcgccgaaaacacagcagcagcaataaacagaaaatgagggcagagcccagtgtgtcacagttctgggaggcagatcgggatgggatacccgtgtggcttgtccaatgatcttcatgttaagaggcagtctctgtgaatgaactttctcttcaggccacaagaagccctaacccaagcggaggcgaaaggtagcaatctccatgggctccaaatagacgtcagtgctgtaggacggggaggccagagggtacagtaacgtcaaggaggttggctgaaggaataccacatccaggccatggaaaaggctgcccag

SEQ ID NO: 169320 - DNA, 1548 bp, Homo Sapiens
  misc_feature (1437)..(1447): n is a, c, g, or t
ccctagacttcctgtacccctagcaatcttccttacattcccggtcaggcatctctggtgtatgatgttgcattattggacctccataaccccaaggacagcatttccattgagaacaaggtagtacctgaaaactgtgagcggatgagtcaaagtggggactttctcaggtatcattacaatggcacgcttctggatggcaccctctttgattccagctactctcggaaccgcacgtttgacacgtacattgggcagggctacgtgattcctgggatggatgaaggtctacttggtgtttgcattggagaaaagcgaaggattgtggtcccgcctcacctggggtatggagaggaaggaagagggaatatccccggctcggctgtgctggtgtttgacatccatgtgatcgacttccacaacccttcggactccatcagcatcacctcccactacaaaccccctgactgctcagtgctgagtaagaagggagattacctcaaatatcactacaatgcctcacttctggatgggaccctgctggactccacgtggaatttaggcaaaacttacaatattgttctgggatctgggcaagttgtgttggggatggacatgggtctcagagagatgtgcgttggcgagaaacggacagtgatcattccgcctcacctgggctatggggaagctggcgtggatggagaagtgcccggcagtgccgtattagtgtttgacagtgagctgctggagctggtggctggccttcctgaggggtacatgttcatatggaatggtgtaggtgtcacccaacctctttgaagaaattgacaaggatggcaacggagaagtcctcctggaagagttctcagagtacattcacgcccaggtggcatctggcaaagggaaactcgctcctggctttgatgctgagctgattgtgaagaatatgttcaccaaccaggaccggaatggagatgggaagggtcacagccgaggaatttaaactcaaagaccaggaagccaaacacgatgaacttctaaacctggcatgaaccagatggtgccagggagtacgtgacaccaagccacctgtgtcgcaagacgtgcagtgagggtgcaagggtctgcgcagaagttgcatcattagccagtagtaggtgggtcacatagtacctggtgtacacatcggggtgggttgatatatgggggtgagaacgttgggctgatcgccagtgatagtaaacaaaatctgtgcagagggccttagcatgggatgtgtccagtattgaaaaggctgcactgccaaccatgatttgtgagccttctgggaaattttgtgattaaaggaatatatagtgtcagacggaagttataatcatcttggaggaaccattaagaaaaggtgtcccaggtatctaatataaaagaggggtaaannnnnnnnnnnacttggctgggttaaaacatttttaaaaatatttctaaaaaatgggcagggaaaagtccaaagggctttgcttggcccccaagcagaagattccccaacca

SEQ ID NO: 169321 - DNA, 625 bp, Homo Sapiens
cggccgcgtcgactctgtattacatgtaaatctgcagcagaagagtagcggctggcgtccctgctggtgtcttcctggtgtgagcttcagaatactgggctaatggaaagcttggccagcacctgcctatctggtcccagctagagccccgtgtgggctgggccccattcatcaggactaaggcagcagctgctgcctagaagggaggagaggagtgggagtgagccggagagggtgaagcaggcaggaagctgcaggccggcggtggatggggccaggaagcatgcagggggagtgaggaccgtgtatgagagaaacactgcccaagagagaagaaagaaaatcacaggacccgaggaaaaagaatgagtggtgtgttcagagatgacacatgacaacaaattgtttgcttggaggattttcttacgcgtgcgtgtttaaactggcctcaaggaggaagaagaaacatgcgttcctggatgactgagttctggaatattctgtcataagactttgcaactggagtagccccagaaaaaggtggaatttaggcaaaacttacagtattgttctgggatctgggcaagttgtgttggggatggaccatgggtctcagagagatgtg

SEQ ID NO: 169322 - DNA, 487 bp, Homo Sapiens
tttagccctgctgtcagtggatggcttgaatgttaatcggctcaatggacactctgccttttcacaagggcagagggccaatgtgaccacttttagtatcccaagctcttgcccagcatcctggaagaatcaggccacacatgggcttgaaggttgaatgcagggttttattgagtggtggaggtggttctctgaaggatggatgcagagctggaagcggggatggcacgggaagataatcttcctgctgggtggccaaacctctccgaccaccctcggctgaactcctctcggcgttcaaatgttcctcttctctctttctctgctgtatcgtttcaccattcatctgcttgtctgggatggtgaagacaactgtctgctcattctaaacgacacggaatagaggcgtctcctcatctgctcatctgcttctggagcccgaggtttggggttatatgggtacaggataggggagcatggcaggata

SEQ ID NO: 169323 - DNA, 275 bp, Homo Sapiens
ctgttgttcatacctgcactgttgttcataccctctctctctttaccccgatacagcgaccaggtatgaacaacagtgcaagtatgaacaacagtgcaggtatgaacaacagtgcaggtatgaacaacagtgcaggtatgaacaacagtgcaggtatgaacaacagtgcaggtatgaacaacagtgcaggtatgaacaacagtgcaggtatgaacaacagtgcaggtatgacaacagtgcaggtatgacaacagtgggatcctcagaacagccat

SEQ ID NO: 169324 - DNA, 526 bp, Homo Sapiens
tccaaaaacagtaacactgacagtcctcccctgtgtcaagggagacagagtagggtccttcaaatcttatttaccaacagatttgacaactgttttaacatcaaatctaaggttttacttcaaatcaacttcagcaggaaggaaagaaggtccagttggacaagctgatgaattttaagtaaccaggggaaggcagacagtggaacaaataggtgggagaccactgtcaaagcatatttttgcccaaaaggtctgcttacttcagtcagctggccccataaaccaagtcacacacaaaatcaatgtcggtcaaattagtgcaaatcaagctcgtggattcaaatgactatagaaaacgggaagagtagccaattcctggaagctgaagtcaggttaaccattaccaactccctagaggacacatgggaatacacataccaagtttccctactatttcccaggagtgggatcatcggtttcccttgcagagaaagaagtcttcacttccatggtatgaacacgtgca

SEQ ID NO: 169325 - DNA, 331 bp, Homo Sapiens
tgtcgatagctgattctagatgtcccggtcgctgtatcagcgggagacgtggtcaagccgggggggtccctgtaaactctcctgtgaagcctctggattcggcttcgagttactatagcatgaattgaagtccgccagacctccagggaaggggctggagtgggtctcatctattactcctactggaactcacgtacactacgcagactcagtgaagggccgattcaccatctccagagacgacgcccagagctcgctctatctgcaaatgaacagcctgcgacccgaggacacggctgtctatcactgtgcgaggggcctggcatcgggg

SEQ ID NO: 169326 - DNA, 433 bp, Homo Sapiens
gctgtatagggggagctgaggagatggaaatgggtccccgtaccgggtccccaacaataacttgccatccctgaacgctacctttcgccagatgccacggtatccacggaggtccgggccatcattgcctggatggagaagaaccccttcgtgctgggagcaaatctgaacggcggcgagcggctagtatcctacccctacgatatggcccgcacgcctacccaggagcagctgctggccgcagccatggcagcagcccggggggaggatgaggaacgaggtctccgaggcccaggagactccagaccacgccatcttccggtggcttgaaatctccttcgcctccgcacacatcaccttgaccgagccataccgcggaggctgccaagcccaggactaaaccggcggcatgggcatcgtcaacgggcccaat

SEQ ID NO: 169327 - DNA, 564 bp, Homo Sapiens
tgatctagaggatcccttagggcaggacaatatggcaggcgttgtcatatgtatatcatggctattgtcacgtggacatcatggcgggtcttgccgcattgttaaagatagcgggttttgccgcctagtgccacgcagagcgggagaaaaggtgggatggacagtgctggattgctgcataacccaaccaattagaaatgggggtggaattgatcacagccaattagagcagaagatggaattagactgatgacacactgtccagctactcagcgaagacctgggtgaattagcatggcacttcgcagctgtctttagccagtcaggagaaagaagtggaggggccacgtgtatgtctcccagtgggcggtacaccaggtgttttcaaggtcttttcaaggacatttagcctttccacctctgtcccctcttatttgtcccctcctgtccagtgctgcctcttgccccgctggatatctggctgtgtggtctgaacctccctccattcctctgtattagtgcctcacctaaggctagtatacctcccccctcaccccccgacca

SEQ ID NO: 169328 - DNA, 465 bp, Homo Sapiens
tagaggatccacagagatcgctgtatcggggggaaacacctagtcctgagtgtgaggagcacaacagcctcaaggaaatggtcctgatggaggggctgtgctctgagcagggacgccggggctcaacactggctagttcctctgagaggaagcccttggagaaccagctagggaagcaggaagagttccgggtatatggaaagtcagaaaacatcttggtcctacgaaaggacatcgaagatctgaaggcccagctgcagaatgccaacaaggtcattcaaaacctcaagagccgggtccggtccctctcagttacaagtgattattcgtctagtctggaaagaccccggaagctgagagctgttggcaccttggaggggtcttcacctcatagtgtccctgatgaggatgaggggtggctgtctgatggcactggggctttctactctccagggcttcaggcca

SEQ ID NO: 169329 - DNA, 467 bp, Homo Sapiens
gggcgcggagacagcaacaagcagcaacgtcggagtctagccagtcagaggcgtctgtccggagggaggaatcacccatggatgtggaccagccatctcccagtgctcaagatactcaatccattgcctccgatggaaccccacagggggagaaggaaaaggaagaaagaccacctgagttacccctgttcagcgagcagctgagtttggacgtagctgtgggacatgctgggggagtgtctaaaggaactagaggaatcccatgaccagcatgcggtgctagtgctacagcctgctgtcgaggccttctttctggtccatgccacagagcgggagagcaagcctcctgtccgagacacccgtgagagccagctggcacacatcaaggacgagcctcctccactctcccctgcccccttaaccccagccacgccttcctcccttgacccattcttctcccgggagcc

SEQ ID NO: 169330 - DNA, 671 bp, Homo Sapiens
ttgaggagaacatcggctggagcacggtgaacctggacgaggacaagcagcagcaggatttctctgcttcctccaccaccatcctggacgaggaaccgatcgtgaatagggggctggcagctgccctgctcctgtgtcagaacaaagggctgctggagaccacagtgcagaaggtggcccgggtgaaggcccccaacaagtcgctgccctcagccgtgtactgcatcgaggataagatggccatcgatgacaagtacagccggagggaggaataccgaggcttcacacaggacttcaaggagaaggacggctacaaacccgacgttaagatcgaatacgtggatgagacgggccggaaactcacacccaaggaggctttccggcagctgtcgcaccgcttccatggcaagggctcaggcaagatgaagacagagcggcggatgaagaagctggacgaggaggcgctcctgaagaagatgagctccagcgacacgcccctgggcaccgtggccctgctccaggagaagcagaaggctcagaagaccccctacatcgtgctcagcggcagcggcaagagcatgaacgcgaacaccatcaccaagtgacagcgccctcccgccccggccctgcctcaaccttcatattaaataaagctccctccttattttttc

SEQ ID NO: 169331 - DNA, 700 bp, Homo Sapiens
  misc_feature (688)..(688): n is a, c, g, or t
gaagagggccaagttactggaggagatggaccaagagtttggtgtcagcactctggtggaggaggagttcgggcagaggcggcaggacctgtacagtgcccgggacctgcagggcctcaccgtggagcatgccattgattccttccgagaaggggagacaatgattcttaccctcaaggacaaaggcgtgctgcaggaggaggaggacgtgctggtgaacgtgaacctggtggataaggagcgggcagagaaaaatgtggagctgcggaagaagaagcctgactacctgccctatgccgaggacgagagcgtggacgacctggcgcagcaaaaacctcgctctatcctgtccaagtatgacgaagagcttgaaggggagcggccacattccttccgcttggagcagggcggcacggctgatggcctgcgggagcgggagctggaggagatccgggccaagctgcggctgcaggctcagtccctgagcacagtggggccccggctggcctccgaatacctcacgcctgaggagatggtgacctttaaaaagaccaagcggagggtgaagaaaatccgcaagaaggagaaggaggtagtagtgcgggcagatgacttgctgctctcggggaccagactcaggatggggactttggttccagactgcggggacggggtcgccgccggtgtncgaagtggagga

SEQ ID NO: 169332 - DNA, 919 bp, Homo Sapiens
gagaagggacgccggctgcgacagttacagcagctacagcagctgcgagacagtggcgagaaggtggtggagattgtgaagaagctggagtctcgccagcggggctgggaggaggatgaggatcccgagcggaagggggccatcgtgttcaacgccacgtccgagttctgccgcaccttgggggagatccccacctacgggctggctggcaatcgcgaggagcaggaggagctcatggactttgaacgggatgaggagcgctcagccaacggtggctccgaatctgacggggaggagaacatcggctgaagcacggtgaacctggacgaggagaagcagcagcaggatttctctgcttcctccaccaccatcctggacgaggaaccgatcgtgaatagggggctggcagctgccctgctcctgtgtcagaacaaagggctgctggagaccacagtgcagaaggtggcccgggtgaaggcccccaacaagtcgctgccctcagccgtgtactgcatcgaggataagatggccatcgatgacaagtacagccggagggaggaataccgaggctccacacaggacttcaaggagaaggacggctacaaacccgacgttaagatcgaatacgtggatgagacgggccggaaactcacacccaaggaggctttccggcagctgtcgcaccgcttccatggcaagggctcaggcaagatgaagacagagcggcggatgaagaagctggacgaggaggcgctcctgaaagagatgagctcccagcgacacggcccctgggcaccgtggggcctgctcccaggagaaacagaaaggctcaaaaagaccccctacatcgggcttcgcgggcagcgggcaaaagcatggaacgcgaaccccattcccaagtgaaagcgcccctcccgcc

SEQ ID NO: 169333 - DNA, 1148 bp, Homo Sapiens
  misc_feature (1035)..(1035): n is a, c, g, or t
  misc_feature (1115)..(1115): n is a, c, g, or t
  misc_feature (1121)..(1121): n is a, c, g, or t
actcgtcgcttctcctagcagacctgccggcttggcgctggagtttccggacctcggcgctcactgttcggagccgagctgtcagcgcttggattttctgccgcttaagtgtgatgcctgctcaggcatcttctgcgcagaccatgtggcctacgcccagcatcactgtggatctgcttaccaaaaggatatccaggtacctgtgtgccctctctgtaatgtgcctgtgcctgtggccagaggggagccccctgaccgtgctgtgggagagcacattgacagagactgtcgctctgatccagcacagcaaaaacgtaagatcttcaccaataagtgtgaacgcgctggctgccggcagcgagaaatgatgaaactgacctgtgaacgcttgtagccgaaacttctgcatcaagcaccggcatccactggaccatgattgctctggggaggggcacccaaccagccgggcaggacttgctgccatctccagagcacaagctgtggcttctacaagcactgtccccagcccaagtcaaaccatgccttcctgtacctctcccagcagagccacaacccgatctccgtcctggacagcccctccagtgattgctttgcagaatggcctgagtgaggatgaagctctgcagcgggccctggaaatgtccctggcagaaaccaaaccccaggttccaagttgtcaggaggaagaagacctaactttagcacaagcactgtcagccagtgaggcaagaataccagcggcagcaggcccagagccgcagctcgaagccgtccaactgcagcctgtgctagggccctgggcttggggagggaggttcacctgaggaggactgtggccctcacacctctagggtacacagggagaggaggcccggagcaccctggagggcagagacaagcgggagtgatgtggaggtcgccctgggagcctctggaaggccttgctagtgctccagctgcatggaagagagcggctagcaactgttccctggttgggccctcagtggatgctgnccaggccctactcttagccccttcatcatgtcatctcccttatgctggagctgccccgatgtggagtgggcaggaagggncctggnaaaaataaaatttttttggcagttgat

SEQ ID NO: 169334 - DNA, 530 bp, Homo Sapiens
agctcctccagttcagcgcggcctggggcggaagcccttggatatatctgtggcaggcagccaggtgcattccccaggcattaaccctctgaagtctcccacgatgcaccaagtccagtcaccaatgctgggctcgccctcggggaacctcaagtccccccagactccatcgcagctggcaggcatgctggcgggcccagctgctgctgcttccattaagtccccccctgttctggggtctgctgctgcttcacctgtccacctcaagtctccatcacttcctgcccggtcacctggatggacctcttctccaaaacctccccttcagagtcctgggatccctccaaaccataaagcacccctcaccatggcctccccagccatgctgggaaatgtagagtcaggtggccccccaccttctacagccagccagcctgcctctgtgaatatccctggaagtcttccctctagtacaccttataccatgcctccagagccaaccctttcccagaaaccactctctattatga

SEQ ID NO: 169335 - DNA, 214 bp, Homo Sapiens
tcgctattctcggcacccatgcttgatactccatagggctataccaagtccatcgacatctggtctgtgggctgcattctggctgagatgctctctataccggcccatcttccctggcaagcactacctggatcagctcatccacattctgggcatcctgggctccccatcccaggaggacctgaattgtatcatcaacatgaatagcgaggtg

SEQ ID NO: 169336 - DNA, 679 bp, Homo Sapiens
  misc_feature (61)..(61): n is a, c, g, or t
ccataaggcattagcatccctagccacagccacttctggagtccgtcgtacaggagagatntgggtctcgctgtgctagaatattccgtctagttttgcagaagaaacacatagagcagaagcaagtggaagactttgcaatgattcctgcaaaggaggcaaaggatatgctatataagatgctctcagaaaatttcatgtcactccaggaaattcccaaaacaccagaccatgccccatccaggaccttctatttatatactgtgaacatcctgtcagctgcccgaatgttgttgcacaggtgctacaagagcatagccaacttgatagaaaggaggcaatttgaaaccaaagagaataagcgtctactagaaaaatctcagagggtagaagccatcattgcatctatgcaggctactggtgcagaggaagcacagttacaagaaatagaggagatgatcacagctcctgaacgtcagcagctagagaccctgaaacgtaatgtcaacaagtggatgccagtgagatccaggtggacgaaaccatcttcctgctggagtcttacattgagtgcaccatgaagagacagtgatccagaagaagcatcttcctcagaagatctggggggatggaaagcaaaataaaggaggtgcctggatgcgaccgacctggattcgcg

SEQ ID NO: 169337 - DNA, 394 bp, Homo Sapiens
  misc_feature (164)..(164): n is a, c, g, or t
cctcgcttagtgctccctggtatgactggtttccctggtgctgctggacggactggtcccccaggaccctctggtatttctggccctcctggtccccctggtcctgctggaaaagaagggcttcgtggtcctcgtggtgaccaaggtccagttggccgaactgnagaagtaggtgcagttggtccccctggcttcgctggtgagaaggctccctctggagaggctggtacttctggacctcctggcactccaggtcctcagggtcttcttggtgctcctggtattctgggtcatccatggctcgagaggtgaacatggtctacccggtgttgctgtgctgtggtgaacctgtcctctcagcataccgccctccttgacccgggatcctctagaa

SEQ ID NO: 169338 - DNA, 568 bp, Homo Sapiens
gcacatgcttcttgggatctcagtgtgaatggtgttcaggaggctaggggaaggcaccctggacctcaccacaggctcagagcctgcccagcaacaccatggatactctctctaaaagggggactcctggggagactatagacaaactcaggcctggctggaagaaagagcatcaggaacaagccttgagtacccccacttggtctcgtagagttcaaggccccagctacaagcagcttgctccagcatccaggaggcccggcggtgcacacggcttgagatgcctgacaacctttacacctttgtgctgaaggtgaaggaccggacagacatcatctttgaggtgggagacgagcagcagctgaatacatggatggctgagctctcggagagcacaggccgaggcaggctggagagcacagaagcagagatgcatattccctcagccctagagcctagcacgtccagctccccaaggggcagcacagattcccttaaccaaggtgcttctcctggggggctgctggacccggcctgccagaagacggaccatttcctgtcctgctac

SEQ ID NO: 169339 - DNA, 934 bp, Homo Sapiens
  misc_feature (824)..(824): n is a, c, g, or t
tccgacgagggcgggccgccgggtgctggtcaccggggcaggcaaaggtatagggcgcggcacggtccaggcgctgcacgcgacgggcgcgcgggtggtggctgtgagccggactcaggcggatcttgacagccttgtccgcgagtgcccggggatagaacccgtgtgcgtggacctgggtgactgggaggccaccgagcgggcgctgggcagcgtgggccccgtggacctgctggtgaacaacgccgctgtcgccctgctgcagcccttcctggaggtcaccaaggaggcctttgacagatcctttgaggtgaacctgcgtgcggtcatccaggtgtcacagattgtggccaggggcttaatagcccggggagtcccaggggccatcgtgaatgtctccagccagtgctcccagcgggcagtaactaaccatagcgtctactgctccaccaagggtgccctggacatgctgaccaaggtgatggccctagagctcgggccccacaagatccgagtgaatgcagtaaaccccacagtggtgatgacgtccatgggccaggccacctggagtgacccccacaaggccaagactatgctgaaccgaatcccacttggcaaagtttgctgaggtagagcacgtggtgaacgccatcctctttctgctgagtgaccgaagtggcatgaccacggggttccactttgcccgtggaagggggcttctgggcctgctgagctccctccacacaccctcaaggccccatgcccgggctcatcctacccccaaatccctccaataaacctgatttctggctgcccccgaaatntaataactatcaagtacctctacgttatgacccatatcccttcccggggcatcctttgttcggggggccggaaaaaagagggtattgcaaatgggccacttgggccactt

SEQ ID NO: 169340 - DNA, 768 bp, Homo Sapiens
  misc_feature (692)..(702): n is a, c, g, or t
  misc_feature (719)..(727): n is a, c, g, or t
cccgtgtgcgtggacctgggtgactgggaggccaccgaggcgggcgctgggcagcgtgggccccgtggacctgctggtgaacaacgccgctgtcgccctgctgcagcccttcctggaggtcaccaaggaggcctttgacagatcctttgaggtgaacctgcgtgcggtcatccaggtgtcgcagattgtggccagggcttaatagcccggggagtcccagggccatcgtgaatgtctccagccagtgctcccagcgggcagtaactaaccatagcgtctactgctccaccaagggtgccctggacatgctgaccaaggtgatggccctagagctcgggccccacaagatccgagtgaatgcagtaaaccccacagtggtgatgacgtccatgggccaggccacctggagtgacccccacaaggccaagactatgctgaaccgaatcccacttggcaagtttgctgaggtagagcacgtggtgaacgccatcctctttctgctgagtgaccgaagtggcatgaccacgggttccactttgccggtggaagggggcttctgggcctgctgagctccctccacacacctcaagccccatgccgtgctcatcctacccccaatccctccaaataaaccctgaattcgtgcgtgccccagaaaaacatagagaaaagaaggatcacctattacaaannnnnnnnnnntcgaagaatttccccannnnnnnnnccagttttcgttacccagtttttgtcacagggggccctttt

SEQ ID NO: 169341 - DNA, 937 bp, Homo Sapiens
tctccgctcaaccgaacaggggttggtgtaaaataggcggtgaacacggcccgcgggctgtaccagcgctggtgcgagctcctgcaggaaagcgcggcggtcggacgcgaggagctggactggacgaccaatgagctgcggaatggcctgcgcagcatcgagtgggacctcgaggacactggaagagaccatcggtatagtggaagccaacccaggcaagttcaatgctcccagccggggacctgcaggagagaaaggtgttcgtggagcggatgcgagaggcagtccaggaaatgaaggaccatatggtcagcccaacagccgtagcatttttggtagaggaataacacgagagatactcgcaggcaagccagctgcccagaagtcacccagcgacctgctggatgccagcgcaggtctcggacacatctcgctacatcgaggagcagcaggccactacagcagctgatcatggatgaacaggatcaacagctgaagatggtgtctgggagcatccaggttctgaagcacatgtccggccgcgttagagaagagctggacgagcagggcatcatgctggatgccttcgcccaagagatggaccacacccagtcccgcatgaacaggatcctcaggaagttggccaaagtatcccacatgacgagtgaccgccgacagtggtgtgccatcgccgtgctagtgggcggtgcttctcctcgttctcatcttactattctctctctgaccccagtcctccctggcaggcttggtcccttaaggccttgtggagccaccaagcacttttggaagctggcctcgcccccttaggcaggacgagggtccctcctgcggtagcttggagagtagagggtcacagcttggggaggctgcccccatggctctctccctagaggccagtgtgacccttcagggaccg

SEQ ID NO: 169342 - DNA, 923 bp, Homo Sapiens
  misc_feature (798)..(798): n is a, c, g, or t
gagggcggaagtgtccgcacgtcgggcctccgaggcttctctttctcccctggcggtccggctctcgatggtggcgtgacgggggcgggggtggcggcgcgttctcctcggttgggagggaaccagcccgcgaacccaggccgggaggggggttcggcctgggggggaagggactgacatgtctctcgaagaccccttttttcgtagtccgaggcgaggtgcagaaggcggtgaacacggcccgcgggctgtaccagcgctggtgcgagctcctgcaggaaagcgcggcggtcggacgcgaggagctggactggacgaccaatgagctgcggaatggcctgcgcagcatcgagtgggacctcgaggacctggaagagaccatcggtatagtggaagccaacccaggcaagttcaagctcccagccggggacctgcaggagagaaaggtgttcgtggagcggatgcgagaggcagtccaggaaatgaaggaccatatggtcagcccaacagccgtagcatttttggagaggaataacagagagatactcgcaggcaagccagctgcccagaagtcacccagcgacctgctggatgccagcgcagtctcggccacatctcgctacatcgaggagcagcaggccacacagcagctgatcatggatgaacaggatcaacagctggagatggtgtctgggagcatccaggttctgaagcacatgtccggccgcgttggagaagagctggacgagcagggcatcatgctggatgccttccgccaagagatggaccacaccccantcccgcatggacggggttcctccagaagttggggcaaaagtatcccacatgacgagtggaccgcccacaggggtgtgcccatcgcccgtgcttagtggggggtggcttcctcccccggtctcatc

SEQ ID NO: 169343 - DNA, 171 bp, Homo Sapiens
cagcctctctgagccagcacctctcactttggacacgagcgggaagaatctgacggagcagaacagctacagcaacattcctcacgaagggaagcacacaccgctgtatgagcggtcctcgcccatcaacccggcccagagcgcagccccaaccacctggttcgcgccaga

SEQ ID NO: 169344 - DNA, 624 bp, Homo Sapiens
ctcacaggacagcttttctcgggaggcagcattgttaagggagcccctgtgcaagtgctggaggacgaggaactaaagtcccagccagagcccctagtggtcaagggaaaacgggtggctggaggccctcagatgatccagctcagcctggatgggaagcgcctctacatcaccacgtcgctgtacagtgcctgggacaagcagttttaccctgatctcatcagggaaggctctgtgatgctgcaggttgatgtagacacagtaaaaggagggctgaagttgaaccccaacttcctggtggacttcgggaaggagccccttggcccagcccttgcccatgagctccgctaccctgggggcgattgtagctctgacatctggatttgaactccaccctcatcacccacactccctattttgggccctcacttccttggggacctggcttcattctgctctctcttggcacccgacccttggcagcatgtaccacacagccaagctgagactgtggcaatgtgttgagtcatatacatttactgaccactgttgcttgttgctcactgtgctgcttttccatgagctcttggaggcaccaagaaataaactcgtaaccctgtcctt

SEQ ID NO: 169345 - DNA, 235 bp, Homo Sapiens
tttcgaattcgagctccggtgaccccaccctccgcacctccttggggacctggcttcattttgctctctcttggcacccgacccttggcagcatgtaccacacagcccagctgagactgtggccaagtgttgagtcatatacaatttactgacccctgttgcttgttgctcactgtgctgcttttccctgagctctcggaggcacccagaaataaactcgtaaacctgtcccttt

SEQ ID NO: 169346 - DNA, 496 bp, Homo Sapiens
ttgtgtggtgttctagaggatccctggggcgcgaatccaggtggccaggactagattcataactgacagcctccctaattttggtccccacttccagctttggacaaatcagagaaagccaaacataataaatggcacaggatgccccatttctacttagcccacctgcagctttcccacaccagcgggcttcatacaaggcatactggtgccttccctcttcccactgtaaagctttcccactcctctgcctgcctttggcctctgacaaaatgcaagtgatggtggctgactcccttccaagcttggaataaagagcctctgcccgttccagttttggcgatctttctttatttccacatatattatttccattttacaggggaaaaaacgcccagaaatggtaaaaatcacccatgtttctgggaaagcctaggtgttttcatctctttgctttgtacctgattcgcgaccgagggatcctctagacaccacc

SEQ ID NO: 169347 - DNA, 220 bp, Homo Sapiens
tccctcgggcgcgaagtccaggtctcctcggaggggctggcagtctcgttctcccatggagatgatgggcactgccacagcatgtcaggtccttttggacactgaacattgtccacccacatgggaatggacatggccttgtctaaagatgcagggttgatttacccatttgtctgcacagcccagctgcctgaaaaccaatgtggatggtggagtgcag

SEQ ID NO: 169348 - DNA, 946 bp, Homo Sapiens
acgtcgcgcaccgtcagcgcgacgccatacggcgcagcgtgctcttcgatccaggccaggtctttgtcgcgggtggcggagttcaccaccaggcggaaatagtcttcagatgaggaaataaacgatcaggtcgtcgatcacgccgccggaggcattcagcatgccggtgtacagcgctttgccgggttgggtcagttgggcgacgtcgttcgccagcaggtagcgcaggaactcgcgggtgcgggcgccgtgcagatccacaatggtcatgtgggacaagcttgattgcccaagagaaagaatttcccaagtttttcacattcagagcaagagatgagtttgcagaagatcgcatttaccgtcacttggaacctgccctggccttccagctggaactcaaccggatgcgtaacttcgatctgaccgccgtgccctgtgccaaccacaagatgcacctttacctgggtgctgccaaggtgaaggaaggtgtggaagtgacggaccataggttcttcatccgcgccatcatcaggcactctgacctgatcacaaaggaagcctccttcgaatacctgcagaacgagggtgagcggctgctcctggaggccatggacgagctggaggtggcgttcaataacaccagcgtgcgcaccgactgcaaccacatcttcctcaacttcgtgcccactgtcatcatggaccccttcaagatcgaggagtccgtgcgctacatggttatgcgctacggcagccggctgtggaaactccgtgtgctacaggctgaggtcaagatcaacatccgccagaccaccaccggcagtgccgttcccatccgcctgttcatcaccaatgagtcgggctactacctggacatcagcctctacaaagaagtgactgactccagatctggaaatatcatgtttcactccttcggcaatcagctgga

SEQ ID NO: 169349 - DNA, 172 bp, Homo Sapiens
ctggtcagtggcagcatcaccctgcactgaaggaagcggcgtgggatgtggagggccctaggctgggggcggaatgcctacctcccatgtggttctgcctcaggtgtcagagccatgacccagtcattgacctacctggtgcgcgaatccaggtacagaggagcaaacagag

SEQ ID NO: 169350 - DNA, 268 bp, Homo Sapiens
ccccagattgcccgttcagagagacaccacattagaaacagatgattcaccttccatatctcagaactgtgctgcttcaacacaatggctgtcacttgtagagaaggtgtatgctaaatcctaaggtggttggtaacacatagcaaaaacgagatggcaatatctttcacataaacaggcatttgtgtgcatctatttcaggtcgggtcacagcccgcagctatgtctgacataatctgactggtgacggcgggatcctctagacgcc

SEQ ID NO: 169351 - DNA, 1023 bp, Homo Sapiens
tccgtgttcggggttggcatggtgaaccgcacacacctagaggcagatattgctggactaacaatggaatcagaactgaagaggatacatggcagttttactcttaaggaaaaaatgaaagatgttttacatcaaaagatgactgagacttgtgctactgctcatattggtggggataatattgtgctgcttgaagggattacaccaaatatacaaactgtagtgaaatgtagtattgccaagtcccaagccctctacagtgcccaaagagggctgaacgacaaacaagtgctgctgtgttcaaagtaggagctagtcagtatcaacattctctcagcaccctgccaccttacatagcatgatggttcgaagttctcaccaactatctaagacaaagtctcagacctaatcagacagccttctacagccccacagcctgtaaaagaagatattgcaaccccactaccttctgaaaaaaccccaacaagtgttaatcaaactcctgttgaaacaaatgaatttcctcagctaccagaaggcttagaaaagaagcctagtgttcttaaattcagtgccatgttagatggtatagccattggagcagcacttttaccatctctgaaagcagaatacaacgatgggaagaatgagaagtcatggaataacaggtgcacagacaagatttacatttgagctgccaaatcacagatcgcgttttacttcaaaagtttctgccacagatatgtcaaccattcctccttccgccagtcttaaccttccccctgttaccatgtcagggaaatatataatggaagaacatgatagtcattcggatcaggtgtggagtatagatgaactgccttctaaacaaggttactatttacagggaacattatctgcgatgtgtggcagcaacgtggttccttggaacataatcttacaactgatcttctaaaccacttggtaattggtacagaaagtgttcatgaaggaagtgaatgaagtatgtcagaaagtttctgg

SEQ ID NO: 169352 - DNA, 415 bp, Homo Sapiens
cctggaggaagcactgaaagctctggatgtggcagacctgcagaaggaactggacaagagccagagtgtgttctctggaaacccatccatatggttgaaggacctggccagctatctctaactacaagctacaagctcctctaagtgaacccacgctgagccagcatactcatggggagtcactacatggttaccgcatctgtatccaggccatcctgcaagacaagcccaagattgacacggcaaacctaggcaagctcctggaactgctgaggtcccaccagagccgaccagcaaagtgtctcaccatcatgtgggccctgggtcaagcaggttttgccaacctcaccgagggactgaaagtgtgtctggggatcatgctacctgtgctgggcagtcaagtctctgtgtccct

SEQ ID NO: 169353 - DNA, 1088 bp, Homo Sapiens
  misc_feature (773)..(773): n is a, c, g, or t
  misc_feature (808)..(808): n is a, c, g, or t
  misc_feature (822)..(822): n is a, c, g, or t
gatgtgccacatcacttacagggaaggaaaggaagctagggcgtcctccgggcaccacaacacacgtcccatttagccctgcacagcggtctccttcccctaagccagcactgctgctccctggtagcccgggcaaggaggctgcctggctaggaggcccgagccgatggcgcctgtgctgaggatttgtgctgtgatttgggcaaatcattccaggtctttgggcctccaccccctcgtctctagtgaacatttgagatcagagagcaccacagggctggctttgtgccctaacccctgggatgcagcctgcctttccataaagtcacctaggtgaggataggcgcgggagcctcggcatgacaccatggagatcggggccctcttcccagtgggttcactccttttcacacctgctgggtccctcctcacccagcaggcctggtccacctctcattgcaagccccaagcactgagccagcaggtgccagggagccacccgccccccatcgcttctgcacacctcagactcaccccatcaccttggcagcaaagcactggctctgccgtctgacccctgatccaggcagccccctctgcagagaaaagggttggggagaagcctctgcagtcctggaagatgtggggtgctgggtgagaggcatcagcccccacaagtatgtttttgtgtcttaagatagcagtttactttgaaaaagtgaaaaaggcttccgggctgtcctctgcccagtgagatggaggacgctagaganagtgctgagtgtcccgagagaggcccccgagccgntgcatggaggtccnttcggcctggctcagctgggctgcaggatgcccactttttgaggagggagggacagggccttgggccgaggggcaaaaggccatcagaactgccccggcttttttgggaaactggaggaccccaacaacttaaccccggtttacacgaacttgaagtttttgaaacccccaattaaatggtcctggtacgtccaccttttcccctaatttcttgaacccctggaaccccctggggggaaacaagggaaaaaccgtggggtctgggc

SEQ ID NO: 169354 - DNA, 858 bp, Homo Sapiens
  misc_feature (581)..(581): n is a, c, g, or t
  misc_feature (620)..(620): n is a, c, g, or t
  misc_feature (754)..(754): n is a, c, g, or t
  misc_feature (783)..(783): n is a, c, g, or t
ggacccagaggggcagcgcagggcgcagagcacacccgctgggccagcagctcccaacggcgatgctactactaacactccccagtgatctgattcttctgttttttaatttttaacctgattttctgatgtcatgatctaaatgaggggtagtgggggatggaagagagtaccaggtggtccaccattggggagtggggccgtccgcctgctctctacttgtgcagaccttcctaactgagtttacacacgcttgtgtttgcaacactaggtctggatgggaggtgaggggtgtgcgtatggctgccatgccagtgtctgtgcacatccctgtctgttggtctccatggccactgtggaccgggaaccttgggggaagcctgcccatgtcgggctgtgggaggctgatcagtgcgtgtgagagtggcttcccttctgcctgactccccactccctgacctgccccttccttgtttttcctcctactggtctccaccaaggctttgttagcccccaccctgcctggtgtgcagctaacccctccctccccacagccagaggaggccacagacccctcaggngagttccgcgctggtgtctgggctgtgctccctcactanagggaaggaaaggaagctgggcgtcctccgggccccccaacacacgtcccatttagccctgcacagcggtctccttcccctaagccagcactgctgctccctggaagcccgggaaaggaggctgcccgggctgngaggccccgagccaatggcgcctggtgcntgagggattttgtgcttgtggaattttgggccaaatcatttcccagggtccttttgggggcctccaacccccctt

SEQ ID NO: 169355 - DNA, 639 bp, Homo Sapiens
cttggcagcaaagcactggctctgccgtctgacccctgatccaggcagccccctccgcagagaaaagggttggggagaagcctctgcagtcctggaagatgtggggtgctgggtgagaggcatcagcccccacaagtatgtttttgtgtcttaagatagcagtttactttgaaaaagtgaaaaaggcttccgggctgtcctctgcccagtgagatggaggacgctagagaaagtgctgagtgtcccgagagaggcccccgagccagtgcatggaggtccttcggcctggctcagctgggctgcaggatgcccactttgaggagggaggcacagggcttgggcgaggggcagaggccatcagaactgcccggcttttttggaaactgaggacccaacaactaaccacgtttacacgacttgagttttgaaccccgattaatgtctgtacgtcacctttcctagttctgaccctgagccctggggaacaggaaagcgtggctggcctcttgcactgctttgtctccaaaataaactactgaaatcaaaccgcatttcacacgtgtttacacatgttgctcaagtttgttatgtcatactcccagtccttaaaagacgtttaataaaacagctttacctttt

SEQ ID NO: 169356 - DNA, 612 bp, Homo Sapiens
tatcgtgttcggggttgtgacacaccagcccaggtgagagctgctgcgggtcacctcatatttatttatcccttcttgcctgtgaggactgcggcttttcgctgtggctcgtccttaacgtttctgaaccaccttggtgccctgagcaggaagatgtgccacttcctagcaggcgcaaggcctgtgcggaagaaacgccgctccctgccaccagggctgaagatgcgagcccgtcctcatgacgcaggcgccaccctgctgccggagccgggcttcggcagtcttctccactgagggactgggctgggaagtcctgcgtttcagtggagcgtatgagcgtcaagtcctgctttctcagttaccccattgcggggccccaccattcatcctgtctgaaggtcctgggtttggtgtgaacgcttggcggctggtgggtggggttttcaagtgggtgacggcgctctccggcagccggggatggccgtgtccgcactgaccaggcctgtggagagtgctcggcctaaccttagaacacatttgtaactgaatacagtgttttcaatttgtacagaatagttagaatattctattaaagtaaaataacattgagtc

SEQ ID NO: 169357 - DNA, 350 bp, Homo Sapiens
gcgacatcagctcatgagagaggttgagagatagggactagcctgaaggtgctactcaggaaatctctttctgggtgacatggggtctgtatttgggggttattatgggagtatctgttaataatggggcctcaatgatcgagggctggctaacaggggtctctactctggatgtgttactgggaatctctatctcagggtgactcagggctcctcgggtgtcaggagatgctagtggggactctgtctctttgtcaggggtccagggcctctaagactgcatctccgccctcagaatccaggggaaccagcagaagaacagcaacctggaaatggagttctctgatgca

SEQ ID NO: 169358 - DNA, 892 bp, Homo Sapiens
  misc_feature (687)..(706): n is a, c, g, or t
aggggttttaccagttttatttctagactttcatgtttgtctttttgtcttctgctggaaacatgccggttacatgttggtgctgggaagcgccgcggtgcaaccagaaatgcacagacccagccgcccgccgcccagaccctcagacttgcgcgtcacaggacagactccgctgtgccccgtgcacttgccaccagcctttggcctctcgatacacacaacatccaggacttgtgcccttgccccatcacgacagacaaagcgtccctcaaggcccccgcgtggttcagacagacgccgcagccaggatggttgaggtaagcgtgagccgtgttctggaggggtggggcggggtgggcctgtgcccgagatggcctccgagcacaggatgaccctgccagggcagggccccaaccacgtgggcccgcagcggggtgcaaattcttttggttcggcagcttgctaggtgaccggggcacacagcactgtgagctggcttcattgagatttggagtctctttaaattagcattatggtgtaattaacaaaacaataacaaacagaacactagtacataacagattaaacatacccaaaacttgaacaaattccagaagctattccaatcatcccgaatgagagtcctacaggtacaacgccgtggtggcacgtaagacacacttgttnnnnnnnnnnnnnnnnnnnntatgcaacttccatagctacacgcaaagaataacacagctgtaaaaactactatgatgctacgcccccgatcagatgaagtgcccagcatcacaggcgcagggaaagagaagagggacacagccttggtctctgggggacaccggggccggttctcacgcacgcgggcctcgggggccggcccccc

SEQ ID NO: 169359 - DNA, 413 bp, Homo Sapiens
agaacgacagatgaggagctacataactatcataccttgaaaggacaagcacccggctgagttgtcccatccactgtgttctaaactccttcccagcttgcgcttgacacagccttgtcttctctccctccgtgcctcgcagtgctagggttccatggaacacgcaggtgaacagtttgacctatggataagccgatctggagagcctgcctggtgcgagcaggttggtccctgcagtccaaagtctgcacacagtccttccagtgagtgtctctggaggctgtatttcctgattacaactctatagttttgtctactagagctgacacctttgttttctgtcacttctcaggccaagaagtaactttttttaggaaaatatctttttccagtaaagatgtcctttcatctcg

SEQ ID NO: 169360 - DNA, 682 bp, Homo Sapiens
gctgactccgaggatccaggcaaagctctacacacacagcacatcattgactcatgtcaacaaaagcccctcacacctttttaagtcgtctgctgctaggccatgccttccttattctgtgcctgggcaagtagctcttgggtgccagaaatagctcctttccctttccattgcatattcttgggtccaggccattgcttctagtctaggagtgagagtgatttggatgctgattctgaccctgagtcatgacatctttgttcccagcctatccacgaatgcaataaacatggcctctttattttcattcaagccagtgataaaaatgtccaatgggactttgcaaaggatagaggcttgaagtcctgaattcagaacctctctctgagaacattaaattgtagcctctgaagaaccgtatccaaccagtccccaagccatccaatggtccatgcaccaaattcatgtcaaccccattgaacttatcaaatgccctactgaattcataaactcttgatctccctcatttctaccggtctcttaatcctatcaaggaaggaaacaagattctcttgaaagagtattttctctgtgaacccacagggcgtcctggtgattcctgctttctgtatgttcataagccacaaatcccctctaacaaggcattcctgaattgtttcat

SEQ ID NO: 169361 - DNA, 378 bp, Homo Sapiens
acccagaataacgggaacaacatggttccaagagatctgacccctcacccaacagaggaaggttacccaggcttgatgtttcccgacctacaaccacacaatagaagacagcccagagaggctcgttcctacagaagagggaactgaagtctggtcggtaataccagatgagtctggctctaccagcacgggggtatatcaggaatcccactgacaaacatccagacctgagacttgtctttagtgctgagagatgagcatccaggggcctctggcaaaaagcatctaacccaggaagattttttattaccctgagcctgagactcccttctcccagagataccatgggacccggcttgggagaaaatccttctttcc

SEQ ID NO: 169362 - DNA, 335 bp, Homo Sapiens
tacaaaagccagctgtaggatcatacacgaaaggagattgcattgagctgacatccttccctcccaagacgccacttctgacagactttcatgactcagaccacccttacatcacacacatatcatgcacatcagaccccaaggaatcggaggcctgagggtaagtgtatacattcttggagccacagcctggtttgaatgccttgattccttcagttgcctctgcgcctgactgggcctgtcccgtccaccctcaactcacttgactgcttgcttctacttctgttcccctcccacccacagcctgacttcttccaaacccacagcctgttttc

SEQ ID NO: 169363 - DNA, 342 bp, Homo Sapiens
  misc_feature (166)..(166): n is a, c, g, or t
tcgggtgataagatgcgcgatcatggtgcacatgacaaaaacgccacagggcagaaaaagatgcaagaggtcgaagattagccaagcgacatgcttaatcatgctagattgtgagtgatctgagaggtcctcttattccaagttgcagtatagcttagtgtagatnacggacattaataaaaatgctagtgagtttaatagcactaacgctacagtgaatcctaatgatggcgtttcacctcgtaggaaatggcaaacaaaggggtgatgcagaatattcccctctatggaaaaggggaaaacagcctgctactgtagcacctaggaaagccaaaagggcag

SEQ ID NO: 169364 - DNA, 917 bp, Homo Sapiens
cccaaaaaggagtttcgccgggtgtggtttggcgtcacgaagaaccggtgagagcagacctgttgatggtatgggaaggccacagggcctttttatcggaaacccgaaagggggggaattgggccaaccaggggttgacaggcgaaggttccatcccgcagttcccagtggttctttcagcgccaatcagcgaggagccccgaggcgcttcttacaaccccctgctgcagctggacccaacaccctttgatccagaagaaccgccgagtggtgctggcctccttcctgctcgtgctgctggggctggggcctgctcagtgccttgctctggaaacagagcttggtgagcttcctggggagggtctctgcctagggcaccttcagctcaggtggtgggtgagccgggctgggggtgggagcgcgccgcctttcaccactgttcctgcccccacccccgggggctccgtctgtgtgccagtgctggatcctggttcggcgtgggactggaggcgaccccctctccaggtgtctccagcgccatcttcttcgtgccgggcttcctgttgttggtgcctggagtctatcacgtgatcttcatctactgcgcggtcaagggccaccggggcttccagttcttctacctgccctacttcgagaagtgatcgcggcgcagcgtggaccccttgcgcccatgggggcgcccctcttgccctgttccgttcccctcatctcaagggaagaggccctccaggaccctcgaaaccccagcccctagggagtttgctcaggaagttcggggcatgcaggcctggccctgggaaagccgcccgtcgcctgctctgtgccttaacttattctcgggccgtgcggctgctaggttgctgttattttgtgctaataaaagagtaattaattcc

SEQ ID NO: 169365 - DNA, 895 bp, Homo Sapiens
  misc_feature (380)..(380): n is a, c, g, or t
  misc_feature (402)..(403): n is a, c, g, or t
gcgggtggaccaggcaatggccggtaacgttctcccggaaagctgggaggcgggtgcaaatggatgcccggggcctttttcggaaagccgtttgggggaggtcgggcaccagggtttcccaaccgaaattccaatcggaagcttcccaggggtcttttcagcggcttttagggaggaagccccccagggttcctacaacccctgctgcagcggggacccaaccccctttgatccagaagaaccgccgagggggtgctggcctccttcctgctcctgctgctggggctggggcctgttcagtgccttgctctggaaacagagcttggtgagcttcctggggagggtctctgcctagggcaccttcagctcaggtggtgggngagccgggctgggggtgggagnnccccgcccttcaccaatgctcctgcccccacccccgcggctccgtctgtgtgcagtgctgatcctggtcggcgtgggactggaggcgaccccctctccaggtgtctccagcgccatcttcttcgtgccgggcttcctgttgttggtgcctggagtctatcacgtgatcttcatctactgcgcggtcaagggccaccggggcttccagttcttctacctgccctacttcgagaagtgatcgcggcgcagcgtggaccccttgcgcccatgggggcgcccctcttgccctgttccgttcccctcatctcaagggaagaggccctccaggaccctcgaaaccccagcccctagggagtttgctcaggaagttcggggcatgcaggcctggccctgggaaagccgcccgtcgcctgctctgtgccttaacttattctcgggccgtgcggctgctaggttgctgttattttgtgctaataaaagagtaattaattcc

SEQ ID NO: 169366 - DNA, 1064 bp, Homo Sapiens
  misc_feature (72)..(72): n is a, c, g, or t
  misc_feature (222)..(222): n is a, c, g, or t
  misc_feature (233)..(233): n is a, c, g, or t
  misc_feature (431)..(443): n is a, c, g, or t
  misc_feature (528)..(528): n is a, c, g, or t
cgtggcgagaggacgagagacgaggatcggaagaggcagcgcgggctctgcgcgcttgcgggagagaacacnagggcgcggcggcggcgtaggatatcgcgggcgagaggagttggggagaggggacgaagactaaaccagcgcgagggacgacgagaatgcgcagggagggggcgcggcggtgcaacaggagagggtacgggcagggggaccaaaattgtnagggagcgggncgaggagggagcaaggggcggtacgctgtgaaaggggcgggtgagagtcagtcgcaagcatgctacaggtaggtgcgtggggggggcgcccttatgtcgctagacaagggcgaccggcgcgggcgctacgggtccccagaaagagcgcgcggggaagttggggggaaggcgctgcctgcactgactgcatggcggatnnnnnnnnnnnnnccctgacttgcgggggccgtgcttggggaagccggaggcggggtgacgcttctgcggggggggtggtgtaacataccggcccgtncaacggtcaggtgcccgcggagcccggctcggagtgggagcccccgccctcacccactgctcctgcccccacccccgcggctccgtctgtgtgcagtgctgatcctggtcggcgtgggactggaggcgaccccctctccaggtgtctccagcgccatcttcttcgtgccgggcttcctgttgttggtgcctggagtctatcacgtgatcttcatctactgcgcggtcaagggccaccggggcttccagttcttctacctgccctacttcgagaagtgatcgcggcgcagcgtggaccccttgcgcccatgggggcgcccctcttgccctgttccgttcccctcatctcaagggaagaggccctccaggaccctcgaaaccccagcccctagggagtttgctcaggaagttcggggcatgcaggcctggccctgggaaagccgcccgtcgcctgctctgtgccttaacttattctcgggccgtgcggctgctaggttgctgttattttgtgctaataaaagagtaattaattccacc

SEQ ID NO: 169367 - DNA, 1057 bp, Homo Sapiens
accccgctagtcaaagtggactccccattgtgggggccacaacaatccccaggtggcccctttcttgttgttttgacgccgactccggagacacttaaggatggcgctcttggaggcctgcgtcccccgcgctcctcggctccggggggggaaattaaattagcctcgttttcgtcaggccccaaaaataacccagccaccctaggcagcccgccacgggcccgaggaataagtttaaggccccagagccaggcgaccgggcgggttttccccagggcccaggcctgcatgccccgaacttcctgagcaaactccctaggggctggggtttcgagggtcctggagggcctcttcccttgagatgaggggaacggaacagggcaagaggggcgcccccatgggcgcaaggggtccacgctgcgccgcgatcacttctcgaagtagggcaggtagaagaactggaagccccggtggcccttgaccgcgcagtagatgaagatcacgtgatagactccaggcaccaacaacaggaagcccggcacgaagaagatggcgctggagacacctggagagggggtcgcctccagtcccacgccgaccaggatcagcacccagccccagcagcaggagcaggaaggaggccagcaccactcggcggttcttctggatcaaagggtgttgggtccagctgcagcaggtgttgtaggagcgctgggtgctgctgctgatggtgctgaaggaccactgggagctgcggatggaagttcggctggaatccctggtgccgactcccccatccggctccggagaggcctgggctccatcctcatcgttctccaggttctggtagcgcagccgggactgcttgtcctcgtcagccacctcgaaccgggcccgacgctcgaagtgcagcggcccaaagcgcgcgaccccgctggactcgggcccagggcccccgtcctccagggacagctcgaaggcatcatcaatgctgaactggggccgggcggcgctcatggccccggcccgctcaggcgccgtgcgccgccgccatccc

SEQ ID NO: 169368 - DNA, 1073 bp, Homo Sapiens
ctggcacttgatggagcagtaggatgtgttccagcagcagtggtacatggcctcctcctcacagttgtagcaccactgcttcttcctggtctgagaaaatcagttgcttgtgctgtgttgccagcttctccatttcttctacaaattcctccgtacacttttcctttacttgcttacattttctgtccatctcaccctgcatgttggctacaagctttatttacagcttgtctcttttcttcttccatttcagaacgcagcttctccagagcttctcggacaacacgctctgtctcccgcttgtggtccgacttcatccggtctttgaagtcattgaagatcttgggtgtatttgtcatggcacatgctctgacacacgccgtcgtttgtggtctgggtgctccgatgcagcattcttggtgaagaggcacttaacttctttgtctgagttgacacggagactttttcgatgggctgaggcatcgtgggtatttcctggctagaacttactgcttctgtttcaggctctggttcttcctttttgggctccacactttgattacgtcgtcctttctttgctcttggttcttgagtgacctttagctgctcattactggtggaggagatactggattctgcctcttcctcacctcggtcctcattcttagatttccaaaatctcccttctcgtaggaaacgctgatgcagctccagctcatcacaggcctttttccaacccatactgcgcttcacgtgcagccgatgaatgttgactgtgatatcttgaatgttttcagaaggaatccaggccctctggtggtggtggccaaagaagcgaacgtcgacttgattgtcttctttctgcatgactttggctggccaaaacccaaaacctttcattttagcccaaaccagctcatgattaggtatacaaggataacagaaccagttgtcaggacgagcatttgacaagtaaaagcaattcttgcaaagctgcagttcatccagctcatgacatgtgtctttatatagcatcctcgcaatgtcagcttggtcgacgcccccgcgaattt

SEQ ID NO: 169369 - DNA, 787 bp, Homo Sapiens
  misc_feature (651)..(651): n is a, c, g, or t
  misc_feature (727)..(727): n is a, c, g, or t
  misc_feature (749)..(749): n is a, c, g, or t
  misc_feature (769)..(769): n is a, c, g, or t
gagcaggggtgggtccaggaagatgatatttgcgtcttttgcccacccccctggcattcagctggacccaactaggccatcatgagtggcttctccctgtcatccccaggggtcataggatatctacaccgcctttctgaccccaccctgcactcccatcctttcctctctccccgttcatgccctgcactacatagcacagccgggatgcttggaacagaggccttggctgctccgcagtggcacagggcttccctctctcggggttggcttcttcccaggccttgcatgggccctgcccacaagcacaccctcaggccgagggtgcagactgatgctcttccctgatggagaccctgagatcttccccacccccaatcatgatgtcttcagtgtgggactggggtcctcttggttctgcctgcagcctgcctggctccgcccctagtgccccctcctcaccacactggccccaggtctcaggaggggtgtcctgggcagggaaggtcagtctcactgatggtttgctgtttggaagccattggcagggctgccgtgcatgtggctgtgaggctgcacagtcctgccaaggggcttcctccttgttaccccgaaccttgtaatcgtgtgctggcgtggcagccctggctnaagttaatccccaccgctttcagtggtagaaagaattccctgagtggggccagggtgggtgccctcctcctaaccnggggttttctgagtgagctgcntgggagccctcatccctttnccagggttgggttggcct

SEQ ID NO: 169370 - DNA, 209 bp, Homo Sapiens
ctagactctacaagacagaacatcagtgtgcaagtcagcgcccagggagggcttcatcaaactacctcacgaggagaagtgtaccgctcctacctgccagctgcggacccagagactttggagggtctgggatccccaaggcctgggcagagcatagacttgaaggtacaaccccaggaacccctggtgctgaaagatgtggaaaacac

SEQ ID NO: 169371 - DNA, 1168 bp, Homo Sapiens
  misc_feature (877)..(877): n is a, c, g, or t
accgctgatcactggcgccagcagcttgtggacaagcatacacaagggggtgtggttgacaaggtcagcctggtcctcccacctgccctgccggcatgtggctgcaaggttgccaatgatcaccggacgtggtctggggcacacaggaggcaccttggataagctggagtctattcctggattcaatgtcatccagagcccagagcagatgcaagtgctgctggaccaggcgggctgctgtatcgtgggtcagagtgagcagctggttcctgcggacggaatcctatatgcagccagagatgtgacagccaccgtggacagcctgccactcatcacagcctccattctcagtaagaaactcgtggaggggctgtccgctctggtggtggacgttaagttcggaggggccgccgtcttccccaaccaggagcaggcccgggagctggcaaagacgctggttggcgtgggagccagcctagggcttcgggtcgcggcagcgctgaccgccatggacaagcccctgggtcgctgcgtgggccacgccctggaggtggaggaggcgctgctctgcatggacggcgcaggcccgccagacttaagggacctggtcaccacgctcgggggcgccctgctctggctcagcggacacgcggggactcaggcccagggcgctgcccgggtggccgcggcgctggacgacggctcggcccttggccgcttcgagcggatgctggcggcgcagggcgtggatcccggtctggcccgagccctgtgctcgggaagtcccgcagaacgccggcagctgctgcctcgcgcccgggagcaggaggagctgctggcgcccgcagatggcaccgtggagctggtccgggcgctngccgctggcgctggtgctgcacgaagctcggggccgggcgcagccgcgctggggagccccgctccgcctgggggtgggcgcagagctgctggtcgacgtgggtcagaagctgcgccgtgggaccccttggctccgcgtgcaccgggacggccccgcgctcaacggcccgcagagccgcgccctgcaggaggcgctcgtactctccgaccgcgcgccattcgccgccccctcgcccttcgcagagctcgttctgccgccgcagcaataaagctcctttgccgcgaaaaaaaa

SEQ ID NO: 169372 - DNA, 443 bp, Homo Sapiens
  misc_feature (199)..(216): n is a, c, g, or t
caattctatacaatgataaatactctgcatataatttataaaaataacttctgttttacctagttaacaataaaacctatgtgtggagccaaatgttatgcagacaaaggtctgctcatcccataccagtgtatatatagtcaaatatgtgtctagtacaaataaaatgtatctctaaggcataaaatgttttaacccnnnnnnnnnnnnnnnnnnggtttgcggccgctcctccaggcctggccgtgcccgctcaggacctgctccactgtttaacactaaaccaaggtcatgagcattcgtgctaagataacagactccagctcctggtccacccggcatgtcagtcagcactctggccttcatcacgagacctccgcagccgtggctaggattccacttcctgtgtcatgacctcaggaaataaacgtccttgactttat

SEQ ID NO: 169373 - DNA, 348 bp, Homo Sapiens
cgatctgactacgcggctaccgcaggacgtttgtcttgtgcctggggtctgacggcctggagcaggccgtgggttttggaggcagcctggggaacttctcggcagccaccctcacggctgctgtgtgtcggcttcaccacgaggagaggctcggggtcctggtgcctgactgcaggctgagggatgtcggccgcagcacctgtctgtctttcctttggtccaagacttgaggaggatctcagactggcttttctgaggggagacagtgaagccaagacggagcctctgccagacatttcggtagctgagcgatcagcgagttcatgtgtccactctcgtccttttact

SEQ ID NO: 169374 - DNA, 237 bp, Homo Sapiens
acaggaagtgaaggcagcagctcgagatggcaagcttaaacccttacctggggagacaatggagaagtgtacccaggacctgggcaacagcaccaaagccgtgagctcagccatcgcccagctactggcagaggttgcccagggcaatgagaattatgcaggtattgcagctcgggatgtggcaggtgggctgcggtcactgcccagccgctaggggccgcgtcgtcaatcggtccg

SEQ ID NO: 169375 - DNA, 663 bp, Homo Sapiens
aaccggaatcatgtcgagtttggcggtgtgagacccggcaatggatcgatcactgcgttccgtgttcgtggggaacattccatatgaggcaactgaggagcagttaaaggacattttctcggaggttggttctgttgtcagtttccggctggtatacgatagagagacgggaaaacccaagggctatggcttctgcgaataccaagaccaggagaccgcgcttagtgccatgcggaacctcaatgggcgggagttcagtgggagagcgcttcgggtggacaatgctgccagtgaaaagaataaggaggagttaaagagccttgggcctgcagcgcccattattgactcaccctatggggatcccatcgatccagaagatgcccctgaatcgattaccagagcagtagccaggtctccccccggagcagatgtttgagctgatgaagcagatgaagctctgtgtccaaaacagccaccaggaagctcgaaacatgttacttcaaaatccacaactggcttatgcactgttgcaggcacaagtagtgatgagaatcatggatccagagattgctctgaaaattctgcatcggaagatacatgtcacaccactgatcccaggacctaatggtctgctgaaccagcagaatccttcagctcctcagc

SEQ ID NO: 169376 - DNA, 195 bp, Homo Sapiens
gcggccctactactactatacggctgcgagaagacgacagaagggctaagcggcggatgcagtacaaccggcgctttgtcaacgttgtgcccacctttggcaagaagaagggccccaatgccaactcttaagtcttttgtaattctggctttctctaataaaaaagccacttagttcagtcaaaagtcgtatcga

SEQ ID NO: 169377 - DNA, 1363 bp, Homo Sapiens
  misc_feature (1321)..(1321): n is a, c, g, or t
tgggtttgggttagggaaccccttgggcaattaattcacaaaaaggcccagccccttttccttccatggattccccttgtgggcaggttggaccttgggttttttggcccccggggaactaaaaagcccgcccagggtctgggtttcccaccctggtatacttggctcctttgcatttcctgttccccggcatgacctgggacctgtctggatccctgggggacaaccgcccccatgttaattggactgggaccctgcattccactaggtatagggtcctctggggccaggcactgggcctctggtatccatgcctctggcctccatccctcggacttccattgcacgggcctccatcgctcgggcctccattgcacgagcttccatcgcacgggcctccattgcacgggcctctaatcctctggcatctaaccctcttgcctccatggctcgggcctccatccctcgtgcatctattcctcggggatcccttccacctctgccatccaagggtggacccctctgatctagcatgggtcctcttggttcttgccattagaggtctgggctcgggtaatgcccctcccctcagttcatatgggggtggtcctcggctctcatggccagggacattggtgcatgggtggaccctgatgaggtggtcccaagtaacctctaggctctacctctccagttacagaaagtaaagtgcctccccgtggatcattcggagcatctcctaacaagcctcgaggggttgggacattcgcaggcaaggatccccgctgcatagctgctctggggtcttgcatcggcacttgcccccgttccatggacactggtccacttcctggcattccaacctgagcctgcattcctcctccaggagctaaggaaccagggccaggtcctgtgacagcagctggcatttgccctggtgctggaactccaccctgcatagaagcttgcatcagaggaggtgcgccattgacatgcattccacccaaagactgggcctgaggggcctgaggattctgctggttcattgacacattggatcctgagccaggcccagcaccatggactggctgagggttgcctgcaatcagcgttgggatatttgtctggcgatgcagaattttcagggcaatttccggatccacaattctcatcactacctgtgcttgcagcaaagcataagccagttgagggttctgaagtaacatgttccgtgcctcctggggactattctcggacgcgtggtcgacgatatcccgggaaattccggaccgtacagcctgcttttattgtacaactgttncatagtcaaatggccactctttcgccccgttggctaggggct

SEQ ID NO: 169378 - DNA, 653 bp, Homo Sapiens
ggggcgcggtcgctcagcagtgacgtgacacgcagcccacggtctgtactgacgcgccctcgcttcttcctctttctcgactccatcttcgcggtagctgggaccgccgttcagtcgccaatatgcagctctttgtccgcgcccaggagctacacaccttcgaggtgaccggccaggaaacggtcgcccagatcaaggctcatgtagcctcactggagggcattgccccggaagatcaagtcgtgctcctggcaggcgcgcccctggaggatgaggccactctgggccagtgcggggtggaggccctgactaccctggaagtagcaggccgcatgcttggaggtaaagtccatggttccctggcccgtgctggaaaagtgagaggtcagactcctaaggtggccaaacaggagaagaagaagaagaagacaggtcgggctaagcggcggatgcagtacaaccggcgctttgtcaacgttgtgcccacctttggcaagaagaagggccccaatgccaactcttaagtcttttgtaattctggctttctctaataaaaaagccacttagttcagtcaaataaagaaagaaacaaacggtcactaaaacagagagacaaagtacaaacggggggacacaaaagaaagaaaagacaa

SEQ ID NO: 169379 - DNA, 421 bp, Homo Sapiens
atcatcaattggaggctcaactggggccacatcccctctcatcccagggtgacagtgaccagcgagggtggccgtggcacactgataatccgtgatgtgaaggagtcagaccagggtgcctacacctgtgaggccatgaacgcccggggcatggtgtttggcattcctgacggtgtccttgagctcgtcccacaacgaggcccctgccctgacggccacttctacctggagcacagcgccgcctgcctgccctgcttctgctttggcatcaccagcgtgtgccagagcacccgccgcttccgggaccagatcaggctgcgctttgaccaacccgatgacttcaagggtgtgaatgtgacaatgcctgcgcagcccggcacgccacccctctcctccacgcagccgcgtacgtcagttcgcg

SEQ ID NO: 169380 - DNA, 529 bp, Homo Sapiens
cgggtgaggctgtagttgctgctctgtgctgctcgcactgggagaacatggcagagctggtgctgctgggatagggcaggcgcccagcattccagcctgctcttgtgctgggcccaggcgcaatatggaaactggttaggttgggctttgatccacacattctcctgcagtcgaatcccccttttctccccaatctcttctaaagaaagactgaaaactcgctccaagaaaagtgtcaatgactgctaatcacctaattacccctcttatggctctggagctcaacaagcagccacaccagtggtccttcaggaatcttttccacagggtgtaggaagaggtatcttgttttccttaagcccaaggctggcccttcctatcactgcctagtccttgctgatctaagcatcagtgctgaagggtcctgtcaccaatagtgccaatgagtctgtaaatagtgtcatcgtgttaaatgactcactggggctggcacacactgacattctgagggcacaaggcagagccccat

SEQ ID NO: 169381 - DNA, 285 bp, Homo Sapiens
catggagcactctccaagactggcacctctcaggccgtgacagacgccctaccaggctgggcggctgtggcaggtgctatatgtgacttagccacaggactctcgggtcctgtcccctgacatggtctttgctgtgaggctggtgttctggtcacaacgcaccaccctgaggcaccccatgctggtggactagaccttccatagccacagagagtgatgctgcctgaggatctgcaggtgggacaggcagactcagacccagaggatatgcccatgcctgttgtg

SEQ ID NO: 169382 - DNA, 244 bp, Homo Sapiens
  misc_feature (29)..(29): n is a, c, g, or t
cgaatcccaccgatcatgactacgcggcntataatagagacaataggaagaactgcattgtgacagcatgtgtacaaagaccacaaaagctgggaaactactttttcaactttggaatcgggtaattatagggcacaaaggacgtaagtaaagcggtcttataagaaaacaagctcagccggacgtggtggctcaagcctgtaatcctagcactttgggagccacccgcgtagtcaatcggctc

SEQ ID NO: 169383 - DNA, 419 bp, Homo Sapiens
gaactgacgacgcggctgggacagaaccagaactacttgtagaaagagaattctagctccaaagatagggaaaggccaggaaagaagccaggtgggagcagagggagcagaaaggcggctgcagagactcgctttctctcaacgtgacgactggggagactaacacattctctccccaaaaaagtcaactataaaactggacaaaactgtcaaaagcaaccatttcagaacagtagaaactgaccaaactttgataagaacaagcagagcttggggatcatgcctgggctgtccccagcctcctcctagcaatgctgaccggtagttcgagccgcgtagtcagatcgagccgcgtagtcagatcgagccgcgtagtcagatcgagccgcgtagtcagatcgagccgcgtagtcagatcg

SEQ ID NO: 169384 - DNA, 174 bp, Homo Sapiens
cgatgctgactacagcggctgaccatggtggaggagcagtacgcaccagatgtacatcaaggcctccggcagctatgcagtgcaagagaagcctgagccagtgccactggagagccgctcctgcgtcctcatccgccgcgacctcgtgccctacctccagccgctgtagtcaag

SEQ ID NO: 169385 - DNA, 958 bp, Homo Sapiens
acatccagctccccaacatctacccagccgtgcccccccacttctgctacctctcccaatgcagtggccgcctgaaccccaacctgtatggcaatgggaaggtgtgtgtcagcctcctgggcacctggattggaaaggggacagagaggtggacaagcaagtccagccttctccaggtgctcatctccatccaaggtctgatccttgtaaatgaaccatactacaacgaagccggcttcgacagtgaccgaggcctgcaggaaggctatgaaaacagtcgctgttacaatgagatggcgctgatccgcgtggtgcagtccatgacccagctggtgcggcggccccccgaggtctttgagcaggagatcaggcaacactttagcactggtggctggcggctggtgaaccgtatcgagtcctggctggaaacccatgccctgctggagaaggcccaggcactgcccaacggggtgcccaaggccagcagctcgccagagcccccagctgtagccgagctgtcagactccggccaacaagaacctgaggatggagggccagccccaggagaggcctcccagggctcagactcagagggcggtgcccagagcctggcctcagctagcagggaccacacagaccagacttcggagaccgcaccagacgcatcggtgccacccagtgtgaaaccaaagaagcggagaaagagctaccggagcttcttacctgagaagagtggctaccctgacatcggcttccccctcttcccactttccaagggtttcatcaagagcatccggggtgtcctgacgcagttccgggctgccctgctagaggcaggcatgccggagtgcacagaggacaagtagctgccaggcacagaggaaagagcatcaccgtgggagaggccagccgccgcctgctcaactcccccccggaatcacccctcttcccatgccca

SEQ ID NO: 169386 - DNA, 385 bp, Homo Sapiens
cgatctgactacgcggctcgagctgactacgcggctggggaggcctcacaatcatgacagaaggcaaaaggcacatcggtggcaggcaagagagagaatgggaaccaaggaaaagggatttccccttataaaaccatcggatctcgtgagacttattcacgaccatgagaacagcatgagggaaaccgctcccatgattcaattaacttccattgagtccctcccacaacacgtggtaattatggaagctacaattcaagatgagattttggtgggacacagccataccatatcaccaagtcacatgaaatactagaaataccatgcttacaagttactctattataacaaattatactgatacaatcccagaagtaacatatat

SEQ ID NO: 169387 - DNA, 486 bp, Homo Sapiens
ctgagtcgtagtaccaagctacttgccggacgctctctcctgagatcccgactgggggcggaaagagcaagcagctcagaagccatccagaattttcaactcattattggggtgacctggggagaaatgtaggcatgcttcatcccttaatcttcttttccagatgttgctcatctgacacagcgtaggactgagcactgtgggatattcaatctgtaccagtgttctctccctaaacatcaaatgtctcttctagccatgctccaccccgtgctcctatcccccttgccttccatccttcagctcattttgcctgcacagaacacgacagccatgaattctgctgcatctctctcaaataggagaacagaagtgttttcaccagctcaaccctcctcactgcaaccctgtgcaaaacaccacatcccccactcccactttcaggctctgctcacaccgacctctgtgcccaggtagccgcgtagt

SEQ ID NO: 169388 - DNA, 193 bp, Homo Sapiens
ctgaacatcaatgatgtactagggaactactcattgactcttgttgatgcacttggatacacttgcaataatgggaaattcatccgagttccagaaagcgtcaagttagtgatcaacacagtttcatttgacaagattccaccgtccaagtctttgaggccacgataagggtcctgggaacccgcgtcgtcag

SEQ ID NO: 169389 - DNA, 222 bp, Homo Sapiens
cacttaaactgctagaacattatggcaagcagcacggagcagtgcagtcaggcggccttaatccagagttaaatgataagctttccaggggctctgtcattaatcagaatgatctagccaaaagttcagaaggagagacaatgaccaagacagacaagagctcgagtggggctaaaaagaaggacttctccagcaagggagccgaggataatatggtaacga

SEQ ID NO: 169390 - DNA, 853 bp, Homo Sapiens
  misc_feature (80)..(80): n is a, c, g, or t
tctctctccacaaactgcccaggagtgagtagctgctttcggtccgtcggacacaccggacagatagacgtgcggacggnccaccaccccagcccgccaactagtcagcctgcgcctggcgcctcccctctccaggtccatccgccatgtggcccctgtggcgcctcgtgtctctgctggccctgagccaggccctgccctttgagcagagaggcttctgggacttcaccctggacgatgggccattcatgatgaacgatgaggaagcttcgggcgctgacacctcaggcgtcctggacccggactctgtcacacccacctacagcgccatgtgtcctttcggctgccactgccacctgcgggtggttcagtgctccgacctgggtctgaagtctgtgcccaaagagatctcccctgacaccacgctgctggacctgcagaacaacgacatctccgagctccgcaaggatgacttcaagggtctccagcacctctacgccctcgtcctggtgaacaacaagatctccaagatccatgagaaggccttcagcccactgcggaagctgcagaagctctacatctccaagaaccacctggtggagatcccgcccaacctacccagctccctggtggagctccgcatccacgacaaccgcatccgcaaggtgcccaagggagtgttcagcgggctccggaacacgaactgcatcgagatgggcgggaacccactggagaacagtggctttgaacctggagccttcgatgggccttgaagctcaactacctgcgcattttaaaaggccaactgactggcattccccaaagacttcctgagaccctgaatgaactcact

SEQ ID NO: 169391 - DNA, 1087 bp, Homo Sapiens
  misc_feature (48)..(48): n is a, c, g, or t
  misc_feature (50)..(50): n is a, c, g, or t
  misc_feature (871)..(958): n is a, c, g, or t
  misc_feature (1010)..(1040): n is a, c, g, or t
ccccaagtgtcaataagcttttccatggcaacaagggcacttgtactnanctgtgttgaaaaggcagatgtctgcatactggcgcactgagatcttgatcttcatcaccgtctggttggtgttgttggtaacgtggacgttgacgctgatgggttctccatggtaatagatctccttatccagagaggcttctaggtgcaagggcttgtccgacatgaggaactgcctggtggtctcggctgtgggctgggggccaggcctctctggggcatactgaaccttccggatgaccagacgcacagaattccgcttgtggatcttctcctccaaattctccgcgcagaaggctttgacttcatagtccacaccgcaagccttccccgtgtcttcgggccccggctgcagtgtcacagaacatggaaggtttggagggatctcaaaggtgaaagggtaagcgtgctcgcccagcttcttgatgaggcgttcctgcagccgcgtcaggggcttcttgtcctcgggggccggtgggaacgactgtacgttggccacaaacaggtccttgcgaaaggtcaggcccaggacatccaggtcctcccggccatagcggaaggcgcaggtcagcgtcacatagactctccgctctttgagatactcaggatccaccaggaccacaccatccacagggtccacgaggtcgatgtggtccacaaagtcccgctttcccaggtagacggtgagctttccatttggactggccttcttgaacactcgggtccctttgtcgcccatggtccgcgacggtcgcagggaggtccgcggcgtcagcgcccaggctggaaaatccccagccagcaggaggagcgcgggccannnnnnnnnnnnnnnnnnnnnnnnnnnnnnnnnnnnnnnnnnnnnnnnnnnnnnnnnnnnnnnnnnnnnnnnnnnnnnnnnnnnnnnngtcgagcagcgcagcgcccgggccgcggccaggggcgtggaaccgcgcgggnnnnnnnnnnnnnnnnnnnnnnnnnnnnnnncgcgtctgcgtgtgcgcgcgccgcccagcgaggcagggcagcgcccc

SEQ ID NO: 169392 - DNA, 282 bp, Homo Sapiens
ggcagaggagaaggccaagaaaaaggcggcggccaagaagatggaggaggtggaagcacgcaggaagcaggaagaggaggcacgtaggctcaggtggctgcagcaggtgcgagcacaggaggaggaagagcggcggcaccaagagctgctgcagaagaagaaggaagaggagcaggagcggctgcggaaggcggccgaggctaagcggctggcagagcagcggagcaggagcggcggagcaggacagcgcgagcaggagcgcgcgacagaccgctatcaatc

SEQ ID NO: 169393 - DNA, 492 bp, Homo Sapiens
gatctcacctgaccagtaagtatccgtgggagcccagttagcgagggagagaaatccacacagcctctcttgctctctccagtccaaaaatccaacgtaggcccaagaaggctctggcatgtgccaggcacttgctgatcttttggtcttagggggatgcctctaagccatttgatcccgttctaggaacaaaaaaaggcagtggtgacaatcgctccttttatcatctccctccagcttcccaggatggtccccttttccctgttctctctagcctaacctcggttatgggaaatttcaagttttccattccaaaggacatccttctaggctgcctcataaaaaaacctacaaacctcaggcctcagtcaagatatccgtgccttgtcttgttttacaattcaatctggccacaatacgaattggataatgggtccaaatggcccacaaacggaacattggactttacaatttttactgacttaatcaatt

SEQ ID NO: 169394 - DNA, 577 bp, Homo Sapiens
ggggctcaagctgtcccaggacatggacacctgtgaggacatcttgccgtgcgtgcccttcagcgtggccaagagtgtgaagtccttgtacctgggccggatgttcagtgggacccccgtgatccgactgcgcttcaagaggctgcagcccaccagatctctgttgaggagctggcgcggaatctggtcatcaaggtcaacagggatgctgtcatgaaaatcgcggtggccggggacttgttccaaccggagcgaggactgtatcatctgaacctgaccgtgggaggtattcccttccatgagaaggacctcgtgcagcctataaaccctcgtctggatggctgcatgaggagctggaactggctgaacggagaagacaccaccatccaggaaacggtgaaagtgaacacgaggatgcagtgcttctcggtgacggagagaggctctttctaccccgggagcggcttcgccttctacagcctggactacatgcggacccctctggacgtcgggactgaatcaacctgggaagtagaagtcgtggctcacatccgcccagccgtataaaacaaggagt

SEQ ID NO: 169395 - DNA, 793 bp, Homo Sapiens
cgtgatagctgaagagataggggctgttgcagctgatggggggtgtgatgaggcatctgttgttttccttgtgagtaaagatccaggatttggtggcagatgtcttccaaaacgtcgaccgggacatcttgaacaaactgctcccaccatctcctatacatgggtttggaggtccattcttgtatttcaaatttgcacaaacgtcctgcgagatacatcactgctactgctatgatctctggttcccactgcagtgacaaggtggtgcagagactgtcatttacaaatgtccatgccatttgaaccaacttttgaattttgtttttatcacctttgagttgctttgcatattttagtaggaactggtatggatgttctacctgtaaatcaaacttgatggtctgcagtaagattctctccagaaccattacttcctcctttgggtcatctccaaactggccaaattgtacatcatttaataaactacgagctgttttgatgatatctttacatttttttcggtgtttcttctactttcccagccagaaagaggcaacaggctcctgtcacatatcttgggaattgcttgaaggaatggaacatatagaagcgatgaaaataaattattccagttgccagggtatcatagtgtagccccaaacgtgtgcccacatcgaagatgaaccgagcgccctctcggaggtaccgggcctcggtggctgaataagtccttcagtagtgagggtgttgagccagtcttactatccagtacagatgcttgtgtgtcaggttg

SEQ ID NO: 169396 - DNA, 615 bp, Homo Sapiens
cgtgccgaactgacgaagcgggtattatgagaaatagcggaggaattccgtgctggccccatgggtcctctggtcctcgtggtctccctggccccctggtgcacctggtccccaaggcttccaaggtccccctggtgagcctggcgagcctggagcttcaggtcccatgggtccccgaggtcccccaggtccccctggaaagaatggagatgatggggaagctggaaaacctggtcgtcctggtgagcgtgggcctcctgggcctcagggtgctcgaggattgcccggaacagctggcctccctggaatgaagggacacagaggtttcagtggtttggatggtgccaagggagatactggtcctgctggtcctaagggtgagcctggcagccctggtgaaaatggagctcctggtcagatgggcccccgtggcctgcctggtgagagaggtcgccctggagcccctggccctgctggtgctcgtggaaatgatggtgctactggtgctgccgggccccctggtcccaccggccccgctggtcctcctggcttccctggtgctgttggtgctaagggtgaagctggtccccaagggccccgaggctctgaaggtcc

SEQ ID NO: 169397 - DNA, 479 bp, Homo Sapiens
  misc_feature (121)..(134): n is a, c, g, or t
  misc_feature (384)..(384): n is a, c, g, or t
  misc_feature (399)..(399): n is a, c, g, or t
  misc_feature (414)..(415): n is a, c, g, or t
  misc_feature (437)..(437): n is a, c, g, or t
acccgaccctacccacaaaccccctcaacattttcagtgtcttcttcttcctcatcactatcaaatttacttctctgaggtaaacgagggccatcccctccttcagcatcttctgtggccnnnnnnnnnnnnnnggacaattgtgaacgttgttgttccattctttctttctccaatttcttctgcttttcacgttccattttttcaagaccttcgcgaatccaagcgggaagagtcctgcgttttactgcgtcaattttggggaggctcctgcttcacaggaagtgcaataggtgaacgctgacgatccctgaatgatgatggcctttctcctcgattctagggagggtgcttggaggtcctggaggccctgggtgcccttanggaggatgaaatccnccttgcggtgggccnnaagccagccccatgctgatagncaaactggtttcactgccccccctgcaaaaattatcgggtgg

SEQ ID NO: 169398 - DNA, 835 bp, Homo Sapiens
  misc_feature (117)..(130): n is a, c, g, or t
gggtaaaacgcaggactcttcccgcttggattcgcgaaggtcttgaaaaaatggaacgtgaaaagcagaagaaattggagaaagaaagaatggaacaacaacgttcacaattgtccnnnnnnnnnnnnnnggccacagaagatgctgaaggaggggatggccctcgtttacctcagagaagtaaatttgatagtgatgaggaacaagaagacactgaaaatgttgaggctgcaagtagtgggaaagtcaccagaagtccatccccagttcctcaagaagagcacagtgaccctgagatgactgaagaggagaaagagtatcaaatgatgttgctgacaaaaatgcttctaacagaaattctgctggatgtcacagatgaagaaatttattacgtagccaaagatgcacaccgcaaagcaacgaaagatgtgatacaaagctcctgcaaaacagctggcacagtccagtgcactggcttccctcactggactcggtggactgggtggttatggatcaggagacagtgaagatgagaggagtgacagaggatctgagtcatctgacactgatgatgaagaattacggcatcgaatccggcaaaaacaggaagctttttggagaaaagaaaaagaacagcagctattacatgataaacagatggaagaagaaaagcagcaaacagaaagggttacaaaagagatgaatgaatttatccataaagagcaaaatagtttatcactactagaagcaagagaagcagacggtgatgtggttaatgaaaagaaagagaactccaaatgaaaccacatcagttttagaaccaaaaaaagagctt

SEQ ID NO: 169399 - DNA, 420 bp, Homo Sapiens
tcaaaacccttcatgaggaaaacactgtttcctcctccaatggtctagaatcttcacaagagtcactgattattcaagagagtgcatattctgaaaaacccttcacagtggacagcgcagcctgcaggtacatactctgtatcatataaagcagaaggggtttaagagcttgctagccgtcatttaaatccatgactcaagacgaccaacactgggttaccaataatcttcagaaagtaccacctactcaccgagtgtaacatttcttgtagttagcgacctctgcttaggaaatcaccagctcctggcaatgaatccatacttcccagaactcacacattcaggcaaatatatggacatacagctctaaatatagatacagagaggtctgccgtgacagttcagtaggagactggaaat

SEQ ID NO: 169400 - DNA, 448 bp, Homo Sapiens
gatttctggatgcagtgacgtggcgactcaagaaggcttagctagcagcaccaaaagcacagaagtgctgctaggtgataaaacaattccagatgatacaccaatgtgccgtatactccttcgcagagaagttctaagattagccattaacttgagcagttcagcttcaactaaatgccatgagactgggcttttaacaattaaggagaagtatcctcaaacatttgatgacatatgcctttactctgaggtttcccatttgctgacacactgcacattcagacttccgtgtcggaggttcatacaagaattatttcaagatgtacagtttctacaaatgcatgaagaagcagaggctgtggtggcaacaccaccaaagcaacctatagatgatacatatgctgaatcctgaccttatatttatgatggtatagatacatactatata

SEQ ID NO: 169401 - DNA, 1280 bp, Homo Sapiens
  misc_feature (423)..(544): n is a, c, g, or t
  misc_feature (638)..(680): n is a, c, g, or t
  misc_feature (693)..(705): n is a, c, g, or t
  misc_feature (795)..(795): n is a, c, g, or t
  misc_feature (820)..(832): n is a, c, g, or t
  misc_feature (969)..(981): n is a, c, g, or t
  misc_feature (1261)..(1261): n is a, c, g, or t
accccgagtgccgcgagaggcccgggtgccgctagaggccccggaggagctgggccagccgcccacccccacccccagtgcagggctggtcttggggaggcagggcagcctcgcggtcttgggcactggtgggtcggccgccatagccccagtaggacaaacgggctcgggtctgggcagcacctctggtcaggagggtcaccctggcctgccagtctgccttcccccaaccccgtgtcctgtggtttggttggggcttcacagccacacctggactgaccctgcaggttgttcatagtcagaattgtattttggatttttacacaactgtcccgttccccgctccacagagatacacagatatatacacacagtggatggacggacaagacaggcagagatctataaacagacaggctctannnnnnnnnnnnnnnnnnnnnnnnnnnnnnnnnnnnnnnnnnnnnnnnnnnnnnnnnnnnnnnnnnnnnnnnnnnnnnnnnnnnnnnnnnnnnnnnnnnnnnnnnnnnnnnnnnnnnnnnnnttgcgggtgggaacaggcggaaacaaaaaagggggtcgggaatttggttctatcactattttcctcaagaaaaaactggggcactggagtgggnnnnnnnnnnnnnnnnnnnnnnnnnnnnnnnnnnnnnnnnnnngcctttttctcannnnnnnnnnnnntcccaaaacaacaaaggggcgggatctctaataaatccctttcctctccactcaaaccccacccgcggcgtttctccaaacaaaaaatcncctctttataacctctccagaagtnnnnnnnnnnnnnccaacccctcaccaaaaagtaatcttgcaggggcgggaccaggtaggtgaagacacacacccccccacaaacaaagcgaggggtgtggttcaccaagacgacaccataaaacgggcaggagtatgagaaaaatagannnnnnnnnnnnnttgaggacggcgtgaaaaatcttgtcgccactccctacaataatcccaactcttatgtgtagaaaagatataatgtgaatataacaaacaaacttatgcacacaccggctatatgtattagtcacacaaaaagatgtgggacacataaaaatttgatctcaaagtatcatatgaagaaaatcctcctcccacccagatatactcacacaaaggaggaagcgcgccacgcggccaaacacaaagacgggccccagattaaggagctggggggggcgaacanacattccacttcaaacctg

SEQ ID NO: 169402 - DNA, 947 bp, Homo Sapiens
  misc_feature (695)..(695): n is a, c, g, or t
aggtagcgaggcctgggtggcgcttgcaggttgttgtcatctgagttgagcactggtcacattgaaggtgctgggtaagtggtagctcttgttgcttcccgttcagcgtcacatctgcagtggagcctgaaaaggctccacattaggtcacctgtgcacagccatggctggaatgatgaaggggatacgctggagttgccctgccatcgcctccatcagccagacgaggtcctcacaggagaaggacagctcttccccaccctgggatctcaggagggcagccacggagtggggaggccccagatgcgctgtgccaaagccaggtccgaggccaaagttctccctgccatccttggtgccgtcctgccccttcctccttcatgcctgggcctgcaggcccaccccagccaccactgagtccactcggagtgccctgtgttcctggagaaggcattccagggttgaatcttgtcccagcctcagcctgggacacctaggtggagagagtggtctccgctctgaattgcatccaggggacctgggctcattcttcttggctcaccaaccctgcaggcctcatctttcccaaaacccactttgtcttggtgggagtgggtccgcgctgctctgcagcaggggctggggagtggacagcatcaggtgggaaagtggagtccaccctcatgtttctgtangattctcaccgtggggctggaagaaaagagcatcgacttgatttctccaaacactcatccctctttttctttcttccaccactccccaccccagctgtagttaatttcagtgccttacaaatcctaagctcagagaaagttccatttccgttcccagaagggaagggaacctcccctaggtccttcccctggctttgttataaccgcaaaagcttgggttggtttatggcaacctcctatcttatgaaaacc

SEQ ID NO: 169403 - DNA, 1488 bp, Homo Sapiens
  misc_feature (49)..(49): n is a, c, g, or t
  misc_feature (102)..(102): n is a, c, g, or t
  misc_feature (125)..(138): n is a, c, g, or t
tttaatggacccacatgtggggccacaatttccaatttaccccttcttnttttcccggcccaccccgaacaataagaatgccctcggattttgtccaaattnaattctataatttgcctgggggnnnnnnnnnnnnnnggaccattattttctttgttttgtttttcctgtataaaaaaggaccccaaatataaaggtagggaaagggacaagagggaacataccccttagtgtagagaaatgggaaggagaaggagaagcctcaaaaggagaggtgggaggggaatgtcattaaggcagcaaagtaatctctgtagaaagatggaggaggaccctccatagcctcagagataaaggcaaagattgccctctcagtgtccagaagggaaatggcagcttttcttccttccatggcagccactccattgctcactccggattaccttcatccttatgtagataagagtgctgcagagctcgaaaggcagagattcgcttgtgtgggttaaaagtcagcatttccagcagcagctgtgctcccgactcctccatctcaggtaccaccgactgcactgggcggggccctctggggggaaaggctccacggggcagggatacatctcgaggccagtcatcctctggaggcagcccaatcaggtcaaagattttgcccaactggtcggcttcagagtttccacagaagagaggctttcgacgaaacatctctgcaaagatacagccaacactccacatgtccacaggtgttgcatatgtggactgcagaagaacttcgggagctcggtaccagagtgtaacaaccacgggtgtaagtgccatctggtagctgtagattctggccaggccaaagtcagccagcttgactgttccaccacttgtcaccagaatgttctctggcttcagatctcggtgaacgatgcaattggcatgaaggaaatctaggcctcttagaaactggcgcatcagatccttgatcgtttcggctggcaagcctggtgggggtgccttgtccagatatgtccttaggtcctggtctacatgctcaaacaccagggttaccttgatctcccggtcagttcgggatgtggcacagacgtccatcagccggacaacattgggatgctcaaaagcctccagtcgcctcagtaaagccacctcacgaactgtgctgatgggaaggcctcctccacctcctcctccacttggggactctcacactcttgagggccaccaaacgtggccactgtggggatcacgggccttgtacactgtcccataggcaccgacaccaatttcagccactggctcatatcgagaggtagccattctcagatcaagggagaccctcacgccagcccggggtgctgtgggggcggcccgttatcggggccccggagccggttcccgacgcgtgggtcgacgatatcccgggaattccggaccggtacaagggccccttggctttgaata

SEQ ID NO: 169404 - DNA, 1003 bp, Homo Sapiens
tgggtgaccttaattagaaaacaaaaggtttttggtagaaaagcggtgtacggtcggaatcccgggatatcgtcgaccacgcgtcggtgggggtgagggggcctctctagcttgcggcctgtgtctatggtcgggccctctgcgtccagctgctccggaccgagctcgggtgtatggggccgtaggaaccggctccggggccccgataacgggccgcccccacagcaccccgggctggcgtgagggtctcccttgatctgagaatggctacctctcgatatgagccagtggctgaaattggtgtcggtgcctatgggacagtgtacaaggcccgtgatccccacagtggccactttgtggccctcaagagtgtgagagtccccaatggaggaggaggtggaggaggccttcccatcagcacagttcgtgaggtggctttactgaggcgactggaggcttttgagcatcccaatgttgtccggctgatggacgtctgtgccacatcccgaactgaccgggagatcaaggtaaccctggtgtttgagcatgtagaccaggacctaaggacatatctggacaaggcacccccaccaggcttgccagccgaaacgatcaaggatctgatgcgccagtttctaagaggcctagatttccttcatgccaattgcatcgttcaccgagatctgaagccagagaacattctggtgacaagtggtggaacagtcaagctggctgactttggcctggccagaatctacagctaccagatggcacttacacccgaggttgtaacactctggtaccgagctcccgaagttcttctgcagtccccctatgcaacacctgtggacatgtggagtggtggctgtatctttgcacagatggtttcgtccaaagcctctcttctgtgggaaactctgaaagccgaccagtttgggcacaaacctttgtaccctgatatgcggctggcctcccaaaagaatgaactggggcttccaaaaag

SEQ ID NO: 169405 - DNA, 1379 bp, Homo Sapiens
  misc_feature (734)..(746): n is a, c, g, or t
  misc_feature (1179)..(1179): n is a, c, g, or t
  misc_feature (1187)..(1187): n is a, c, g, or t
  misc_feature (1220)..(1220): n is a, c, g, or t
  misc_feature (1252)..(1265): n is a, c, g, or t
gggagacggtctagcgctgcgtgggccatggtgcagctccgaccgcgagcgtctcgcgccccggcgtcggcggaggcgatggtggacgagggccagctggcctcggaggaggaggaggcggagcacgggctgttgctcgggcagcccagcagcggcgcggccgccgagcccctggaggaagacgaggaaggggacgatgagtttgacgatgaggccccggaggagctgactttcgccagcgcccaggcggaagcgagagaagaggagcggcgagtgcgggagaccgtgcgcagggataaaacgctcctgaaggagaagaggaagcgacgcgaggagctgttcatcgaacagaagaaaagaaaactccttccagacactattttggagaagttaaccacagcttcacagactaacatcaagaaatcgccaggaaaggtgaaagaagttaatttgcaaaagaaaaatgaagactgtgaaaaaggaaatgactccaagaaagttaaagtacaaaaagtacagtctgtcagccagaataaaagctacttggccgtaaggctaaaagaccaagatctgagagattcaaggcaacaagcagcacaagccttcatacataattcattatatgggccaggaaccaacaggactactgtaaataagttcctgtctcttgccaacaagaggttaccagtgaaaagagctgctgtccagtttttgaataatgcttggggaatccnnnnnnnnnnnnntgaccaagaggtttaaaagaacggtggatggtacagaaagatgaaaactaagaagtaaatcaatgactaaatgaagaatctgtactttgtatgtatagaatttatctaataaatcattcatagatcattttaaaggatcattataaaaatcataaacctaatttgaggaagtgctcaaccacatttcattcttctggagtagaactgtgccttgcaatcctagaggaaaaagcggtttaagaaggaattgttttcttcttaatatatttaactgaaattcagccatacccgcatccagcacagcacctcttctctcctccccgtttaaagggtcgccaaaatgcccggactacaaggaaccgcaatcccggaggtctactgagcggaacattgtataacgaacctattaccgccgccgtaaatgtacgcacgngagccatnctgagctggcgccggccgccccgcgctcgtgtngaacctcgaaccatcgccgcgccccaccaaannnnnnnnnnnnnngcgccgtcacgacttctacactgtcggaagggtgggtgggggcaacttccgccctcgccctgcgcagaccgccgggtcgttgcccctccgctcgcggctctgcgccgaccggcc

SEQ ID NO: 169406 - DNA, 260 bp, Homo Sapiens
cttctagtggatccctatggacaatgcgctacgcgatgtgctgctccctctcccgacgcttctgctcttcggccagctgcttcacccgcagcgactcctgcatggtcgccaggctcgggtaccattcgcgttcttcggcctccagctcccgcagctgtctccggcgacggccataacgaaccggggaccaccccggaggcggcgccgtaacgcgcgaactgcttagccgcgtagcgcatgtcatagggatcgtagatcac

SEQ ID NO: 169407 - DNA, 1050 bp, Homo Sapiens
  misc_feature (738)..(783): n is a, c, g, or t
  misc_feature (787)..(787): n is a, c, g, or t
  misc_feature (790)..(790): n is a, c, g, or t
  misc_feature (846)..(856): n is a, c, g, or t
  misc_feature (974)..(983): n is a, c, g, or t
cgggggcacagccaagatggcggcgtccgtgcgacaggcacgcagcctactaggtgtggcggcgaccctggccccgggttcccgtggctaccgggcgcggccgcccccgcgccgcaggccgggaccccggtggccagaccccgaggacctcctgaccccgcggtggcagctgggaccgcgctacgcggctaagcagttcgcgcgttacggcgccgcctccggggtggtccccggttcgttatggccgtcgccggagcagctgcgggagctggaggccgaagaacgcgaatggtacccgagcctggcgaccatgcaggagtcgctgcgggtgaagcagctggccgaagagcagaagcgtcgggagagggagcagcacatcgcagagtgcatggccaagatgccacagatgattgtgaactggcagcagcagcagcgggagaactgggagaaggcccaggctgacaaggagaggagggcccgactgcaggctgaggcccaggagctcctgggctaccaggtggacccaaggagtgcccgcttccaggagctgctccaggacctagagaagaaggagcgcaagcgcctcaaggaggaaaaacagaaacggaagaaggaggcgcgagctgctgcattggctgcagctgtggctcaagacccagcagcctctggggcacccagctcctgaggctttgtcccttcccaataaagcctgctacctggcagtacccctggaggagnnnnnnnnnnnnnnnnnnnnnnnnnnnnnnnnnnnnnnnnnnnnnnacanccnacaacctcaaacactactttcctgggcccccccggggaacttaccccggccaagannnnnnnnnnntccattccccctttccttcacaaaaagaaggaacccttgcgcgggggttcccacacgaccgcttgaaggccaagtcttacccttgggaaaagagcccacgggggttctttccttggtnnnnnnnnnnggaacatttacgccaacccacacctccaggaatggggcccaaggcaatttaagcccccaggcggccc

SEQ ID NO: 169408 - DNA, 953 bp, Homo Sapiens
  misc_feature (861)..(861): n is a, c, g, or t
  misc_feature (891)..(891): n is a, c, g, or t
  misc_feature (937)..(937): n is a, c, g, or t
aggaacggcggcaagaggcagctgggccagccctgcggcctgacatgtcctatgctgagcggctggcagctgagaggcagcacgcagaaagggtggcggccctgggcaatgacccactggcccggctgcagatgctcaatgtgactccccatcaccaccagcactcccacatccactcgcacctgcacctgcaccagcaagatgctatccatgcagcctctgcctcggtgcaccttctcattgaccccctggcctcagggtctcaccttacccggatcccctacccagctggaactctccctaaccccctgcttcctcaccctctgcacgagaacgaagttcttcgtcaccagctctttgctgccccttaccgggacctgccggcctccctttctgccccgatgtcagcagctcatcagctgcaggccatgcacgcacagtcagctgagctgcagcgcttggcgctggaacagcagcagtggctgcatgcccatcacccgctgcacagtgtgccgctgcctgcccaggaggactactacagtcacctgaagaaggaaagcgacaagccactgtagaacctgcgatcaagagagcaccatggctcctacattggaccttggaggcacccccaccctcccccacaacgtgcccttggactgccacccagagccaagagggtagctgctcaagttgcaaggcctccgacagctggacagagagtgagggaaggagggacagacagaaggccaaggcccgatgtggtgtgcagaggtggggaggtggcgaggatggggacagaaagcgcacagaatcttggaccaggtctctcttccttgtcccccctgcttttctcctcccttntgaaccaacccctgtgggccgccgcccctncccttgccccgttggtgtgattattttcatctgtttagatgtgggntgtttttgcgtaaaat

SEQ ID NO: 169409 - DNA, 346 bp, Homo Sapiens
  misc_feature (92)..(153): n is a, c, g, or t
  misc_feature (317)..(317): n is a, c, g, or t
  misc_feature (324)..(324): n is a, c, g, or t
ccaaggcccgatgtggtgtgcagaggtggggaggtggcgaggatggggacagaaagcgcacagaatcttggaccaggtctctcttccttgtnnnnnnnnnnnnnnnnnnnnnnnnnnnnnnnnnnnnnnnnnnnnnnnnnnnnnnnnnnnnnntggtgtgattatttcatctgttagatgtggctgttttgcgtagcatcgtgtgccacccctgcccctccccgatccctgtgtgcgcgccccctctgcaatgtatgccccttgccccttccccacactaataatttatatatataaatatctatatgacgctcttnaaaaaanatcccaaccaaaaccaaccaaa

SEQ ID NO: 169410 - DNA, 362 bp, Homo Sapiens
ggccagagccaagagggtgctgctcagttgcagggcctccgcagctggacagagagtgggggagggagggacagacagaaagccaaggcccgatgtggtgtgcaaaggtggggaggtggcgaggatggggacagaaagcgcacagaatcttggaccaggtctctcttccttgtcccccctgcttttctcctcccccatgcccaacccctgtggccgccgcccctcccctgccccgttggtgtgattatttcatctgttagatgtggctgttttgcgtagcatcgtgtgccacccctgcccctccccgatccctgtgtgcgcgccccctctgcaatgtatgccccttgccccttccccacact

SEQ ID NO: 169411 - DNA, 870 bp, Homo Sapiens
  misc_feature (651)..(651): n is a, c, g, or t
  misc_feature (711)..(711): n is a, c, g, or t
cacagaataacacccgggctgtgacaaggcccatgatgacatttcatgaggcccagatgtgggcaggcagcccgggctgcactatgcggtcaggattccttgctgctttggtgggacatgaggcctcagtgggtggtgagaggggcccatggcccttgtgggaggatatctttgggccgtgtaccctcaggtccagtgcttggtcctgctctggtcactggggcttcccaggaggcagcagggtctggtcataatccagtgtgaagatgaggtgaggaaggaaggggttgctgtccagtgttggcctggtcgctttgattcttcctgcacagctcagcccaccccatctgtactggaagggaccctggagccctgggaccaccccctttcaagtcccaaacactgagtcctctgtcatgtgtccttgtccctaggctacaatgctacacttggctcaggctgatcaccatgctagtcacaggagggagagagaggcagtgtacttgcccccatctcctggagggaggtgcgttggaaattctaggcccttcagcagagacccatttgtgcccagaccacaatatttcttcttcctcagggactacatgccacagacctgtatccccagtggcaactcctggtagctcccanaattaaacagtgatctcctctaaataaacaaagcatctacccagccccaatagtgaatanaagtcccaattttaagtccaacacccctagcaatttcttcaaagccagccttacctgactagggctattccccgcaccggttcccaacccccaagggggaaattagggggattaaaattaagagtaagggaaaagaccccctttgggccctttcccggg

SEQ ID NO: 169412 - DNA, 1032 bp, Homo Sapiens
  misc_feature (842)..(842): n is a, c, g, or t
tagcgaggcctgggtggcgaattcggcacgagggcttgcccgtcggtcgctagctcgctcggtgcgcgtcgtcccgctccatggcgctcttcgtgcggctgctggctctcgccctggctctggccctgggccccgccgcgaccctggcgggtcccgccaagtcgccctaccagctggtgctgcagcacagcaggctccggggccgccagcacggccccaacgtgtgtgctgtgcagaaggttattggcactaataggaagtacttcaccaactgcaagcagtggtaccaaaggaaaatctgtggcaaatcaacagtcatcagctacgagtgctgtcctggatatgaaaaggtccctggggagaagggctgtccagcagccctaccactctcaaacctttacgagaccctgggagtcgttggatccaccaccactcagctgtacacggaccgcacggagaagctgaggcctgagatggaggggcccggcagcttcaccatcttcgcccctagcaacgaggcctgggcctccttgccagctgaagtgctggactccctggtcagcaatgtcaacattgagctgctcaatgccctccgctaccatatggtgggcaggcgagtcctgactgatgagctgaaacacggcatgaccctcacctctatgtaccagaattccaacatccagatccaccactatgcctaatgggattgtaactgtgaactgtgcccggctgctgaaagccgaccaccatgcaacccaacggaggtggtgcacctcatcgataaggtcatctccaccatcaccaacaacatccagcaagatcatttgagatcgaaggacacncttttgagaccctttcgggcttgctgtgggcctgcatctaggggctcaacacggatgcctttttgaaaaggtaaaccgggccaaggaacaccgccctttttgggccccccggacccaaatggagggccctttccgaaggaaggaatatcccccttaggggaaaaaacttctttgaaaacccgactaatta

SEQ ID NO: 169413 - DNA, 840 bp, Homo Sapiens
gccgcccgcttgcccgtcggtcgctagctcgctcggtgcgcggtctgtcccgtctccatggcgctcttctgtgctggctgctggctctcgccctggctctggccctgggccccgccgcgaccctggcgggctcccgccaagctcgcccataccagactggtgctgcagcacagcaggctccggggtccgccagcacggccccaaccgtgtgtgctgtgcagtaaggttatatggcactaataggaatgtacttcaccaactgacaagcagtggtaccaaaggaaacatctgtggcaaactcaacagtcatcagctacgagtgctgtcctggatatgaaaaggtccctggggagaagggctgtccagcagccctaccactctcaaacctttacgagaccctgggagtcgttggatccagccaccactcagctgtagcacggaccgcacggagaagctgaggcctgagatggaggggcccggcagcttcaccatcttcgcccctagcaacgaggcctgggcctccttgccagctgaagtgctggactccctggtcagcaatgtcaacattgagctgctcaatgccctccgctaccatatggtgggcaggcgagtcctgactgatgagctgaaacacggcatgaccctcacctctatgtaccagaattccaacatccagatccaccactatcctaatgggattgtaactgtgaactgtgcccggctcctgaaagccgacaacatgcaaacaacgggggtggtgcacctcatcgataaggtcatctccaccatcaccaacaacatccagcagatcattgaagatcgaggaacccctttggaaac

SEQ ID NO: 169414 - DNA, 212 bp, Homo Sapiens
acagtaccaacacaaaatgtgactcctaacacagtgaaccagcaaccaggagcacagcagttgtacagcaggggtcctccatgcccctcatatggtgggatccactctaggatctttacaaggagcagcatcgtcagcatcccatcagcatacgagtgcctcccaaccatactcctcttttgtggatcaccatcacgtccggggtacacgag

SEQ ID NO: 169415 - DNA, 298 bp, Homo Sapiens
ccccatttggaatgaggaaactgaggcttagagcagatacttggtaaactaatgtggctaataaatggcattgtggcggggcaaactcatgtgtgcctgactccaaagtctttcccacgatgctggaacctgccacagttgttccttagagcccttcccaacctgccatagctctgatggtatgtcagagctgagcctgagcataccagggacacctgagccttctcgctccctctcgcctgacacggcactgctgctgtgtgctgtgccaagctggatcaccattccgtccggggta

SEQ ID NO: 169416 - DNA, 199 bp, Homo Sapiens
attaacgaatgtagagactcggtaaccccgccggggttgccacgctcggacttgatccacacattggcaccggcgccgaacaggcggttgatgcgcacatggggcgtgttgccaatcgtttgcaggatgttgtcagctctcatcgacctccgcgagttggggtggtggttgacagtcgggtgcgcgagggatcctctag

SEQ ID NO: 169417 - DNA, 633 bp, Homo Sapiens
tcagctgggggtgacctacaggactcttcgaacgcagaagccaagggtcagtgttgggaggcgggggcttgttgtgaatccatttaaccactttgatgccattctgagcagtggcaatgtttacacctggaacacaggtaatgaagtgttctaagggaacacctccttggttttcttgcactacttctagatcgccaaactctgcaatgtaacaatctggaaagctcaataaaggcacggtgccctcgtgggtctggagaagactgtgaacctggggcgcaaatgtcttcaaagaaagaatcacaaaaggaatcttgtaagagtctggatcaaattcatgttcgctgaaatccttattggaacaatgctgtctgcagacaggctcgtgatattctaactcttcaaatataattgggctgcaattcgtggaggagccgtcgtgtgactgggaagaccccaaggggctctggcgggcctgactgctgggtaggagacacaccagccgtccgtttccttgttcacggattgcgaccgtgtctgttaattaatatagatctgacacattcaacttgtgtccaaactttttttcatagatatctgtaatttaaacagtaggcaggcaacaggcagggg

SEQ ID NO: 169418 - DNA, 107 bp, Homo Sapiens
gtgccgtaggtactggagggagagacgtgggcaccaaggtcgcgggaggaaccggtgcccaccatggctgcatatttgcccgtggatcactgaagattcctgctctc

SEQ ID NO: 169419 - DNA, 263 bp, Homo Sapiens
caggggactcctaaaagtccatggaccgcactgcagagtctctgcgagccccctaacgtggtatgcaaggcgttcaccacctctcacaagttcttaaaggggtccttgaccactgacctagacaaatagaagctttgggttttccatttgtagagtgtgcacacgtgagtgtcgcataacggatgcagcctgggggccgttaggatcaggatgggggtttgttctagtctaagtttgccaccccaggggtgatcaccatacgt

SEQ ID NO: 169420 - DNA, 298 bp, Homo Sapiens
gtctgtgaggggtgaaatcaaggtgtcagtcagctgggtcctcatttgaaattcagagccctcttccacattcactcaggttgttgtagaattcatttcttgtgattacacaacccagatccctcttccccctatttcccactggctgctggccagggacccctctcagctctgagaggttgatcttagggcctttctctgtagccctctccacaacatggcagttcgctatttctcggggccaacagaaaacatctcgttaatgatcaccatacgtccccgggatcctctagaacgc

SEQ ID NO: 169421 - DNA, 686 bp, Homo Sapiens
ttggtgtggtgttctagaggatcccgggacgtatggtgatccgggaaccctttgatagcaagaccgagcaggggccgcaggtggatgaaactcagtttaagaagatcctcgtgctacatcaacacggggaagcaagagggggcgaagctgctgtgtggtgggggcattgctgctgaccgtggttacttcatccagcccactgtgtttggagatgtgcaggatggcatgaccatcgccaaggaggagatcttcgggccagtgatgcagatcctgaagttcaagaccatagaggaggttgttgggagagccaacaattccacgtacgggctggccgcagctgtcttcacaaaggatttggacaaggccaattacctgtcccaggccctccaggcgggcactgtgtgggtcagcagcaatgcccccaccacacagcagcttcgccccctcttgcttccccgtgttgatgtagccgaggatcttcttaaactgagtttcatccacctgcggcccctgctcggtcttgctatcaaaggggttcccgaccacccgacccttggcccgagcaacgctccgctccacaaacacatcatagatgtcctcctgcacgaaggtccgggagcggcacatggatggttgtcctaaagtctgctcatgcgacggaggctagggtcattaagacgatacct

SEQ ID NO: 169422 - DNA, 647 bp, Homo Sapiens
agcgttctagaggatcccagtcaggggcgtgtggaagactcgtggccatggatagaagatggtagaagctaggatgtctgagttgcgagtcactctggatccagtgcagctagagtccagtctcctaagatcaaaggctatgctgaaggaggtggagaagcgccgctccctgctggaaatatggaatagtgctgctgacattctgatcaattcttcagaagcagatgaggatggaatccgggatgagaaggctgggatcaaccagaacatggatgctgttacagaagagctgcaggccaaaacagggtcactcgaagaaatgactcagaggctcagggagttccaggaaagctttaagaatattgaaaagaaggttgaaggagccaaacaccaacttgagatctttgatgctctgggttctcaagcctgtagcaacaagaacctggagaagctaagagctcaacaggaagtgctgcaggccctagagcctcaggtagactatctgaggaactttactcagggtctggtagaagatgccccagatggatctgatgcttctccacttctccacccagctgaggtcgccccaccagagcttcctcgaagctaagccacagagtgaacgtgttctgcgatgactggactcc

SEQ ID NO: 169423 - DNA, 616 bp, Homo Sapiens
tggggggcaagtccttagccctgtttcacatgacacagtaccacctcaattcttggcggtcacaacaagcgtgcagagcagctggcacgtgacttccccatccctgacaagaggctctggtggctgaagctgactgccctggcagatttggaagattgggaagagctagagaagttttccaagagcaagaaatcacccattggctacctgccttttgtggagatctgcatgaaacaacataacaaatacgaagccaagaagtatgcttcccgcgtgggtcccgagcagaaggtcaaggctttgcttcttgttggcgatgtggctcaggctgcagatgtggccatcgaacaccggaatgaggctgagctgagcctcgtattgtcccactgcacgggagccacagatggggccacagctgacaagattcaacgggccagggcacaagcccagaagaagtgaggagtccatcctgtacatctcaagcaaggggttcctcccctagcacctgggcttggcagaagggccatagttcatccagctcctcccctagagcaatgctgaggagcgggggcatggtagcagggctgtctggttttaaataaagttggaacacttc

SEQ ID NO: 169424 - DNA, 215 bp, Homo Sapiens
catagagggaggatcagaaaggagaaaagcattcagaggaaatagaaggtgcaaaagccgtgggagccagggaatagaagggtatgtatagggaacggaaagaaactcacttatgttcagagactcaagacttccctttctttctaggggagcatagagtcaatggtagatggcacaagcaggagaaagactagaaatgggtagaactcctgggc

SEQ ID NO: 169425 - DNA, 545 bp, Homo Sapiens
ggtggctgttctagaggatcccaggggctcgcagtcatcgggatagaggattcagcagttatcccggaggctcccatgaggagcagccaggtctctgcctgggggctgaagctcaagaagatgaggacccatcctataagtggagagaggaacacagactctcagcaactcagcagagtgagttaagggatgtgtgtgactatgcgattgagacgatgccctcttttcccaaggaaggttctgcagatgtggagcccaatcaggaaagccttgtggctgaggcctgtgacactccggaacactgggaggcagtaccccagagcctagcaggccgacaagcaaggactctagctcccccagagctctgggcctgccccattcagagtgagcatctagacatggccccattttccagtgacctgggaagcgaagaagaggaggtggaatttgggccaggacttacttctttgacatggggatctggacaggcagaagaagaagaggaaacctcttcagataactctggtcagaccagatattattct

SEQ ID NO: 169426 - DNA, 158 bp, Homo Sapiens
tggttggtggcacacggaatgaagacatacaacggcaatgaaatttatcttcattcagattcagaaacctcattcgttgtaatcttctttcattgaatgcatgcattatgacgtaaccgcgtcaaggaaatacgttaccacttcaggaagatcggtat

SEQ ID NO: 169427 - DNA, 829 bp, Homo Sapiens
ctgacaccatctccaagagcgagctccacaagttcaagatcaagatcatgggcgagttggtcagcaacggggtccagatctaccagttccccacggatgatgaggctgttgcagagattaacgcagtcatgaatgcacatctgccctttgccgtggtgggcagcaccgaggaggtgaaggtggggaacaagctggtccgagcacggcagtacccctggggagtggtgcaggtggagaatgagaatcactgcgacttcgtgaagctgcgggagatgttgatccgggtgaacatggaagacctccgcgagcagacccacagccggcactacgagctctaccggcgctgcaagttggaggagatgggctttcaggacagcgatggtgacagccagcccttcagcctacaagagacatacgaggccaagaggaaggagttcctaagtgagctgcagaggaaggaggaagagatgaggcagatgtttgtcaacaaagtgaaggagacagagctggagctgaaggagcaaggaaagggagctccatgagaacgtttgagcacctgaagcgggtccaccaggaggagaagcgcaaggttggaggaaaagcgccgggaactggaggaggagaccaaaggcttcaatcgccggaaggctgcggtggaggccctgcaagtcgcaggccttggcacgccaacctcgcagcaggcccttgaggaagggacaaggacaagaagaattacggcacgcaacagactttacttgtcaaggagtggactttagacctttcatggtgttaagttggttgagttaacaccttgtggaaccctgtttcc

SEQ ID NO: 169428 - DNA, 554 bp, Homo Sapiens
gtatggcatatgaagaaaaggagctttgcaaaatcggggaggtggccctagctgtgatatttgatgttgcaagtatcatcctgggctccaaggagagggcctgccagctgcccctgttttcttacatcgtggagcgcctgtgtgcatgttgttatgaacaggcgtggtatgcaaagctggggggtgtggtgtctattaagtttctcatggagcggctgcctctcacttgggttctccagaaccagcagacattcctgaaagcacttctctttgtcatgatggacttaagctggagaggtttccaatggggcagtcgctatggcaaagaccacgctggagcagcttctgatgcggtgcgcaacgcctttaaaagacgaggagagagccgaagagatcgtggccgcccaggaaaagtctttccaccatgtgacacacgacttggtgcgagaagtcacctctccaaactccactgtgaggaagcaggccatgcattcgctgcaggtgttggcccaggtcactgggaagagtaccacggtgctataacgggggatcct

SEQ ID NO: 169429 - DNA, 589 bp, Homo Sapiens
ggcatcctccagacccccccacaggggttcccttgtagccccttccagggggggtgccccgttggtccacccacaattcaaggtaacttaattctcccttcagggtggggaagccccccccaggagaaagctggttccagccccctttttgataaggccccgtcggtgtagggtgccccttcccaaagtaatttgcccgcgtcccacgctgcttttgagtgcgtcgcggccgccaggcatgcgcgtgaggccttggatgatctccacctcgtcactgtagtgcagcgcgcctgcgttccacaccaggtttcggtcacagcggtagtacctgtccctcaggttgtcgatgaagcgcttggtgaaggacttgactttgtccacgagggccccgtaggcttcagcctcagggccacgctctcagaggtgtccagcacaaagaacaggtccacggggcagtcctggaaggccacggcactcggggtctccggctcatcctgcgcggctgtccagcaggcctgcagcagcaggggcagcagagcacgggccgccctcatgtctcgggcctgcggtcaccacacagcgcggccag

SEQ ID NO: 169430 - DNA, 745 bp, Homo Sapiens
  misc_feature (735)..(735): n is a, c, g, or t
gttgacgtcaagtcaatcaacaagcgcttcatccacaacttagagacagggtactaccgctgtgaccgaaacttggtgtagaacgcaggcgctctgcactacagtgacaaggtggagatcatccaaggcatcacgcgcatgcttggcgcccacgacgcactcaaaagcagcgtggacgcggtcaagtattttgggaagggcacctacaccgactgcgctatcaagaaggggctggagcagctcctcgtggggggctcccacctgaaggagaataagtacctgattgtggtgaccgacgggcaccccctggagggctacaaggaaccctgtggggggctggaggatgctgtgaacgaggccaagcacctgggcgtcaaagtcttctcggtggccatcacacccgaccacctggagccgcgtctgagcatcatcgccacggaccacacgtaccggcgcaacttcacggcggctgactggggccagagccgcgacgcagaggaggccatcagccagaccatcgacaccatcgtggacatgatcaaaaataacgtggagcaagtgtgctgctccttcgaatgccagcctgcaagaggacctccggggctccggggcgaccccggctttgagggagaacgaggcaagccggggctcccaggagagaagggagaagccggagatcctggaagacccggggacctcggacctgttgggtaccagggaatgaagggagaaaanaggcgggcct

SEQ ID NO: 169431 - DNA, 348 bp, Homo Sapiens
ttgcgggatgtaggcaaagctcagtcagcagagcatcttgtccagtctcactcgaggggcaggggtgtgggtgaggacagtcagtaccactgttgccatggtgatgagaacaggctcctgctgaggctctggctgtggtcgcaagaggctggagaggctgaggactgggctggatatgctgaccatcagccaagccccacccagggcccgcgggcagttctgcgcgggggtcaggccgctggcccatttcgcagaggcggggagaggcacgaagcggctcatctcgcagtgtggtgcgggggcgcccccgggggataccgcctgaaggcagcctggagggcgcccggg

SEQ ID NO: 169432 - DNA, 678 bp, Homo Sapiens
attgagcgtctcctgctgcctctctcgcatggcgcttctcctcgtgtctcctgatggctggagtgccgcttcaggcagaggcccgggctggttggtgcctaggctgagagtcaagccactgaggccctgcaccagcatctcccaggaggagggatgtggggccctgttactctccccagggatcccagaaagattcggcctgtggctctggcagtatcgacattcacatcggaatcgattctgacttctgtcacctaatggggagattctggcttccctcccaaccgcatagggggccatgtgatcgcggtgtctcctcctcacatgccgcaggaatgctttcttcctctgaaggaactccagcctctcccaccgccgctcttccagggtcttctcctctctgtaccgctggcggagcagcccctctgggagaggcacggcctggctggggccaggaccggggctcaggttactgaggcccatcatcggctgttctgagtacgaaggctgagagggcactggaccttcctgggaagtctctgcagctgtcatcggggaagatttggaagggatgctggattccgtttctggagtggatccatggaggtctggtcccagctggaagctccgccaggccctcgggtccagaaaaggatggtgaagctggacggttctgcc

SEQ ID NO: 169433 - DNA, 264 bp, Homo Sapiens
atggactccatcatcgcatgatagaaacgggttgaatgtctccattgaatgtaagcgagtgtctggactggagccagccaccgtggatggggccttcgacctgaccaaaacgaatatgcaaaccaggtatgagcagagtgagtggggctggaaggaccgagagaaacgggaggaaatgacagatgaccgagccgggtacctcatcgcgtgggaaaacagctccgtccctgtggccttttctcacttccggttggacgtggagtg

SEQ ID NO: 169434 - DNA, 318 bp, Homo Sapiens
agaggatccagggactccatcatcggcatccagacatcagtcaatttctcctacttcgcccttctctccggggaatccccgagagccctttactcctctcgggcccgggcagccctggaaaccttgagtgccgttcacaccaggcggaccacgctcaccgggtccaccctcatcaccaggatagcctcggtagccgtcttctccaggaatacccttgggcccgatgccgccgatgggcccgcaggtctcccctctgcccagagcacttgcagggaaccccaccagcaagctttctcggcaatgtggtcaagctgctcc

SEQ ID NO: 169435 - DNA, 857 bp, Homo Sapiens
  misc_feature (671)..(671): n is a, c, g, or t
  misc_feature (673)..(676): n is a, c, g, or t
  misc_feature (678)..(678): n is a, c, g, or t
  misc_feature (680)..(680): n is a, c, g, or t
  misc_feature (682)..(682): n is a, c, g, or t
  misc_feature (684)..(684): n is a, c, g, or t
  misc_feature (686)..(686): n is a, c, g, or t
  misc_feature (689)..(690): n is a, c, g, or t
  misc_feature (693)..(694): n is a, c, g, or t
  misc_feature (696)..(700): n is a, c, g, or t
gggggcgcagtgcatcctgggttggcgtagccatggcgtctcgtgtcctttcagcctatgtcagccgcctgcccgcggcctttgcgccgctgccccgggtccggatgctggccgtggcccggcctctcagcaccgctctctgctccgcggggacccagacgaggctcgggactttgcagccggccttagtgctcgcgcaggttcctggtagagttacacagttgtgccgccagtatagcgacatgcctcctttgacgttagagggcatccaggaccgtgttctttacgtattgaaactctatgacaagattgacccagagaagctttcagtaaattctcattttatgaaagacctgggcttagacagtttggaccaagtggagattatcatggccatggaagacgaatttgggtttgaaattcctgatatagatgctgaaaagttaatgtgtccacaagaaattgtagattacattgcagataagaaggatgtatatgaataaagtatcagaccctttggctttgctgagagaggactcagatgatagtgacgaatgtctggcagtgaggacacattttggcattcttgctgactctgacagagtgattctgatggacttgtatttaaattgtatgtgttttactctttgaaaataaatctataaaacccnannnnanananananaannaannannnnncaaaatggtcgggccgccctcgggcccttcaagaaacctttcctaaaaccattctcttttggcgccgcggggcccccacttaggggaaaggggaaccctgggggccataagccgcggctttccccctagggaaaaaatcccgggggcacacggaaac

SEQ ID NO: 169436 - DNA, 466 bp, Homo Sapiens
aagctcgacacagtcgtagaattcccaatcagagggctgaacatgtccgagtttgtctgtaacatgtcagcaaggccttatgtgtacgacctcattgccgtgtccaatcattatggagccatgggggttggccactactaaagcagcttatgtgctatattaccaacgtcgagatgatgaattttataagacaccttcacttagcagttctggttcctctgatggagggacacgaccaagcagctctcagcagggatttggggatagatgaggctatgcagcattggacaccaactaatgctgactccacgatcctgccaccctgtagcgccagtgttaatcccccaggagaacatctttgacacgtctgcagactgctagtgttctgtctaaaaaccagacaaggaaatacccttcttttatgagcagaaggaaaccaacacaaaaaagaagacggtttacctgg

SEQ ID NO: 169437 - DNA, 366 bp, Homo Sapiens
caaactgaatggtaaatggtattactttgatgatagcaacgtgtccctggcctctgaggatcagatagtgactaaagcagcttatgtgctattttaccaacgtcgagatgatgaattttataagacaccttcacttagcagttctggttcctctgatggagggacacgaccaagcagctctcagcagggctttggggatgatgaggcttgcagcatggacaccaactaatgctgactccacgatcctgccaccctgtagcgccagtgtaatcccccaggagaacatctttgacactctgcagactgctagtgttctgtctaaaaaccagacaaggaaatacccttcttttatgagcagaaggaaac

SEQ ID NO: 169438 - DNA, 1746 bp, Homo Sapiens
tggggataacctggcgcacaaggtggcaggattctgggagtcagcattagttggtgttccatgctgcaaggcgtcatcagtccccaaggccctgttgagacttgcttgctcgtgtcccttccatcagaggaaccaagaactggcgtaagtgaaaggtgtctttataagagttcatcatctcgacgttggtaaaatagcacataagctgctttagtcactatctgatcctcagaggccagggacacgttgctatcatcaaagtaataccatttaccattcagtttgttcttcgcatatgcagtgtagtggccaacccccatggctccataatgattggacacggcaatgaggtcgtacacataaggccttgctgacaggttacagacaaactcggacatgttcagccctctgattgggaattctacgactgtgtcgagcttatccctccagtatctgttgtaggagaaacgtttgaggtggaccaccaggatcttgggcaaggaccataggtcaaacttttttgtggcctgttgatgcttcttacagttgggacagtaccaggggtcatgctccccaagggtctccatggtggtgaagagctcgatgcagtctctcagggccactgtggtcttcttcatcttctgaggctgcaacatgctcacatgcttctcgtaggcctcagattcttgctcatcattagtaaagtctccgagtttcactgtcccaatccatggccagtgtagatcgagagtttgagtttaagtagttttccatcagctgcaagtgaatttatgtcagctgttccataggagttcacaagactgaaggtaaaaagcctttttgggcagggctggcctttgatcttcttttgggtggtctcactggggtcatttcctggctcatcttccccactgccttctgtttctgaaagctgctctctgccttcttcctgatgctccatttcttcctcatcttctccttcacagctgttcctggagccattgcagccccctggctccaagggtgacctgccaaactcatcaggtaaaggctgtttcacatagcggctgatacgatcacaaacagcctggtacaaagactcaagggttaacttgtgcttggggacagaaagcaatagtggctgcccatatagcgctgatgcggaggaagtgcttgatggcctggacttcctctccctgaagtagactggaagcgtgacacattccgagccatccaacggaagtgctgcagacctcgtacacgaaaatgtcatcccgaggcatgatgtggtttaaaccttcatccatttggaaaattttgtggaatcggtgattatacacatctgcgaccaccatattttctgcagcaatgccagacagcctggagagagcctcgcacaggtcggacacagcccccatcagcggcacagtcacacggtactgagtaggtctgcagtgagggtcagcaggaaccaggaaaacctccataactcgatctttcttcaagggcagtggcagcgttagatagcaaatgggtcaaaggtcacagaaaccttagcacattctgggcaaacaaagtagatttgaagaggccatggaaagtatccacaatcacagaatcattcctcaacctgtgattctcccaggcttcctttgccaccaccgcatctggccgcccattggcatccttcagctcacaagtagggctttttctgtacccggttcagatcttcatgcaatccatata

SEQ ID NO: 169439 - DNA, 1085 bp, Homo Sapiens
  misc_feature (219)..(248): n is a, c, g, or t
  misc_feature (559)..(559): n is a, c, g, or t
  misc_feature (564)..(564): n is a, c, g, or t
  misc_feature (626)..(626): n is a, c, g, or t
  misc_feature (664)..(664): n is a, c, g, or t
  misc_feature (720)..(720): n is a, c, g, or t
  misc_feature (795)..(795): n is a, c, g, or t
  misc_feature (841)..(841): n is a, c, g, or t
  misc_feature (900)..(900): n is a, c, g, or t
  misc_feature (912)..(912): n is a, c, g, or t
ggtataattacaatgatattttcttctataataaaatccaaagtaaacatttaaattgtagaactgatatttttcatttatatgaagtataagcctctacggggtctatatggtgaatcatcctgcctttcaaattggtttcataatagttagatgaaaactattttttgggagatgttactgaagttgattgagcaataaaagtctacttaattagtnnnnnnnnnnnnnnnnnnnnnnnnnnnnnnccctgaccaaagcacttcgctcctccaaaacactcatccaaacacctttaattcgaacactgttgcgccccccttgcgtcaccacccaaaaatggcacactaggcctacccacccccagtcgcagaacacccaggcgccacaggaacctagtccgctttggggacatccttgaatctctataccatcttaatttttcccctacccgtgcaaaacccccgcaaggccgccatcctaaataaccgaccaatttttccccaacaaacatgatcacaacgtttttcatcatcaatggctgatgcacgccttctcnatacncgctgggcggagaatataataatatatctctgagacgaacagagctgagcaccacgccggtngctcgcacttccgctccaggacatcttaatatcaacancactccgctgccgagccacgatcgcggtccgacggcaaagagaggtctttaatatnacgcagcccctgcactctcgcgtacgaactccaccccgcgcgagagcgagatagtgaactcaactccaataaagngccagaggaagtatgatagatctagctcgatgatgaccatagcacnaccacattaaactgttcgccatcattaccaccagatcccgcgtttacacatctctattnaagcacacctcntctacagagtacgcgtggtatcacagccaccacctatctgactatggagcgacacccccccgcgccacacctatttacgctcctcacgtttattaacgcccactcctcgtatatataaacatgacccaagcgagaagttcataatactatatacatctacacacgcgcgcatg

SEQ ID NO: 169440 - DNA, 831 bp, Homo Sapiens
  misc_feature (11)..(11): n is a, c, g, or t
  misc_feature (45)..(45): n is a, c, g, or t
  misc_feature (50)..(50): n is a, c, g, or t
  misc_feature (61)..(61): n is a, c, g, or t
  misc_feature (146)..(146): n is a, c, g, or t
  misc_feature (153)..(153): n is a, c, g, or t
gggactattancctctctaaagctgtgcaagtatctaacgtggtnaccgnaatggctgttnaggtcttcctgaagcagtcaggctgaaagccctggaaaggcatcaggaagaggcccagctcccaggatcgtgtgtatgctctccnagcaganagctcttcaagggtgatcttgtttctcaatgtcactcattcccctctctcttaacatcaagcttgtttgtccagtagagcctttggagatttaggaccataatgaggtctcatgttctctgctcccacacctaagccaagacctttgggtcccagctcctccccttccactcagcactatccaggcaggaggaccaaaagggactcagtgtggtctacttactctggggccctagaatccctgcccccccgccacccttcatgtttgcttcagcagctggtagcttttgatgagacagaataaagttttatttttatattaagctactttgcctcagtggttgcacagtaaggggtagagggtagatgaggacaagaacaccctgagaaagtattttacagcacaagctttatgaggaataggagaacacatttttttcacattatactaagtccagcagagcccaggctctggggctgttgctcttaatcctcagtggaggcttcaggctttaccacttagaacgttctccagggctctggttacctgatcagcactgaagttgttcaaagggacattcgtctcttggccaaatgctgaagagagagagggaggtgtctttaactattctgcaccctggaggctaccaaagtaaaataaaagatctttgtctttaaa

SEQ ID NO: 169441 - DNA, 837 bp, Homo Sapiens; identical to SEQ ID NO: 2966
  misc_feature (594)..(681): n is a, c, g, or t
  misc_feature (686)..(713): n is a, c, g, or t
  misc_feature (724)..(738): n is a, c, g, or t

SEQ ID NO: 169442 - DNA, 436 bp, Homo Sapiens
cagcgggtgattaccggctacggcaggcagttgaactactgcgtaaccgatggtgatgcacacctagccagccatccaaaagagctgatggatttcgccccaggcaagcaacgcgttgctgatcaatacttcaagcagtttgttcatcgtgaacttttgtagcggactgttgcttttgccttcgggcttttgattttcatctattcatccatgccgagctgaaaagcgatctttcttgtggtctattgtactcagccatcaatgattgtcaatgcaatttacactgattgatttttcatttcatcaagcccggctttcagcatgccgagcgggtcttcgctttcaccagatacggccttcttcaatgatagcccgagcatctttctgtttcgcttcgatctgatcgaaaccctcgtagtcatcaaactgtttgcag

SEQ ID NO: 169443 - DNA, 257 bp, Homo Sapiens
cgccggtggactcgtcgctgctggtctcgctgccggccatcgaggcgatccatgtggactggcgttcgggcgttcagctacgcagccagcgcgtcagcgccgagcaggcgcgtcatctggatctgaccccgaccagcatcactgccttcatgctcggcctgaactcgcgcattgccacgttttcggtgcagcgcaggatcaacgagtatccagacgaggcaatgctggcgatcctgccccgcgtgggatcctctaga

SEQ ID NO: 169444 - DNA, 184 bp, Homo Sapiens
cggtctctcggttccaggcgttcgagtatttcctccagcagatactccgccacccggcggttgttggcgtggtcgacggcgggggcgcttgactcctcgatacccatcagggccagccgtactccggcgggccagcctgagttcggtgaacagttgttcgcctcggcgcgggggatcactctag

SEQ ID NO: 169445 - DNA, 550 bp, Homo Sapiens
aagcttgattgccctaaaatgtaagcaaagtagtcattaaaaatacaccctctacggtgggctttatactgcatacaaatttactcatgagccttcctttgaggaaggatgtggatctccaaataaagatttagtgtttattttgagctctgcatcttaacaagatgatctgaacacctctcctttgtatcaataaatagccctgttattctgaagtgagaggaccaagtatagtaaaatgctgacatctaaaactaaataaatagaaaacaccaggccagaactatagtcatactcacacaaagggagaaatttaaactcgaaccaagcaaaaggcttcacggaaatagcatggaaaaacaatgcttccagtggccacttcctaaggaggaacaaccccgtctgatctcagaattggcaccacgtgagcttgctaagtgataatatctgtttctactacggatttaggcaacaggacctgtacattgtcacattgcattatttttcttcaagcgttaataaaagttttaaataaatggcaatcaagctt

SEQ ID NO: 169446 - DNA, 529 bp, Homo Sapiens
gaggtcgtctagaggatcccaaccgtcagcactcctggctttcatgcggtggaggggaacttgtcttgtttgcacctacaccttgggcttccgcaatgaattccagaatctactcctggccatcatgctctcggccactttaaccattcccatctggcagtggttcttgacccggttgggcaagaagacagctgtatatgttgggatctcatcagcagtgccatttctcatctgggtggccctcatggagagtaacctcatcattacatatgcggtagctgtggcagctggcatcagtgtggcagctgccttcttactaccctggtccatgctgcctgatgtcattgacgacttccatctgaagcagccccacttccatggaaccgagcccatcttcttctccttctatgtcttcttcaccaagtttgcctctggagtgtcactgggcatttctaccctcagtctggactttgcagggtaccagacccgtggctgctcgcagccggaacgtgtcaagtttacactgaac

SEQ ID NO: 169447 - DNA, 343 bp, Homo Sapiens
  misc_feature (277)..(277): n is a, c, g, or t
agggaagtatcctgcccgcgctgtgtgtctgagtccctcgctctcaaagtcgtgggtcatccatgacgaaggacagcatttgtgcagcaatgggtccctcggggatcactctccgactgaggaggcctgctcacccttccccggctccatctcagcagggggcctggtgctgctgcgcttctccggacctgtgcgaacagagacaccgcctggccagggtgtgtgtgctgcgtgtcctcgtgggagcttgtccccctccccggctccgaagctgganatggaggaccacttggtctctggctctgagcactggtccgaagaagtggagaagctggtttgggcg

SEQ ID NO: 169448 - DNA, 527 bp, Homo Sapiens
gccgcctactactactaaattcgcggccgcgtcgactggtcctccataccagcttcgaagccacggagggggacagctcccacgaggaccgcagcacccccctggccaggcggtgtctctgttcgcacaggtccggagaagcgcagcagcaccaggccccctgctgagatggagccggggaagggtgagcaggcctcctcgtcggagagtgaccccgagggacccattgctgcacaaatgctgtccttcgtcatggatgaccccgactttgagagcgagggatcagacacacagcgcagggcggatgactttcccgtgcgagatgacccctccgatgtgactgacgaggatgagggccctgccgagccgcccccaccccccaagctccctctccccgccttcagactgaagaatgactcggacctcttcgggctggggctggaggaggccggacccaaggagagcagtgaggaaggtaaggagggcaaaacccccaaaaagcacaagaagaagaagaagaaaaaagg

SEQ ID NO: 169449 - DNA, 904 bp, Homo Sapiens
  misc_feature (133)..(153): n is a, c, g, or t
gcacatatggtcacctactgtgtgcctggcactcatgtcacaaagataagttcctgattcggtacacttactgagcacctgctgtgtgcagggagctgagctatgggatgggaatgggagtaaacaaggtacnnnnnnnnnnnnnnnnnnnnncctcactgctagacggtgtgggaacttctcactcattggcttctttcccacacacctgaagagcactgactgtgtgccgggcactagtgatacaaaagagtgtgacagttgttcagtctgcattttcgatcatgggctacatgccgagtgctggggcacagagatgaacaagatcggttccttcacttcttcatgccacaagtgtttattgagcacctgtgtgccaggcctcacagactcccagttgggttgaagaatggttgactgagtttgattcttcctgtaccctcggtcgtctgagctgtgtgcagacaacatccccccaccacccaagagggagggtagctcttccgccaccagggcaagcacaggtcctggtggccccacgccacatgttagcccccctggagggggcgccagttggagacgggggctgggtgtccctggcccactcccggtcccctgtgctttacctccttgcccttgtgtctcaggtgtggtccctgcctgcttgatgaagttgctctgttcaagcctttggtgggatcatgtgtttgggggcttttaggggacccagctgcactggggcactgcccgtggcctgggtaggacatttcccagcaagggctggaggagttgccgtgccttcagcctgaatcgaatgtcagaaccagccagcggtgcttcaccctcttggggataacttgcttagttttttaataaatgttcctggttggttttcaacagaata

SEQ ID NO: 169450 - DNA, 442 bp, Homo Sapiens
  misc_feature (15)..(15): n is a, c, g, or t
  misc_feature (28)..(28): n is a, c, g, or t
aacctgtgagctaancccctttagggancccttgccccccttggagaacccttgccccccagtgcctctgctcgtgggtcccctggaaacggccttgaagccaaccttctttggaggagcaacagcagcagccttggccgacgcgtccaactcccaaggctgccgtggagggcaggggggtggtgcttgcctggatgtggccccgagtgcctcccctccctccctctgtgggggagtctcccgcctgaacctgaagatggagcagggcccccccttcgccctggagcctcttcctgtgcctggctcaagctggctgcctgtcagtcttggggaatctggcccaggtctcctcagcctctgccccagttctgggagaagtttctactggtgtatattttttactggaaatgagccttttaggaatgaatgtagactggtttgt

SEQ ID NO: 169451 - DNA, 985 bp, Homo Sapiens
atctagaggatcccaacgtcgacacctcctgggctggtcgggccagtaaaaatagctgcctgacatgtttatatattatcatggtcagtagttcaatgaaatttgtacatttttggtaacattggtatacatgatgcccctgcagttccttttctgtttggtagtttgtgactctaagatttccactgttatgtgtgttaatttatgaaaataaatttttttgaaaggtttaaacgctttattgtgcccaaaaaaaggcccatggaatgaagggaagagccgcgcagccctgagcccggagcgattgtttgtcgcgcacccaaaggcaaggagggtggggagccgggaaaggatgcgcggcctccgcgtccccgcgcgcctgggcccggccaaccagcgaccccgcccggtgggcaggcgcggcctcggccatcggcgcctaggggccagtaaccatgacgacggccgttgccaaggccgagagccaatagaggcgtcgccggggctgtttcaaaaacctaaagcaaacaacgaaaaacgctacatcgttgggggaggggaaagactgagaggacccggggcccctccctgaggctcagaccaggcctcgcggccccggccggcgtgagccgtacaaaatctacgtcacttggggtagaaaaacaaaaacaccgaaaagcccacgccggccgctctgaccggccgacacgctcacttgcggcccttgggcactttggggacgctgggcttggccgccttcttcaccttcttgcccccggcggccgccgtcttcttggccttgccgcctttgtccttcttggcgccagcgcccttcttgtgcgagcgctgctccggcttctggcccctggcgggcttcttgtccgcgcgccgggagccggccgcgcccggggctgccttcttcgctttgtgcgcggtgggggccggggcggtggcggccgccggggctccgcgccgctccccgccg

SEQ ID NO: 169452 - DNA, 435 bp, Homo Sapiens
aacgtcagcactcctgcatctgggcttgggttggaaactgaccagcaagctggagctgccaccacagagaaacatcaaagcaaaagggttccaggaccagagattaggtaactagctacaggccagaggaatgcttccctctctagatcaacaagcccctcctttcactctgaaaaaaagtaagtacctgagggtccgtccttgcaaagcctccgctcttcatcgccatccctgaacaccgtgttccttcctccttgtgctcctttggtcttttcatgcatccggtgtctgtcatcaggctgccaccggtatcgaagtcaggacagttcactgcgtaagaagtcaagcatcatgggatgttggctgtggcgtctggtcattgtgccagcctcaccacagacatgtgaccactgtcccaaggagtgctgacggttg

SEQ ID NO: 169453 - DNA, 238 bp, Homo Sapiens
tggtcgtggctctcacttgctcctgctccttctgctgcttcttctccagctttcgctccttcatgctgcgcagcctggccttgccgatgcccccagcttggcggatggactctagcagagtggcccagccaccggaggggtcgaccacttccctgggagctcctggactgaaggagacgcgctgctgctgctgtcgtcctgcctggcgccttggcctacagggccgcggttgagggtg

SEQ ID NO: 169454 - DNA, 330 bp, Homo Sapiens
agagccaacgtgtcatggagccccctaggattcacaatcgtcactgtcctcatctacctgtggctgctgcggtggcggcagaggagggatggagtctgacacgcgggcaaaggctcctccgggcccctcaccagccccaggtcctttcccagagatgcccttgtgcctcatgaccagcttgttgaagagatccgacatcaagtgcccaccttggctcatggctctcacttgctcctgctccttctgcttcttcttctccagctttcgctccttcatgctgcgcagctcgccctaactcaggggcgagctgccatgtcgctcagcaaggag

SEQ ID NO: 169455 - DNA, 1014 bp, Homo Sapiens
ctgatgggaataccggggctcggccagccccactgcatcccctcacatgatgatacgaggctctggcactgactcgcccatagacttgtggggcagcacgctggctccgttgaggtagagctcatcattaactatgacgtcctcacccagcaccggttcgtggagaagccacaggtgtttgtgtccaataagatcaacgcaggcatgtacatcctgagccctgcagtgctgcggcgcatccagctgcagcctacgtccattgagaaggaggtcttccccattatggccaaggaggggcagctatatgccatggagttacagggcttctggatggacattgggcagcccaaggacttcctcactggcatgtgcctcttcctgcagtcactgaggcagaagcagcctgagcggctgtgctcaggccctggcattgtgggcaacgtgctggtggacccaagtgcccgcatcggccagaactgcagcattggccccaatgtgagcctgggacctggcgtggtggtcgaagatggtgtgtgtatccggcggtgcacggtgctgcgggatgcccggatccgttcccattcctggcttgagtcctgcattgtgggctggcgctgccgcgtgggtcagtgggtacgcatggagaacgtgacagtgctgggtgaggacgtcatagttaatgatgagctctacctcaacggagccagcgtgctgccccacaagtctattggcgagtcagtgccagagcctcgtatcatcatgtgaggggatgcagtggggctggccgagccccggttttcccatcagcaaggggagtgctggcctgacacatcagaagaccctggacttgtcattatttgtctggggggcactgggtgaagctgaagctgttggacacctgcccttctcatgtggacatcatctggcaggatccctgctgggcacaccccacaaaccccactccctcaagaagggccagggccagggctgtatggaataataatttaatgctaa

SEQ ID NO: 169456 - DNA, 526 bp, Homo Sapiens
ttatacaggcaatgcattacgtgagctgcgtcccggagcccacggtggtcatggctgccagagcgctctgcatgctggggctggtcctggccttgctgtcctccagctctgctgaggagtacgtgggcctgtctgcaaaccagtgtgccgtgccagccaaggacagggtggactgcggctacccccatgtcacccccaaggagtgcaacaaccggggctgctgctttgactccaggatccctggagtgccttggtgtttcaagcccctgcaggaagcagaatgcaccttctgaggcacctccagctgcccccggccgggggatgcgaggctcggagcacccttgcccggctgtgattgctgccaggcactgttcatctcagcttttctgtccctttgctcccggcaagcgcttctgctgaaagttcatatctggagcctgatgtcttaacgaataaaggtcccatgctccacccgaggacagttcttcgtgcccgcggactcttcccgaacgcccacaagcgctgt

SEQ ID NO: 169457 - DNA, 433 bp, Homo Sapiens
ggccttgctgtcctccagctctgctgaggagtacgtgggcctgtcccagcaagggctctggcagctgacagggctttgtctgggacagctgcaaaccagtgtgccgtgccagccaaggacagggtggactgcggctacccccatgtcacccccaaggagtgcaacaaccggggctgctgctttgactccaggatccctggagtgccttggtgtttcaagcccctgcaggaagcagaatgcaccttctgaggcacctccagctgcccccggccgggggatgcgaggctcggagcacccttgcccggctgtgattgctgccaggcactgttcatctcagcttttctgtccctttgctcccggcaagcgcttctgctgaaagttcatatctggagcctgatgtcttaacgaataaaggtcccatgctccaccccag

SEQ ID NO: 169458 - DNA, 947 bp, Homo Sapiens
  misc_feature (727)..(727): n is a, c, g, or t
  misc_feature (746)..(746): n is a, c, g, or t
  misc_feature (843)..(843): n is a, c, g, or t
  misc_feature (866)..(866): n is a, c, g, or t
  misc_feature (869)..(869): n is a, c, g, or t
caagatgggcgtcagccgctcagcggccacagtgctggcctatgccatgaagcagtacgaatgcagcctggagcaggccctgcgccacgtgcaggagctccggcccatcgcccgccccaaccctggcttcctgcgccagctgcagatctaccagggcatcctgacggccagccgccagagccatgtctgggagcagaaagtgggtggggtctccccagaggagcacccagcccctgaagtctctacaccattcccacctcttccgccagaacctgagggtggtggggaggagaaggttgtaggcatggaagagagccaggcagccccgaaagaagagcctgggccacggccacgtataaacctccgaggggtcatgaggtccatcagtcttctggagccctccttggagctggagagcacctcagagaccagtgacatgccagaggtcttctcttcccacgagtcttcacatgaagagcctctgcagcccttcccacagcttgcaaggaccaagggaggccagcaggtggacagggggcctcagcctgccctgaagtcccgccagtcagtggttaccctccagggcagtgccgtggtggccaaccggacccaggccttccaggagcaggagcaggggcaggggcaggggcagggagagccctgcatttcctctacgcccaggttcccggaaggtggtgagacagggccagcgtgcatgacagtgganaaggagggcgaagcctganccctcacacatgcccacgctcccctgacactgaagaggatccacaactccttggagaaacaccctcacgtctggtggcgcacacatttcctctcagnttccgccccatacccgtcactanagnctcaacctcccacccctgttactacgggcttaactcccacccctgttactacagccttcactcctaaaggcctaaagt

SEQ ID NO: 169459 - DNA, 532 bp, Homo Sapiens
gatctagaggatccaaccgtcagcactcctggacagaccagcaacgcccacgcttcctgggcttgcctcgaggatccccggggacgggacgggccggggcttggaggggggtcggctgccacaggctcacatcacggcctccatatgcaggatcctcagggcctcggaaaatctgcgcgctggggtcccatctggccgtaacatgcccaccaggaaggcccggtggaagcagcacagccgcgtgctcttggcacaggagagcgtactcaggcaggttccggagggccgtctgcaccacctcaaagtcctggctgcccaggcagtacatgaacgtgggcaggaaagcggctgcaatgctggggctgttctgcatggagcgcagggccaggctgaaggcgaggttgcggcaacactcctcggccgagctcatcagccgctgcaggttggtcgagaagaagctcaggatctcgggtctccgccgggacatctcgtctatgtcactcagaacctccagcagatcctccaccgtttg

SEQ ID NO: 169460 - DNA, 384 bp, Homo Sapiens
  misc_feature (351)..(351): n is a, c, g, or t
  misc_feature (370)..(370): n is a, c, g, or t
ctgaaatccctccttgcagggctcagctgcccagcaggaacgacaggaccaaccgaggcctggacgaagagggcgaggaggagagctcagccggctccttgcccctggtcagcgtctccctgttcacccctctgaccgcggccgagatggccccctacatgaaacggctttcccggggccaaacggtggagggtgagtcaggccctgcttcacccacgccagatctgctggaggttctgagtgacatagacgagatgtcccggcggagacccgagatcctgagcttcttcttcgaccaacctgcagcggctgatgagcttcggccgagggagtgtttgccgcaaccttggncttttagcctgggcccttncggttccattgcag

SEQ ID NO: 169461 - DNA, 806 bp, Homo Sapiens
gggctctttgtcagctggagttgcgcgggctgacgcgccactatgtagcgggtttcgggcgggccacgcgtgcgggacaggaacccaaccccagccgaccttgagctccaggagttcgtctcttacgtctgcggaagtgcagctgcctcagttcttagcgcaggttgacaactacaggcacaagccattgaagctggaatgtcctgttgctggtatttcaattgacttaagccaactatcccttcagttacaataggaaagtgcctctaataaggccaaatatgcgtactaacttgtagcaaccacgtgtccgtgcagtgccacaggagctagagcagtgacaatgctggtggcaacagggcagtgtagcaggtgcttcatgttcaccttttcaaccttttcatttaattgtcacaactcggaggtggattctgttagggacaggctgccccaggaccactccgcccccgctaactcaatgcagctgacccttaccctgaatactctgcagctgcattcctgaaccgttatctaggcgctatagcaaggtcaccagacttgctacaccgaagccctctgggtggcacgggggaggtcatgagaaacgtggattacacccccttgtaaattcctattttcacaagataatatattgtaagccggtcatgagattatatgtggtaaagttaattgactaacaaccccagggtctctctcccccatataaacccctcattttgtaagctcagggctgccacctccgactggtggagaagcctggcaggttaataaacttacttggcctg

SEQ ID NO: 169462 - DNA, 327 bp, Homo Sapiens
gccaatggggacaacttacagctcctgcagctccagctctcagaggccaagcacagacaagctgcccatttaaaaaagtaaagtctgagggttgggggggttttaacaggagcttctgaaacaagaatgtgcataccacacctatgacccaaggtcctcctgatgaaatgcggacgagagacagacacattccacctcagaggagccgacagctacagaaatctccatctcgactttggacagggcgaggtaacgacagagtgcagaagcaataccagcaagaatcgactaagggcatactttccagaggtctactgatgtccactc

SEQ ID NO: 169463 - DNA, 778 bp, Homo Sapiens
tataagcagaaaaaaactttatttctatcaaatggaaaagtatgaaccttcaagcaagataatcaacataatcaataatacaattaacagttaggatagcatatacagatcagactggaggtttagatacttggaagcacatacaccaaaattaagagggccagcaactgtcccaccgaggaaaagcactctgactcatcataaacacacgacttctgggaaacttgagctgacatttcacaggacagtaaaccaaagagacaggttgtcattgggttatagaactgatctgagcttgagagggatcacagtgaaatgccattgtaactcaacaatttccccagagatctgttcatctcaaaaacaggaatatataaaaatcagtagtacaaattctcataaaactagaaaagccctttaagccctaatatccttggagcttacataaagactgagttttcatttttcttccctttagtcttccctaaattaaatacaaaatagtttgttatttaggacatttctgactatatagccaaagctttaaaatgaagacaagaataatttttataaaatgaattagacacatatcaaccctagggggaatcttcaaggtggtctgctcctttgaaaagctttaaacaggaaagcttttatttaaagaatgacactgtgcttctgggaataacctaattattaccagaggaaggaattcatatctatgccatacaagagctttcatcctttagaaatgttttactgcagtatctctctctct

SEQ ID NO: 169464 - DNA, 940 bp, Homo Sapiens
  misc_feature (850)..(868): n is a, c, g, or t
tgtggcagtacctgcaggctgagtacttccaggatgacatgccagaatctgaggaatgtgccagcgcccatgccccagtgccccaatcctctacacccttttcctcacccaagtagatccaacctccagcccaatatagggtgaacctcttgataagctctctgcctcctcctccctttctcccttgtggggaatgtttggaggaatcactggcatttgatggggaataacataagcctgggctctgagcctcagctgagccctggaagattctccccatggggcagagtggtctccttacgtgctcacacccagtcagcttgggtccctatctctggccagagtttggcaggactgccattatctggggtgtggcctctgccagcaagagaagtgtcctgggtgtttttaatcatgtttgaatgttaggggttggatcctagagtagatgcctgaggccacatctgaacagacctgtcagccaggcctgccaggtcttcacgttgaggattcaactggccaatcacaggacaggtgtcctggcctttcttcctgaggtctctaggggaggggcatgggtaagggtgtttcctcagcaccctcctggggtggggattatgtctgctgtcatgtctgggtctttagggtaggacaggctgtggtatgagaggcaggagtctccacaaggcttcatgtggccccttatagggcaggccctgccctctgggaaggtcccttcatgctggaggcacacagctttaaggaagtaggttgaagtaggactccttcgtcctctcactggctttggctccctcaataaactgtgtggggaacctggctcagtgtctgnnnnnnnnnnnnnnnnnnngtttttcctatctgagtcttcatctcctcacttcaggaaaccacagttcagcaaagtcttcagatgcgatcc

SEQ ID NO: 169465 - DNA, 153 bp, Homo Sapiens
cgtgtgtactgatctagaggatcccagcagcatggaaatggactaatacaaacacttactattagaagttcttctgtacgttgctctaaaatctttttcactcttattttgtaacactgataattctgccaccacaataaacagaacaagatt

SEQ ID NO: 169466 - DNA, 171 bp, Homo Sapiens
cagcacctcctgtgcttgctgatactggtctttaatattctgataggtgaatttttctaatggaatgaacccatgcatatatagtatttatatgaatattttagcagtgtaatatgttgaattctagttctctgcattaccattattacgttaaagtattttttaaagctt

SEQ ID NO: 169467 - DNA, 462 bp, Homo Sapiens
ggatttccacatggtgactgagagagcagaacaggggaggcagtggggcaaaggcagctcccacctggccccaggaaatgcagtttctgggttgggatggagtgtaggggctgcgtcaatgcttttacggaattccagcttttacggaaacatccatactccaatcacgctgccaggtccctaataattatcatgagtattaacacgacttttaaaatacgcacagaaaatctttactgggaaatcttgcctaaggagtgcgggagggacagcgaaggaaagtatgagctggacagatcctgctccgaagctgcgcccttagggaaggtcctctaaaagcctggtcataggatgaggcaagaatgggggccattcgggattccccaaccctgctttggttggaatgatggggctctgcgctgccaccagactttctggcaaggtgagcgcaaggaggtgctg

SEQ ID NO: 169468 - DNA, 1065 bp, Homo Sapiens
gggtctacttagtgggcgccaccaacgccggcaaatccactctctttaacacgctcctggagtccgattactgcactgccaagggctccgaggccatcgacagagccaccatctccccttggccaggtactacattaaaccttctgaagtttcctatttgcaacccaactccttacagaatgtttaaaaggcatcaaagacttaaaaaagattcaactcaagctgaagaagatcttagtgagcaagaacaaaatcagcttaatgtcctcaaaaagcatggttatgtcgtaggaagagttggaaggacattcttgtattcagaagaacagaaggataacattccctttgagtttgatgctgattcacttgcctttgacatggaaaatgaccctgttatgggtacacacaaatccaccaaacaagtagaattgactgcacaagatgtgaaagatgcccactggttttatgacacccctggaattacaaaagaaaattgtattttaaatcttctaacagaaaaagaagtaaatattgttttgccaacacagtccattgttccaagaacttttgtgcttaaaccaggaatggttctggtttttggggtgctataggcccgcatagaatttcctgcagattccaatgggtggaaaagaacgaatggcaggatttcctcctcttgttgctgaagacattatgttaaaagaaggactgggggcatctgaagcagtggccgacatcaagttttcctctgcaggttgggtttcagtaacacctaattttaaggacagactgcatctccgaggctatacacctgaaggaacagttttgaccgtccggccccctctcttgccatatattgttaacatcaaaggacagcgcatcaagaaaagtgtggcctataaaaccaagaagcctccttcccttatgtacaacgtgaggaagaagaaaggaaagataaatgtatgagaccgaccttgttcactccagatattaactgtattgaacacaacaaaatacattgaatttgtattaaacatataacgcataaataaagctcccattctt

SEQ ID NO: 169469 - DNA, 614 bp, Homo Sapiens
  misc_feature (41)..(50): n is a, c, g, or t
aaagcaggctggtaccgctccggaattcccgggatatcgcnnnnnnnnnnccttctgaagtgtttcacgagagcccgggagctgctgccctgcggccccgtctgtggctttcagcctctgggtctgagtcatggccgggtgggcggcacagccttctccactggccggagtcagtgccaggtccttgccctttgtggaaagtcacaggtcacacgaggggccccgtgtcctgcctgtctgaagccaatgctgtctggttgcgccatttttgtgcttttatgtttaattttatgagggccacgggtctgtgttcgactcagcctcagggacgactctgacctcttggccacagaggactcacttgcccacaccgagggcgaccccgtcacagcctcaagtcactcccaagccccctccttgtctgtgcatccgggggcagctctggagggggtttgctggggaactggcgccatcgccgggactccagaaccgcagaagcctccccagctcacccctggaggacggccggctctctatagcaccagggctcacgtgggaacccccctcccacccaccgccacaataaagatcgcccccacctccaccctcgaaaa

SEQ ID NO: 169470 - DNA, 863 bp, Homo Sapiens
  misc_feature (398)..(432): n is a, c, g, or t
  misc_feature (451)..(468): n is a, c, g, or t
ggcaaggggatgtaaaaagaatgccctgtttttatttggctcatgagctgcatctgaatcttctaaatcacccatggctggtccaggatacagaggctgaaactctgactggttttttgaatggcattgagtggattcttgaagaagtggaatctaagcgtgcaagatgattctcttttcagatcttgggaactgaaaccatttgaaatttattactaaggtcgtgatgtgaatatttgctcagtcagcccaccttgtcctgcctttttgcagataggctttcatttggacagctataactgctgtgtctctcatattatttatactctttaccataaatcaattacaagaaaagagtttcagtcctagtatttagccccaaaatgaacctttaaacnnnnnnnnnnnnnnnnnnnnnnnnnnnnnnnnnnnaaaaatattaaattctggnnnnnnnnnnnnnnnnnnccccatacacaaaaaacacccaccacccccacaggaacaagtcatattccttggtcggcccagcctccggccctccaaaaaaacttccctaaacccatttcctttggggcccccgggccccaattaggggaattggacacttgggtctttaatttgggtttcccaaaggggaaaccccggaggacatggaaaataaggggtgtgtggaaattctccccccccacaataaaataagaagcgccccggcgccgggcacaacccggaatgtgtttttcttgacaacccatatctccccgaatgagagagttctctccaaggggtccctattattcgtggggactcttatttacaaccagcgccgcctcgcccacgagcgagaggccttctacctatcc

SEQ ID NO: 169471 - DNA, 322 bp, Homo Sapiens
gtccagatgctccagttcattgaactcctgcatctggacctgattcacatccaagctctgcatcttctcatcaagagagcccacatccttgagcagatggggcaactgctgggtaaccagctctttgaactcgttgacgctgaggctatccttccggccctcctgccttgcaaaggtgaagaaggtggtgaccacggtctcaatggactcctctagctctgtcagtggttctgctgccattaggaccctgaggccaaagctgatgtcctcaaggggctagctgacctttgtcagggctgacccggcaaggagatggggtaga

SEQ ID NO: 169472 - DNA, 1253 bp, Homo Sapiens
  misc_feature (1097)..(1097): n is a, c, g, or t
  misc_feature (1184)..(1184): n is a, c, g, or t
gggaggcagcagtggatggtgcaggggaaagaggtgggaaggaggtcctgggagggacactggatgtcttaccccaagctgggccttgcagtacctgtggctggctgtgctggttgagcccgaatcgaccacggaaatttgacacctccgggcttggaagcagctctctcctccttccccgctgcttataaacctcagccctgaggctccagctcactctaccccatctccttgccgggtcagccctgacaaaggtcagctagccccttgaggacatcagctttggcctcagggtcctaatggcagcagaaccactgacagagctagaggagtccattgagaccgtggtcaccaccttcttcacctttgcaaggcaggagggccggaaggatagcctcagcgtcaacgagttcaaagagctggttacccagcagttgccccatctgctcaaggatgtgggctctcttgatgagaagatgaagagcttggatgtgaatcaggactcggagctcaagttcaatgagtactggagattgattggggagctggccaaggaaatcaggaagaagaaagacctgaagatcaggaagaagtaaagccgcctggctgagatggggtgggcagggcagagctgatcagggccgagcagaaccgcactcttcccaaataaagcttcctccttgaaaaaaaaagccaaaccgccccacgccccgccactccctctgcccagtcgatacatgtaaacccccccagggcttcccatgtccgggagcgggcgaaacacacagacccaggaccggggtaccccgcatccaataggcattcgtagcacggacatccacgacaaggccgcgggaaaacacaccgcgcactccctaggtttaatcgacgaggacacccacgagaccccgcacctcagaccaccgcagccactccgcgaaccccagagctggtgatacacaatggaatgaaacgacacgcaccatgcaccaaagacgactgagatcaattcgtcagctcccaccacctcccgatgactcatagtagcaactctagatgataccccggcaacagcacgcagaacgacactcccgtancggctcacacagaactctgctcagctcgacctgcgagccgctaagagatcagagatcaagagaagagaccacacgtaagacgggccnagcatcagctcatggacatacgatatattagtgctccaacttagcgctcgaggctgcagcaagcacaca

SEQ ID NO: 169473 - DNA, 724 bp, Homo Sapiens
ctcggtaccgagtgccatggtcttccagatgtttgaacagaatcttcaagttgctgctcagataagtgaagatttgaaaacaaaggtactagttttatgtcttcagcagatgaattctttcctaagcagatataaagatgaagcgcagctgtataaagaagagcacctgaggaatcggcagcaccctcactgctacgttcagtacatgatcgccatcatcaacaactgccagaccttcaaggaatccatagtcagtttaaaaagaaagtatttaaagaatgaagtggaagagggtgtgtctccgagccagcccagcatggacgggattttagacgccatcgcgaaggagggctgcagcggtttgctggaggaggtcttcctggacctggagcaacatctgaatgaattgatgacgaagaagtggctattagggtcaaacgctgtagacattatctgtgtcaccgtggaagactatttcaacgattttgccaaaattaaaaagccgtataagaagaggatgacggccgaggcgcaccggcgcgtggtggtggagtacctgcgggcggtcatgcagaagcgcatttccttccggagcccggaggagcgcaaggagggtgccgagaagatggttagggaggcagagcagctgcgcttcctgttccggaagctggcgtccgtttcggggaagacaatgcaatcgtatcctctaggtacctcacatccg

SEQ ID NO: 169474 - DNA, 954 bp, Homo Sapiens
aagaagtggctattagggtcaaacgctgtagacattatctgtgtcaccgtggaagactatttcaacgatttgccaaaattaaaaagccgtataagaagaggatgacggccgaggcgcaccggcgcgtggtggtggagtacctgcgggcggtcatgcagaagcgcatttccttccggagcccggaggagcgcaaggagggtgccgagaagatggttagggaggcagagcagctgcgcttcctgttccggaagctggcgtccggtttcggggaagacgtggacggatactgcgacaccatcgtggctgtggccgaagtgatcaagctgacagacccttctctgctctacctggaggtctccactctggtcagcaagtatccagacatcagggatgaccacatcggtgcgctgctggctgtgcgtggggacgccagccgtgacatgaagcagaccatcatggagaccctggagcaggcccaagcacaggccagccccagctacgtgcccctcttcaagaacattgtggtgcccagcctgaacgtggccaagctgctcaagtagcctccgccggcctgccctgctcgcccctccacagcctcggtccctgcctttagaaacgcgggacagctgattgctctccttggccacacgtgctccttttagctgcacggcctgtctttaggtgccagtgtgatgcaccgggtgtgcgtcgagtgagcgtcccgaggccacgtgcggaggcccctcactgtgctgtcaaaggcctgtgggtgcagggctctgccgcacagcctctcttgggtgcttgtttgttgcagtggttgaaagtgtgtggggcacagaggacgtgcacctccctgccctcctcctccctgggccttcaccgcaccccatctgcttaagtgctcggaaccccgtcacctaattaaagtttctcggcttcctcagagaaaaa

SEQ ID NO: 169475 - DNA, 249 bp, Homo Sapiens
tatacggctgcgagaagacgacagaagggacggggaagccgagctccagagcaacgaccagggccgaggaggtgcctggagtgcccaccctgggagacagaccccacctccttgggtagtgagcagtgagcagaaagctgtgaacaggctgggctgctggaggtggggcgaggcaggccgactgtactaaagtaacgcaataaacgcattatcagccaaagctggaatggccccagcagaaaacctcag

SEQ ID NO: 169476 - DNA, 313 bp, Homo Sapiens
cacgtgagagggttccagaagcattgccttttgcctcgtctaataggatccttaggacactgtgggctttaggaatgactatagatgctcacacgtgtttaaagtgacatttggagatgctctcagtcctgtggcatctggcacgaagtctccaagaagccactttgcctcttctcccttcaagcacaagctttactgcaaaagggccagtcgcgtttctatttctctcgatcccaggcttctgcggaccgacgatacgtttaaatgttgttctagtaaatattcttgaatgtattaaaatggctgaaacaac

SEQ ID NO: 169477 - DNA, 1145 bp, Homo Sapiens
tgaggatcccgtggcgctcctggacatgaatcctccatggagggcctgctggctgaacatgctgaatcatctccagcaaaacccagccccaactttctctctgatgctccagcatgggggcaggggcatggtggcccatgtagtctcctgggcctcaccatcccagaagaggagtgggagccagctcagagaaggaactgaacccaggagatccatccacctattagccctgggcctggacctccctgcgatttcccactcctttcttagtcttcttccagaaacagagaaggggatgtgtgcctgggagaggctctgtctccttcctgctgccaggacctgtgcctagacttagcatgcccttcactgcagtgtcaggcctttagatgggacccagcgaaaatgtggcccttctgagtcacatcaccgacactgagcagtggaaaggggctatatgtgtatgaatagaccacattgaaggagcacaatgccctcctgtgttgatgccacttcccagggtggagacagtggaaaagaaccgaggacaggaaaggattgggtaggtgaaggggtcaggggactggtagtcacccaatcttggagaggtgcaaaaagcactgggggctacccgttagctgcatctgccctggctgtttgcccgttcatgtcacaaactgccactactatgtacctgcagtggggttgcagagatgggggagactcaagtcttactccccaggagctcccagggcccaaggaggagaatgctgcctcctttcagtctggtctacacccactttctggtagcctctctgcttcctgtaattctggctgtttttccagactcagctcaaatagtgcccctccttaagcccatccctcgcccccagcctgaggtgatctttccctcctctgaactattagagcagttactgtctgttcagttcgtttggcaggcacacacagtggcataaattctattgttttgaactctgatttaaaattaaattgcagctgggcgtggtggctcatgcttgtaatcccaacacttagggagtcaggagaatcacttgagctcaggagttctagaccaatctgggcaacagagagaccccatctcttttaaataaaaagttaaattgctt

SEQ ID NO: 169478 - DNA, 609 bp, Homo Sapiens
  misc_feature (545)..(545): n is a, c, g, or t
  misc_feature (557)..(557): n is a, c, g, or t
  misc_feature (577)..(577): n is a, c, g, or t
aaaagaaaacaaagttcattgatgtcgaaggatatatacagtgttagaaattaggactgtttagaaaaacaggaatacaatggttgtttttatcatagtgtacacatttagcttgtggtaaatgactcacaaaactgattttaaaatcaagttaatgtgaattttgaaaattactacttaatcctaattcacaataacaatggcattaaggtttgacttgagttggttcttagtattatttatggtaaataggctcttaccacttgcaaataactgcacacatcattaatgactgacttcccagtaaggctctctaaggggtaagtaggaggatccacaggatttgagatgctaaggccccagagatcgtttgatccaaccctcttattttcagaggggaaaatggggcctagaagttacagagcatctagctggtgcgctggcacccctgggcctcacacagactcccgagtagctggggactacaggcacacagttcacttgaagcaggccctgttttgcatttcacgttggccaccttccantttaaacctttnttcatattgtggattgttcntaggttcacttagggttaaacttttcccaccc

SEQ ID NO: 169479 - DNA, 1175 bp, Homo Sapiens
  misc_feature (11)..(11): n is a, c, g, or t
  misc_feature (41)..(41): n is a, c, g, or t
  misc_feature (51)..(51): n is a, c, g, or t
  misc_feature (485)..(505): n is a, c, g, or t
  misc_feature (609)..(617): n is a, c, g, or t
  misc_feature (734)..(734): n is a, c, g, or t
  misc_feature (881)..(881): n is a, c, g, or t
  misc_feature (893)..(893): n is a, c, g, or t
  misc_feature (944)..(944): n is a, c, g, or t
  misc_feature (1041)..(1041): n is a, c, g, or t
  misc_feature (1043)..(1043): n is a, c, g, or t
  misc_feature (1073)..(1073): n is a, c, g, or t
agttacaagancatcctaagctggtgcgctgggcacccccnggccctcaanacagactccccgagtagctgggacctacaggcacacagtcactgaagcaggcccctgtttgcaattcacgttgcccacctcccaacttaaacattccttcatatgtgatgtccttagtcactaaggttaaactttcccacccagaaaaggcaacttagataaaatcttagagtactttcatactcttctaagtcctcttccagcctcactttgagtcctccttggggttgataggaattttctcttgctttctcaataaagtctctattcatctcatgtttaatttgtacgcatagaattgctgagaaataaaatgttctgttcaacttaaatatcaatgtcttaatacccgcacacaaatacatctgtaaacgaaatcatttctctaaaagggaacaaaatatcataaatatgttttacttacctcccacacnnnnnnnnnnnnnnnnnnnnnacccccgcccactcctgaaatctgccttttgcctttatccccgggtccgaaccgccatctgtacggaagccaagtgttatcaatataactcccccaatatgctnnnnnnnnnggtatataccccgcccacccacctcaagcaacgctaattaggctcccagccgctatttatattcccatagtaacacagcgccacgccgcgcccctacaagatctaacattgggacgntctggagacaaccattttggcgcgattacacagagagatacagcaacttcacttctcgccagcggcgccgctctttctctgtttctttcctccagacgccacctatcatatttacaccatgatcaacacagattgagaccgccctcntgttctcgcgcnctcaacccctaaaccacctccatgtgttgtgatgctccaaccgccccacanactggtgttctcctctatgacacgcttttgacggcgccggctcatctctgtctctcctcactctccgctatgatgattcaaggcggaaaacgatgtntngtatatcaccagctccgctctcctctcctntgtacgtcgccacactgcgtactgcgcgtgtttatagcagtaccatatcgacaccactccagcagtcttctcgacccacataccagagtatacactacctcg

SEQ ID NO: 169480 - DNA, 431 bp, Homo Sapiens
  misc_feature (21)..(21): n is a, c, g, or t
  misc_feature (39)..(39): n is a, c, g, or t
  misc_feature (64)..(64): n is a, c, g, or t
  misc_feature (73)..(73): n is a, c, g, or t
  misc_feature (81)..(81): n is a, c, g, or t
  misc_feature (133)..(133): n is a, c, g, or t
  misc_feature (240)..(240): n is a, c, g, or t
  misc_feature (263)..(263): n is a, c, g, or t
  misc_feature (420)..(420): n is a, c, g, or t
agctggttcccccagggctgnaaactcccccaggtgtanagctgctgtccctgccctgtcctgncccttgcanagtctccnatgtctgagcccccagtgcccttctgttcgggccctcctttggtgggaaagncagagccctgacccttgaatggttgtccttgactctgtgctgctgccttctgcagagaggcacctaagctgtttaaagagcccagtgattgtggctgctcctcctanaggtgggagggggcaagaggccnccttggtcagtgtccatgctttctgggcagggacttggttttttgttccaacagtggccttctccgggcttcatagttcttggtaatatgttgaagttaatttgaattgactgattttgttgaactgtgtgtttaagctgttgcattaaaaataatnggatctacatc

SEQ ID NO: 169481 - DNA, 847 bp, Homo Sapiens
gggtctctcttcctgtctttgtggctccggaaaggcgtttgggatgccaacgatgaggctgctgtcatttgtggtgttggctctatttgctgtcactcaagcagaggaaggagccaggcttttggcttccaaatcactgctgaacagatacgccgtggagggacgagacctgaccttgcagtacaacatctacaatgttggctcaagtgctgcattagacgtggaactatctgatgattccttccctccagaagactttggcattgtgtctggaatgctcaatgtcaaatgggaccggattgccccgtatcctcttggcacttggtgatgaagggtcggggggcacggagagccttgcctgcaaagcagcaggggtacttcaaataggctggatatgtgtggctgtcctcctgtcatctctctggataagatggagcaagagagattggctctaccagtgcacctggacagggaggaatcctggctcagcgggagtttgacaggcgattctcccctcatttttctggactgggcagcctttggggtcatgaccctttccctccatcggcatccccctgctattgtggtacttcagcaagaggacatatgaccctcccaaaacccaaaagaactgatttgggggttcccacaagccctcctctctcaagaaaatccaggctccctcctcccaagaaatcccggtggcttttccaaactccaaaaggggaatccttaaaatgccatttctcttctcccctttaaccccttgggcccccttttccccctggaatccttggcccttgtttccttcaaccattagtgtaaaaggagcacaccccttaggggc

SEQ ID NO: 169482 - DNA, 796 bp, Homo Sapiens
  misc_feature (30)..(30): n is a, c, g, or t
  misc_feature (199)..(199): n is a, c, g, or t
ggacctccctaagggcctgggtccttccanttatggctgaggagccaggggcaggatcccagggagaaaagtggcccaaagggctaagagagaagagagatttgcatttaaagatacccctttggagtctggaaaagcacctgggatttctggggagaggagcctggatttcttgggagaggagggctgtgggaagccnccaatcagttcttcttcgttttgggagtgtcatatttcctcttgctggagtaccacaatagcagggggatgccgatggagggaagggtcatgaccccaaaggctgcccagtccagaaaatgaggggagaatcgcctgtcaaactcccgctgagccaggattcctccctgtccaggtgcactggtagagccaatcacaacgggcccatcctcctgggccaggtaagtaattgttgccgaggtgaagttgaaataaccagccttgagagggcgcaggaccacagtgtgggagacattgctagcaggggcaatccggtcccatttgacattgagcattccagacacaatgccaaagtcttctggagggaaggaatcatcagatagttccacgtctaatgcagcacttgagccaacattgtagatgttgtactgcaaggtcaggtctcgtccctccacggcgtatctgttcagcagtgatttggaagccaaaagcctggctccttcctctgcttgagtgacagcaaatagagccaacaccacaaatgacagcagcctcatcgttggcatcccaaacgcctttccggagccacaaagacccc

SEQ ID NO: 169483 - DNA, 1118 bp, Homo Sapiens
ggggctctcttcctgtctttgtggctccggaaaggcgtttgggatgccaacgatgaggctgctgtcatttgtggtgttggctctatttgctgtcactcaagcagaggaaggagccaggcttttggcttccaaatcactgctgaacagatacgccgtggagggacgagacctgaccttgcagtacaacatctacaatgttggctcaagtgctgcattagacgtggaactatctgatgattccttccctccagaagactttggcattgtgtctggaatgctcaatgtcaaatgggaccggattgcccctgctagcaatgtctcccacactgtggtcctgcgccctctcaaggctggttatttcaacttcacctcggcaacaattacttacctggcccaggaggatgggcccgttgtgattggctctaccagtgcacctggacagggaggaatcctggctcagcgggagtttgacaggcgattctcccctcattttctggactgggcagcctttggggtcatgacccttccctccatcggcatccccctgctattgtggtactccagcaagaggaaatatgacactcccaaaacgaagaagaactgattggggcttccacagccctcctctcccaagaaatccaggctcctctcccaagaaatccaggtgctttccagactccaaagggtatcttaaatgcaatctcttctctcttagcccttggccactttctcctggatcctgccctgctctcagccatagtgaaggaccagccctaggagtctgcgagagcctccttggttccatcgtgaagccataaacaggaatgcctttggcaatagccttgagcctagagggccctctgatgccccactgaggtgctgttggtttattgctggcaacgtgaattctctcaggggtctaggaggggcattttggagactgcctgacaccacccctatcccctgcctccccctctcagaagagggtggaagatgaaatgaaagctatgggactcttggaggatacccagtgtctattctgggttagagaagtgcttactaaggggttttctaataaaaaagcaattgtccacattggagtcaatacacacaacaag

SEQ ID NO: 169484 - DNA, 399 bp, Homo Sapiens
gaggatgtttgcgccttttccttcccctgtcttgcccagcaacctttcgcggggcatgtctatctatccaggctacatgtccccacatgcaggctacccagctggtggcctcctacggtcccaggtgcctccatttgactctcatgaggttgccgaggttgggttcagctccaatgatgatgaggataaagacgatgatgtgatagaggtcactgggaaatagctagggagcccctccccacctcacttggggcccccagcaggttgcccaccaagctggaaggcagtgatttagaccttgtgagaataggacacttggcaggagggaaaaggaagaggacaaaggagggtggttggccaaagtggcagagctctgttgctgtttaacaaaagaggcaa

SEQ ID NO: 169485 - DNA, 407 bp, Homo Sapiens
aatattcctgttagccctaaaggctttacatgaggaatggtagaagtggtcttttgtttaaattagttgcattcagcatatatgaattgtcttaaatattttggggatactcccccgccttttaaacagggcataagatctggtaaactctctgtatatcttcctacctttcaaaatcgttcttagggttagtcaagtctggaatataattgctgactataaagttagcaattatgctttaaggtgttgtcacatcaacctaaagagaaccatctatggaaggtatggttgaaacatctgtaggaacacagaactgggatttcactgagtttaccaaatcaactgtgtgaactgtttctgcactgcttgctaatggtttcatctaataaatgtttacttatatatat

SEQ ID NO: 169486 - DNA, 848 bp, Homo Sapiens
  misc_feature (770)..(778): n is a, c, g, or t
ctgttgggcaacgggctgggtgtggcctccaaacagtcctctcaagccccctgcacggtgggagtgtggattaatgtggcaaccggttttagaataagattccccccccgtgatatgtttctacctttgccccacgtggccatttgcagtagagggtcctggtttggccagccccggacaattgtggccttgcaagtgggcaatgcccatcatcggccactatgactgcacttatggtggtggcgtgcacctgtccagcccactggcttcaggtgctgtggccaacaagctatgccagagtttccagaccttcagcatctgctatgcagagacgggcttgctgggtgcacactttgtctgtgaccgaatgaaaatcgatgacatgatgttcgtcctgcaagggcagtggatgcgcctgtgtaccagtgccacggagagtgaggtggcccggggcaaaaacatcctcagaaatgccctggtatctcatctagatggcactactcctgtgtgtgaggacatcggacgcagcctcctgacctatggccgccgcatccccctggctgaatgggaaagccggattgcggaggtggatgccagtgtggtacgtgagatctgctccaagtacatctatgaccagtgcccagcagtggctggatatggccccattgagcagctcccagactacaaccggatccgtagcggcatgttctggctgcgcttctaggcgggaagcctatgtaagcaagagggcagggccggggtttgtggtnnnnnnnnnaccacaaacacagcacttcggctcctctaacctgtgccacaggtgaccaccaataaaatcctctgctgag

SEQ ID NO: 169487 - DNA, 979 bp, Homo Sapiens
  misc_feature (105)..(105): n is a, c, g, or t
ggcattggcccacttgcaaggccccacatgtcccggggctggcccagccaggaccccttttactgccaatgccacgtggccaaaaggtagagcatcatcacggtnggcggatctcactgccagtgaagcggcatggagtaagagtgggcacagcgtcctctggcatatgtccatgggatgccaccgaggtgcttctgggcgaggtctaacagttgctggtgctccactcctccagctgctgccagcaccattcgaggggccttgtaatgtgtgctgaggtactcggtcaagtctgcacgagacagcttcctgacattctcactgggcccctccacagcctgggctagaggtgtgccctggaatgctgtggcatgcaggtagttaaagaccacatctcgcatagatgcatcattctcctgcatctcccgcaggatcacatcacgttccttctcaatctgtgagtcttccagactacagttctgcacaatgtcacccaggagctccacagctttcggcagatccttggacagcgccttgatgtagtaagctgtgtgctcccgggtgctgtaggcattaagatgggcccccatgctctccacctccttctccagggcactgccaggccgattctttgttcccttgaaagccagatgctccaaaaagtagcctgccccattattcttctcagtctcaaaacggctgccaacatcaatccacactcccaccgtgcaagtgggctgagaggactgctcggaggccacacgcaggccgttgtccagcaggctaacctgcgtctccggcacgaactggagcgcctgagcgaaggttgccgtactccgcaaggctggcgtccgcagcagggccggcgagcggcgggcgcgcaatagcacttgtgccccggcggtagcggcccgacagaccacggacgccgccatcttccagctgcagtcggccctgttgcgccgcgccagcgtagccc

SEQ ID NO: 169488 - DNA, 1056 bp, Homo Sapiens
  misc_feature (414)..(422): n is a, c, g, or t
  misc_feature (490)..(520): n is a, c, g, or t
  misc_feature (762)..(762): n is a, c, g, or t
  misc_feature (908)..(916): n is a, c, g, or t
ggggcaacagggccgactgcagctggaagatggcggcgtccgtggtctgtcgggccgcctgtgtaccagtgccacggaaaatttaggtggcccggggcaaaaacatcctcagaaatgccctggtatctcatctagatggcactactcctgtgtgtgaggacatcggacgcagcctcctgacctatggccgccgcatccccctggctgaatgggaaagccggattgcggaggtggatgccagtgtggtacgtgagatctgctccaagtacatctatgaccagtgcccagcagtggctggatatggccccattgagcagctcccagactacaaccggatccgtagcggcatgttctggctgcgcttctaggcgggaagcctatgtaagcaagagggcagggccggggtttgtggtnnnnnnnnnaccacaaacacagcacttcggctcctctaacctgtgccacaggtgaccaccaataaaatcctctgctnnnnnnnnnnnnnnnnnnnnnnnnnnnnnnncttgtcgggccgccctccggccctcaaaaaagctttcacaaacccattccgttttggcgccgcggggccccggtaaggctaaggtgaaacactggcaacaataggctggtttctcctaaggaagaatcccttgtggccactgagcataagtgagcttttgggaatattcctctcaccccaatttaaaacaaaaacacgacccccccgggccggggggcaaaacacccgagagcccgggtttnttctgtgcaaaacaccacaaaatttccccccaaagaaatggtgggagaagggtttttttcgtgagggaagggggggtctccccatttcttttacacgcggggcgggggaaattatccttaatattcttcgcaaaccccagagggtnnnnnnnnntctcccccaaatatacccccccgcagaaaggccctttttctcaaaattaaaattccgcacaaaaattatttgaagggcgagagaaaccgccgggggcccgatatgggggcgcccagaaattcacacagtccgcgatgaac

SEQ ID NO: 169489 - DNA, 1025 bp, Homo Sapiens
  misc_feature (897)..(897): n is a, c, g, or t
  misc_feature (914)..(914): n is a, c, g, or t
  misc_feature (980)..(980): n is a, c, g, or t
  misc_feature (998)..(998): n is a, c, g, or t
aactgtagtctggaagactcacagattgagaaggaacgtgatgtgatcctgcgggagatgcaggagaatgatgcatctatgcgagatgtggtctttaactacctgcatgccacagcattccagggcacacctctagcccaggctgtggaggggcccagtgagaatgtcaggaagctgtctcgtgcagacttgaccgagtacctcagcacacattacaaggcccctcgaatggtgctggcagcagctggaggagtggagcaccagcaactgttagacctcgcccagaagcacctcggtggcatcccatggacatatgcagaggacgctgtgcccactcttactccatgccgcttcactggcagtgagatccgccaccgtgatgatgctctaccttttgcccacgtggccattgcagtagagggtcctggctgggccagcccggacaatgtggccttgcaagtggccaatgccatcatcggccactatgactgcacttatggtggtggcgtgcacctgtccagcccactggcttcaggtgctgtggccaacaagctatgccagagtttccagaccttcagcatctgctatgcagagacgggcttgctgggtgcacactttgtctgtgaccgaatgaaaatcgatgacatgatgttcgtcctgcaagggcagtggatgcgcctgtgtaccagtgccacggagagtgaggtggcccggggcaaaaacatcctcagaaatgccctggtatctcatctagatggcactactcctgtgtgtgaggacatcggacgcagcctcctgacctatggccgccgcatccccctggctgaatgggaaagccggattgcggaggtggatgccagtgtggtacgtgagatctgctccaagtaacatctatgnaccagtgcccagcagtnggctggatatgggccccattgagcagctcccagactacaaccggattccgttagcggcatgttctngctggcgttttttaggcnggaagcttatgttaagcaagagggcag

SEQ ID NO: 169490 - DNA, 352 bp, Homo Sapiens
tagttaggtctctgtaagagctgctgttgctagattattgaaaattttggaggagtttgattagctggaagatggagagggaacaatagatgagggcctggataaatgctgtgaacagcgggatgacatgccttcttttttcagacattacataaggtgaagagggagctgagatctaagatggagaaggaaattcagcagctgcaggacatgataacacagaatgatgatgatgttttcttcccgggaactggaagctgagcgcttcagatctcggcttcagctggcttccctttcagtaccagtaaaagtcccctcccctatgaggcccagactttgattattgtagggt

SEQ ID NO: 169491 - DNA, 839 bp, Homo Sapiens
  misc_feature (767)..(781): n is a, c, g, or t
ggggggcggaacctggagataatgggcagcacctgggggagccctggctgggtgcggctcgctctttgcctgacgggcttagtgctctcgctctacgcgctgcacgtgaaggcggcgcgcgcccgggaccgggattaccgcgcgctctgcgacgtgggcaccgccatcagctgttcgcgcgtcttctcctccaggttgcctgcggacacgctgggcctctgtcctgatgctgctgagctccctggtgtctctcgctggttctgtctacctggcctggatcctgttcttcgtgctctatgatttctgcattgtttgtatcaccacctatgctatcaacgtgagcctgatgtggctcagtttccggaaggtccaagaaccccagggcaaggctaagaggcactgagccctcaacccaagccaggctgacctcatctgctttgctttggcatgtgagccttgcctaagggggcatatctgggtccctagaaggccctagatgtggggcttctagattaccccctcctcctgccatacccgcacatgacaatggaccaaatgtgccacacgctcgctcttttttacacccagtgcctctgactctgtccccatgggctggtctccaaagctctttccattgcccagggagggaaggttctgagcaataaagtttcttagatcaaccccctatacccgccccctctattaatccccgggcccggccgccctcggacccttcaaaaagcttttctacaaccatttctttgggnnnnnnnnnnnnnnnaacggaaagtgaaacatgggccctatgctggttcccaaggaaaaatctggggcacaga

SEQ ID NO: 169492 - DNA, 819 bp, Homo Sapiens
ggtaccggccccggaattcccgggatatcgtcgacccacgcgtccgctggagataatgggcagcacctgggggagccctggctgggtgcggctcgctctttgcctgacgggcttagtgctctcgctctacgcgctgcacgtgaaggcggcgcgcgcccggggaccgggattaccgcgcgctctgcgacgtgggcaccgccatcagctgttcgcgcgtcttctcctccaggtggggcaggggtttcgggctggtggagcatgtgctgggacaggacagcatcctcaatcaatccaacagcatattcggttgcatcttctacacactacagctattgttaggttgcctgcggacacgctgggcctctgtcctgatgctgctgagctccctggtgtctctcgctggttctgtctacctggcctggatcctgttcttcgtgctctatgatttctgcattgtttgtatcaccacctatgctatcaacgtgagcctgatgtggctcagtttccggaaggtccaagaaccccagggcaaggctaagaggcactgagccctcaacccaagccaggctgacctcatctgctttgctttggcatgtgagccttgcctaagggggcatatctgggtccctagaaggccctagatgtggggcttctagattaccccctcctcctgccatacccacacatgacaatggaccaaatgtgccacacgctcgctccttttacacccagtgcctctgactctgtccccatgggctggtctcccaaagctctttccattgccaggaagggaaggtcttgacaataagtttcttgatc

SEQ ID NO: 169493 - DNA, 141 bp, Homo Sapiens
cggcggtcctcatatgttcgtttatccttccagaaagcatatcatattagagtgtctaagaaatcagtgaatcaagtgactagattataaatattctctatgtgaatagttgaataaaacagctgtttttttctgcttcct

SEQ ID NO: 169494 - DNA, 654 bp, Homo Sapiens
ggatcagagtatacaagaatactggaagtgtgtgaagaaagaaagcattaaaggagtaaaagaagtctggaaacaagctggaaaaggtcttttttaataaaagatataatagtatggcaattatattgttccaaatgtcaaaatttgtgattttttagaagtacttgctatttatcttcttaagtcttcattgatattctgtgtgaaataagcatgtcttgtacttgctttctgattcataattttattaaagaacttagtagaaagaaaagtaagtataaaaatagatattggattctgtcagaaggcctagatttgaaataatgttttgtacttcggtaagatggaaaacttagtgattcactgatttcttagacactctaatatgatatgctttctggaaggataaaacgaatacatatgggaaaaagtacttgagaccaaggccagcatcaattccagacatcttcatgttcctaataggctaaatgaagttaaaaacttatttcagatttttctcatctgtaccttatatctcataaatttattgtatattttatgtcagtagcttagctgtttattgtctttaaaataacatgtaaacttcaatgttctatctggaagcagaataaaatatttacatagataaagaag

SEQ ID NO: 169495 - DNA, 198 bp, Homo Sapiens
tctaggcagtgtggacggttaggactaaatgtttcacgtagcttcgccctggttcagctcttccctctcacgcctcccagacttctccaggccggtttcatgttaaccgtcttacactctgacatcagccaaggcgtctccattctgttcttgtgccattcatgtcttggattcccagtaagtagaacctgagaaatt

SEQ ID NO: 169496 - DNA, 690 bp, Homo Sapiens
aaaagcaggctggtaccggtccggaattccgggatatcgatgcagccccaggcccctctgcccacgctgcacccagcaccacaagcgccctgacccccggactctgcagctgccgctgccgacgccgcagcttcctccgttgccaagggcagggcttagagctcaacccagacacctgcaggtgccggaagctgcgaaggtgacacatggcttttcagactcagcagggtgacttgcctcagaggctatatcccagtgggggaacaaagaggagcctggtaaaaaacagccaagcccccaagacctcagcccaggcagaagctgctctaggacctgggcctctcagagggctcttctgccatcccttgtctccctgaggccatcatcaaacaggacagagttggaagaggagactgggaggcagcaagaggggtcacataccagctcaggggagaatggagtactgtctcagtttctaaccactctgtgcaagtaagcatcttacaactggctcttcctcccctcactaagaagacccaaacctctgcataatgggatttgggctttggtacaagaactgtgacccccaaccctgataaaagagatggaaggagctgtccctgcctgtgtcactgtttgtcactgtccaggctggctggtttgggcatgaatgtctgcatcactaaatcc

SEQ ID NO: 169497 - DNA, 769 bp, Homo Sapiens
tgctgtgaagccagacagggctgccactccccaccaccggtccccagccccgttctgttccgggctgggactctgcccccggagcaccctccccagctgacatcacccatcccactccagccccagggcccctctgcccacgctgcacccagcaccaccagcgccctgaccccctggacctgcctgctgccgctgccgacgccgcagcttcctccgttgccaagggcggggcttagagctcaacccagacacctgcaggtgccggaagctgcgaaggtgacacatggcttttcagactcagcagggtgacttgcctcagaggctatatcccagtgggggaacaaagaggagcctggtaaaaaacagcaagcccccaagacctcagcccaggcagaagctgctctaggacctgggctctcagagggctcttctgccatcccttgtctccctgaggccatcatcaaacaggacagagttggaacgaggagactgggaggcagcaagaggggtcacataccagctcagggagaatggactactgtctcagattctaaccactctgtgcaagtaagccatcttacaactggctcttcctcccctcactacgaagacccaaacctctgcataatgggatacgggcatggtacaagaactgtgaccccaacctgataaacagagatggaaggagcttcgtccatgacctggtgtcactagattggtcacatagaccaggagtggcaggaactgggcactacatgtctggcatcag

SEQ ID NO: 169498 - DNA, 861 bp, Homo Sapiens
gggggcgtttccaggagggagcggcctttgctcagcgcgagacggctgggcgccgagtgggacagcgctggtgcggagactgcttccggactccagaattgccaccttgccaatggacctgatcggctttggttatgccgccctcgtgacgtttggaagcatttttggatataagcggagaggtggtgttccgcctttgattgctggtctttttgttggatgcttggccggctatggagcttaccgtgtctccaatgacaaacgagatgtaaaagtgtcactgtcctcatgatgatcctgagacttgtcttgttgctgctctgagcatctggaggaacagaaaactaagttcatgtcatcctgctgtaatgggcagagcatattttttttgtattgaaaagataaacttcaatatggaatgctagaaacacaaatagcactggcacctctaatatgaacattactttgaggtactttttttctaaagccaaaaatttaactgttttctaaatgtcaaccactattttcattaaaagtgtctaatgaatcatgatatactcttccattttgctgagactatttttttatatattcggcattttttgaaaattccaaatactcatgtcccaaggaagcttaaactacaactgtcacataaaggaagtcttaagtggagttcacagaatgataatgtatctatttgtcattagtgttatatttgaaattattagaaattatgctttttccattttaattgtattgctgccagtgctatttttttctttaaaaaattttattcttagcacactgttatgtcctaactgaatgtattcagtattcaaataaaagacatttgggttc

SEQ ID NO: 169499 - DNA, 841 bp, Homo Sapiens
ggggcgagacggctgggcgccgagtgggacagcgctggtgcggagactgcttccggactccaggtaccgcgcttggcggcagctggccccagacttctgtcttttcagctgcagtgaaggctcggggctgcagaattgcaaccttgccaatggacctgatcggttttggttatgcagccctcgtgacatttggaagcatttttggatataagcggagaggtggtgttccgtctttgattgctggtctttttgttggatgtttggccggctatggagcttaccgtgtctccaatgacaaacgagatgtaaaagtgtcactgtttacagctttcttcctggctaccataatgggtgtgagatttaagaggtccaagaaaataatgcctgctggtttggttgcaggtttaagcctcatgatgatcctgagacttgtcttgttgctgctctgagcatctggaggaacagaaaactaagttcatgtcatcctgctgtaatgggcagagcatattttttttgtatttaaaagataaacttcaatatggaatgctagaaacacaaatagcactgtcacctctaatatgaacattagtttgaggtagtttttttctaaagcaaaaattttaactgttttctaattgtcaagcactattttcattaaaagtgtctaatgaatcatgatatactcttccaatttgttgggggcaatttttcaaaaaattgggggaatttttttggaaaatccccaaatactcatggtcctcaagaaggccttaaccctacaacttgtccacttaaagggaagttcttaaaggggaaggtctcccgaaatgttataatggtt

SEQ ID NO: 169500 - DNA, 1528 bp, Homo Sapiens
  misc_feature (904)..(1048): n is a, c, g, or t
  misc_feature (1099)..(1113): n is a, c, g, or t
  misc_feature (1188)..(1196): n is a, c, g, or t
  misc_feature (1349)..(1357): n is a, c, g, or t
ggggctgcggggagggcgggacttcctgcgcgggggcccgagccgctcagtctccctgctctccgtggtcccggctcgcgtgtagcggcggcggcggcgtctccgtgaggaggcgcgcggggccatgacgtcagcgtccacaaaggtcggagagatcttctcggcggccggcgccgccttcacgaagctcggggagctgacgatgcagctgcatcccgtggccgactcttctcctgcgggcgcgaagtggacggagacggaaatagagatgctgagggctgctgtgaagcgatttggggacgatcttaatcacatcagctgtgtcatcaaggaacggacagtggcccagataaaggccactgtgaaacgcaaggtatatgaagattctggcatcccccttccagctgagtcacccaagaaagggcccaagaaggtggcatctggtgtcttgtcacctcctccagctgcccctcctcccagcagctccagtgtccctgaggccgggggtccccccataaagaaacagaaggctgatgtgacactcagtgctctgaacgactccgatgccaacagtgacgtggtggatattgaagggctaggagaaactcctccagctaagaaactcaacttcgaccaggacagcctgaccctggattctggccttctcatgacctctgctgatcctcctctcctctcctgctgagccttccacctctgacctctcactgttcatgccggacctgtggatctcctgggactccgagcaaggcctgcacgagagagggctgaaaggctgctggggctgccacctcgctattcccgcataagcatctgcccccaacccctttgaccttcatctgatggacatttttatacagaaaacaataaagatttccctctcagnnnnnnnnnnnnnnnnnnnnnnnnnnnnnnnnnnnnnnnnnnnnnnnnnnnnnnnnnnnnnnnnnnnnnnnnnnnnnnnnnnnnnnnnnnnnnnnnnnnnnnnnnnnnnnnnnnnnnnnnnnnnnnnnnnnnnnnnnnnnnnnnncgcgggcgcgcccccctcccccgaaaaaatttctaaaacactccttttggnnnnnnnnnnnnnnnaaagaaaagaacacctgcaaaaattttcccccaacgaaacccccgactgtaaaccccgggttcttctcccccccnnnnnnnnncaccccgcggacccccacgttcttcaaacaacatacagggtatcgcacgggctcttttggtttcatcacaccgcacccccaaccaacatttttacaaaattaccccgccccccctgtccctttcgagaggggggcggtaaatcactcccattnnnnnnnnnaagtcaacctctcccccccagtggactgtaaacctttccatcccacccgggctccacacccactcccaccccccaccacaatatcttcccccccggcgcaaaaacacccgccctaaaaaaactttccctctttatcgcccctcaccttacaactcacaagaggtaggcaca

SEQ ID NO: 169501 - DNA, 945 bp, Homo Sapiens
gggggggacagcagagacaaggaggccatggccctggatggcacagcctatcaggggagcagctccacctgcatcctccaggagacctccctgtgatgttgactcaggaccccgcctctgtcctcactgtgccaggccatagccagaggccaccctgtagtacagggatgagtcttggtgcgttctgcagggacaggcctggatgatctagctcataccaaaggaccttgttctgagaggttcttgcctgcaggagaagctgtcacatctcaagcatgtgaggcaccgtttttctcgtcgcttgccaatctgttttttaaaggatcacgctcgtagggagcaggatcatgccagaaatagggatggaagtgcatcctctgggaaaaagataatggcttctgattcaacatagccatagtcctttgaagtaagtggctagaaacagcactctggttataattgccccagggcctgattcaggactgactctccaccataaaactggaagctgcttcccctgtagtcccaatttaagtaccagttctgccagccacagtgagcccctaatattactttcagattgtctgtgacactcaaagcccctctcatttttatctgtctacctccattctgaagagggaggttttggtgtccctggtcctctgggaatagaagatccatttgtctttgtgtagagcaagcacgttttccacctcactgtctccatcctccacctctgagatggacacttaagagacggggcaaatgtggatccaagaaaccagggccatgaccaggtccactgtggagcagccatctatctacctgactcctgagccaggctgccgtggtgtcatttctgtcatccgtgctctgtttccttttggagtttcttctccacattatctttgttcctggggaataaaaactaccatgggacctaga

SEQ ID NO: 169502 - DNA, 350 bp, Homo Sapiens
tagatgatttcaggttataaaaccagaagtacaattcaacaaaaaaggagtaagtcatcaatataaatattagcaaacgagatattgctacatctctatttaaagtaaaatacaaccgattttaaagttcctgaaaccatagccatattttgacatttcacaaagaatggttctagtctactagagtacatttggctaagtagataacttacctaaattggctccaaagctaaatcacaagtaaacatatttatgtttaaaacacagaaataaataacttaagatttttatctaagcggtcagtgttgtgttggaaagatatatctataaataaacttggaactgatttc

SEQ ID NO: 169503 - DNA, 968 bp, Homo Sapiens; identical to SEQ ID NO: 3601
  misc_feature (521)..(533): n is a, c, g, or t
  misc_feature (573)..(625): n is a, c, g, or t
  misc_feature (725)..(738): n is a, c, g, or t

SEQ ID NO: 169504 - DNA, 202 bp, Homo Sapiens
ccgagctcggtaccgtgtgtacgagtagcacgttgcccaagggttgcacagcaaagaaaagggagaagttgagattcaaacccaggctgtctagctccgggggtatagccctgcactcctactgagtttgtggtaaccagccctgcacgacccctgaatctgctgagaggcaccagtccagcaaataaagcagtcatgattt

SEQ ID NO: 169505 - DNA, 1698 bp, Homo Sapiens
  misc_feature (305)..(305): n is a, c, g, or t
  misc_feature (392)..(392): n is a, c, g, or t
  misc_feature (959)..(1086): n is a, c, g, or t
  misc_feature (1178)..(1186): n is a, c, g, or t
  misc_feature (1418)..(1463): n is a, c, g, or t
  misc_feature (1493)..(1554): n is a, c, g, or t
ggtgaattaaattattcttgtcggtttgattctaaacatctggcagctgctctggagaatctcaataaggctctcctagcagacattgaagcccactatcaggacccttcacttccttaccccaaagaagataacacacttttatatgaaatcacagcctatctggaggcagctggcattcacaacccactgaataagatatacataacaacaaagcgcttaccctattttccaattgtaaactttctatttttgatgcgctcagttgtccaaaacttcaatacaacaaaaatctgggtaatggntctgtccgaaaaccgaccgacccggttgtattggtccaccacttgtcctgggactgctcactctgctgaagcagttccattcccggntacaccgagtcagttcctggcgctgattggtccagtttatctgctccacggtggagcagtgtacaagccagaaaatacctgaaattcctgcagatgttgtgggtgcccttctgttcctggaggattatgttcggtacacaaagctacccaggagggttgctgaagcacatgtgcctaatttcatttttgatgagttcagaacagtgctgtaactgtttttcctacttcttcaatggaaggattgtccttagatcttcccaccatcacaaatgaatttgaagatgaaaagaaactcagttgctcatacaactgcattttttctgtctattatgggaaacatcagacgttctgagtaagatatatctcatggcattagttaatataactgatattgtttaaatcatggtattacatgcaatttatatcagataaaagcagaacacatttttgtactgcctctcttaaatgctgaatgtaactgttatgtataaatccatttagttttatgttctaaagaactatttgtgcaactccagattttcagtaaaatagtattactagtacccnnnnnnnnnnnnnnnnnnnnnnnnnnnnnnnnnnnnnnnnnnnnnnnnnnnnnnnnnnnnnnnnnnnnnnnnnnnnnnnnnnnnnnnnnnnnnnnnnnnnnnnnnnnnnnnnnnnnnnnnnnnnnnnnttttctaaggccttcaggacgaaaaacaaacataaaaatcctttggcgccggccccttcgcccttaacaaacccttaccaggctcttttttnnnnnnnnncccctcccgcaaaggaaaagggggttactttcccctcccaaaaaaaccccgccaaagacacctttggcccttccctcgaaaaaaaccccggggggcccctcccggtgttttacaaaattcacaatggcgtccctttttgtccccccggtcttcttccatgccgatccttttgcgccccttttgaaacattatcgctcaccctgttcgcaaacatatcgatcctcgggggggnnnnnnnnnnnnnnnnnnnnnnnnnnnnnnnnnnnnnnnnnnnnnnacaatggcccgtaattggccgctttttctnnnnnnnnnnnnnnnnnnnnnnnnnnnnnnnnnnnnnnnnnnnnnnnnnnnnnnnnnnnnnngttttgcacaaagtgcgcccaaacacaaacccctcttatctcggcccccccttttttaaacataaaagggggcggaaaacctccccccgtgtattggcctcctcgcccccaaaaataatattttgtgcccacaaacccttcacg

SEQ ID NO: 169506 - DNA, 486 bp, Homo Sapiens
  misc_feature (12)..(12): n is a, c, g, or t
  misc_feature (25)..(25): n is a, c, g, or t
  misc_feature (71)..(71): n is a, c, g, or t
  misc_feature (90)..(90): n is a, c, g, or t
  misc_feature (123)..(123): n is a, c, g, or t
  misc_feature (130)..(130): n is a, c, g, or t
  misc_feature (164)..(164): n is a, c, g, or t
agggggcccccnccggcccccgggngaataaggtccgggtacaacaaaggcctacccccggggggttgccngaagcacagggccccaaantccatttttggatgaggttccagaacagtgccngtaaccngttttcccccacctccttcaatgggaaggattgnccctagatcttcccccacccatcacaaatgaatttgaagatgaaaagaaactcagttgctcatacaactgcattttttctgtctattatgggaaacatcagacgttctgagtaagatatatcctcatggcattagttaatataactgatattgtttaaatcatggtattacatgcaatttatatcagataaaagcagaacacatttttgtactgcctctcttaaatgctgaatgtaactgttatgtataaatccatttagttttatgttctaaagaactatttgtgcaactccagattttcagtaaaatagtattactagta

SEQ ID NO: 169507 - DNA, 256 bp, Homo Sapiens
gcgtcgagtagtaggcagcacttttaaaaatatgtgaactcaaatattgcacttctttcaagacgttatcaatggttattgtactgtatagttttaataattttgattgaaaccctttaacaactctttgtaaattttaactcattttagttgattttcagtactatttacataggaattgatttctatggactatagtacaagaaatgtgctgtattttgataaaattcacttattgtactgtgtgttgtaatct

SEQ ID NO: 169508 - DNA, 1187 bp, Homo Sapiens
  misc_feature (922)..(931): n is a, c, g, or t
  misc_feature (1064)..(1064): n is a, c, g, or t
  misc_feature (1073)..(1073): n is a, c, g, or t
  misc_feature (1096)..(1096): n is a, c, g, or t
gcagttattctctctccatattgggctttgatttgtgctgagggtcagcttttggctccttcttcctgagacagtggaaacaatgccagctctgtggcttctgccctggggatgggccgggttggggggtgggttggtgaggctttgggtgccactgcctgtgggttgctggcttaaaggacaattctcttcattggtgagagcccaggccattaacacctacacagtgttattgaaagaagagaggtgggggtggaggggaattagtctgtcccagctagagggagataaagagggctagttagttcttggagcagctgcttttgaggagaaaatatatagctttggacacgaggaagatctagaaaattatcattgaacatattaatggttatttctttttcttggatttccagaaaagcctcttaattttatgctttctcatcgaagtaatgtaccctttttttctgaaactgaattaaatactcattttatctttgactctccttgaaatctagagaaaccaagaaaatggctgttgggaaggaaccaatttcctcctcttccctcgggtctcaggcatttacatcctccctctccccgcaatctgacctttaccaggagggaaacagttctcctacatctcatcattggaaaagttttcagggaatcagatagaacttagccagagatttaaatatcacagaaaagcctcagagaaggaaggagaaaaagaaaagaagtgacgcatgtagagtgcttttgggttataggcaccaaaatcccattaaggactgattataagcttcatggtacagttcagcaaattatgattcattgaggggcacagaggaccagtgttggtgacagctaggggatgatgacctgaggttataggcttggggtgaatgaagcatagagnnnnnnnnnnaaaaaagaagggattgttgaaaaccctggcaaaaatgtataatttaatggagaaaacttgctgcttttaaaatccatatagggccaggctttagcaggcatgctggttttgataggtttttgggaactctggnaataagagnacttatctcatctggcactttcnaggtggtggcccagccagttaaagctgtgggtcgaaaaggggaaatgttaactgggttgtggcattgggatagaagaccttatttaagggg

SEQ ID NO: 169509 - DNA, 514 bp, Homo Sapiens
  misc_feature (74)..(85): n is a, c, g, or t
gggacggttaagaatgtcagtatacaagaaggaatagaaaactgatactgttttaaataatctgtaatttcaannnnnnnnnnnngctgaaatacattatattgtacgtttgagataattctagtacaaagtataataaaactagatgtataataaaccctttaaatcattggtaagtgtacaagtggtggaactgaagcatttactggacaaagtaatgttactctaatggttacttgctcgtgcgttgccacactgtgttataatttgcttcatttccttgctatttgatacatagtgtgcatttctctgtcactgtaactattgtaatgacaaattttcatcttactgcacaatcaaaatgacattgataggaatgaactccagaggctgggcctgaacagggaggtggtcgctcaggcctggtgctcagtcgtacgacctgtacctctcaacttttgccctatctgttaaatatatgctatgtcattaaatgcttttaaatctaaaaaaa

SEQ ID NO: 169510 - DNA, 1122 bp, Homo Sapiens
  misc_feature (625)..(721): n is a, c, g, or t
  misc_feature (854)..(862): n is a, c, g, or t
  misc_feature (964)..(972): n is a, c, g, or t
gaaaagtctgttacagttgctagaggttttcattaaaacttatcagatgagaggcttttttaggataagaggtgagaactgggcaaaagttgtgaagcagcaattctgttatatggacagtgttctgctttttaatcctatttagcttgtttcagaaattctcacttttgttgactgccaacatacaaagtaagggaaactcaagatattaagatggctgtatcagttcttaaaatctgcagagcctggttcaaaatcagtcactcccttcagaagcagacatggcatctgttccttgcttgcttgttggttgtgtacctttcacgagacctgaattttagaattgcccagtgctgccagagtgagtgagtgtaattctcctttcaggtaaagataggctatctcaacactgctgagtgattcataaacatatcaaccaatagcattaacccattttatttcctgtccttagtgtctgaagatgctcaccagttttctgtgtacagtaaggcagcatgctaaaatgcttttgttcagttctgtatatttgaaaatagcagtgtgttctctgatggttacctgcagtggcaccctgtacaaaaaataaaagacttattgctgtagnnnnnnnnnnnnnnnnnnnnnnnnnnnnnnnnnnnnnnnnnnnnnnnnnnnnnnnnnnnnnnnnnnnnnnnnnnnnnnnnnnnnnnnnnnnnnnnnntttgtgggccgcctcgccccccgaaaaattttttaaacaattctttgggggcggggccccccaaggaaagagaaaagggtcatacttgtttcttaaaaaaacctggccataataagggttggtattctccccnnnnnnnnncccccgggggaaaccaacggttttaaaaaaatccaaagggagttctgaggactttatgggagttttcaccaggggtccaccgaagttctatataaatttatnnnnnnnnntgccgcctattcaagaaggggggaaattattaaagaatgctgccgccggggagcccctcccaaccggcttgttgaacctgattctcccggggggttaacaccttggtgccctgggggaaaaaaatttgcccccgcgggaaaacggggggg

SEQ ID NO: 169511 - DNA, 974 bp, Homo Sapiens
  misc_feature (836)..(836): n is a, c, g, or t
  misc_feature (867)..(878): n is a, c, g, or t
caggaaatacttcatttgtatgtaaatattattgtaaataaataggaggctgtatatttttgaagttgttgatccgcactgaaatagaagtctctaggatctgcatataaacaataaatgtttcctagaaattagtggttttgtttgggaattagaaaaatttacattctctcccaggtaacatagttctctcaatgtaaacttggaacctgaaaccctacttaatttagagaaagaaatgtctgagaaatagttcccttgatttcttatgctggcattaagatcaattatttaacagatagtcctctgagatacaagtaaggaatatttagacacaaatccttgtcctatagaaacagatatacccaaatgacaaattgtttcttcataatgatcttccatttttaacactgataccactacacagtacatatgaaaacagaagctggggagaagaatgttttttttcacaattgaattgctgcatttctcaaactttgggatctatgaaagcggggagagggaacctgaatattaattatgagcacaaatttgaaggaaagaaaacaaagaaccattatctaatcaagctttgaaagtcctgcatgtttgccttttattttagtgttgacgccaacatagactgtctaaggtatttttttccccaaacacttgaatcttggtcgttggtatgtaatccactctctagagtccagtgtactttagacttcatctgagtccaatacatgtaccacactactgttttattaatgtaaaaaccttgtaaatgaatttcagatgggtgatttaagtgagtcacaagtcacaaaactttngctattcatagttaatcaaatagaactgggnnnnnnnnnnnncagagtgcggggtaaataaagaaatattaagaagttcctgttctataactgctctgttaacatagtttttaaacattaaaaaatgtgacctaaacg

SEQ ID NO: 169512 - DNA, 416 bp, Homo Sapiens
ggtccttgaaaactcctacaatattatatttggaggcagcttcagactgttttattggtggtagctgcttgctgaggtcttttagttggtaataactccagagaagcagcctgtgtatattcctaacactttgttcactagcatttaagtttagaataagcccaagtaagacaatggaaatgtatatagaactcttagttcttacatgatttaattatatcgatacatgaatttaacttactttaatgtaggcaaactatcaattttttgtccattttcctgtttgttaaaataacatacctctcctacgtattattttcttgacccaaatgaaatattaacctaaggtcaagctgggagagagaaatgactgagatgaatgtctttactaaagtaccaataaatttgtcaaactc

SEQ ID NO: 169513 - DNA, 139 bp, Homo Sapiens
cactcgccgacagagatttcactggtaatcgcggtatggatgagctgagacttcataaccccgcccagtagaccgacggcggggctgtcggcgtcggtgagttcggtctggcgcagaccgtaagggatcatctagatca

SEQ ID NO: 169514 - DNA, 842 bp, Homo Sapiens
ggggccattttgtgaggtgccgccgtctctcctccagcaaggtcaggacttcaggactgaaacaatgaccgataaaacagagaaggtggctgtagatcctgaaactgtgtttaaacgtcccagggaatgtgacagtccttcgtatcagaaaaggcagaggatggccctgttggcaaggaaacaaggagcaggagacagccttattgcaggctctgccatgtccaaagaaaagaagcttatgacaggacatgctattccacccagccaattggattctcagattgatgacttcactggtttcagcaaagataggatgatgcagaaacctggtagcaatgcacctgtgggaggaaacgttaccagcagtttctctggagatgacctagaatgcagagaaacagcctcctctcccaaaagccaacgagaaattaatgctgatataaaacgtaaattagtgaaggaactccgatgcgttggacaaaaatatgaaaaaatcttcgaaatgcttgaaggagtgcaaggacctactgcagtcaggaagcgattttttgaatccatcatcaaggaagcagcaagatgtatgagacgagactttgttaagcaccttaagaagaaactgaaacgtatgatttgagaatacttgtccctggaggattatcacaccccaaatgcataatctcgttaatgattgaggagagaaaaggatcagattgctgttttctacaatggagcaggatattgctgaagtctccgggcatatgttaccgaatcaaatagccctcccagaggctaagaaatttctgttagtaaaagatgttccttttcccaaagcattttatttg

SEQ ID NO: 169515 - DNA, 720 bp, Homo Sapiens
  misc_feature (459)..(584): n is a, c, g, or t
  misc_feature (595)..(607): n is a, c, g, or t
  misc_feature (648)..(668): n is a, c, g, or t
atatttatactataccaaactcatttgcagttcttaggtttgttggttaaaaacatttttttaaaagcagtaagtttatagaaaatgttttcatttaatggaaggctggggaatgtccagcatcaacccctatggcatgcattcccagtggccttctcatctgggcctggaacctttggttcagggcttaggggagaacaggccacatggcaacagccacacagtcattgccttcaacacagagccacgtgtccccaaacagcaatagtcatgcccttgtccaggctgggatctaattgatacaataggtcgttgactccctcctagtagagctatctaggtttgtctggaaagtttccgaccctggcttataggcaccacacctcatgtactcctcatggcttggatctctgtattcagcctttgttcagtccaataaactttgagtagatgatctcnnnnnnnnnnnnnnnnnnnnnnnnnnnnnnnnnnnnnnnnnnnnnnnnnnnnnnnnnnnnnnnnnnnnnnnnnnnnnnnnnnnnnnnnnnnnnnnnnnnnnnnnnnnnnnnnnnnnnnnnnnnnnnttttgggcggnnnnnnnnnnnnnaaaatcccaaaaatttgggggtctcccgggaaacctccacnnnnnnnnnnnnnnnnnnnnnatcaaaagaaaaagattttcaaaccccccttggggacccggaaggaacttcc

SEQ ID NO: 169516 - DNA, 1022 bp, Homo Sapiens
  misc_feature (729)..(729): n is a, c, g, or t
  misc_feature (802)..(802): n is a, c, g, or t
  misc_feature (963)..(963): n is a, c, g, or t
  misc_feature (991)..(991): n is a, c, g, or t
  misc_feature (1012)..(1012): n is a, c, g, or t
gggcactcaaacttgctatccacacaccctgcacaccttagataaaaagaacattttaaaagcagagttcactttcactccagtctcccctctttttccctcactgaagccaaaccacagaagactttgaggaatgagagacaaatgaggtagagctcacctgtgctcaccagctccgtcagggtggtcagccgacccctttccctgggaaccccacttctctctgtggctggcttggttgtcgggggtgagatgccatattgattacagggcagcaaagaaccagtaccaggaatttacttgaccattccccttatttttcatctagaggaatctcggattcagccctttcattgctaagacaccttttcactgaggttcttaccagctcagccaaatctccactctgctatagcagaagcaataatgtttgctttaaaaagatttcttgacctatgccttttcttagaaagtttgatagattagttagaacttcagatcatcagatcagtctcaaatgggtttcttggaaatttatatttgacaatatttatactataccaaactcatttgcagttcttaggtttgttggttaaaaaatttttttaaaagcagtaaagttataagaaaatgtttttcatttaatggaaggctgggggaatgtccaccatcaaacccctatggcatgcattcccaagtggcctttctcatctgggcctggaacctttngttcagggcttaggggagaacaggccacatggcaacagccacacagtcattgccttcaacacagagccacgtntccccaaacagcaatagtcatgcccttgtccagggtgggatctaattgatacaataggtcgttgactccctcctagtagagctatctaggtttgtctggaaagttttccgaccctgggttataggcaccacacctcatggtactcctcatgggcttgggtntctgttatttcagccttttgtttcagtnccaataaacttttgagtaggntgatctcata

SEQ ID NO: 169517 - DNA, 786 bp, Homo Sapiens
gggaaacactctgtgtggctcctcggctttgacagagtgcaagacgatgacttgcaaaatgtcgcagctggaacgcaacatagagaccatcatcaacaccttccaccaatactctgtgaagctggggcacccagacaccctgaaccagggggaattcaaagagctggtgcgaaaagatctgcaaaattttctcaagaaggagaataagaatgaaaaggtcatagaacacatcatggaggacctggacacaaatgcagacaagcagctgagcttcgaggagttcatcatgctgatggcgaggctaacctgggcctcccacgagaagatgcacgagggtgacgagggccctggccaccaccataagccaggcctcggggagggcaccccctaagaccacagtggccaagatcacagtggccacggccacggccacagtcatggtggccacggccacagccactaatcaggaggccaggccaccctgcctctacccaaccagggccccgggggcctgttatgtcaaactgtcttggctgtggggctaggggctggggccaaataaagtctcctcctcccgaaaaccccaactcgcgccaaacacaacccttgccggcccgccttcggcccctccagaaagttttctacaccctttccttttggggggcccgggcccccgccagggtaaggggaaacctgggtgccacaagcttgttttctcctcagagaaacatcctctgcgcccaataggacctaagcggcctctggggaattccccacccacacaag

SEQ ID NO: 169518 - DNA, 715 bp, Homo Sapiens
gggaccctgtctccagtgggcgtcttgggccccggatctattctgggctgcgggcctgggaagggctcgccgggtgccaaatgagctgtcctaactctgcggggctgcagcttcctgcatgatgctggggagcttggcgcctgacccaggatctagaaggcactctgggcaggccgcgctccgcccacgaaggtacccaaccctctgggatgagatgcaggaagcgatggttaagacccattttcacccaacttctcgccgcaggtctgggcttaccacacgctcctccccattcccagtgagccgctttttgcagcaccaggcgaacacttacaccagtgctttgtaaaggaatcttattgtccaccccgtgtcttggcaaaagaacagtgatcacacagattcctacttgggctctttcctttaatcttcggaggctgagtttgcccaactcaggtttaaccaccaaggactctgagagctggcaggtctgagtaaccctggtaacaattctcttcaccttatcaaaacctgagctaaaaccaatgcatcagctgatgatgacagcagagagtggcagggctgaggacccaaagtcatttcccaggctggcggagaataaactgccagggagaagaatgagaagacaggagacaaactgtttggaaagctaaatcttccctcttaatgaataaaggtttttgccttgtcttaa

SEQ ID NO: 169519 - DNA, 1055 bp, Homo Sapiens
  misc_feature (93)..(93): n is a, c, g, or t
  misc_feature (104)..(104): n is a, c, g, or t
  misc_feature (211)..(211): n is a, c, g, or t
  misc_feature (341)..(341): n is a, c, g, or t
  misc_feature (355)..(355): n is a, c, g, or t
  misc_feature (940)..(955): n is a, c, g, or t
tgtttttccccttgccccccttggggtttccttaagttcttaaggggaatgcccctttcaaaaccacatcattcttgttccccaggttccttncaaattcccgncctttggcggaaagcatagattgttacacccctccccttcccctcgtgagattggcctttcggtgaggaatttcagggcttttccccatatcttctctccccccacntttatcgaggggtgctgctttttctccctccctctcaaagttcctttttgcacggtcacccacccaacaccttccatgacacttcttggctttggccagaagccatcaggtaaggttggaaagagcctcntgacctcccctgtnttagttttggaaccatactcactcactctccaccagcctgggaaatgaatattgggtcctcagccctgcccaccctctgctgtcatcagctgatgcattgtttttagcccaggttttgataaggtaaaaagaatagtcaccagggttactcagacctgccagctcttcggagtccttggtggttgaacttggagaaagaccgcatgaagatacttgtaagcacacatgatccctctgaattgttttactttcctgtaactgcttttgcttttaaaaattgaagaagttttaaacagggctttcatttggtcatccttgcaatccattggggtctagtttggaatctgacaactggaacaaaaagaaccttgaatccggtgcatgccttggttttggtgctgctgctgcttcccaagatcctcagcagggattaagaaggaacccggtgtgcacagcagatccccgaaattggtgggcttgacctcctggcaaattgctgcgtctttccacttgctgttcaggaccactaaatgctgaaatgtggatgcataccgaaataaaagcaattcattgtgtactaaaggnnnnnnnnnnnnnnnnaatttagtatttgtgtaaaaccaccttttgaaggcaggcaactatcaagtctggaaaaggcaattggatgtttccattaaatctttttctggggggggaa

SEQ ID NO: 169520 - DNA, 890 bp, Homo Sapiens
  misc_feature (33)..(34): n is a, c, g, or t
gcatccacatttccagcatttagtggtcctganncagcaagtggaaaagacgcagcaatttgccagagggtcaagccccaccatttcgggggatctgctgtgcacaccgggttccttcttaatccctgctgaggatcttgggaagcagcagcagcaccaaaaccaaggcatgcaccggattcaaggttctttttgttccagttgtcagattccaaactagaccccaatggattgcaaggatgaccaaatgaaagccctgtttaaaacttcttcaatttttaaaagcaaaagcagttacaggaaagtaaaacaattcagagggatcatgtgtgcttacaagtatcttcatgcggtctttctccaagttcaaccaccaaggactccgagagctggcaggtctgagtaaccctggtgactattcttttcaccttatcaaaacctgagctaaaaacaatgcatcagctgatgacagcagagggtggcagggctgaggacccaatattcatttcccaggctggtggagagtgagtgagtatggttccaaaactaaacaagggaggtcagaggctctttccaaccttacctgatggcttctggccaaagcaaggaagtgtcatggaaggtgttgggtggtgacggtgcaaaaaggaacttgaggaggagggagaaaaagcagcacccctcgataaaggtgggggagagaagatatggggaaagccctgaattcctcaccgaaggccaatctcagaggggagtggaggggttacaatctatgcttcggccaagggcgggagtggaggagcgtggggacaggatgatggtttggaaggggcatcacttaagacttaaagaaaccaggggtgcaggcgaaacaccccacacacctagca

SEQ ID NO: 169521 - DNA, 880 bp, Homo Sapiens
  misc_feature (839)..(839): n is a, c, g, or t
ggtctctgccttctccccttaccctcccgcctcccaccctccctgcaacaacagccctctagcctggggggcttgttagagtagatgtgaaggtttcaggtcgcagcctgtgggactactgctagcgatgtgtggagagtttcgactgaacccctggttactataagtcttaagtgatgccccttccaaaccatcatcctgtccccacgctcctccactcccgcccttggccgaagcatagattgtaacccctccactcccctctgagattggacttcggtgaggaactcagggctttccccatatcttctctcccccaactttatcgaggggtgctgctttttctccctcctcctcaagttccttatagcaccgtcaccacccaacaccttccatgacacttccttgctttggccagaagccatcaggtaaggttggaaagagcctctgacctcccttgtaaagtattggaaccatactcactcactctccaccagcctgggaaatgaatattgggtcctcagccctgccaccctctgctgtcatcagctgatgcattgtttttagctcaggttttgataaggtgaaaagaatagtcaccagggttactcagacctgccagctctcggagtccttggtggttgaacttggagaaagaccgcatgaagatacttgtaagcacacatgatccctctgaattgttttactttcctgtaactgcttttgcttttaaaattgaagaagttttaaacagggctttcatttggtcatccttgcaatccattggggtctagtttggaatctgacaactgggaacaaaaagaaccttgaaatccggnggcatggccttgggtttttggtggctggctgggctgctttc

SEQ ID NO: 169522 - DNA, 910 bp, Homo Sapiens
  misc_feature (590)..(590): n is a, c, g, or t
  misc_feature (592)..(593): n is a, c, g, or t
  misc_feature (600)..(601): n is a, c, g, or t
  misc_feature (610)..(610): n is a, c, g, or t
ggtctctgccttctccccttaccctcccgcctcccaccctccctgcaacaacagccctctagcctggggggcttgttagagtagatgtgaaggtttcaggtcgcagcctgtgggactactgctaggtgtgtggggtgtttcgcctgcacccctggtttctttaagtcttaagtgatgccccttccaaaccatcatcctgtccccacgctcctccactcccgcccttggccgaagcatagattgtaacccctccactcccctctgagattggccttcggtgaggaattcagggctttccccatatcttctctcccccacctttatcgaggggtgctgctttttctccctcctcctcaagttcctttttgcaccgtcaccacccaacaccttccatgacacttccttgctttggccagaagccatcaggtaaggttggaaagagcctctgacctcccttgtttagttttggaaccatactcactcactctccaccagcctgggaaatgaatattgggtcctcagccctgccaccctctgctgtcatcagctgatgcattgtttttagctcaggttttgataaggtgaaaagnannatagtcnnaccaggggntttaactccagacctgccaggctctcggagtccttggtggttgaacttggagaaagaccgcatgaagatacttgtaagcacacatgatccctctgaattgttttactttcctgtaactgcttttgcttttaaaaattgaagaagttttaaacaggggctttcatttggtcatccttgcaaatccatttggggtctagttttggaaatctgaccactggaaacaaaaaagaacccttggaatcccggtgcaatgccctttggtttttgggtggcttgctggcctgctttccccaaagatcc

SEQ ID NO: 169523 - DNA, 461 bp, Homo Sapiens
gggacgaacacgtgacgcggtcgggcggaccactgcagactgagcggtggaccgaattgggaccgctggcttataagcgatcatgtttctccagtattacctcagcccatcctgctcggttctccccagatgacaaatactctcgacaccgaatcaccatcaagaaacgcttcaaggtgctcatgacccagcaaccgcgccctgtcctctgagggtcccttaaactgatgtcttttctgccacctgttacccctcggagactccgtaaccaaactcttcggactagtgagccctgatgcctttttgccagccatactactatatggcatccagtctctcgtggcgattgattatgcttgtgtgaggcaatcatggtggcatcacccaataaagggaacacatttgacttttttttctcatattttaaattactacaagattattaaagataaaatgatttc

SEQ ID NO: 169524 - DNA, 884 bp, Homo Sapiens; identical to SEQ ID NO: 83938
  misc_feature (568)..(568): n is a, c, g, or t

SEQ ID NO: 169525 - DNA, 465 bp, Homo Sapiens
  misc_feature (423)..(423): n is a, c, g, or t
ggaagagaagccttgtgtgtgcagagagtgtggccaaggctttctccaaaagtcacacctcaccttacatcaaatgacacatacgggggagaagccatatgtgtgcaagacgtgtgggcggggcttcagcctcaagtctcacctcagcagacacaggaagacacgtctgtccaccacagactgccagtgcagcccgaccctgagccgtgtgcagggcaaccttcggattccttatactctctctgaaggcaaagatggggacaaggactaagagtcagaatgttgacactttgatgaaatggagtagagaaatgcattctgtaagtggtcaaaggacatttgactgtttactttctccacactaagtcttctccatgttttgtggccttcggttgtaataaacttggcttctttatacaaaancacagggccttaacaaaaacacaaacgtggtgggccgccctc

SEQ ID NO: 169526 - DNA, 705 bp, Homo Sapiens
  misc_feature (607)..(648): n is a, c, g, or t
gggcatatcaatcagttaatacacttaatgttgcatgagtgatattttggtctgggtttcctcttaagattttagtttgtctgaattaaggaaaaatgtttttaatatacattcttattttgtcccacccctccagaaataagctggaaatcttaactttttggggggtcttttttggtgttttaatgggcccagaactgtggtttaaatttttatgtatgtattttcttttttgtggagtataaatttaaaaactggatttgggacctaaaatactcctcaggttgatgtattcatgaagttttaaaacatttttagttttcaaagtaaactggatatgtggaccttaaagttattgagtttaagctacaaattgtaacgtcattactggacatgtcagcatcaaccctctcaaaatagctcggtcactattatgaaggggcgtttaaaagttgtagtttagcagtgacatttaatatggtccaatagcttttctttttaacgtgacaaaaagagaataaggaacaaacactattgctgccgaatgccataacactgagttgtacaaattgtgattgaggaaatgaaaaggtttcatcactttttnnnnnnnnnnnnnnnnnnnnnnnnnnnnnnnnnnnnnnnnnnttcaacatggacatcacattcatcccatgaagccttaacaaaaacacaacacaaaac

SEQ ID NO: 169527 - DNA, 176 bp, Homo Sapiens
gaattcgagctcggtacccctatcaactgaggcgattccgtgcatcaataaagcaaaaacaaaacaacacgtgtagatccaacacattcaggtcagtagaaacaaaccaaaacattttcccctcacaaacttgcaacaaaatacaccccatccccccctcatccgcttatccaatg

SEQ ID NO: 169528 - DNA, 269 bp, Homo Sapiens
accgtcgatcagcatcacgctgagttgtgctgatagaaattgcattgtctatacatgcaaaagactattaagttaggatgaactagattccctaattacagtgaaattctatcttgcaaatgctatagaataacttgcattttaaagtgtatttgcacattttacatatgctatgtggttgcctttgggttttctgtacagattgtttttgttattaacatggaaaaggcctgaattatgctcttatgtgaagtaaattgatataacct

SEQ ID NO: 169529 - DNA, 777 bp, Homo Sapiens
  misc_feature (582)..(591): n is a, c, g, or t
  misc_feature (593)..(610): n is a, c, g, or t
  misc_feature (702)..(702): n is a, c, g, or t
gggaggggactccgggaggaggaacatggcggtggcggacctcgctctcattcctgatgtggacatcgactccgacggcgtcttcaagtatgtgctgatccgagtccactcggctccccgctccggggctccggctgcagagagcaaggagatcgtgcgcggctacaagtgggctgagtaccatgcggacatctacgacaaagtgtcgggcgacatgcagaagcaaggctgcgactgtgagtgtctgggcggcgggcgcatctcccaccagagtcaggacaagaagattcacgtgtacggctattccatggcctatggtcctgcccagcacgccatttcaactgagaaaatcaaagccaagtaccccgactacgaggtcacctgggctaacgacggctactgagcactcccagcccggggcctgctgcctccagcagccacttcagagcccccgcctttgcctgcactcctcttgcagggctggccctgcctgctcctgcggcagcctctggtgacgtgctgtccaccaggccttggagacaggctagcctggccacagaattaaacgtgttgccacaccgnnnnnnnnnncnnnnnnnnnnnnnnnnnnccatgtcggccgccctcgggcctcgagaaagttttctagaacctttcgttttggcggcgccgggcccaagtagggtaagggaaacatgggtncaatagcttggtttccttagggaagaatccgtgggcccatggaccaaagggcctttgggaattccccaccacaat

SEQ ID NO: 169530 - DNA, 489 bp, Homo Sapiens
gaggtagcgaggcgtctgctctaggcagagtccgggacatggactcctgacacacagcacgcagagaggactcaagactcccgctggccatggagtggcctgaaagagagcaagaacatgtggatctttgataggattgttaccaaatggtgtcagtatggaccaattgtgtgaccatgagaaggatgcttattttttttaaaaagaaaacacatctaaaagcccaggaactgatttttttaagaggaaaactaatgacagtgtataactgatgtttaaattgtgcatttagtactatttaaatgttttcttatactagtattttatattcttttgttgtcgtttaaaactggagcttcagtgtctcttccctccctctaatagtaatggttcagtaagcactccttaactccttagtatttcatagaaaaatgacctgcaacattaaagctaagaggaacacttcaacatatgtggtacaaatttata

SEQ ID NO: 169531 - DNA, 328 bp, Homo Sapiens
cagctggtaccggcatgtgctgtaggccagcgcagctgcatcgagaacatcctcagggcctgcgtggggctcccgccacagaaccacatgctcctggaacacaaaatggagcgcccagggcccagcctcaagcgagttggacccgtggctgccacctaccctatgttgaacaagaaaggaccggtacccgctgccaccaatggctgcaccggtgatgccaatgggcatctgcaagaggagcccccaatgcccaccacctgaggccccggtcacacagtttctcggctcttcctccccgctggcctacagcacatgccggtaccggctg

SEQ ID NO: 169532 - DNA, 806 bp, Homo Sapiens
  misc_feature (321)..(444): n is a, c, g, or t
  misc_feature (451)..(464): n is a, c, g, or t
  misc_feature (490)..(499): n is a, c, g, or t
  misc_feature (503)..(584): n is a, c, g, or t
  misc_feature (599)..(659): n is a, c, g, or t
  misc_feature (685)..(694): n is a, c, g, or t
aaccccgaaaatagctgtcacttccgagatctaatctcccccatacagctctgccaggaattctttcagacctcactagcacaagcccggttgctccattgtcaggagaatttgtagatcattctcacttcaaattcctggggctgatacttctctcatcttgcaccccaacctctgtaaatagatttaccgcatttacggctgcattctgtaagtgggcatggtctcctaatggaggagtgttcattgtataataagttattcacctgagtatgcaataaagatgtggtggccactctttcatggtggtggcagcagttnnnnnnnnnnnnnnnnnnnnnnnnnnnnnnnnnnnnnnnnnnnnnnnnnnnnnnnnnnnnnnnnnnnnnnnnnnnnnnnnnnnnnnnnnnnnnnnnnnnnnnnnnnnnnnnnnnnnnnnnnnnnttggggnnnnnnnnnnnnnnaaaaaattttttaaaacctttttttnnnnnnnnnncccnnnnnnnnnnnnnnnnnnnnnnnnnnnnnnnnnnnnnnnnnnnnnnnnnnnnnnnnnnnnnnnnnnnnnnnnnnnnnnnnnncccccgggggaaccnnnnnnnnnnnnnnnnnnnnnnnnnnnnnnnnnnnnnnnnnnnnnnnnnnnnnnnnnnnnncccaggggggcctaatttaaatttannnnnnnnnnggcccttattgggagaagggtggaattttttaaaactttccgccgactgggaaccctccccaacggggtgggagaacctgaatcccccggggaatccccaccttggccccct

SEQ ID NO: 169533 - DNA, 665 bp, Homo Sapiens
  misc_feature (56)..(118): n is a, c, g, or t
  misc_feature (135)..(143): n is a, c, g, or t
  misc_feature (197)..(210): n is a, c, g, or t
  misc_feature (212)..(452): n is a, c, g, or t
cgcgggtcgttgttgttttttcttccggccccgcgggtggtcccccccggggcggnnnnnnnnnnnnnnnnnnnnnnnnnnnnnnnnnnnnnnnnnnnnnnnnnnnnnnnnnnnnnnnggcccgtggggcgcggnnnnnnnnngtctgctggggggcccccgtccccccggtggggtgttttttttggggttttttnnnnnnnnnnnnnntnnnnnnnnnnnnnnnnnnnnnnnnnnnnnnnnnnnnnnnnnnnnnnnnnnnnnnnnnnnnnnnnnnnnnnnnnnnnnnnnnnnnnnnnnnnnnnnnnnnnnnnnnnnnnnnnnnnnnnnnnnnnnnnnnnnnnnnnnnnnnnnnnnnnnnnnnnnnnnnnnnnnnnnnnnnnnnnnnnnnnnnnnnnnnnnnnnnnnnnnnnnnnnnnnnnnnnnnnnnnnnnnnnnnnnnnnnnnnnnnngaatgccaagtctcttctgtactttcttttattaacatcatagtctttgcatcaagatacatagcaatgatagcaggtttctttttaaagcttagtattaaatattaaatatcttcactcagccattgtacctcacccccaccataattaaaggaacaaatggaataaatattgtgttggcagcattaagaaaaatcttaataaaaattaaat

SEQ ID NO: 169534 - DNA, 1126 bp, Homo Sapiens
  misc_feature (47)..(47): n is a, c, g, or t
  misc_feature (58)..(58): n is a, c, g, or t
ccctggcgatcggttgcccttgcctcagggtttcgggagctgttgcnccctggaaccnaccgctggcccttcctgggacctcgccttcccgtggtaggggacgtgaaccagcccccctggtggagctttgtgttgcagtgaggccacaaagcaaaggcccagaggcagaggcctgacactggctgtggtcgacggtcacaccttgactccctctctctctctgaatatacaacgtgtgggtgggcccgttcagcagatgttacaggaaaaatagcaaatttttaacttattccatctccaaagttgaaaaagatcagacagttactaaaataaacgattttctcaattgcattctggtgcccgtgggcccggtggccgcggcgtggccggggcgttgaaggtggaagggccccgggctgagtgaggggctcactcagaaacaggcacagtcagctgggctgagcgaggctcagagtaaggcggtgttcctcacagaagaacacatcggaaaaagctgctcctcttctgctggtccggtgtgattttgactccctggttgctccccggggggctgttgccttccaattttttgtccatttttgctttgatatctctggcgagagtgaaaaatgcattttccacattgatgttggccttcgcgctggtctccatgaacttgattccatagtcgagggccagcttttctccccgttccttggaaacttgtctcttgtcattcacatcacacttgttcccgagtatcatcttttcgacgtctgcagaggcgtgctcctcaatgttgcgaatccagttccggatgttgtcgaaggacttctcgttggtgatgtcgtagaccagcatgatgcccattgcacccctgtagtaggccgttgtgatcgtccgaaaccgttcctgaccggctgtgtcccatatctgcagtttaattctcttgccatcgagctctatggtcctaattttaaagtcaattcctatggtggagataaaagtggagttgaaggcgtcctcggagaagcggaacaggacacaggtcttccccacccccgagtccccgatcagcagcagcttgaacaggtaatcgtaggtcttcgccatattacactctccc

SEQ ID NO: 169535 - DNA, 1147 bp, Homo Sapiens
  misc_feature (784)..(810): n is a, c, g, or t
ctgcaacacaaagctccaccaggaggctggttcacgtcccctaccacggaagcgaggtcccagaaggccagcggtggttccaggagcaacagctcccaaaccctgagcaaggcaaccgatcgccaggaccaggaagcatcacccaggagatttggcgcccacttccacctcttctctcagttttggacaagtgacaaaccattttgccccctcactcttcttttttaactgttaaaccaaaggaaagcacaaatgaaggaaatcctgtgtaaagcattgagaaggaaagaagcctggagcagcctctcctgtccacagccaggggttaggtctgcaggcccgtctgcggtccccatcgagcatcaaggggacgctgtgtgtgctgcaagtgaccccgaaaacaaccacagccgtcacatggtcctcctgaagttggggcaccctcctctcagcaccaaaatggcccccactccttcgtgtcctcccgctatctccaaatcggacgttctttctagctgagatttttatttttccacatctgtagtgccatgaagcgattctgtctttgacttccaatggcaaacctgggtgatagggaacaagcacgttgtacccttggctggacatggccaagacacaaggcattccacggcggcaagctgaccgcacagcagtctggcttgattttcagccgtcatcattgggttctgttttgacagctctgctgtcccatagggactgcgactgggaccaggtcaaccacaccaggagggtgtcaccagcnnnnnnnnnnnnnnnnnnnnnnnnnnnatgttgtatccctccttaaagctggtggtcaaatccaaaacctatgggcatcaacggttccgttgggaattaaacccaatatatcaagcaatagtctgggtctccccggggaatctttaacatggctcggttcacatcgataaaggcacttaggggacaaccaacaatttaaaggctcatcctaaaggtcccaggcgcttttagtgtccacattttcctctgttgtgccacagggactgtgcccaggttgcttggcggtgggttctggaccaaatgtgttgagcccgtggtttccccattgaaggaggcacctcagaggaaattgcccccattttag

SEQ ID NO: 169536 - DNA, 779 bp, Homo Sapiens
cgatccacgcgtcctacagttagcctccgcctcccgattgactggcctgcttggcaaggcaagtagcggcggcgcttcaagatgcgctgcctgaccacgcctatgctgctgcgggccctggcccaggctgcacgtgcaggacctcctggtggccggagcctccacagcagtgcagtggcagccacctacaagtatgtgaacatgcaggatcccgagatggacatgaagtcagtgactgaccgggcagcccgcaccctgctgtggactgagctcttccgaggcctgggcatgaccctgagctacctgttccgggaaccggccaccatcaactacccgttcgagaagggcccgctgagccctcgcttccgtggggagcatgcgctgcgccggtacccatccggggaggagcgttgcattgcctgcaagctctgcgaggccatctgccccgcccaggccatcaccatcgaggctgagccaagagctgatggcagccgccggaccacccgctatgacatcgacatgaccaagtgcatctactgcggcttctgccaggaggcctgtcccgtggatgccatcgtcgagggccccaactttgagttctccacggagacccatgaggagctgctgtacaacaaggaaaagttgctcaacaacgggggacaagtgggaggcccgagatccccgcccacatccagggctgactacctgtatcgggtgaacgcccccaccgggcccgcagccccctgccgccccaataaaaaccacttccgaccccaaaa

SEQ ID NO: 169537 - DNA, 696 bp, Homo Sapiens
tggcaaggcaagtagcggcggcgcttcaagatgcgctgcctgaccacgcctatgctgctgcgggccctggcccaggctgcacgtgcaggacctcctggtggccggagcctccacagcagtgcagtggcagccacctacagatcccgagatggacatgaagtcagtgactgaccgggcagcccgcaccctgctgtggactgagctcttccgaggcctgggcatgaccctgagctacctgttccgggaaccggccaccatcaactacccgttcgagaagggcccgctgagccctcgcttccgtggggagcatgcgctgcgccggtacccatccggggaggagcgttgcattgcctgcaagctctgcgaggccatctgccccgcccaggccatcaccatcgaggctgagccaagagctgatggcagccgccggaccacccgctatgacatcgacatgaccaagtgcatctactgcggcttctgccaggaggcctgtcccgtggatgccatcgtcgagggccccaactttgagttctccacggagacccatgaggagctgctgtacaacaaggagaagttgctcaacaacggggacaagtgggaggccgagatcgccgccaacatccaggctgactacttgtatcggtgacgccccaccggcccgcagcccctgctgcccaataaaacccactcgacccc

SEQ ID NO: 169538 - DNA, 812 bp, Homo Sapiens
  misc_feature (751)..(751): n is a, c, g, or t
cgattgactggcctgcttggcaaggcaagtagcggcggcgcttcaagatgcgctgcctgaccacgcctatgctgctgcgggccctggcccaggctgcacgtgcaggacctcctggtggccggagcctccacagcagtgcagtggcagccacctacaagtatgtgaacatgcaggatcccgagatggacatgaagtcagtgactgaccgggcagcccgcaccctgctgtggactgagctcttccgaggcctgggcatgaccctgagctacctgttccgggaaccggccaccatcaactacccgttcgagaagggcccgctgagccctcgcttccgtggggagcatgcgctgcgccggtacccatccggggaggagcgttgcattgcctgcaagctctgcgaggccatctgccccgcccaggccatcaccatcgaggctgagccaagagctgatggcagccgccggaccacccgctatgacatcgacatgaccaagtgcatctactgcggcttctgccaggaggcctgtcccgtggatgccatcgtcgagggccccaactttgagttctccacggagacccatgaggagctgctgtacaacaaggagaagttgctcaacaacggggacaagtgggaggccgagatcgccgccaacatccaggctgactacttgtatcggtgacgccccaacgggcccgcagcccctgctgcccaataaaaccactccaccccaaagatgagtcagaaggcaancaaaaaactgtcggccgcctccggcctcaaaagctttcataaccatttcgttgggcgcgct

SEQ ID NO: 169539 - DNA, 124 bp, Homo Sapiens
aaatgatcagtcgtcctatagcgctagtcagaattatagcccttagcaacgactgctgctggtgtgtatttttgtaaatgttatgcactctctgaaaggaaaaacacacacaaaagaaaaagac

SEQ ID NO: 169540 - DNA, 483 bp, Homo Sapiens
gggatgatgggaggggccagtgaggacaggaacagagagtagatgtcctataataaaggggcttctgggaggtgcctgggcacagatgtctgttcagcaggtgtgtgggcctagaggagagagcagagcccagaaatgtcttttgcaggcccacgtttctgacttgaagctttcgtgggcatgttgccattgggttttgcccttgcaaaggcttcctaggtctccagatggcccctcaggacccagggtcccagctgctgctaggggatgtgcactgctggccgccggccttgcagtctctctaccctggggaggaacagtggcttctcagagcctggggcatacagaagaaggcaggagttgatttttgtgttgggtttggggtttctttgtcctcaaggtactgttctgtttctctttacccctctgctttatttattgtaagcattcccacgttaaataaactttggctgttgtctacca

SEQ ID NO: 169541 - DNA, 662 bp, Homo Sapiens
tgctgccagaggttacgttcggcagtatgtgactctggtggtggatgtttccaatagaggaccccgcaacgccccgggtcagcccggcacactcccctcctgaaaatgggctggacaaggcccgtagcctgaaaaaagatgcccccaccagccctgcctcggtggcctcttccagtagcacaccttcctccaagaccaaagaccttggtcataacgacaaatcctccacccctgggctcaagtccaacacaccaaccccaaggaacgacgccccaactccaggcaccagcacgaccccaggtctcaggtcgatgccgggtaaacctccgggcatggacccgatagcctcggctctgcgcacgcccatctccatcaccagctcctatgcggcgcccttcgccatgatgagccaccatgagatgaacggctccctcaccagtcctggcgcctacgccggcctccacaacatcccaccccagatgagcgccgccgccgctgctgcagccgctgcctatggccgatcgccaatggttggttttgaccctcaccccccgatgcgggccacaggcctcccctcaagcctgggctccattcctggaggaaaacagcgtactcattccatgtgagtgctgatgggcagatgcgccgtgccttccccagag

SEQ ID NO: 169542 - DNA, 716 bp, Homo Sapiens
gatggcggggaggggtaagctcatcgcagtgatcggagacgaggacacggtgactggtttcctgctgggcggcataggggagcttaacaagaaccgccatcccaatttcctggtggtggagaaggatacaaccatcaatgagatcgaagacactttccgttcacttggaagccttccgggcagtgttgtagaagccaaccctaatcagcgtgaccctccgctttgggatgaaattgattctaggcaatttctaaaccgggatgacattggcatcatcctcatcaaccagtacatcgcagagatggtgcggcatgccctggacgcccaccagcagtccatccccgctgtcctggagatcccctccaaggagcacccatatgacgccgccaaggactccatcctgcgcagggccaggggcatgttcactgccgaagacctgcgctaggggactcctcatagccctcagcccttccctcgtttccaggcctctccccaggcttgccatcagccttctttactttttgagcctctgatttccaattccctgctccttcccactccattaagaggctaggtgaggcgcttctaggttgctggggctctgctggttaaggaacaggaagcctgaccatctccctccactacctcttccctgtgctgttacacagcgtcattgttgatgttaaattaaagtcatattcttgcttctctgcaaa

SEQ ID NO: 169543 - DNA, 909 bp, Homo Sapiens
  misc_feature (719)..(725): n is a, c, g, or t
  misc_feature (727)..(731): n is a, c, g, or t
  misc_feature (733)..(733): n is a, c, g, or t
  misc_feature (736)..(737): n is a, c, g, or t
  misc_feature (740)..(740): n is a, c, g, or t
  misc_feature (743)..(745): n is a, c, g, or t
ggggaggccgacggggcgccgtacggcggaggcggggtttcagtggcttctggtgctctagggtgagctctgcccggctgcagggatggcggggaggggtaagctcatcgcagtgatcggagacgaggacacggtgactggtttcctgctgggcggcataggggagcttaacaagaaccgccatcccaatttcctggtggtggagaaggatacaaccatcaatgagatcgaagacactttccggcaatttctaaaccgggatgacattggcatcatcctcatcaaccagtacatcgcagagatggtgcggcatgccctggacgcccaccagcagtccatccccgctgtcctggagatcccctccaaggagcacccatatgacgccgccaaggactccatcctgcgcagggccaggggcatgttcactgccgaagacctgcgctaggggactcctcatagccctcagcccttccctcgtttccaggcctctccccaggcttgccatcagccttctttactttttgagcctctgatttccaattccctgctccttcccactccattaagaggctaggtgaggcgcttctaggttgctggggctctgctggttaaggaacaggaagcctgaccatctccctccactacctcttccctgtgctgttacacagtgtcattgttgatgttaaattaaagtcatattcttgcttctctcccaaccnnnnnnncnnnnncnccnnaanccnnnccttgtcgggccgcctcgggccctcggagagcttttcctagaccatttcgctttggcgcggcgggccccagttagggtaagtgaaacatggggccataagctggttttccctaaggaggatccctgggccatggactaacggcctctgggattctccccaaatt

SEQ ID NO: 169544 - DNA, 502 bp, Homo Sapiens
cgttctctgcccgtgctgggcctgggattgctgctcactcccttgccgccccccgttgtggtgccctgcctgtcccccgtggtcgctggctatggctcaccagggcagaagggcacggtcatgggtacaatgcgcagcctaggtgctctggccagggccgcggggcccctggtggccgcttcagaagctgagttacccggcacagacgctcaaggctgagtagctgagccactgtgcccaggctgtgggcaccaggcagagtgggagcctaggtcaggcccctgcccactgcctgacccccaccccccgccagtccagggagaccctgtgggtgggggccggcccctaagcaggaagctcaggcagctcctccagacttacttactccttcagtgactccgagctgcagcactccaaggctgtcagggcttctgtttgttttttaaactatgcaccaggtttctgatgcatgaaataaagcacctgtttgttttataaaaaa

SEQ ID NO: 169545 - DNA, 499 bp, Homo Sapiens
ggacgcgtgggtcgacccacgcgtccggacccacgcgtccgggcacggtcatgggtacactgcgcagcctaggtgctctggccaggccgcggggcccctggtggccgcttcagtgtactggctggccggggcccaggcctgcttcaccacgtggtccgggctctttttgctccccttcttcctcctgcagaagctgagttacccggcacagacgctcaaggctgagtagctgagccactgtgcccaggctgtgggcaccaggcagagtgggagcctaggtcaggcccctgcccactgcctgacccccaccccccgccagtccagggagaccctgtgggtgggggccggcccctaagcaggaagctcaggcagctcctccagacttacttactccttcagtgactccgagctgcagcactccaaggctgtcagggcttctgtttgttttttaaactatgcaccaggtttctgatgatgaaataaagcacctgtttgtttt

SEQ ID NO: 169546 - DNA, 851 bp, Homo Sapiens
  misc_feature (570)..(612): n is a, c, g, or t
  misc_feature (614)..(623): n is a, c, g, or t
  misc_feature (625)..(626): n is a, c, g, or t
  misc_feature (630)..(636): n is a, c, g, or t
  misc_feature (638)..(643): n is a, c, g, or t
  misc_feature (645)..(654): n is a, c, g, or t
  misc_feature (728)..(728): n is a, c, g, or t
ggggcgatagccagccgcggctgcccttgcgcttcccgagctggcggggtccgtggtgcgggatcgagattgcgggctatggcgccgaaggtttttcgtcagtactgggatatccccgatggcaccgattgccaccgcaaagcctacagcaccaccagtattgccagcgtcgctggcctgaccgccgctgcctacagagtcacactcaatcctccgggcaccttccttgaaggagtggctaaggttggacaatacacgttcactgcagctgctgtcggggccgtgtttggcctcaccacctgcatcagcgcccatgtccgcgagaagcccgacgaccccctgaactacttcctcggtggctgcgccggaggcctgactctgggagcacgcacgcacaactacgggattggcgccgccgcctgcgtgtactttggcatagcggcctccctggtcaagatgggccggctggagggctgggaggtgtttgcaaaacccaaggtgtgagccctgtgcctgccgggacctccagcctgcagaatgcgtccagaaataaattctgtgtctgtgtgnnnnnnnnnnnnnnnnnnnnnnnnnnnnnnnnnnnnnnnnnnnannnnnnnnnnanntttnnnnnnnannnnnnannnnnnnnnnaaaaaatgggggcccgcctcgggccctcgaaaaacttttttaaaccatttcgtttgggcgccgcgggcccccanaagggtaaagggaacctgggccataacctgttttcccaaggaaaatcctgggcccatgaccagaggcttgggaattccccaccacataaaaaaacgcccggggggaaaaaccgaagggtttct

SEQ ID NO: 169547 - DNA, 392 bp, Homo Sapiens
  misc_feature (27)..(27): n is a, c, g, or t
  misc_feature (62)..(62): n is a, c, g, or t
  misc_feature (175)..(175): n is a, c, g, or t
  misc_feature (189)..(189): n is a, c, g, or t
gttcactgcagaaaactggcagtgaancgcccaaaaggctcctgctgtgccccgtctcgaangcccttgctcttcccgtctacacccgcaactgctgtcggggccgtgtttggcctcacccacctgcatcagcgcccatgtccgcgaaaaacccgacgaccccctgaactacttncctcggatgctgcnccggaggcctgactctgggagcacgcacgcacaactacgggagttgcgccgccgcctgcgtgtactttggcatagcggcctccctggtcaagatgggccggctggagggctgggaggtgtttgcaaaacccaaggtgtgagccctgtgcctgccgggacctccagcctgcagaatgcgtccagaaataaattctgtgtctgtg

SEQ ID NO: 169548 - DNA, 2052 bp, Homo Sapiens
ggggtagtgccgccgggactcttggcgggtgaaggtgtgtgtcagcttttgcgtcactcgagccctgggcgctgcttgctaaagagccgagcacgcgggtctgtcatcatgtcgcgttacgggcggtacggaggagaaaccaaggtgtatgttggtaacctgggaactggcgctggcaaaggagagttagaaagggctttcagttattatggtcctttaagaactgtatggattgcgagaaatcctccaggatttgcctttgtggaattcgaagatcctagagatgcagaagatgcagtacgaggactggatggaaaggtgatttgtggctcccgagtgagggttgaactatcgacaggcatgcctcggagatcacgttttgatagaccacctgcccgacgtccctttgatccaaatgatagatgctatgagtgtggcgaaaagggacattatgcttatgattgtcatcgttacagccggcgaagaagaagcaggtcacggtctagatcacattctcgatccagaggaaggcgatactctcgctcacgcagcaggagcaggggacgaaggtcaaggtcagcatctcctcgacgatcaagatctatctctcttcgtagatcaagatcagcttcactcagaagatctaggtctggttctataaaaggatcgaggtatttccaatccccgtcgaggtcaagatcaagatccaggtctatttcacgaccaagaagcagccgatcaaagtccagatctccatctccaaaaagaagtcgttccccatcaggaagtcctcgcagaagtgcaagtcctgaaagaatggactgaagctctcaagttcaccctttagggaaaagttattttgtttacattattataagggatttgtgatgtctgtaaagtgtaacctaggaaagataattcaaccatctaatcaaaatggatctggattactatgtaaattcacagcagtaagataatataaattttgttgaatgtattaacatcatatggtctgaaaatgtgggtttttatttggcacatttaaataaaatgtttctaactagatttttgatttgtgttcaatattaacacttcttaatttgatatatttgagagtcagacattataattgttaaccttattcatacatacctacattcagaattgaaaggtggttggttaagtcttgaacatcactattctatgcataaaactttggccaggatcttaagggactttgaaaattccatcttacccttgtagctctgggtaagatgacctgagtcccttatgatacagcctgaatgcatcatgacagatccttaagttagctaatccgtttgaagttggtgttagtaggtattggtatgatcagtggtgaagcaagtaggaccactgatgtgtctaaatgagcatgacaggaactaaacgaaactgattaaatgtatgagaaatagaaactgatttctggatgatctttatactaattgcagctttcaggctactaggtggcatagtgttaattaggactccccaagatatggggagttctactctcaatggtcttgtttctttgctttctacattagttaaccagttttataccaaaaaatgcatgtttgaggaattgtctgaaattgggacaaaacaccttcatgtaaaccagctttgcaaaattttccagcccagatactcttcatctattcaaatggattgtcttattctgagcaaagacctgttgttaatcttcaagctaggttttgcagttcccaaccacaacattcttctattttgccaggctggtgcaaagtaattaaagatgtcaatcagaaatgtcaatgagactaaagtggttttgtaaatctcagctatatttagcaacactccatgtagctaatattttttggtagcatctggtagaccttagaatgttacatagccagtaggttctttattcaaattttaagtatcttaagaatagtagggcagtaacagttacttttgagagttttctggtcaagcttttaccaggcattctctagccttggtacc

SEQ ID NO: 169549 - DNA, 425 bp, Homo Sapiens
gtggataaatatagtagcaaataaatatatgtcttaacatagtgcctgattcaagcgtctgtctggttcagatataaatacccatgtgggtacctaggtgctagtctccccactaactgagggaaaaaggttcccaggtggggtcctctgcccactttgccaccacattcacattccaaatgggataatgcctgaggggccaagagtggtcaggctgccctggggtgaatgtcaccctgatgaggcccatcagctcttgtccactcagtgaggccagacttgtgctctaatccactctcctgtgggtccctggcctgtatggcttatactggggagctgggcctctgggctgtccaaacccaagggtcacactttgcttttcctttgttgtccccattttccatccttgctctaagacaaaactt

SEQ ID NO: 169550 - DNA, 435 bp, Homo Sapiens
ctacccgggcagacattttactgtgtttctcagaccaagtgtctactgatggcccaaacatggagttttgtgggcttccactgcccccactccgaactcctgtatgtgcctggctgagtcacctaattcatactgtcatactagcataattatgactattgcatatgcttgttttgtttgactcttggctgcctacgtctgtagggtcccctgaaaatcccacttcctgcccccagaaagggcctttatttccaactaggaggataatgcctagtccaggcaatctttctctgtttagcagtcacaggtgagggtggtattagcatcttttttatgtagaaaaaattgagttaatggggtggactgggttgggaagaaatacatttcctcaatgtcatttcatagcaacatcacaaaatatttttcatgtgccat

SEQ ID NO: 169551 - DNA, 264 bp, Homo Sapiens
tcggtacgtataggcgctaggtggtgggaacaccttgcagaacgtgtgtgcaccaggacacaccgcggccaggcagccacaccgagaaagcacacatctccactgatggcagccacccgactctccagttaacctcttttactctttaattctgatttactgtgatgatttaataaagtggaaacacagcacttcagtgctatatgtttctctcattctcattatagtttataagaaaataaagttcaccctggcatctacaac

SEQ ID NO: 169552 - DNA, 177 bp, Homo Sapiens
ggcgctaggtgtgtccctctgtcttggttagccatacgatgttagttctcagcactgtacaacggtccctatataatacggagaagcaatatcactatatgagactcacaccatgtattcattattcactagcaccctaggtgtgataattgaagtaaatatcttttatacaaacac

SEQ ID NO: 169553 - DNA, 845 bp, Homo Sapiens
  misc_feature (753)..(756): n is a, c, g, or t
  misc_feature (764)..(764): n is a, c, g, or t
  misc_feature (768)..(768): n is a, c, g, or t
  misc_feature (772)..(775): n is a, c, g, or t
ggggggcagaagttggaaacatgcggctgtcggtcgctgcagcgatctcccatggccgcgtatttcgccgtatgggcctcggtcccgagtcccgcatccatctgttgcggaacttgctcacagggctggtgcggcacgaacgcatcgaggcaccatgggcgcgtgtggacgaaatgaggggctacgcggagaagctcatcgactatgggaagctgggagacactaacgaacgagccatgcgcatggctgacttctggctcacagagaaggatttgatcccaaagctgtttcaagtactggcccctcggtacaaagatcaaactgggggctacacaagaatgctgcagatcccaaatcggagtttggatcgggccaagatggcagtgatcgagtataaagggaattgcctcccacccctgcctctgcctcgcagagacagccaccttacactcctaaaccagctgctgcagggtttgcggcaggacctcaggcaaagccaggaagcaagcaaccacagctcccacacagctcaaacaccagggaatttaactgggatctgaagagtctgcagcccttaatcagtacccatgatcacaggcctttggagcacttttactctctgagaagaactggagctagagatgtaaaatggacagtccttgatgggggttgagaaaccttctgggggaagcaagatgacccctctcctttgcacaaatagaataaaaagtctcttatattggcccccccaannnnaacccaancaanaaannnnccccttgtcgggccgcccttccggcccctcgaaaaaagccttttctagaaccaatctccggttgtggcga

SEQ ID NO: 169554 - DNA, 789 bp, Homo Sapiens
atgcggctgtcggtcgctgcagcgatctcccatggccgcgtatttcgccgtatgggcctcggtcccgagtcccgcatccatctgttgcggaacttgctcacagggctggtgcggcacgaacgcatcgaggcaccatgggcgcgtgtggacgaaatgaggggctacgcggagaagctcatcgactatgggaagctgggagacactaacgaacgagccatgcgcatggctgacttctggctcacagagaaggatttgatcccaaagctgtttcaagtactggcccctcggtacaaagatcaaactgggggctacacaagaatgctgcagatcccaaatcggagtttggatcgggccaagatggcagtgatcgagtataaagggaattgcctcccacccctgcctctgcctcgcagagacagccaccttacactcctaaaccagctgctgcagggtttgcggcaggacctcaggcaaagccaggaagcaagcaaccacagctcccacacagctcaaacaccagggatttaactggatctgaagagtctgcagcccttaatcagtacccatgatcacaggcctttggagcacttttactctctgagaagaactggagctagagatgtaaaatggacagtcttgatggggttgagaaccttctggggagccagatgaccctctctttgcacaatagataaaagtctttatatgaatatttattaactttatttattctttttccttcctgtgggaatttctggagaatgagaattatccaaatgctcagtctac

SEQ ID NO: 169555 - DNA, 481 bp, Homo Sapiens
gggacattttctcggccctgccagcccccaggaggaaggtgggtctgaatctagcaccatgacggaactagagacagccatgggcatgatcatagacgtcttttcccgatattcgggcagcgagggcagcacgcagaccctgaccaagggggagctcaaggtgctgatggagaaggagctaccaggcttcctgcagagtggaaaagacaaggatgccgtggataaattgctcaaggacctggacgccaatggagatgcccaggtggacttcagtgagttcatcgtgttcgtggctgcaatcacgtctgcctgtcacaagtactttgagaaggcaggactcaaatgatgccctggagatgtcacagattcctggcagagccatggtcccaggcttcccaaaagtgtttgttggcaattattcccctaggctgagcctgctcatgtacctctgattaatacaatgctatgacactgaccacac

SEQ ID NO: 169556 - DNA, 355 bp, Homo Sapiens
taaggcgcctaggtgaggggaatgctatatgaacaagaggagctatctagggatctgatagactttgacagtgtttcaactgcatctcttgcatgttgccccaccttttctcctgtactcagaagtacatgatacaacaaatttttgagcctttaatggggtcgatggtgtaaatcaacttgtttttcagctttcctcactgccagccaaaagatcggtttctgtgcgcctgctaagttagttactgcagatcaggcatctgctttccagctttcgaaattgttgctccattctctccactttgtcctacagatttatgccctttaaaataaaaataattacctggtaaaaaaat

SEQ ID NO: 169557 - DNA, 473 bp, Homo Sapiens
gtctgtttaacactgaggaagacagctatgatccgggtctggatatatacgcagggatggaatgagcctcagaatggcgcggtatgaaggtgccgtagatctgtgtgagggaggcggtgcccgggtaatccacatacacgacaggcacgtggcgcaggaaccatgtgtgagaggggctttcttccagtggtctgtggggggattacaagccccaacaaacttggattctctccagcttcacccatgtcggatctgaggtacggtaaaagcctccgtgctccaccatctgtctgatgaaggatatgaccctctgggtcccatatttatccatatctggcaagttgatttcatcacagaacaacaccagccactttccaagttgaacaggagccaaaaccaccccattaggtgtgcgcctgtactcgcagtagtgatcaaaagtcttcagaagcagctctggagtagtagcactg

SEQ ID NO: 169558 - DNA, 847 bp, Homo Sapiens
gggagtgagtagatatagtgacggtggtgtatactggggtgaatctctcctgaggacatggtgtagaacatccaccagggcagcagtgagcggctctgcatacgtccgcagggatggaatgagcctcagcatggcgcggttgaaggtgccgtagatctgtgtgagggaggcggggcccgggtaatccacatacacgacaggcacgtggcgcaggaacctgtgtgagaggggctttcttccagggtctgtggggggattacaagccccaacaaactggattctctccagcttcacccatgtttgatctgaggtacggtaaaagcctccgtgctccaccatctgtctgatgaaggatatgaccctctgggtcccatatttatccatatctggcaagttgatttcatcacagaacaacaccagccactttccaagttgaacaggagccaaaaccaccccattaggtgtgcgcctgtactcgcagtagtgatcaaaagtcttcagaagcagctctggagtagtagcactggagaagttgagacccaccacctccatgtcaggcaaggcccggagggcgctgaagagtgtcatggtcttgccagacccaggagggccacacaagaccaggggcttgtgttcggccagccaagtgtacaagagggcttcgtggcggactgtgtccagcgttggcacgacgacatcaggggctgccaccttgtgctgtctccacttcaatctgatggcaccttggcctgccatcggagaccattctccgctgatggacacctcataatcgataatgggtatgttgggcgcagtgggcagaggcacggtcgtgattcttctgatg

SEQ ID NO: 169559 - DNA, 454 bp, Homo Sapiens
gcagcgtggggtgaatacagaacaagtgctagacgatgtagtagcaaagagaactcgtcaatggcggacttccaccacaaatggagggattttgactgtatctattgacaatcctggagcagtgcaatgcccagtaactcagaaaccacgattaactcgtactgctgtaccttcatttttaacaaagcgggagcaaagtgacgtcaagaaagttcctaaaggtgttcccctgcagtttgacataaacagtgtcggaaaacagacagggatgacgttgaatgagcggttggggatcctgaaggaacaaagagccactctcacatacaacaaagggggaagccgctttgtcaccgtgggataggtcccatgtcaaaggaacttttgagtgatgactctgagaagttgaatcgcttgaagagttcatcacggaaattcaagaaactttacttcaaaa

SEQ ID NO: 169560 - DNA, 494 bp, Homo Sapiens
  misc_feature (75)..(83): n is a, c, g, or t
ggtactactactggtaaaatgcagaagacagtgttaatgtgtttggtttggggactggttgttataaaatgcaannnnnnnnnaaatctaagcatttcattatgtgttctacagtgtcggtgaataaatgaaaccaatctcaatttagaggtgtggatgatgacagaaagcccaatagaagcttaggtgatgcttctgtttgagggccagcaagcaccactaaattactggatgaaatgaaattgttcacttgagggattagtcaaccatctgggggagaagttgctcactgtcaaatacagcatgcacggtcctagctgatagaccttttcctcattgctacagcaagccacagggtagagtgaccagttctcctatccaaaaataaatgcgaacatgcatacataaatgtggctgagggccactttagccatcactgtgctccaaaggaacatgatattgttaaatatactgtacacattaaactattcgaa

SEQ ID NO: 169561 - DNA, 589 bp, Homo Sapiens
ggacaacatgacagagaaggaattctggacacgttttttccagtcccattattttcacagggatcggctgaatacagggtcaaaggatctctttgcagaatgtgccaaaatagatgaaaaaggcctaaaaacaatggtttcattaggagtgaaaaacccactactagatttaacagctttggaagataaaccattagatgagggctatggcatttcctctgtgccatctgcttccaattctaaatccataaaagagaatagtaatgctgccatcatcaagagatttaaccatcacagtgccatggtcctggcagctggactcagaaaacaagaagcacaaaatgaacaaactagtgagcccagcaacatggatggaaattccggagatgcagactgctttcagccagcagtcaaaagggcgaaattacaagagtccattgaatatgaagacttggggaaaaataattctgtaaaaacgattgcactaaacctcaagaagtcagataggtattatcatggccactcaatccagcactacgatgcacagcagcatatatcttcagatacgatgataccatacgtcgagctg

SEQ ID NO: 169562 - DNA, 464 bp, Homo Sapiens
cgtggggtgaatactcgggtcgtcttagccactaggaatagaatggcggcctgacggagccgcggcgccggcgaagtcgctgaggcgcgagcgggaacccccagaccagctcaaacgggagccaaaactcgaagcttggaagaattagcaggaaatggcggatgaggcgttgtttttgcttctccataacgagatggtgtctggagtgtacaagtccgcggagcagggggaggtggtgagtgctgccacacaaccttgaggtcctttggcggtgacacaccttgtttcccctcagtgctttccttcaacccctgtcccatcgccacccgacgcctcccgaggtgtacacaaaatggtccacctccaggtgtcctaaaccctagaacctgtcagttgtctcctttgaaccgtcatctttcatcgttttctctttcgtatcttcttctatttgattctctttggtc

SEQ ID NO: 169563 - DNA, 500 bp, Homo Sapiens
  misc_feature (339)..(406): n is a, c, g, or t
tgatgagtaggaagtgattaagaggagaatcacaatgagctcaggactgaagaggcattaactaaggtggggcctgcgggcttccagctgtgagaatagtatgctcaaggaagggaccttgggtactgaagaacacacatttccggaacttgaagagggtcagtatggtgagagtacactcagcaagggggaagacagtaggaaaagaggcaggggacgctggcagaagcttcactgggcagtcagtgaaaaaggcaagaacacagaattcaggttcttatcagggtctttaggcctcactgacagttttgtttttgagacagggtctcactctgtcannnnnnnnnnnnnnnnnnnnnnnnnnnnnnnnnnnnnnnnnnnnnnnnnnnnnnnnnnnnnnnnnnnncccacctcagcctcctgagtagctgggactacaggcaggcaccaccacgcccagctaattttggtattttttgcagagacagggttttgctatg

SEQ ID NO: 169564 - DNA, 281 bp, Homo Sapiens
cgagctcggtaccctgcttgtcgagggaccaccaggaccagcaggacctgcaggtattatgggtcctccaggtctacaaggccccactggaccccctggtgaccctggcgataggggccccccaggacgtcctggcttaccaggggctgatggtctacctggtcctcctggtactatgttgatgttaccgttccgttatggtggtgatggttccaaaggaccaaccatctctgctcaggaagctcaggctcaagctattcttcagcaggctccccaatata

SEQ ID NO: 169565 - DNA, 557 bp, Homo Sapiens
  misc_feature (535)..(535): n is a, c, g, or t
ttcatagacaggctttgtctgtgaaagccctgcagtagggtgtggtgctagagtgcatcagaagcccaggacagttgcagccagcatggcatcgccagagcctggggcccactgtggcaggtgaagcactggagtgggcaagaagcctgaggcagatgcaagtggaaagacactaaggtgctctaacagctggatgcagctgaagccagtgcagtgctgccagaagcctagggcccactacagcaggtatggcactggggcagaccaaagcctgggacagctgtggccagcatggcacttccagaatctcagggcaactgtggccataagagtggtgccagaagcctgaggtccacaacagcaagcacagtactgggacagctgaagccaagggccactaatgctgcctgctgctgagggtgacctgaagcccaagacaactgataccaacccagtggcgatacataccagagatcgagtttgccatacgagcctgaagcctggggctttatggtccctcctggcaccagggcangtttagaggctcagtcaccagt

SEQ ID NO: 169566 - DNA, 330 bp, Homo Sapiens
  misc_feature (187)..(203): n is a, c, g, or t
  misc_feature (224)..(261): n is a, c, g, or t
aagcaatggggagcagccagaaatacagacgaagcttcaattgttacccaccattcacctcctgctctgtggcccggttcctaacaggccacagaccagtacatgtccatggcccaggggtcagggacccctgctgtggcacattgctaatagaggactgtagcagccatgtgccctgacctttccnnnnnnnnnnnnnnnnnggggagcccaaaaccccaaannnnnnnnnnnnnnnnnnnnnnnnnnnnnnnnnnnnnncccccagttgggggtggggaggggaattttggtttaacaaataaggggccccgggcccaaaatccgaaa

SEQ ID NO: 169567 - DNA, 357 bp, Homo Sapiens
aacgcaggtggagaggaaatgaggctaagacagtaactgggagccaagtcatatgtgatcttgtgggccactctaagggctttggctttttccctgagagatatgtaaagccactgaacaattttgaacagaagagctatataatttggatttacgttttgaaaggatcactccggcttcctgtttagaataaactgtagacaggcaagggcaaaagcagggcaatcagttaggctattatctcaccaggcaagagacgatggtaacgtggatcagggtggtaggtgcagaggtaatgaaaagtatctgaatgttggatttgttttaaaggtagaaccgacaggataggctcaccaa

SEQ ID NO: 169568 - DNA, 1064 bp, Homo Sapiens
  misc_feature (934)..(942): n is a, c, g, or t
taaattccttcattctcattagaatgcagcctgctgagtatgtgggtttcactgccggagtccatcatttagccagtatacatagaggaactgcttcgaatcaaggcaactggtgaagggcttagcatgttggcagcaatatcccagagattgaatctgtttgcattttcctcatctaggataacagctgcttgaagccagggctcttagccctttgcattccccttgaacgaggaagccacactgcctttctgtgtctggttcagagctcttccttcttggcatgttttctggactacatgcacatgggcagctatagattaatctgcaaaacctagtcacttacctacccataatatctgggaaggtgtggtatttgttttaaggaaacattgtttctttgggagggcagtttctgtctggactttgaggtggacttagttatccctacagttctttaactctcagcttttaataaaagatgaaatcagatattgatgcagttgggtcacaattctttagaatgcttctaccccagggccgcttcctgttcctagtcatggttttccagtttagtagtggagtttcttgaggcaacttacagaaatttctaactgaaaactttaagagttattgatacttgttttttcagtcagtcacttacatcacctagcctactctctggaatttaaatttatttctctacgctggtcctggaaagttgataaccttttggcaaagcttacatttaggagaaggcttgagtccctgttccacgggtctgtgggaattctctttgcttatggctctctgcctgcaaccctggcaaaccatactgtatgtcatggataccccagggaaatatacctgagaagaaaacccattttccaagggtattttaaaactcctcactcctggcacaccttttctaaannnnnnnnnaaggtttggccaaacaaaatgcctggcaaaggcctctgaaataattcacttatgcggcccaccacctgaaaaattattttccccaaagaggggaagccctccttttggcccgagtggatctt

SEQ ID NO: 169569 - DNA, 1623 bp, Homo Sapiens
  misc_feature (877)..(896): n is a, c, g, or t
tccactagtgtaggcacactgactgtatgcgactgtctcatagcagcgtcttccggacatgttttctggactacatgcacatgggcagctatagattaatctgcaaaacctagtcacttacctacccataatatctgggaaggggtggcatccgctttaaggaaacatcgcgtctttgggagggcagtttctgtctggactttgaggtggacttagttatccctacagttctttaactctcagcttttaataaaagatgaaatcagatattgatgcagttgggtcacaattctttagaatgcttctaccccagggccgcttcctgttcctagtcatggttttccagtttagtagtggagtttcttgaggctaacttacagaaatttctaactgaaaactttaagagttattgatacttgttttttcagtcagtcacttacatcacctagcctactctctggaatttaaatttatttctctaggctggtcctggaagttgataaccttttggcaaagcttagatttaggagaaggcttgagtccctgttcagcgggtctgtggattctctttgcttatggctctctgcctgcagccctggcagaccatactgtatgtcatggatacccagtggaaatattactgagatgaaacacatttccaagggtatttaaactctcactctgccacctttctaagggtgggaggctggcagagatgctgcaatgcttgataatcatttggccacactgaaatttccaaagggagctcttgccggtgcttaaaaccaaaactcctggacacttagaaaattccatgaatctagcacaaaatatccattcttgcccaagtgtatcccctttctctccagcttaatcnnnnnnnnnnnnnnnnnnnnaaagcccaggccaagggtacttttaacctggaaactggggaggagggaagaacactagcagggagctaaaaggcaggttgctgggtaagccatcctgctcctacctggtgcctgtatctacatggctgagtgctgtgcgccagtgcctttccttcatctgcagatggagcccatctctttccacctgggtgaggagaccctctgctactccaggggtaaaccttaaagaaggtgtcttgaagagcccaaaggacactcacgtgctaaggtgtccattttatgcatctttcaaaatattctatttaacaacaaaaaaatagccctgccctgtcttagtgccattaaccggccagttccatccattctgaatggaaaagcggaaacttggccagcccttccctgggtcttccccttggtcctcccatgatgttgttgtcccctaaatccctcccatccatttccctgtcgtcgtggatggatacggccgagggtacccccgcatgtcctttgacggcagccctgtgtgattccagtgaatcaagagtgattccgggaatataacacataatttctcccacaccccagcacaattgtcggcgaaatttagggtacaccacttcaaatctctccaatccaagggcttgcctgaaatagtcacaccgttaaaacctcttgagctctccaacagaacctgcaacacacacacaccgatactaacaacagaggg

SEQ ID NO: 169570 - DNA, 441 bp, Homo Sapiens
  misc_feature (95)..(106): n is a, c, g, or t
ggaggggtaaaccttaaagaaggtgtcttgaagagcccaaaggacactcacgtgctaaggtgtccattttatgcatctttaaaatattttatttnnnnnnnnnnnntagccctgccctgtcttagtgccactaacggcccagttccatccattctgaatggaaaagcggagactgccagcactttccttggtcttccctttgtctcccatgatgtgttgttccctcatccctcccatccatttcactgtgtgtggatggatagcagagggtaccacgcagtccttgaggcagtcctgtgtgattccatgatcagttgtttttgaattttaactattcttccaaaccagcagatgtttggaaattaaggaaaaaattaaattctcatcaatggttgctgttatagttaaatcagtaaagatcttgagtatcaaaaaaataaa

SEQ ID NO: 169571 - DNA, 417 bp, Homo Sapiens
aataccacatccaggccatggaaaaggctgcccagggctaccttgccttggcttgtggtgcagttgaagcccaagttcttggcctccaggccgcagtcaaaacccttgcggtgtaagatgagtgcggtctccgccgagggtagggtgtcctcctcagcctggagcgtacgtaggttgagcaggtggaagtcacagggcagtgaggaagccagaggatgaaatgagcgcagaccagggcctgggagctgcatcctggctacagacagagcgagcgccgggacgttcaggtacatggaggtcaggtggctgaggagggatgggtagctggtagagtggctatcttggacctcactgcccacggttcgccgctctagcaggaggcggaaacggttgcaggttctcttgttgtccttgagc

SEQ ID NO: 169572 - DNA, 588 bp, Homo Sapiens
gtagcgaggcctgggtggcgtattcggcacgaggatcaagatgaccaagatgtataaagggttccaagccttaggggatgccgctgacatccggttcgtctacacccccgccatggagagtgtctgcggatacttccacaggtcccacaaccgcagcgaggagtttctcattgctggaaaactgcaggatggactcttgcacatcactacctgcagttttgtggctccctggaacagcctgagcttagctcagcgccggggcttcaccaagacctacactgttggctgtgaggaatgcacagtgtttccctgtttatccatcccctgcaaactgcagagtggcactcattgcttgtggacggaccagctcctccaaggctctgaaaagggcttccagtcccgtcaccttgcctgcctgcctcgggagccagggctgtgcacctggcagtccctgcggtcccagatagcctgaatcctgcccggagtggaagctgaagcctgcacagtgtccaccctgttcccactcccatctttcttccggacaatgaaataaagagttaacagccagcgagaagaagaaagaacaaa

SEQ ID NO: 169573 - DNA, 828 bp, Homo Sapiens
gggccatcgccgcagatccagcgcccagagagacaccagagaacccaccatggccccctttgagcccctggcttctggcatcctgttgttgctgtggctgatagcccccagcagggcctgcacctgtgtcccaccccacccacagacggccttccgcaattccgacctcgtcatcagggccaagttcgtggggacaccagaagtcaaccagaccaccttataccagcgttatgagatcaagatgaccaagatgtataaagggttccaagccttaggggatgccgctgacatccggttcgtctacacccccgccatggagagtgtctgcggatacttccacaggtcccacaaccgcagcgaggagtttctcattgctggaaaactgcaggatggactcttgcacatcactacctgcagttttgtggctccctggaacagcctgagcttagctcagcgccggggcttcaccaagacctacactgttggctgtgaggaatgcacagtgtttccctgtttatccatcccctgcaaactgcagagtggcactcattgcttgtggacgggacagctcctcccaggctctgaaaaagggcttccagtcccggtcaccttgcctgccctgccctcgggaggcaggggctgtggcaccctggccagtcccctggcgggcccccagatagccctggaatccctgccccgggagagggaaagccttgaaagccctggcaccaggggccccaccccggggttcccaacttctcccatccttttctttttcccgggaaccaatgtggaaaaataaaaggggaggtttaaccccaccccccc

SEQ ID NO: 169574 - DNA, 791 bp, Homo Sapiens
ggctagcgctcaggccctgccgccatcgccgcagatccagcgcccagagagacaccagagaacccaccatggccccctttgagcccctggcttctggcatcctgttgttgctgtggctgatagcccccagcagggcctgcacctgtgtcccaccccacccacagacggccttctgcaattccgacctcgtcatcagggccaagttcgtggggacaccagaagtcaaccagaccaccttataccagcgttatgagatcaagatgaccaagatgtataaagggttccaagccttaggggatgccgctgacatccggttcgtctacacccccgccatggagagtgtctgcggatacttccacaggtcccacaaccgcagcgaggagtttctcattgctggaaaactgcaggatggactcttgcacatcactacctgcagttttgtggctccctggaacagcctgagcttagctcagcgccggggcttcaccaagacctacactgttggctgtgaggaatgcacagtgtttccctgtttatccatcccctgcaaactgcagagtggcactcattgcttgtggacggaccagctcctccaaggctctgaaaagggcttccagtcccgtcaccttgcctgcctgcctcgggagccagggctgtgcacctggcagtccctgcggtcccagatagcctgaatcctgcccggagtggaagctgaagcctgcacagtgtccaccctgttcccactcccatctttcttccggacaatgaaataaagagttaccacccccccc

SEQ ID NO: 169575 - DNA, 929 bp, Homo Sapiens
cactgatggtgggtggatgagtaatgcatccaggaagcctggaggcctgtggtttccgcacccgctgccacccccgcccctagcgtggacatttatcctctagcgctcaggccctgccgccatcgccgcagatccagcgcccagagagacaccagagaacccaccatggccccctttgagcccctggcttctggcatcctgttgttgctgtggctgatagcccccagcagggcctgcacctgtgtcccaccccacccacagacggccttctgcaattccgacctcgtcatcagggccaagttcgtggggacaccagaagtcaaccagaccaccttataccagcgttatgagatcaagatgaccaagatgtataaagggttccaagccttaggggatgccgctgacatccggttcgtctacacccccgccatggagagtgtctgcggatacttccacaggtcccacaaccgcagcgaggagtttctcattgctggaaaactgcaggatggactcttgcacatcactacctgcagttttgtggctccctggaacagcctgagcttagctcagcgccggggcttcaccaagacctacactgttggctgtgaggaatgcacagtgtttccctagattataccatcccctgcaaactgcagagtggcactcattgcttgtaggacggaccagctcctccaaggctctgaaaaggggcttccagtccctgtacaccttgccctgccttgcctccgggagccagggctgtgcaccttggcagtccctgggggtcccagaatagcctggaatcctggcccggcgttggaaagctgaaagcctgcacagtggtccaccctgtgccaattccccattctttacttccgggaccaatgaacattcaagagttaccaaccaaggcaaacaacgaaaccacg

SEQ ID NO: 169576 - DNA, 478 bp, Homo Sapiens
aaaaatgtaagtcttggtgaaaccccggccgctaacctaaactcaagctgttcccaggaacccacaaaaactgccaggtagtgatgtgcaaaaagtccatcctgcagttttcccagcaaatgagaaactcctcgctgcggttgtgggacctgtggaagtatccgcagacactctccatggcgggggtgtagacgaaccggatgtcagcggcatcccctaaggcttggaaccctttatacatcttggtcatcttgatctcataacgctggtataaggtggtctggttgacttctggtgtccccacgaacttggccctgatgacgaggtcggaattgcagaaggccgtctgtgggtggggtgggacacaggtgcaggcctgctgggggctatcagccacagcaacaacaggatgccagaaaccaggggctcaaagggggccatggtgggttctctggtgtctctctgggcgctggatctg

SEQ ID NO: 169577 - DNA, 496 bp, Homo Sapiens
  misc_feature (69)..(69): n is a, c, g, or t
  misc_feature (452)..(452): n is a, c, g, or t
  misc_feature (484)..(484): n is a, c, g, or t
ggttcgtcttaaaacccggcccatggaaaaatgtctgcggaaaaattccaaaggtccccaaaaaccgcnaacgaggagtttctcattgctggaaaactgcaggatggactcttgcacatcactacctgcagttttgtggctcccctggaacagcctgagcttagctcagcgccggggcttcaccaagacctacactgttggctgtgaggaatgcacagtgtttccctgtttatccatcccctgcaaactgcagagtggcactcattgcttgtggacggaccagctcctccaaggctctgaaaagggcttccagtcccgtcaccttgcctgcctgcctcgggagccagggctgtgcacctggcaagtcctgcggtcccagatagcctgaatcctgcccggagtggaagctgaagcctgcacagtgtccaccctgttcccactcccatcttttnttttgggacaatggaattaaagagtttaccanccaggaaaaaaa

SEQ ID NO: 169578 - DNA, 513 bp, Homo Sapiens
  misc_feature (452)..(452): n is a, c, g, or t
  misc_feature (463)..(463): n is a, c, g, or t
  misc_feature (497)..(497): n is a, c, g, or t
attcggcacaggagcgcccagagagacaccagagaacccaccatggccccctttgagcccctggcttctggcatcctgttgttgctgtggctgatagcccccagcagggcctgcacctgtgtcccaccccacccacagacggccttctgcaattccgacctcgtcatcagggccaagttcgtggggacaccagaagtcaaccagaccaccttataccagcgttatgagatcaagatgaccaagatgtataaagggttccaagccttaggggatgccgctgacatccggttcgtctacacccccgccatgggagagtgtctgcgggatactttccacaggttcccacaaccgcagcgagggagttttttcatttgctgggaaaattggcagggtgggattttttggcaaatccattaacctgcagtttttgttgggttccttgggaaacagcntgagtttagtncaagcggcggggttttaaacaaagaacctacatngtttggttttgaagga

SEQ ID NO: 169579 - DNA, 654 bp, Homo Sapiens
  misc_feature (592)..(592): n is a, c, g, or t
agacccagggattcctgggaatccaggaaaagtcggccccaagggccccatgggccctaaaggtggcccaggggcccgtggagccccaggccccaaaggtgaatcgggagactacaaggccacccagaaaatcgccttctctgccacaagaaccatcaacgtccccctgcgccgggaccagaccatccgcttcgaccacgtgatcaccaacatgaacaacaattatgagccccgcagtggcaagttcacctgcaaggtgcccggtctctactacttcacctaccacgccagctctcgagggaacctgtgcgtgaacctcatgcgtggccgggagcgtgcacagaaggtggtcaccttctgtgactatgcctacaacaccttccaggtcaccaccggtggcatggtcctcaagctggagcagggggagaacgtcttcctgcaggccaccgacaagaactcactactgggcatggagggtgccaacagcatcttttccgggttcctgctctttccagatatggaggcctgacctgtgggctgcttcaaatccaccccggctccccctgccagcaacgctcactctacccccaanaccaccccttgcccagccaatgcacacagtagggcttggtgaatgctgctgagtgaatgagt

SEQ ID NO: 169580 - DNA, 427 bp, Homo Sapiens
gattatctttttctcctcagaggcacaagtgaaagcagaagctgaaaaggctgaagcgcaaaggttggcggcgattcaaaggcagaacgagcaaatgatgcaggagagggagagactccatcaggaacaagtgagacaaatggagatagccaaacaaaaatggctggcagagcaacagaaaatgcaggaacaacagatgcaggaacaggccgcacagctcagcacaacattccaagctcaaaatagaagccttctcagtgagctccagcacgcccagaggactgttaataacgatgatccatgtgttttactctaaagtgctaaatatgggagtttccttttttttactctttgtcactgatgacacaacagaaaagaaactgtagaccttgggacaatcaacatttaaataaactttataattatt

SEQ ID NO: 169581 - DNA, 361 bp, Homo Sapiens
tgtctgacctgtggctgtagaatatggagtgaaagatgcaggtgtgtccccacctacaggctcatcctgcaccaccagagtcctgccgttttctttggtgtaagtggcaaagcgaatgttgcggtttatctgggggacaaatgtagacggtggctgcttggctctctgatccagccctggctctccactggcattccctcctttccagggccctcggcttgcctcacctccatcgctcccattactgtctacttcacccctgtctccttttaatttctttgatgcagggtcacacccagagtccgaagcacttttcctcctccggccatctttcccctctatgctttctctcttcttcttt

SEQ ID NO: 169582 - DNA, 711 bp, Homo Sapiens
ttccaactgggacatgactgggtacggctcccacagcaaagtgtatagccagagcaagaacatccccctgtcgcagccagccaccacaaccgtcagcacctccttgccggtcccaaacccaagcctaccttacgagcagaccatcgtcttcccaggaagcaccgggcacatcgtggtcacctcagcaagcagcacttctgtcaccgggcaagtcctcggcggaccacacaacctaatgcgtcgaagcactgtgagcctccttgatacctaccaaaaatgtggactcaagcgtaagagcgaggagatcgagaacacaagcagcgtgcagatcatcgaggagcatccacccatgattcagaataatgcaagcggggccactgtcgccactgccaccacgtctactgccacctccaaaaacagcggctccaacagcgagggcgactatcagctggtgcagcatgaggtgctgtggctccatggaccaaacctacgaggtcttaaagttcttgggccgagggacgttcgggcaagtggtcaagtgctggaacacggggcaccaatgagatcgtagccatcaagatcctgaagaaccacccatcctatgcccgacaaggtcagatcgaagtgagcatcctggcccggttgagcacggagagtgccgatgactataacttcgtccgggcctaccgaatgcttccagcacaagaagca

SEQ ID NO: 169583 - DNA, 577 bp, Homo Sapiens
gacgtttactggaaagtgtacaggaaacaggatagaggaaatatagctggaccgggtgaatacgtatgatcgcatcgtgttgatcaggtaaatatttactgagcaaactatgtcttagaaagcacttcgagaataacagtctcgctttcacctctgtcggggtacttacttcagaaacctccttaggacttaaaattctccttttttatcttccttttcctagcttaggcctgggggagcccatccaggaacatgcagtcccagcagaccaggctcctgagaagaaccttcagccaataaagcttgtgcttaccccaccgagctcacgctgtctctttgttccaagtgtggttcctatttattgaggaagaaagagctgtctggccaaaggaaatctattttttcccttcatgttttctctctgaaagtgggcttgagagtagttgtcagaaaggtgcaggtgctccacaaacgggtggtaaaaaggcctcgagctcttggatgttgtatttcagatcaggggcaggcaccggagttgaggctgtgcgccttggtgggcttcacgtcttcccctgac

SEQ ID NO: 169584 - DNA, 1034 bp, Homo Sapiens
  misc_feature (164)..(172): n is a, c, g, or t
  misc_feature (174)..(185): n is a, c, g, or t
atttggtgaggaattcccaagcacttagtccatggcccagggatctccctagggaaaccagcttatgacccatggttcacttaccctgactggggcccggcgcgccaaaaccgaatggttctagaaaagcttctccgagggccgaggccgggccgacatgtttnnnnnnnnntnnnnnnnnnnnnttttgcaatgaaatgaatcatttaatgagaatcttcaaactgtggcactggctgagtactaagcaaatccaggggaagacgtgaagcccaccaaggcgcacagcctcaactccggtgcctgcccctgatctgaaatacaacatccaagagctcgaggcctttttaccacccgtttgtggagcacctgcacctttctgacaacaactctcaagccaactttcagagagaaaacatgaagggaaaaaatagatttcctttggccagacagctctttcttcctcaataaataggaaccacacttggaacaaagagacagcgtgagctcggtgggggaagcacaagctttattggctgaaagttcttctcaggagcctggtctgctgggactgcatgttcctggatgggctcccccaggcctaagctccaggtttcctctggccttccgaaggattttgtgggttacgaccaattgatcaaagatgactttttcctggcgcttgctcagctgcaaaagcttcatggtgttttgcaacttcttttcttgttcaaacaattttttatgtagtttggtgacctctgccttcatttctccaatctgctcacagtgaagggggcactggccatcctcggggagtgagactctccagagaagcttcagccgcctgtaggcctcttccagggtcagcttggccgtgctcacactgctcacaaacttgctcagtggtgctgggtgtggaccctttgttcccagctcttgacttgtggagctgggagcctcttgggtttgaatgtccatttcagcaaggagcctctgtccctggctgatctgtttgagcagggacccactcg

SEQ ID NO: 169585 - DNA, 374 bp, Homo Sapiens
ccagatttatatctttgccatttattttttaaaatcttattcaaaatattaaataatagtttcagatatgaaaaaaattactgcaataaaacggttcaggggtatttccattgtgcttcccttccctattaggaaagtacactgtccgcccaagagacaggatggacggccttcttccagctctacataaagcgcaagcccactggctcacccgggtcctgcttaacatatattagggctatgttttctaaaaagctgtagtgacacttgtaagtcaaccatggttcaaatcacatatttacatattgatcaattctttatgatagaaagacagacataaatgaatcccatagtaaatactttccagttgccat

SEQ ID NO: 169586 - DNA, 293 bp, Homo Sapiens
gcccggcccgagaagtctttttaacatcatttgagagatatggtagaggaagagacctgagaccagagataggagctgtgggagcatgttctgccagctccaagctaggcctgagattgcctccatagacctgggaaccccacatgtgggaatatttccaccagctttctagggtacatcaaggctgagaaatagctcctggggaaggtggatagagaatcctagatctccatcctggggaaaatttggagagaaagacatggtaccaggacaagcccagtggctggacaggt

SEQ ID NO: 169587 - DNA, 204 bp, Homo Sapiens
ccctagatatcttattctgcacctatacacatttatatatcttggaagtgagttaagatgtattgctatattatttgagaaaagatagcattaggaagggcaaagaacagtcataatatttcccccaaatcacatgacaaggttgtatggcagaatgagatatctagggaggttggaaatcctggagccttttaaaaataggat

SEQ ID NO: 169588 - DNA, 145 bp, Homo Sapiens
gtggatgacgtctgggtgcatatcatccaggctcagcagcacctccccggtgcccacattccagatgatgatcacattgtcaccacctgcactgagcaggacattcctggcagtagggtgccaggagaggatgcccacacgcttg

SEQ ID NO: 169589 - DNA, 174 bp, Homo Sapiens
aacgagtggctaccgagagtattccagccttcaaaggcaggctctgagtgcaaatttgaaccagcctcggggcagccattaaaactaattaggaaacaaaactacctcatgctcagtgaatatttgtaggttctggaaaattctgaaaggaaaggagtgattctaattagaagc

SEQ ID NO: 169590 - DNA, 138 bp, Homo Sapiens
gtgctctgcaggagttccggcaaacacaactctctccatatcactatggtttcagagatgcctaagtgctcattgatactttagcatcccttacaggatggcaacaccggcagctccccggccagccccccttgtcct

SEQ ID NO: 169591 - DNA, 255 bp, Homo Sapiens
gttgacctggatttgaaaggacccaaagtaaaaggaaattttgatgtgtctgtccctaaggttgaagggactttgaaaggcccagaagtagatcttaaaggtccacgtctggatttcgaaggccctgatgccaaactcagtggcccatctttgaagatgccatcgctggagatatctgctcctaaagtaactgctcctgatgttgatttgcatctcaaggcaccaaaaattggattttcaggtccgaagtttgaa

SEQ ID NO: 169592 - DNA, 786 bp, Homo Sapiens
  misc_feature (650)..(651): n is a, c, g, or t
  misc_feature (743)..(744): n is a, c, g, or t
ggggctgcgtgtgtgtgagaaccaccggcccccctagtggccagatgccggacaaccctccacacagaaatcgtggggacctggaccacccaaacttggcagagtacacaggctgcccaccgctggccatcacatgctcctttccactctaagccgtagcctcttcggttaagaacacacagagagctcggccaagacaccggagtaggcccttgacagcgtgtgtgccctgggatgcctccgggcgcgaatcaggagggtctggaaggactctggctatattctgcaaatgtggctcatgccccttaccgtggctcggcgttgtggtgcctgagggacagccggccacctgcccagtacgggtcagcgttttcaacactattcccttggacctacgggccatcttcctcacagccctcagatatcaacgggcacaaataagaccaactcaatttccacttgaatttacaaccaaaagcctgctgagttgattacagctgggccaatacagtacgaggcaataacaaattagtgtgggttggttctggaattggaaaagcttttgcttgtatggatacagcaaatccagatgtctctgaacaaagcaacaatttaaagcaacgacattttctgtcctttaagcacttaannaatcaggtgtggtggtgtttttcaaagggcagaaagtctgcatttttttgagcaaaaggtgggcttcccaggctcctacaaagttaactggnntaccatgacacttaaagctttgggcaagggcttcaaaacttt

SEQ ID NO: 169593 - DNA, 919 bp, Homo Sapiens
  misc_feature (766)..(819): n is a, c, g, or t
cggtacatcaagaagtcagataggtataatcatagtccaactccaatccagtcactacagtatgcaacaagtcaggacattattaatgcttttcaaagtattagacaagaaatggaagcttatacacccaagttaacgtcaagttctctcaagtagtgctgccagtagtaccatcacagcgactgtcacctggaggggcacttatgcagggaggaacacagcaagccataaaccagatggtgccaaatgatattcaatctgaatcgaaacacttatatgtagctgttggagaacttctacgacatttctggtcctgctttcctgttaatacgccattcctagaagaaaaggtcgtgcagatgaaaagtaattggtaacgattccaagtttacgaagctctgtccattccaggaaaagattcggagacagtatttaagcacaaattggtaagtcacatagaagagatgctccagacagcctacaacaagctccacacatggcagtcacggcgtctgatgaagaaaacgtgaggtggccatgatgcttacaggttttgtgagattgagagaactatgacctgcagcaactctggaaacctggcctgacagacaagcagatgacctcacaggagtgataagaaacatctgctccacgccaactcccagagctgatgctattgtacttgcacattggagactgaaaggaaagaagggactaaatgctggggaggtaaattaagacagaaccaaatgagctaagttgcaannnnnnnnnnnnnnnnnnnnnnnnnnnnnnnnnnnnnnnnnnnnnnnnnnnnnntttaaaagactgtttactgcagttgctcaggaactgcttttgattcacattaagctgctttcagaaattaaaaaaacactttttaaagggtgcattgata

SEQ ID NO: 169594 - DNA, 488 bp, Homo Sapiens
agaaagaagaggttcgagaaacagctcactcagattgatggcacactttctaccattgagttccagagagaagccctggagaactcacacaccaacactgaggtgttgaggaacatgggctttgcagcaaaagcgatgaaatctgtacatgaaaacatggatctgaacaaaatagatgatttgatgcaagagatcacagagcaacaggatatcgcccaagaaatctcagaagcatttactcaacgggttggctttggtgatgactttgatgaggatgagttgatggcagaacttgaagaattggaacaggaggaattaaataagaagatgacaaatatccgccttccaaatgtgccttcctcttctctcccagcacagccaaatagaaaaccaggcatgtcgtccactgcacgtcgatcccgagcagcatcttcccagagggcagaagaagaggatgatgatatcaaacaattggcagcttgggctac

SEQ ID NO: 169595 - DNA, 340 bp, Homo Sapiens
tgatatgagtatctcgatctcctaaaatgagagctttcttgcaaaattctctacctggaaccatccataagcctgatgatttttcattcggtgaaaagggttaaaaataactgttttctgtctgaaaatgattaatattccacccaactgtttccttcttttaggcaatctgcactctaaataggtggatattttcttagctggcttacatgcatttatttatacatttttttccccacaataaaaattacacaaggtatgacaaagagagtgtgcacttttaaagttgccacgctcccttcccatccattccatgtaacggcaaccccgagctgttgtg

SEQ ID NO: 169596 - DNA, 749 bp, Homo Sapiens
  misc_feature (90)..(90): n is a, c, g, or t
tgtattggtggtgctctctcatgtcttcaccagtcctcagggactctcctgtctgtcccagctactctccaaccatgcccacatttctgntggagtcagttccaggcaccccggagtcaccaccaaactcaccagtttcactcagttactccccggtctcgctcatgtcttcacccccagccccctgggactctcctgtctgtcccagctactcccccaccacgcccagatttcagcgggagtcagcctcccacactccggaatcacctacagactcacagacttcactgaggtcctccctggtctgtctcaggtctttagcctcagcccacagggactcttgtgtctccttcagctactctcaaaacttctctagattccagctggagtcagttccaggcacccacgatacaccaccgaactcacgaatttcactgacttactcccccgtctccctcatgttctcacccccagccctcagggactcttctgtctctctcagctactctccaaccatctccagatttcacctggagtcagcttcccgcacccaggaatcacctacaaactcacggaccttactgcaaccctcccccatttctttcacctcttcaccccctgccttcagggactctcctgggtctcccagcttctctccagccttccccagatttctgccacagtcagccccaggcacccaggacaaccctagacactcacagggggtgaagaaatgagatgttggaagg

SEQ ID NO: 169597 - DNA, 438 bp, Homo Sapiens
catcttcatcaggattattaatgacctccaagcccgcttcaataacttccaccaattcatctcgtttgtcttttctaactggcttttcttcaggatggcgagtgagacccatttccaattgaaatactttcattaaggtaaaactttcaaagggaatgaccccatactcactgggtagtttggcccctatgctaacttcagctttgtcaatttgggaatgaagaaactctaaaagatcactaggtgcttgctctttgttgctctgatagcctatgccattagcccctacattccttctttcttgcagtgaccgcatcttctcactcatttcttgtaattcttgttttagttgggcaatttggcgtttcagactggttgccctggtctgataatgttcttcttgttcctgtaggagggcttgataatactctttaccat

SEQ ID NO: 169598 - DNA, 247 bp, Homo Sapiens
tttctcgaatggatcgatctgcaaagcgctcgcatcgctgttcccggtaacacggtctacaagggcagaaatcaccagctattcgatacactgctccgttgggcatacggagccgtccatgcgcatgcggacgaacaacgctggtatgccaccgtgcatgcgaaggctgaagagatccaatgccattttcacgcaaccccttgggttttccgaagtcagggccacggccagatcgacagccaaacgg

SEQ ID NO: 169599 - DNA, 432 bp, Homo Sapiens
gtgtgagccaccatgcccaacacccctatataactttctttgattgaagctgccctcactatctcctggcagtaaacttctattgcagtgtcagttacaataagaaaacacatgtgaattaatattactttatagtggttgctcatttttaaatagctgttagacttgatccacaaaaagactgtataatatctgacggcatgttttacttattgattcaactacctattgagtacctggtatatgccaggcactgtttttggttaatacagattcacagtaagtaaaaccaacactacccctgctctcacagaacttacattttggtattacagatactctgtatttcccataattcccagcctgggacagacctgagggcaagtatgtgctcaatgatcacctcaaaattaactggttgcctttggttca

SEQ ID NO: 169600 - DNA, 314 bp, Homo Sapiens
catgacaatctcctgcaccttactccccctgtttccccatcctccaatcctaggtttcctctcttcaatctttaaacatagattagattgagtcacctgctcacctccggacaaattatgggaacacaacaaactcgctggcttattccaaacacaacattccccagagctgatatagggctgatgtatgcgtgtacatgtaagtacaggactccagaaggaaaaacgaaagaatggctgataagcaaacctccttctctataaagttatttggttagagcacttcataattatctgctttccagggaactcct

SEQ ID NO: 169601 - DNA, 411 bp, Homo Sapiens
ctgattaagtaggttatgcttctctttcatgtaatttcttttagttcaatttaatattgaagaactttgtcccttcactttctttttaaaagagaaagagattaaacctggaaagacaagacacttagccacttttatatacttcaatgcaaaaagtacctttgctacttaatagccgatgaaagttgttctctgaagcaaaataatctccatgatggctaataaaatgaacttaataatgatcagatgagagaaatgaatatttctctcatattaaagtatatacttagaattaaaattactctaaactgataaaaatttaataagggaaatgttatttttaaagtatcatttctcttgtatcttacatttcttcactagagcatagaaatatatgcaaaattacaaaaa

SEQ ID NO: 169602 - DNA, 352 bp, Homo Sapiens
  misc_feature (259)..(259): n is a, c, g, or t
gttagagaacacaaagaaaattactactgtgatgttatgcatatcccaaaaacctatatatacgatattttccctgaagtatatatatttgtacataaattcatggggggaaaaaaactcttgagaggatcacatcatactgacagaagtagtttgctaggaagggcagaagtttacgcaggggagggtgagtggtcaaccagatgcactttggattctgctttaatctagagtttcatgcagctaagcatctgactgnaataaaggaaggaaaaggagtcatcttagcgggaagatgatatacagttgacaaaattctagtcaaagatgcaatctccagatacaaaaagag

SEQ ID NO: 169603 - DNA, 160 bp, Homo Sapiens
  misc_feature (58)..(58): n is a, c, g, or t
ggatctgaatttaggaatcaataacaaaaacaatttttgggaaactcataaatatgtngtaaagtaaataaaatagtcttaaataaccaagggattaaagaagaaaccaaagagaaattagaaaatactttgagatgaatgaaaatgaagacacacttac

SEQ ID NO: 169604 - DNA, 697 bp, Homo Sapiens
  misc_feature (35)..(35): n is a, c, g, or t
  misc_feature (205)..(205): n is a, c, g, or t
gtcttggcctcccaaagtgctggagttataggagngagccaccatgcctggccccataagagttctttatggggataaggaatctgtcacttgaaattaacctgaatcaattaaaataggcacaaataacaatgtcttgatagtcagatttcttccttcttccttccacctgctttcctcttagctgccttcttaatttcaagtnatagaaatggagcttctattaatataatgtatctcaaagttggaaaagcgacagatactcttttggtctaacaaagtatctactaaaaagaattgagaaaatcagtcattttgtattgcaaaaattactctccttctggcatacagtagataccttatcagattctcccaacatttcaggagcatctttctccatttcattctatttctgcccccattgataagcagatatgaatgaaacagaaaaagcctgataatccaagctagaggccaggcattagaggaggcagaaacttggtggggaatatgaacaaaagagataagaggaccaaggaaaaatactgggagtgggccaatagtaaggtttaacaggaatgctctctcttgagcatagtgctatccacacagtatcttctgagggccttggaataaggcctctgtatcagcagactaagcccaggaacaaacagagcaagttatgtctcatcaacat

SEQ ID NO: 169605 - DNA, 375 bp, Homo Sapiens
actttgcagtttcctttttgtatcctggagtcattctgttgttaatgttcaggtctgaaacattttcataggccctgacaagctcatagattctattctgggctttgtgcctgtaagtgcttaacaggaaagttaccctgacctagttaatcaaacaacaggcatttactgagcacctaatatctataaagtgctgtgctggagtcttcatcagattcattcattaggcagccatctaccatgtccaggcactgagtgtggtacatggctgctgggaatgaagataaagtcccctcaattcctgcctttgaggggtctgccttagccaaccaagggatggcccgaagtagagcaaattcaagaaactgtggagtt

SEQ ID NO: 169606 - DNA, 518 bp, Homo Sapiens
  misc_feature (313)..(313): n is a, c, g, or t
  misc_feature (383)..(383): n is a, c, g, or t
  misc_feature (391)..(391): n is a, c, g, or t
  misc_feature (407)..(415): n is a, c, g, or t
  misc_feature (487)..(487): n is a, c, g, or t
aacaaaaagatacatcgtttaaaatcagttgggtggggggcagacagtgagatgccaaagagcatatacacttgaatatatagaatttcaagtaagtgcaatgaaggaaaagaatgagattcagtaagagagaatagaaagaactttagagtgaattatcaggagacctttctgaggagtcaatttagtgtaagtcctaagcactgtattacctgttccattgtgttacttgttttgctcagaaaggtcaggtttctggtaccatgccaccaagattaaaagattctctgtgcaaagacaggcagcgaatcanaggaagaaataatttttagactagcaatatatgaccttgtggagttaatggtctttaaaccatttatgangaaattgngatcaagggacctacnnnnnnnnngagacactgaaatatttttattaccggatgggtaccttgggggtttctttcaggaacctttaaaattgggtnaaggccctgggcctttgaaagggtttttccc

SEQ ID NO: 169607 - DNA, 467 bp, Homo Sapiens
  misc_feature (16)..(16): n is a, c, g, or t
  misc_feature (23)..(23): n is a, c, g, or t
ggtcacagcgctggtncagttcnttcaatgaggtccttcgctgctgccaagttgctgcgccgccctggctgtggctcatcaccatctccgtgagcagtttcacattgttgttcacctcctcgatggcattcaccctcttcgagatcttctccatccgcctctggtcctcctgcaccatctctttgatgagcttattggctgcgcggaggtcttcgggatgggagctcttcagcaggcgggccagcatcttggatttctcctcatcttcaaagatcacattcttcggccgtggaggaggaaggggaaaggtagtgtcatctggaagcttggggtcggactttacaatcccctgcttctttagcatctggtaggcctctgcgattttcacctcctcgggcaggcccactgtccagctgtagaggagctccaagatcttattcttcaccttctccgatgtccgagagccc

SEQ ID NO: 169608 - DNA, 455 bp, Homo Sapiens
  misc_feature (346)..(346): n is a, c, g, or t
  misc_feature (401)..(401): n is a, c, g, or t
  misc_feature (411)..(411): n is a, c, g, or t
tcagtgtcttctgtgccactcgccagccggaagagcgtgggccgcatccgctcacagcgctggtacagttccttcatgaggtcctcgccgctgccagctgctgcgccgccctggctgtggctcatcaccatctccgtgagcagtttcacattgttgttcacctcctcgatggcattcaccctcttcgagatcttctccatccgcttctggtcctcctgcaccatctctttgatgagcttattggctgcgcggaggtcttcgggatgggagctcttcagcaggcggccagcatcttggatttctcctcatcttcaaagatcacattcttcggccgtggaggaagaangggaaaggtagtgtcatcttggaacttgggggccggactttacaatccctgcttnttaacatctnggaagcctctgcgaatttaacttcttcggcaggccccttgtcaa

SEQ ID NO: 169609 - DNA, 489 bp, Homo Sapiens
  misc_feature (18)..(18): n is a, c, g, or t
  misc_feature (39)..(39): n is a, c, g, or t
  misc_feature (46)..(46): n is a, c, g, or t
  misc_feature (55)..(55): n is a, c, g, or t
  misc_feature (91)..(91): n is a, c, g, or t
ccccccttaaaaaagggncccaccttcctttaaacgggncaagacnccattggcngtccaggtacaattataccctaataggcttcctccntcctttaatacaagtacaatccctgcctcctttatgcaaccctaacaaaataatatagaatgaagtcattagaaaaatatgaacctttctgaatcctacattacatttttaatttaaattggaaaatacagtttagatcatatgaaacatatggatttcagacatgtattatctgtttctaacagattattacaggcggtctttattttggctgaaatgcaaaaatatgactttcttaataacagattagttaaaaatactttccattgatagcagtgctagtccctagaacaaaaggtaagcaaaacttatttgtaagttactgcctattcaatgcccagaatatgtagatcctaaatctaagcccttaatatacatctactttaaagataactgaa

SEQ ID NO: 169610 - DNA, 471 bp, Homo Sapiens
  misc_feature (165)..(166): n is a, c, g, or t
tcaagagttatcagatggcacatgctcctcaaagccctcactctctcgaactagagcacgttccaggatcacgcggccttccttatatcgctggctgtcttcagtggcaaactcatagatccatcccagtttgctattgcagtttttgcagctcaccatctcgannacccatgtggcggccagtgagcatgacccgatcttgaacttcgctgtactgcaggttaactaccttgttaaaaagaaatgctctgccagtggcgcctgtgaaacgagtggagatgagttctgagcggttggtcaggatcgtatcacagtttgcacaagaaaacagacgggtaccaccgatatgttcaaggaaaattctgcccatttttatggctgaagttctaaaaaccctgagcggcggtgagatccgcggctgccagcggcttgtcgctcttcagctggtatgaagcccctcggccacccgag

SEQ ID NO: 169611 - DNA, 206 bp, Homo Sapiens
tctagaggatcccacatgatagctccacgctccatgaaaggaaacaaacaggaagcaaaatgtggattcagcaaacaaattctggaaatactaaatagtactggtgttgaatatgaaacattcgatatattggaggatgaagaagttcggcaaggattaaaagcttactcaaattggcaaacataccctcagctgtatgtgaaagg

SEQ ID NO: 169612 - DNA, 1066 bp, Homo Sapiens
ggggcagagttagctaaagaactccctcaagtttcatttgtgaagttggaagctgaaggtgttcctgaagtatctgaaaaatatgaaattagctctgttcccacttttctgtttttcaagaattctcagaaaatcgaccgattagatggtgcacatgccccagagttgaccaaaaaagttcagcgacatgcatctagtggctccttcctacccagcgctaatgaacatcttaaagaagatctcaaccttcgcttgaagaaattgactcatgctgccccctgcatgctgtttatgaaaggaactcctcaagaaccacgctgtggtttcagcaagcagatggtggaaattcttcacaaacataatattcagtttagcagttttgatatcttctcagatgaagaggttcgacagggactcaaagcctattccagttggcctacctatcctcagctctatgtttctggagagctcataggaggacttgatataattaaggagctagaagcatctgaagaactagatacaatttgtcccaaagctcccaaattagaggaaaggctcaaagtgctgacaaataaagcttctgtgatgctctttatgaaaggaaacaaacaggaagcaaaatgtggattcagcaaacaaattctggaaatactaaatagtactggtgttgaatatgaaacattcgatatattggaggatgaagaagttcggcaaggattaaaagcttactcaaattggccaacataccctcagctgtatgtgaaaggggagctggtgggaggattggatattgtgaaggaactgaaagaaaatggtgaattgctgcctatactgagaggagaaaattaataaatcttaaacttggtgcccaactattgtaagaaatatttaattacattgggagcagttcatgatttagtcctcagaaatggactaggaatagaaaattcctgctttctcagttacatgttttgtgtatttcacaatgtcgtgctaaataaatgtatgttacatttttttcccaccaaaaatagaatgcaataaacatcttcaaattattaac

SEQ ID NO: 169613 - DNA, 494 bp, Homo Sapiens
actagtccaaccatactaaagggcaaagtaaaacagtcaatcaggtactcacccatcctcaggtgaaacagatcatataagcccatgctttccctctgaagctggaaaagatttactaacctgcccactccattacccgtggcgtcttctcagtcacctaccttcttggctctctctgctttgtccctctcgatcttttctctaactctttgtctggctgctaactcctcggccttttccctccgcctctcctcagcagcccggcgcatctcatcttcctgtagccgctgtcgtgctgctgacaactcttgcccttgtctcctgcgctgccgttcccgttccaatgcctcccgttcctctctttcttcacgctcccgctgcttctgggccaccagctccaacatcctcttagtttgttcctgtctttcctcttcactcaaagcgggtttgccttctccggcagcagaaccagatccttgtatggtggctagtcg

SEQ ID NO: 169614 - DNA, 420 bp, Homo Sapiens
  misc_feature (357)..(357): n is a, c, g, or t
  misc_feature (379)..(379): n is a, c, g, or t
  misc_feature (399)..(399): n is a, c, g, or t
  misc_feature (406)..(406): n is a, c, g, or t
gtagctatctggtgatgtggtatttatccagattcttttgtataatcttatccttgtctttcttaggttgtgagggagctgggagtctctcatccgcacttagtaaagcggagcctaagtggctgttcatttggtgctttaaatagtagttgtgctggttcaatctaagaagaagggggcccagctttagctctgttccttacttgggcacctcattcagttttgatgcccacaatactgagtatctcccttgccctttaggtcaggctgccagatgggacctcactgacccagacgttccgggcccgggaacagctggcagctgtgaggctcaatgtggagctccaccgttgggangaactaggtgggttgccaggancctgtggcaattgctcagtngcttccncagacgggcctttt

SEQ ID NO: 169615 - DNA, 1032 bp, Homo Sapiens
  misc_feature (926)..(933): n is a, c, g, or t
  misc_feature (937)..(937): n is a, c, g, or t
  misc_feature (940)..(940): n is a, c, g, or t
  misc_feature (942)..(943): n is a, c, g, or t
  misc_feature (945)..(945): n is a, c, g, or t
  misc_feature (952)..(956): n is a, c, g, or t
gtagcgaggcctgggtggcgaattcggcacgagggatggactggctgatggagcacgaagacgaccccgatgtggacgagcctttagagactccccttggacatatcctgggacgggagcccacttcctcagagcaaggcggccttgaaggatctggttctgctgccggagaaggcaaacccgctttgagtgaagaggaaagacaggaacaaactaagaggatgttggagctggtggcccagaagcagcgggagcgtgaagaaagagaggaacgggaggcattggaacgggaacggcagcgcaggagacaagggcaagagttgtcagcagcacgacagcggctacaggaagatgagatgcgccgggctgctgaggagaggcggagggaaaaggccgaggagttagcagccagacaaagagttagagaaaagatcgagagggacaaagcagagagagccaagaagtatggtggcagtgtgggctctcagccacccccagtggcaccagagccaggtcctgttccctcttctcccagccaggagcctcccaccaagcgggagtatgaccagtgtcgcatacaggtcaggctgccagatgggacctcactgacccagacgttccgggcccgggaacagctggcagctgtgaggctctatgtggagctccaccgtggggaggaactaggtgggggccaggaccctgtgcaattgctcagtggcttccccagacgggccttctcagaagctgacatggagcggcctctgcaggagctgggactcgtgccttctgctgttctcatttgtggccaagaaatgtcccagctgagggccctttgtcccattgtcccctctgttgacccctttcatctttgataaagcactgaacatctcccttcctaaataaatagaaccctgaagttcctgtannnnnnnnaaanaanannanaaaaaannnnnaaaaatttcgagggccatcctattgttcggggggggccggagaaaaagaggggtaaatggaaaatgggggcccctg

SEQ ID NO: 169616 - DNA, 1027 bp, Homo Sapiens
  misc_feature (789)..(789): n is a, c, g, or t
ggagcgaggcctgggtggcgaattcggcacgagggtgttcccggctgctatagagccgggtgagagagcgagcgcccgtcggcgggtgtcgagggcgggttgcctcgcgctgacccttcccgccctccttctcgtcacacaccaggtccccgcggaagccgcggtgtcggcgccatggcggagctgacggctcttgagagtctcatcgagatgggcttccccaggggacgcgcggagaaggctctggccctcacagggaaccagggcatcgaggctgcgatggactggctgatggagcacgaagacgaccccgatgtggacgagcctttagagactccccttggacatatcctgggacgggagcccacttcctcagagcaaggcggccttgaaggatctggttctgctgccggagaaggcaaacccgctttgagtgaagaggaaagacaggaacaaactaagaggatgttggagctggtggcccagaagcagcgggagcgtgaagaaagagaggaacgggaggcattggaacgggaacggcagcgcaggagacaagggcaagagttgtcagcagcacgacagcggctacaggaagatgagatgcgccgggctgctgaggagaggcggagggaaaaggccgaggagttagcagccagacaaagagttagagaaaagatcgagagggacaaagcagagagagccaagaagtatggtggcagtgtgggctctcagccacccccagtgggcaccagagccaggtcctggttccctcttctcccagccaggaancctcccaccaagcggggagtatgaccagtggtcgcatacaggtcaggctgccagatgggaactcactgacccagacgttccggggccccgggaacaagctggcagctggggaggctctatggtggagctccaccgggggggaaggaaactaggtgggggggcccaggaaccctgttgcaatttggctccagtggcctttcccccaggacggggccccttcctccagaaaagctggaat

SEQ ID NO: 169617 - DNA, 824 bp, Homo Sapiens
  misc_feature (596)..(656): n is a, c, g, or t
ttgtcagcagcacgacagcggctacaggaagatgagatgcgccgggctgctgaggagaggcggagggaaaaggccgaggagttagcagccagacaaagagttagagaaaagatcgagagggacaaagcagagagagccaagaagtatggtggcagtgtgggctctcagccacccccagtggcaccagagccaggtcctgttccctcttctcccagccaggagcctcccaccaagcgggagtatgaccagtgtcgcatacaggtcaggctgccagatgggacctcactgacccagacgttccgggcccgggaacagctggcagctgtgaggctctatgtggagctccaccgtggggaggaactaggtgggggccaggaccctgtgcaattgctcagtggcttccccagacgggccttctcagaagctgacatggagcggcctctgcaggagctgggactcgtgccttctgctgttctcattgtggccaagaaatgtcccagctgagggcctttgtcccattgtccctctgtgaccccttcatctttgataaagcactgacatctccttcctaataaatagaccctgagttctgtaannnnnnnnnnnnnnnnnnnnnnnnnnnnnnnnnnnnnnnnnnnnnnnnnnnnnnnnnnnnnaaactcgaggcattttattgttggggggccgggaaaaaaaggtaatggaaaagggcccacggggcccataaatgtggtttccgggaaccccagttttttcttgtgtacaaaaggggggtaaaaaattttgggccggggtccttcccctataaaggggggggctcctat

SEQ ID NO: 169618 - DNA, 229 bp, Homo Sapiens
tgtcaagacaagaaaacctataaaacaggaagctgacgcttaatctgaagggtgctcagggcaagatctatttacttcaaaccattcatctatgcagcctttatgatatatgcatagacaaggcagtcgtgctatagtatctccctgctgcaattcttcaaggcatattgcacattccccagcatctttactcagtacatcctcattataggttattcgtggctttgtt

SEQ ID NO: 169619 - DNA, 313 bp, Homo Sapiens
catgtcttacaatgcaagaatgtaacctcttaattgctctatttgtattacattgtcatctttggactttcctggatacccttgatctctctggtatttcctgttatggtgagtctgtcctaacagccttatttatagacatgtttttgcacattaaccacactccatggaagaagccctttaacatgagacttgttcctaagtactccactggcttaccaagtataggattaccctttgattactttatctggctaccaggacagagagattcttgggagccaaccagccatcaggtcaactattttgctac

SEQ ID NO: 169620 - DNA, 898 bp, Homo Sapiens
  misc_feature (463)..(507): n is a, c, g, or t
gctatggccagtgtcaccaagtaaagccatacttgaatgagatgacgactggatacaaagctggtgaactggggactggcacagttaagagttgtactaattctaggaaaggggtagaagacataaaaacacccatctatgtaatttaattcacattttctcccctgcatcaccttcccttgagagtttcacaaaatgccagtgcccagaaagaatcacaatgctataactggcagggtaaaaaagtccccccgccccgacttccttgctgccgggctataggcaaatattaaagcatgcatcagctacccaaagccatcagtcacccatctggaagaccatggtgtacagtttccgcctaggctggctgcactaggaagtactccagtttttaaatggagccagctttatgttagccctgtaaaatattgagctactgtagcagcaaatatgacattacagnnnnnnnnnnnnnnnnnnnnnnnnnnnnnnnnnnnnnnnnnnnnnccttcaaatctgtgtcctttaaccaaacaacagtttcttctatcacttaattctggtcttattacctcagtctgactttctcattatgcttctctggaaagacacttctaaatcctggagattaaatttactcttaaaaatggaaatacaggaattttaaagtaaaaagaaaaggtctgttctaaaagttctttcacaaatatatatatttaaatattaaaataggctacctaggatttttataaaatggcttttgaaaagataatagaggcacaaagaagccatatactatcctccaagttggacataaggtgccacaaggctgccctacaaagaggcaggcaatctctacctgatgcaacgggaggcaccagtaaacaacagaaacatt

SEQ ID NO: 169621 - DNA, 582 bp, Homo Sapiens
  misc_feature (253)..(253): n is a, c, g, or t
  misc_feature (307)..(307): n is a, c, g, or t
gttaagttggagccccctcaaaaaaactgatgagaggaatggggaaaaatcactttaatgaaggcaggagagcattaatggtttcgtagccaagaaggaaagcagtgctcatccttacctcatggagcaggagtgagaggccctggttaagagaagctgggatctaagagtcactgtgggtcacacttgcaaacatgcccacatgatctctctctgcagccactggaaactgagttaagaggtagggagtggnaggtaggggtaggggttcattccttagtaggaatacggcaaagatttcctaagngtcttccttcttcccacccacaaggcaaagctcttctctgcccaaaactactactattctctcacctttccagtcgccagagagaaaagcaagacacccagggaccaccaatcagcagcatggttgtaaggtcctccacttaggacctctggggctacagatttcaaagatactcatcacagacatcctttagctatcctcctgcccaatgcttacccatcagctttaacctctctcacccatgtactgaagagtgccacagatagatgtatgct

SEQ ID NO: 169622 - DNA, 637 bp, Homo Sapiens
tcccactggcagactcttaacttcaaaaagtattgaagcccccaaaggaaaaggatttgccaagtccccggcaaattcttagaaacataggctttaggttaaaaactaacttgcaaccattccttccgcaaatcgtcctctgacctctagcaaactatcctgtcctaatctgtgaaaaaggagcaacagttacacctatcccagcaggtggctgcaaatatcaaatgggaccaaaaatgagtcaactaccaagcaccacccgactggaactacaggggtaaactaaattctggatcgccctacacctgttcatctcccagtaccactgtatgaaggtggaggtgaagcctgtcttgaagagagagagaggctccttggagcctctggggtccgaaggtagatgttaccttcctcttgagtgcattgtcttcctaagataggatggacaacagggtctatatggaaagtgttggctgtcagggcttcaagtctggctcctaagctgttgctggagggttagagaccccactccagctctctctaaaatgagggcagcttgttagcaagagtgagtgaggtgagccctctatgaacccatgggaggagagaaaacgagcatcccatataagcttttaca

SEQ ID NO: 169623 - DNA, 606 bp, Homo Sapiens
  misc_feature (15)..(15): n is a, c, g, or t
gtaaactccctcccnccagcttccttgtcccttgaaggggcagttcagctgggttctggtcaagggtcaggcagccagttaaggcttgcctggtgcaaaaaggctgggtcctgtgtcttcagagctcattcctccactctggctccacttgcagagacaggcccccttcaccctcccgctcctggggggaggtagtcatggctgtggggcccctgaggtagaggggctgagcttgctcagaccttgcagtaaattctgtccctgttgcaggtccagtttggcagggaaggcacacccggtataccctccgttttctttacagaactccaggaatctgtggggtacagaggagtgccagcagagactggaggctaagccacggtcctgtcccatctgagctgtacttgctcaacctctggatgtcatttaacttataaatacaatagtgatgctgtgaaaatggacacatctgaggattaactgagcgataagcaagcgcttaaaaaagatccacctgccctaggcaggggctgtggccactaagagggagaatggggtgggaatgctcacactttccagtcagggtcatggcccaggaaaaggggg

SEQ ID NO: 169624 - DNA, 677 bp, Homo Sapiens
  misc_feature (86)..(86): n is a, c, g, or t
gatgacatcaaggacttgaaggtgggttcagtagaagaattccaaggccaagaacgaagcgtcatcctcatctccaccatgcgaangtccaagagctttgtgcagctggatctggactttaatctgggtttccttaagaaccccaagaggttcaatgtagctgtgacccgggccaaggcctgctcatcatcgtggggaacccccttctcctgggccatgaccctgactggaaagtattcctggagttctgtaaagaaaacggagggtataccgggtgtcccttccctgccaaactggacctgcaacagggacagaatttactgcaaggtctgagcaagctcagcccctctacctcagggccccacagtcatgactacctcccccaggagcgggagggtgaagggggcctgtctctgcaagtggagccagagtggaggaatgagctctgaagacacagcacccagccttctcgcaccagccaagccttaactgcctgcctgaccctgaaccagaacccagctgaactgcccctccaagggacaggaaggctgggggagggagtttacaacccaagccattccacccgcctccctgctggggagaatgacacatcaagctgctaacaattgggggaaggggaaggaagaaaactctgaaaacaaaatcttgttctatgc

SEQ ID NO: 169625 - DNA, 441 bp, Homo Sapiens
  misc_feature (318)..(318): n is a, c, g, or t
  misc_feature (352)..(352): n is a, c, g, or t
  misc_feature (359)..(359): n is a, c, g, or t
gtatcaatctattatgagagtttgacccatccaaggtaaaatgaatcaagttcattttacacacttaaacatgtaggtcttcctttgccatgattttattttgatgtgttttactgaattgcaattctaacaaattgactatagaagtggtggttgttatccaccaatagaatatacaggctacagaagaaagtccacaaattcatgaatgaaaatagacttgtatatgttttaaaaatctataataagaaatgctctcatgaatgtatcggtgattaacattttatagatcagatgttcccatcagaatccaaacangaggaagatgaagaataatctttggaatccgggnaactggngattattgatgttataattctctaaaaatataaatgtgagtgatgtgaaaatataaaatcagaggctttgacttggttttct

SEQ ID NO: 169626 - DNA, 665 bp, Homo Sapiens
ggcgttcagaggatcccggatgtatcgcccaaaccagcatatagtatagatgtctgtcttttttatattttttagttcttcctgtacatgtgttggcaataaagttataggaagaacaaaattattttgttagaattaaaacatgcttaatatttagtctgtttgtggagggcaggtattcacgtggactgagatacaatgttggatacagaaaataactttcattgtcttcctgacactgtgctaaggacatgctgttaaagcttcaaagtgaccagatgaggaaggaataattaattattactcctgatttgtagataactgaggtaagagtgtttcaaatttatgatagtcttttgggtattcagaaacctttccttatactgcactggccaccagagcttaattttcccagcagttacagcaatgggagatagaacagtctcaatcttttgccaacaatcaggttcctagaaaccaggtaggtgtatcccataacaagggaggagcataccacagaccctcatttgattaattcatttgatctatctatgttattaagtacctactaggaataaggcattgtggaaatactatacaaagataaaacatggtgtagatgcttatctactttgcttttcaccagataaacagaaaacaaagaa

SEQ ID NO: 169627 - DNA, 534 bp, Homo Sapiens
tcctcgatgtaaattattttcttctgatactgtgatggtttcatagagtaaaacactttccttagatctcttcatttgaacatttcctgttgataaatcactgaaaacaaaacaaaactacctaatttaaaagcgttgcgatgggtcttccagagtttttatcttacacatagctgttctagggcttcccaccaacatttatttccaaaccaaggacttgtttatctcatccttcatacttttgcatttcagtccgaattggatacgggtttttgttgtctttgtttttgcagtagaaaaacttcagttggtaggatgaaaaggagaacaaatctttattcactttcagtatagttccattaacagtattaatgtgccatgtatgaatatacctgtcatgcagactgaggcccacagactaataacattttgagcaagataatcttaagtaaaaactgaagctctgaactcaaacattctttcaaatttctttaaaataataatgatcacttagatgaggtgcatcatttatgt

SEQ ID NO: 169628 - DNA, 743 bp, Homo Sapiens
  misc_feature (41)..(86): n is a, c, g, or t
  misc_feature (171)..(171): n is a, c, g, or t
acatagagacaacatctgaagatggtcaagtattttcaccnnnnnnnnnnnnnnnnnnnnnnnnnnnnnnnnnnnnnnnnnnnnnntccaaaggtgattctgatatttctgatgaagaagcagcccagcaaagtaagaagaaaagaggcccacggactccccctataacanactaaagaggaattggttgaaatgtgcaatggcaagaatggtattctagaggactcccagaaaaaagaagatacagcattcagtgactgggctgatgaggatgtccctgaccgtacagaggtgacagaagcagagcatactgccaccgccacgactcctggtagtaccccttctcctctatcttctcttcttcctcctccaccgcctgtggctactgccactgcttacaactgtgcctgcaaactcttgcttgccactactgctgctgccgccaactctttcagcacatctgccatcactatttccacctctgccacccccaccaataccaccaataatacttttgccaatgaagactcacacagaaaatgccacagaaacacgagtagaaacagtagagacgcctcacgtgactatagaagatgcacagcatcgcaagcctatggctcaaaagaggagcagcagcctcgggagcaatcggagtaaccgtagtcatacgtctggtcgtcttcggtccccatccaatgatcagcccatcgaagtggagatgacaaagtgtcgaagagagtatg

SEQ ID NO: 169629 - DNA, 540 bp, Homo Sapiens
  misc_feature (472)..(472): n is a, c, g, or t
cacagattatacatgatagacctcaacagacagtaaccagcttacgaatgtggatataggccgtctgctaatacatgggagactgtgcttatggtcacctttagggcgaaacactttagaagttgacagcatttaagccatgagtggtgtctagagcctgcatcaccaacattgcctcaagacagtcacgaagccattactcccatcagttgcttagacaatgaatcctgtgtctgagactcacttatgtcttcttacatcactgtcttcattgccagtgcagctcttgcatggtgacaatactaataggcatacctaattcttccacgaatgcgggataattttcaagggaacagatttaaggatctttccaagttagagcatgcaaccctttttagttatgcaagatggtagaacaatagatcccacttctgccaccatggaacaaccagcatgtgaaacagacaagacncttgcaagcaatactctagttccctttaggaagtgactttttactcaactctaccgcacaatgccatt

SEQ ID NO: 169630 - DNA, 1054 bp, Homo Sapiens
gggccagtccaccctggcggggtcgcagggttgggatggcggctggaggcgatcatggttcgcccgacagctaccgctcacctcttgcctcccgctatgccagcccggagatgtgcttcgtgtttagcgacaggtataaattccggacatggcggcagctgtggctgtggctggcggaggccgagcagacattgggtttgcctatcacagatgaacaaatccaggagatgaaatcaaacctggagaacatcgacttcaagatggcagctgaggaagagaaacgtttacgacatgatgtgatggctcacgtgcacacatttggccactgctgtccaaaagctgcaggcattattcaccttggtgctacttcttgctatgttggagacaatactgacttgattattcttagaaatgcacttgacctgcttttgccaaagcttgccagagtgatctctcggcttgccgactttgctaaggaacgagccagtctacccacattaggtttcacacatttccagcctgcacagctgaccacagttgggaaacgttgctgtctttggattcaggatctttgcatggatctccagaacttgaagcgtgtccgagatgacctgcgcttccggggagtaaagggtaccactggcactcaggccagtttcctgcagctctttgagggagatgaccataaggtagagcagcttgacaagatggtgacagaaaaggcaggatttaagagagctttcatcatcacagggcagacatatacacgaaaagtggatattgaagtactgtctgtgctggctagcttgggggcatcagtgcacaagatttgcaccgacatacgcctcctggcaaacctcaaggagatgggaggaacccttttgaaaaacagcagattgggctcaaagtgcgatgcccatataaagcggaatccccatgccgttcaagaacgtttgcttgccagtcttggccccggccaccctggatggaaccctttggtccatggggaccccggcctaacaggaaccagccaattcctgggccccaggttggc

SEQ ID NO: 169631 - DNA, 724 bp, Homo Sapiens
  misc_feature (233)..(283): n is a, c, g, or t
  misc_feature (321)..(351): n is a, c, g, or t
  misc_feature (472)..(472): n is a, c, g, or t
  misc_feature (547)..(582): n is a, c, g, or t
  misc_feature (708)..(708): n is a, c, g, or t
gcttcctgaactgggcagtgccttctatgacatggccagtggctttacagtgggtaccctgtcagaaaccagcactgggggccctgccacccccacatggaaggagtgtcctatctgtaaggagcgctttcctgctgagagtgacaaggatgccctggaggaccacatggatggacacttctttttcagcacccaggaccccttcacctttgagtgatcttactccctcgtannnnnnnnnnnnnnnnnnnnnnnnnnnnnnnnnnnnnnnnnnnnnnnnnnnttaggtttcatgcccattttctatcacactgggctccnnnnnnnnnnnnnnnnnnnnnnnnnnnnnnntgtgccctgttttcatcccaagatttctcacttcatcctctcctacctggctcttttgtcccagggaggggtcctgttcggaagcagtggctgaaatttatcccctggaaagtgggtttgngaggaaccgggatggaggaggccttcccctgtgggaaaagaattcgtccactcctagccctggttgcttctgatnnnnnnnnnnnnnnnnnnnnnnnnnnnnnnnnnnnncccttgtctgatgccccaaagccaattcctggggcaccctaccctctcttatttggagtttccgttggtttacctgaagttttctctgggggtctgcacagaggcagcagcatgggacatcatggnctttcaaggtcccttt

SEQ ID NO: 169632 - DNA, 393 bp, Homo Sapiens
ctggagctcatggtctctggcagggtaggtgttctcaatgccgttgccgggctcgtgggctgcactgtctcctgggaggaaggggccgtagagctggctggcaactgactggaggtctgttgagttctttgcgagataaccgatgacggtagggtggtggtcatccccgggcttgtgaaggtgtagccagggatagccacagtgcttgaactgcttgaaattttcataagatggtcatgtcccgagcttgttggggtggccacaggatgcgtcaaagtgggttgtcgggggctaagtggacttgtagggtgaggggtcgtcagattgttctgccttagtgaaaatgaggtctgtggtcacactgtggctgcttttccccccattaccctacgc

SEQ ID NO: 169633 - DNA, 393 bp, Homo Sapiens
cagtcagggcccaggcctgagggggaaagccttaggtaaagaatatttctccaaatcccactccagctcccgcagacaacctgatcggggtcaggaggacacactcctaccccaggctgagagcagcctctgataacacaaaaggaccctgagggtggagacctcccacctccacttcaaaacagtgtgttatttatcaatatcttatccccggaagttgaatctatctcccagtgccaactccgagataaatgacttgaccaggcgtgtggcatggattaaggcatgagataggtgttcccaccaccagaacgagccagtggctgcctctcttccctttgagccctccctccacagagacctgtgaataggtggttctgatccctaggctgg

SEQ ID NO: 169634 - DNA, 1738 bp, Homo Sapiens
gggatcgccacttggagaccaccgcgaatgaagtttgcgttttcctctgttcttgagcccagcttcttctcgtctcccaccccagcttcccggcattggaagaagggaccgtcctcttccttgtcttggccacccaaatcctggtatcgaaagggttgaacggaccggaagtgtgcagcagcgacgggtccccagctaatcgacgccggaagtagcaattactagacaagcattccgccgccggcttcgctatggcggcaattcccccagattcctggcagccacccaacgtttacttggagaccagcatgggaatcattgtgctggagctgtactggaagcatgctccaaagacctgtaagaactttgctgagttggctcgtcgaggttactacaatggcacaaaattccacagaattatcaaagacttcatgatccaaggaggtgacccaacagggacaggtcgaggtggtgcatctatctatggcaaacagtttgaagatgaacttcatccagacttgaaattcacgggggctggaattctcgcaatggccaatgcggggccagataccaatggcagccagttctttgtgaccctcgcccccacccagtggcttgacggcaaacacaccatttttggccgagtgtgtcagggcataggaatggtgaatcgcgtgggaatggtagaaacaaactcccaggaccgccctgtggacgacgtgaagatcattaaggcatacccttctgggtagacttgctaccctcttgagcagctcttctgagatggccccagtgaaccaccttctagatgacatagaatgaaatgtaatgctaaatttcattttggctttgcaagtcatgaagcttaggaggcctggcatcttgggtgagttaaaaatggaagaacattttaataggatggcttctttcctcttcccccagggcctaggttggccagaacattttgcacaaatgcccctggtttatcaataggtgactacttactacacatgaaccataatgctgcttcttgtacatgtctgctctgatatacgtcgaacaatgtagcagccactgtcatttctcagtggttttgcctaaccaaacttcttcctaaggagatttatattctggcctacacagcagtccttgatggctgacagccacagaattccaaaccaagtagtgtctgtcagccctcttaactctgtgcacgccctatttcagtcttttacatttgttcttctagggaatgtatgcatctctatatatattttccctctcaaaaccagaacatcaacagtgctgtttctgacacttcagacatcccacgcaaagccacattgaatttttgccaaatgaaaaacacatccaacaatcaagtttctaagaaggtgtcaagtggggaataataataatgtataataatcaagaaattagtttattaaaaggaagcagaagcattgaccattttttcccagagaagaggagaaatctgtagtgagcaaaggacagaccatgaatcctccttgagaagtagtactctcagaaaggagaagcgccactcaagttcttttaacccaagactttagagaaattaggtccaagatttttatatgttcagttgtttatgtataaaaataactttctggattttgtggggaggagcaggagaggaaggaagttaatacctatgtaatacatagaaacttccacaataaaatgccattgatggttg

SEQ ID NO: 169635 - DNA, 758 bp, Homo Sapiens
gatggatctcagaaataccccagccaaatctctggacaagttcattgaagactatctcttgccagacacgtgtttccgcatgcaaatcaaccatgccattgacatcatctgtgggttcctgaaggaaaggtgcttccgaggtagctcctaccctgtgtgtgtgtccaaggtggtaaagggtggctcctcaggcaagggcaccaccctcagagccccgatctgacgctgacctggttgtcttcctcagtcctctcaccacttttcaggatcagttaaatcgccggggagagttcatccaggaaattaggagacagctggaagcctgtcaaagagagagagcattttccgtgaagtttgaggtccaggctccaccctggggcaacccccgtgcgctcaacttcgtactgagttcgctccagctcggggagggggtggagttcgatgtgctgcctgcctttgatgccctgggtcagttgactggcggctataaacctaacccccaaatctatgtcaagctcatcgaggagtgcaccgacctgcagaaagagggcgagttctccacctgcttcacagaactacagagagacttcctgaagcagcgccccaccaagctcaagagcctcatccgcctagtcaagcactggtaccaaaattgtaagaagaagcttgggaagctgccacctcagtatgccctggagctcctgacggtctatgcttgggagcgagggagcatgaaaacacatttcaacacaccaagg

SEQ ID NO: 169636 - DNA, 467 bp, Homo Sapiens
aggccaccaggctgaagtcagctcagacccagacctccctgcttaggccactcgagcatcagagcttccagcaggaggaagggctgtaggaatggaagcttcaggcccttgctgctggggtcatttttaggggaaaaaggaggatatgatggtcacatggggaacctcccctcatcgggcctctggggcaggaagcttgtcactggaagatcttaaggtatatattttctggacactcaaacacatcataatggattcactgaggggagacaaagggagccgagaccctggatggggcttccagctcagaacccatccctctggtgggtacctctggcacccatctgcaaatatctccctctctccaacaaatggagtagcatcccctggggcactttgcttgaggccaagccactcacatcctcacttgtgctgccccaccatcttgctgacaacacacacagaag

SEQ ID NO: 169637 - DNA, 504 bp, Homo Sapiens
  misc_feature (353)..(369): n is a, c, g, or t
  misc_feature (378)..(443): n is a, c, g, or t
  misc_feature (468)..(468): n is a, c, g, or t
ccttggtgtgttggagttgaccatgagtgagccttggtgagtgtgtgagcagtgtgaatgcatgcatcccagtactgtggacaacagctcctcctgggtgctcagaattctgcagctcacaaggccctatttgcagccacaatttcactggatccctagaactgccctgggtgcagggcagggtgtgtttccttgtttttgtgattgtggaacattatgtatatttacccattgtacaaagaatggaagaaagaaaatttgaaaaattggcaggggaaaaaatgtttctccccattcctatcacagccagtcacatgacacttaggttcatttcctcgaaatcctttatcccnnnnnnnnnnnnnnnnngagatggannnnnnnnnnnnnnnnnnnnnnnnnnnnnnnnnnnnnnnnnnnnnnnnnnnnnnnnnnnnnnnnnnagggttcaagcaattcttatgcctnaaccttccaagtagctgggattacaggcatgcgccc

SEQ ID NO: 169638 - DNA, 718 bp, Homo Sapiens
agccggggaacatcatgcgcctcgtaggggaagaggggcagagcatcttcaagctgacagacttcggcgctgcccgggagctggatgatgatgagaagttcgtctcggtctatgggactgaggagtacctggtggcatcccgacatgtatgaacggccggtgcttcgaaagccccagcaaaaagcgttcggggtgactgtggatctctggagcattggagtgaccttgtaccatgcaaccactggcagcctggccttcatcccctttggtgggccacggcggaacaaggagatcatgtaccggatcaccacggagaagccggctggggccattgcaggtgcccagaggcgggagaacgggcccctggagtggagctacaccctccccatcacctgccagctgtcactggggctgcagagccagctggtgcccatcctggccaacatcctggaggtggagcaggccaagtgctggggcttcgaccagttctttgcggagaccagtgacatcctgcagcgagttgtcgtccatgtcttctccctggtcccaggcagtcctgcaccacatctatatccatgcccacaacacgatagccattttccaggaggccgtgcacaagcagaccagtgtggccccccgacaccaggagtacctctttgagggtcacctctgtgtcctcgaagcccagcgtctcagcacagcacatcgcccactagta

SEQ ID NO: 169639 - DNA, 659 bp, Homo Sapiens
tcgtgactgtgacacacctggcgctccagctgctgggttcatctccaggtctctctgccgctctgtgagtggctttcctgggccttctccaccgaggcatagcggctggcgagctgattgcgaaggtcggcaatgtggtggtcgcacctcttcatgtctttcttgaagttctcacggaagtacatcaggggcttctccacctcgctgtgaagcttggcagagaacttgaggtgaacttctgcttcgtccgccaggctcttcttcacctgggcccacgcctctcccaaggagcccttcctcctgtgaagccaaggagttctgagagaagcctaagctaagttcttcgcatagtcttcttcaatctttatccctttcccgggatgaattctgacatttccttctgcatttgtttgcccttcagctgtttctggaggcccagtagttcaaacccagccacggtgccgttgccttgggggtccttcttatcagcccagaagtagtcgcagtagctccactcggttggtttcagcagctgctgttccggcatcgtgtctgggtgagggaacgtcacacagtttattgtgatggtgtttccttgctctgctttttcttggcgatgaggatccaggttctggaatcacggtggatttcggacactc

SEQ ID NO: 169640 - DNA, 587 bp, Homo Sapiens
tctataccaggtggtatagatggctgcatggaaatggagggaaagcggagggtgacttcagcttaattcagccatattggtaaccatctcagtgtccttggcattctgtcatagaataccttggggttcagaacatgagatcttccagataaaacagtcaaagaagctgcagcagtaggaaggacagctttgaaaacaccagccctccaccgaggataaccaaaggcgccattttgcccatccatgcagtctgtagtatccctctgcacttgaaagcccagggacttagtcactgtgtgctgtttgtagatcctccgggtgaagagccagataactgaaagttataccatgataatcactttatgttgttagtaatttcagtggggaaaggaatgcctgagcagctagagctttcctatagatgattctgaaaaagaatacctcgaatagccatatgttttagcgatacatttctgaatatttatcaaacactatggtattctcatcaaatacaaaatatgtcatgagcaagccattcatagccagtgaaagaaaataagacaccacaggtaaccaacacaccagga

SEQ ID NO: 169641 - DNA, 903 bp, Homo Sapiens
  misc_feature (623)..(623): n is a, c, g, or t
  misc_feature (639)..(640): n is a, c, g, or t
  misc_feature (643)..(643): n is a, c, g, or t
  misc_feature (646)..(646): n is a, c, g, or t
  misc_feature (649)..(649): n is a, c, g, or t
  misc_feature (657)..(657): n is a, c, g, or t
  misc_feature (672)..(672): n is a, c, g, or t
ccgccggtatttctccatctggctctcctctacctccaggcaggctcacccgagatccccgccccgaaccccccctgcacactcggcccagcgctgttgcccccggagcggacgtttctgcagctattctgagcacaccttgacgtcggctgagggagcgggacagggtcagcggcgaaggaggcaggccccgcgcggggatctcggaagccctgcggtgcatcatgaagttccagtacaaggaggaccatccctttgagtatcggaaaaaggaaggagaaaagatccggaagaaatatccggacagggtccccgtgattgtagagaaggctccaaaagccaggatgcctgatctggaaaagaggaagtacctagtgccctctgaccttactgttggccagtactacttcttaatccggaagagaatccacctgagacctgaggacgccttattcttctttgtcaacaacaccatccctcccaccagtgctaccatgggccaactgtatgaggacaatcatgaggaagactattttctgtatgtggcctacagtgatgagagtgtctatgggaaatgagtggttggaagcccagcagatgggagcacctggacttgggggtanggggaaggggtgtgtnntcnccnacntggggaanagaggggggctcccnccgccagggagacagaaaggggaagacatcctagaaacatttacaccacacccacccgtcattcccatttttcccatggcttcattggatattcttttgcttgccttcccccggcccccggggagaaaagacatgttcacggaacagaacctggctggggattgggcctttttaataaaagggaatcgggcgaacggactgtcaagcttttaccagggaatctccccgggg

SEQ ID NO: 169642 - DNA, 217 bp, Homo Sapiens
tagtatacgaacggaaatgagacaagagtgccttatttcctttccaagtatttcacagcaacactctacttgaagcaacttggtccaaattgaaaagtgtcctctggctgagtggccactaggcccagacccagcccagcctgagccccaacaacttttccctcactgttccccaaaacatgcaccctggacttctctaatagaaaagtctccaccc

SEQ ID NO: 169643 - DNA, 438 bp, Homo Sapiens
aaactgtgcatttaaatacacaaaggtttccatcaaagccaacaatttaccttggactaaaacgataatattaaggaatcaaacaccaaatgtcacctcccaatcctccccatcatctccatctttaaactgaaacacacaacaaactattgggcatttaagtaccaggcattctctcacagcagtgtgtttactcaaccactctcttggcctaaacctcccctgaaatgaaaaacaagccttttccttaaatgcttcctaagggagggatggggcacatagagaaagggcttctttcctcagacacggttgtgtctctgttataccatctacacaccttttctgcttcgctggctagtcttatttttactggcaacacaaaaacaatgagctctataatcatagctgtaattctccaacacaccaggaccggcagcg

SEQ ID NO: 169644 - DNA, 298 bp, Homo Sapiens
ctgtttttaacacatcactccttgaatagcatgtatttcttacagcacatttattagacccatttcacttctttcttcagatcccacataacgtctcaagaaacattgtatttgcaaaatagcttccattggccacacttagaatataatgttcacagaacatttgttatgctaggctcttgtctgtttgttcaaaatgtagaccaacttcaactatgaatttatgagttcaaccatgagtttctaggcagcataatgggcatcttgtacctaactcgtggggctcagcttccaagat

SEQ ID NO: 169645 - DNA, 264 bp, Homo Sapiens
gatataatggtcagtaaagcacacgtgatatatactttgtaagcattcagccttggaacttggaaagaattggagggagaatgtggatgtgaggtgacttctgaggctaggtcataaaagtattacacttcttgtcatgttcttggattgctcactatggggaaagccagctgctatgctgtgaggatactcaaaacagccctttggacaggaactagagcttcatgccaacacaccaaccaacacaccaggaagtccggtacc

SEQ ID NO: 169646 - DNA, 540 bp, Homo Sapiens
gtaaatccgtggacgctggtaagcccccatggtcaggggtgctggtgctagcatttcctgtggataatgggagggggatgtgtggaggacctgtgtctactgttcctctagcctctgggggatttggagaacccactctgcccagagatgtaagtcatctttggatatagatgagacttgttccccctccccctgaatcccagggcacagctctatggaataagctctagctggaacttgtaaagtttggcccagccctccctgggaggctaggaggtggggaagagccaggagactcgaagtggtggtggtagttaatgtctatgtggttagacgttaaccagttactctgtggtgccaggcactgtcctaggcacgctatagttatcattgtctcctttggtgcccccagacagcccagggtcaagacaggtagcctcagtttacagatgcagcagtggaggcttgcacaatgagtaggtggctttgttcaaatcacagacctaggccaggtataaaagccaaagtgtggtgtaattc

SEQ ID NO: 169647 - DNA, 613 bp, Homo Sapiens
taaccgtgcgcgcaaacaccgggggaagggggacagggaaacatttaacacagacgatgatcaggatttgccccaaaccaccccaagagagaggactgagtggaacaaaaaagtgacccccagaacctctcttagtgtggagggtgggtagaatgagaactgacacctgggagctgtggggagcagagcggctttggggaagagtggagtgactagacacctaatgccctggcagctggagactcaaactcctgtacagctaccttctgggaaatagtttttgacacctatttttcagattcttgtccggaatttctgctggctcttttcaaaaaagggcattaacaattctctggaaataaagcacctgttagcctgacatatgcaaaaagcagggcggcatcacccattacgagctcccccagccagcagtcagtattggattggccttgcctggctggtggcagttggggaagaaacagccaaagaggttagtttatttcaacaccaaattagaccatggcccatttccaacgggtctctttaaaggcctctatggaatacattggctggtttccttctttgcagttcaccacagcaaggaatgtcacct

SEQ ID NO: 169648 - DNA, 816 bp, Homo Sapiens
  misc_feature (603)..(603): n is a, c, g, or t
  misc_feature (616)..(616): n is a, c, g, or t
  misc_feature (623)..(623): n is a, c, g, or t
  misc_feature (635)..(635): n is a, c, g, or t
  misc_feature (652)..(652): n is a, c, g, or t
  misc_feature (663)..(663): n is a, c, g, or t
  misc_feature (668)..(668): n is a, c, g, or t
  misc_feature (682)..(682): n is a, c, g, or t
  misc_feature (690)..(692): n is a, c, g, or t
  misc_feature (713)..(713): n is a, c, g, or t
  misc_feature (732)..(732): n is a, c, g, or t
  misc_feature (748)..(748): n is a, c, g, or t
  misc_feature (752)..(754): n is a, c, g, or t
  misc_feature (762)..(762): n is a, c, g, or t
  misc_feature (766)..(766): n is a, c, g, or t
  misc_feature (781)..(781): n is a, c, g, or t
  misc_feature (783)..(783): n is a, c, g, or t
ccagagttttcaggttcggttgagccgccatgattagtaagttttcccacgggcacagtctgagcacattcccgatgtgtgtcagtatatcgtgcgtcagacccgtggaggggcaggacatgctcctgggctgcccgtccagggtgaagaagccaggccagggagagtccagccagtgcttaatgtgcaagatcttctcatctttagatctggcaaaagcttcctcacagatcttatcatacttggaaatttcctcctcatactcaggctggttgaccacaccctgcgacaccagcagctcagcgtacttctgtaacacaggcttctgcttgcggatctgcttgtacatgagcggctgcgtgaacatgggctcatccatctcgttgtggccgttgcgccggtaacacaccaaatcgacaaccacgtccttgtggaaggtgctcctccactcggccgccactttgcacacgtacatgacagcctcggggtcatctgagttcacgtggaaaatgggggcattcaccactcgggcacgtcagtggggtagggggaggagcgggccatcgagggtcggtggtgaagccgatcttggttgttgacaancacgtgcaccgtnccattangttgtgtaggantggcagggcgcttaagnggaagggtttntacanaatgccttggcagnaaatggcnnnttcccttgcaaaaggaagganatgaccttttttcctttangggggcccaaaaaaantttnnngttttggnttgnccaaaaccccggggnanggggttaagggggaaggggggcccccaagaaag

SEQ ID NO: 169649 - DNA, 619 bp, Homo Sapiens
taccggacttcttggtgtgttgtcctctccctggcatgactttgatgcagcttggtgccctgtggggtggggaggagcgtgctgactgcctcagtctcagggatagatgggaaggctccctcctgttctggctctccgtcgggattcctgcttgctcctttctggcatatgggtataccgtgtcgaggctgtaccttggtgtacagtataaggctgtatctcgttgtgcccatattgaggctgtttgttggtatacagtattgaggcctgtatcttggtgtacggtatcgaacctgtccctccatgtgccgtatcaaggctgtatcttgatgtaacgtatcgaggctgtacctcggtgttgctgtatcaaggctgtatctcaatgtataatgtcgaggctggctgccgtgtcttcatccctccttctctctggtatatgcagggccactgtgcatgtgcgggtcaacgatgtgaacgaatttgccccagtggttgtggaacggctgtatcgtgcggctgtgacagaggggaagctgtacgatcgcatcctgcgggtggaagccattgacggtgactgctccccccagtacagccagatctgctactatgagattctcac

SEQ ID NO: 169650 - DNA, 422 bp, Homo Sapiens
gtacccggacttccttggtgtgttgtgactttgacctagggtccgagtgtcacagctgatcttggcactcggcactcattggcacagtggtagttagaggtgaaaagtagagctgtcaagcccaagggcttagctttagggctcctcctgagttcggcccacagtagaagcaagattttaactagccccttttcctcttcaccctcccatgatgcgcagtgttcagaaagctggtaagtcctagggatttccagaagtagcctgcagaagaaggtaagtttgaaagccactccaggggtcctgatgctgtcatgctcagtgagccattttacagttctccaaagtctagccctgtttcggacctgcacttcacctctaagttatgtacaactcaacctgcatccctctaaaagtcctatatc

SEQ ID NO: 169651 - DNA, 456 bp, Homo Sapiens
gaatttgcagagacgtagaatctgggacccagagtaatcactgaactgctcatgaaatgggtgtaacagctttacagattctccaaaacttgggggaggaaaaccaaatacaacaggagttattttttggctgtgtgatcaaaataaccaaacaggttgtgaaaagttttcataaaggaatcacaaagcaaccttacctacacactgcaatctgacccacttccaggagggttagagcatttccaatcacagcccaagattccaatgcaagctgtgaattagaaagttaatgattctaggaatcagaatatcctctaaaccagagcctctcaactattttttgcatcaagattcccaatgaaaccattttttttgtctggcaagtagaggaataacatcagtaaggctactatagtcacaacaaacccaaaggctttggtggcccggtaccacaaa

SEQ ID NO: 169652 - DNA, 836 bp, Homo Sapiens
  misc_feature (735)..(735): n is a, c, g, or t
gggtgactagaggatcccccttccggctgtgtgggtacgagtggacaaaatggcgaagatcgccaagactcacgaagatattgaagcacagattcgagaaattcaaggcaagaaggcagctcttgatgaagctcaaggagtgggcctcgattctacaggttattatgaccaggaaatttatggtggaagtgacagcagatttgctggatacgtgacatcaattgctgcaactgaacttgaagatgatgacgatgactattcatcatctacgagtttgcttggtcagaagaagccaggatatcatgcccctgtggcattgcttaatgatataccacagtcaacagaacagtatgatccatttgctgagcacagacctccaaagattgcagaccgggaagatgaatacaaaaagcataggcggaccatgataatttccccagagcgtcttgatccttttgcagatggagggaaaacccctgatcctaaaatgaatgctaggacttacatggatgtaatgcgagaacaacacttgactaaagaagaacgagaaattaggcaacagctagcagaaaaagctaaagctggagaactaaaagtcgtcaatggagcagcagcgtcccagcctccatcaaaacgaaaacggcgttgggatcaaacagctgatcagactcctggtgccactcccaaaaaactatcaagttgggatcaggcagagacccctgggcatactccttnccttaagatgggatgagacaccaggtcgtgcaaaggggaaccgagactcctggaagcaaccccaggctcaaaaatatggggatcctacacctacccacaca

SEQ ID NO: 169653 - DNA, 388 bp, Homo Sapiens
actcaaaaaggtgttcggcaaaagaagtttgaacgagtggttgggcaatgaaaacactgaagaccaatattcactggtggaagatgatgaagatttgccccatcatgatgagaaaacatggaatgctggaagcagcaaccgaaacaaagctgaaaacctgttgcgagggaagcgagatggcacttttcttgtccgggagagcagtaaacagggctgctaatgcctgctctgtagtggtggacggcgaagtaaagcattgtgtcataaacaaaacagcaactggctatggctttgccgagccctataacttgtacagctctctgaaagaactggtgctaattaccaacacacctcccttgtgcaacacaccaggagtccggaccggcta

SEQ ID NO: 169654 - DNA, 592 bp, Homo Sapiens
aatgggagtgggcctgggaaaattggtgccttccaagaaggagtgtcctgtccaaccccccgcacccccacggaaccttcaggagctgctgctcccagccacaggaagtagaccatataaatatggaataaatacatgaccagtgagagaggcaaaatgtcggaaagcagaccccaggccagctgggtctctactaccaggaccccaggctcaggccatcaatcaccccaggagaagggagcccgacccccaccaggacccagtgagaggtagacagcacaaatgctgaaggagcaccaaggggccaggtaagggaagggagagactggagtactgggacaaccaaagccatctcatgcaagaacaagtttctattcccaaaccacccccatccccatcaatgctcagctctcttcctgcccccatgccttccctctgctcaacagagagctggaggcaggagggcgactcagtttgccagacatgctgctgcaggtccccagaccccagggaggctggcaagggacacaaacactttgatgttgccactcctcctcaaggaatgctcctgccctcccaacacacacagaaa

SEQ ID NO: 169655 - DNA, 669 bp, Homo Sapiens
tagccggtccgggtgtgacactgtgaagcttcgacaaagagtaaatgggggggatatatctcctgaagagtgagatttgtagcaacagtttgtttctccctcaagagaagagggaaaatagtattaggtgagaaggtagcaaggtaacagcctttattttagattcacctggatggcaactattccttcattcatttatcatttatggaacactttaaacttctattacatgccaagacaccattttaggcttttggatgtatccgtgagcaaaatacaaagaactctctgcccttggggaattcacattctaatctgagacaaatctatatataacatacataataaagcacaacattagagatgatgttaggaggtgttatgtgctacagaacaaacaacaggataggtgggattaaaaacctgtataaacagtctataggttgggattataaaccctggagctaatctgttacaacagaaccaaatagagtatatgaaaatacaagctttcaaaagtgtcttatactctacttccattctattcctcagtgttagttatgtctgaaaacaccagatgagaaacggaaagaaatggcattttgatgtgctcaatcaggccaatacttcagaaatatagcatcttatggattactggtggagaaattc

SEQ ID NO: 169656 - DNA, 692 bp, Homo Sapiens
  misc_feature (579)..(579): n is a, c, g, or t
  misc_feature (592)..(592): n is a, c, g, or t
aggccgccacaaaaaagcacgaggccattgagacagacgttgccgcatacgaggagcgtgtgcaggctgtggtagccgtggccagggagctcgaggccgagaattaccacgacatcaagcgcatcacagcgaggaaggacaatgtcatccggctctgggaatacctactggaactgctcagggcccggagacagcggctcgagatgaacctggggctgcagaagatattccaggaaatgctctacattatggactggatggatgaaatgaaggtgctagtattgtctcaagactatggcaaacacttacttggtgtggaagacctgttacagaagcacaccctggttgaagcagacattggcatccaggcagagcgggtgagaggtgtcaatgcctccgcccagaagttcgcaacagacggggaaggttacaagccctgtgacccccaggtgatccgagaccgcgtggcccacatggagttctgttatcaagagctttgccagctggcggctgagcgcagggcccgtctggaagagtcccgccgctctggaagttcttctgggagatggcagaagaagnaaggctggatccnggagaaggagaagatccttgtcctcggacgattaccggaaagacctgcccagcgtcatgcccctggttcaagcaagcacccgggcgttcgaaggccaaat

SEQ ID NO: 169657 - DNA, 810 bp, Homo Sapiens
  misc_feature (454)..(468): n is a, c, g, or t
tgtgtgtgttgggcaccgaaaagcattcaaagtctgaagcctgaactgcgaggcgaggacatccctttttgctcgttgcaagtcgcaagtgctgacagctaacaacaccaaataagacccagggtctcagtcctaagaaagcactctataaatcagtcagttaattgctgaaagaaaagagggcactgaatcatctgtatctatttgaattttaagccactcgctcaacctgcacttacactctcaacaatccaatttggagtgaggctgacataaagctgtaagaaggcactacagcatcttcagttctctcatgctggttgtggggcttatctctaaagaggactgcagacaaataaagcacttgagatatactaatttgcctccacttttgaaaccttcctcaagatactacctggtgcatgagactagtgggctctcaaaaaccttgtcnnnnnnnnnnnnnnncaggtttaggaggaaggcttctgaagaaatagaagatttccgcctcagaccacagagcctgaatggatcagattatggaggaggtaagaggcccttggaggaagtcaaaaggtcttctagagaggccccagaacatttcctgggctacagctaaggcactgttggctgcagcatcactgaagacatttgcagtggtcttctgacgcatgctgatgcacatctacatgccttgctgaatgctgccacctctacctggagtatctctcccttctttatctgataacctgcttatccttcaaaaggtcagccaaagcaacacaccaaggaagtccggtacgacta

SEQ ID NO: 169658 - DNA, 417 bp, Homo Sapiens
ggtaccggacttctgggtgtgttgatcgctgcatccagtgtaagcttggggctgctggggagggaggggccgagtaagggactttcccatctgagtggctcaggagacccacccctctcccctcagagcagcaggggacagagaaaagccatcacttctttggtctttgtggcggctcagcatgtgggatgggaaggagggcagaaagggcagagaagggcccttagcaggaagcgccacctcagcagagtaggcctggctgggagctctggcagaaaggtcacagtgaggctgaggagcgcccaagaggagaatggccgtagtgcagaagtgctggcatggatggggggggtaaggtgcagtgccccaccctctgccagggcccttgggaaaggcagagcctccagaggtggccag

SEQ ID NO: 169659 - DNA, 822 bp, Homo Sapiens
ccggtccggacctcctgtgtgtgttgagtgcagtatggagggcattcgcggagcagcatttaaatgctcacgaagggcatgggcagcactgaagtacaccacctcatggagaggctgtgtctcaggaggcagaaggtattctctcactagacagtcaatgaagttcacaacattttctctgagtacttcaaatttggtttgcttcttacttcttcttaactccttcatttccaataaggacttctgaagatgatagaggtctgtcttctgaagcccctttggctgtgacccagaagcatcttcttcctcttgggtttcatcgaggctctgaaactggcccaggaactcctctattctctaagctgtgctgccaaggtggttttcacaataagacttaaaaaccttgaaacatttctcaagtatggtcatcagttcatcctttgccaacatcctcagcagctgcaagactgatgcatactcctctgaatcccatatgttcttttctaaacatgtacagtacaactctctgatctgtcgacctagtggatacttgggaagagaagaggtgaacttatgaagacatctcaaaaccaggaagtaattcatatgataaacatgcaggttttctagtaataattgtgtttcctccttcaaatatctctcattggtcaagagcgcaacttgcttttctgaggcttgcttttccacgtacctcctaaaagatggtagacgtcggatgttttcacattgattatttgataaaaaatttattcttcttttggcttctggaagattacagcacaggacacttaaggaaggtcc

SEQ ID NO: 169660 - DNA, 227 bp, Homo Sapiens
gtattgagccggtccggacttctggtgtgttgttggtgtgtgcaggccaatcctcacatttggctttgattagcctttatcaaattattctgcctcaacagacttaattttggtcaacaatttaactgaggtactttatagataacagtgtccattataccacaggaaatacttcagtgtttaaataatgagaaaagcaaaagctgttcccaatgacagctgctccc

SEQ ID NO: 169661 - DNA, 437 bp, Homo Sapiens
  misc_feature (138)..(152): n is a, c, g, or t
ggaccggacttcctggtgtgttgctctggtctatggccataccaccctgaatgcacccaattttgttaatatgttgcattgctaaaaggactttttattggaatagaagagaagcgttcttctaaagtgtatggcagnnnnnnnnnnnnnnncacatacacatgtgtacatacacatatattttccctctgacaatgcacccatcatatgtaatatttgcatacaaggtaatactggccccaggaagaatcagtatcttacagagggtaaggcacaactgaaacacagagcaaagatctagatacaaccagatttacttgtttctggtttcttaaaatttcaagtacaaagaaactaggaatggtaacttataaataaaagaaacaagagaagggaggataagaaaataaaggataatcgaaaggactgttggaaac

SEQ ID NO: 169662 - DNA, 160 bp, Homo Sapiens
ctagtcggagaggcctcagatggggggttcactggctcctggcttaagggggtggttgcaaggggttgtggggagccgccatgtcgctcagcaaggagcggagtgggagcaggtggttctgggcctgtgctgctcctttccagggagcactaagcgaggt

SEQ ID NO: 169663 - DNA, 832 bp, Homo Sapiens
aagatcataaagagataacctaacagcttgagggaatctgcttacaggtcattggtactgttttacaacagcatgtcttagaattctatgaggagattttctctttagcgcacagtttgacatgtcaacaagtgtctccacagatgtggcagctactaccccttgtatttgaagtctttcagcaagatggctttgattactttacagatatgatgcccctccttcataattatgtaacagttgatacagacacacttctgtctgacaccaagtaccttgaaatgatatacagtatgtgcaaaaaggttcttacaggagttgcaggagaagatgcagagtgtcatgcagcaaaattgttagaggtcatcattctgcagtgcaaagggcgtggcattgaccagtgcattcccttattcgtggaagcagccttagaaagactgacaagagaggttaagacaagtgaacttcgaactatgtgtctgcaagttgcaattgcagctttgtattataatccacacctactactcaataccttagaaaatcttcgcttccctaataatgttgaaccagttacaaatcattttattacacagtggcttaatgatgttgactgtttcttggggcttcatgacagaaagatgtgtgttctcggactctgtgctcttattgatatggaacagataccccaagttttaaatcaggtttctggacagattttgccggcttttatccttttatttaacggattgaaaagagcatatgcctgccatgcagaacatgagaatgacagtgatgatgatgatgaagctgcagatgatcgatgtccgcgggt

SEQ ID NO: 169664 - DNA, 1796 bp, Homo Sapiens
  misc_feature (1076)..(1091): n is a, c, g, or t
  misc_feature (1137)..(1151): n is a, c, g, or t
  misc_feature (1233)..(1274): n is a, c, g, or t
  misc_feature (1291)..(1299): n is a, c, g, or t
  misc_feature (1565)..(1573): n is a, c, g, or t
  misc_feature (1707)..(1707): n is a, c, g, or t
ggacgcggagaaaaaagttctcgccaccaaagtccttggcactgtcaaatggttcaacgtcagaaatggatatggatttataaatcgaaatgacaccaaagaagatgtatttgtacatcagactgccatcaagaagaataacccacggaaatatctgcgcagtgtaggagatggagaaactgtagagtttgatgtggttgaaggagagaagggtgcagaagctgccaatgtgactggcccggatggagttcctgtggaagggagtcgttacgctgcagatcggcgccgttacagacgtggctactatggaaggccccgtggccctccccggaatgctggtgagattggagagatgaaggatggagtcccagagggagcacaacttcagggaccggttcatcgaaatccaacttaccgcccaaggtaccgtagcaggggacctcctcgcccacgacctgccccagcagttggagaggctgaagataaagaaaatcagcaagccaccagtggtccaaaccagccgtctgttcgccgtggataccggcgtccctacaattaccggcgtcgcccgcgtcctcctaacgctccttcacaagatggcaaagaggccaaggcaggtgaagcaccaactgagaaccctgctccacccacccagcagagcagtgctgagtaacaccaggctcctcaggcaccttcaccatcggcaggtgacctaaagaattaatgaccattcagaaataaagcaaaaagcaggccacaaccttaaccaacaccaaagaaacatccaagcaataaagtggaagactaaccaagatttggacattggaatgtttactgttattctttaagaaacaactacaaaaagaaaatgtcaacaaatttttccagcaagctgagaacctgggaattcctgcacggaagacaagagagtagcctctccagtttcagcaaccgctaggtttctattttttttcctggtttttactgttttggtaatatatatattgaaacaagaaatattaataccacatggggagaaccccaaccaaagaaatctgaaatatatagtaaatgcnnnnnnnnnnnnnnnngttcattttggatgctggtgctaaacctccaagtgtcctgaatttnnnnnnnnnnnnnnnttaatggccctccttatttatttctaggaaggagggggaggaaaaacatttttggcctttcttatggggactctcttttggnnnnnnnnnnnnnnnnnnnnnnnnnnnnnnnnnnnnnnnnnnttttttaccccctttcnnnnnnnnnaaacaaccaaaaaataatactacggacctcacactaatgggggggcccgcctcgggccccccgaaaaaattttcataaaacattttcgtttggggccgcggggccccaaatagggaaggggaaactgggccaaaactgtgtcccctaggaaaaccggggcggagccaagggtgtgtgatctccccacaaaaaaacacccgcggggaccccagaggtttgtaaaaaaacccgaagagagtttggggcgtacatggggcattcaggannnnnnnnntggttatatagcccgcgctccttcgcggcggtgtaattgtattccgtccaggcgcctcaccgcgggaagactgatcgcgggcccctccaccctccgatatttttcgtggggcgcgcggaacgcgagcacgtctnattaatcgaggagcccggggggcgaaacaactctacaaccgttggaggagactgcaggcacccgcggagtattcgacagcacctcgccc

SEQ ID NO: 169665 - DNA, 878 bp, Homo Sapiens
  misc_feature (699)..(731): n is a, c, g, or t
ggttcccgccttaccacgtgggacagacctttgaccgtcgctcacgggtcttaccccatcccaacagaatacaggctggtgagattggagagatgaaggatggagtcccagagggagcacaacttcagggaccggttcatcgaaatctaacttaccgcccaaggtaccgtagcaggggacctcctcgcccacgacctgccccagcagttggagaggctgaagataaagaaaatcagcaagccaccagtggtccaaaccagccgtctgttcgccgtggataccggcgtccctacaattaaccgcgtcgcccgcgtcctcctaacgctccttcacaagatggcaaagaggccaaggcaggtgaagcaccaactgagaaccctgctccacccacccagcagagcagtgctgagtaacaccaggctcctcaggcaccttcaccatcggcaggtgacctaaagaattaatgaccattcagaaataaagcaaaaagcaggccacaaccttaaccaacaccaaagaaacatccaagcaataaagtggaagactaaccaagatttggacattggaatgtttactgttattctttaagaaacaactacaaaaagaaaatgtcaacaaatttttccagcaagctgagaacctgggaattcctgcacggaagacaagagagtagcctctccagtttcagcaaccgctagnnnnnnnnnnnnnnnnnnnnnnnnnnnnnnnnnggtaatatatatattgaaacaagaaatattaataccacatggggagaaccccaaccaaagaaatctcgaaatatatagtaaatgctttgttttccgtttttgttcatttaggatgctggtgctaaacctccaagtgtcatgatttac

SEQ ID NO: 169666 - DNA, 489 bp, Homo Sapiens
  misc_feature (421)..(421): n is a, c, g, or t
gtgaaaaaagttctcgccaccaaagtccttggcactgtcaaatggttcaacgtcagaaatggatatggatttataaatcgaaatgacaccaaagaagatgtatttgtacatcagactgccatcaagaagaataacccacggaaatatctgcgcagtgtaggagatggagaaactgtagagtttgatgtggttgaaggagagaagggtgcagaagctgccaatgtgactggcccggatggagttcctgtagaagggagtcgctacgctgcagaccggcgccggtacagacgcggctactatggcaaggcgccgtggacctccccggaattacgctgggggagggaggaggaggaagggaacggcacaagttgaagggtttttaccccccttgccacttgattagggcagtttttctgggggnccccgattcagcttgcgccgcccccagtattcgccctcagtaccccgcagccgccgtttcccctttta

SEQ ID NO: 169667 - DNA, 428 bp, Homo Sapiens
tatggtttcaagtgatccccagcttgaggttcatactaaaattaacacaagaggtgcccgagaatatcatgtccagttttttagcaaccagccagagagggcgtgggttcatgaaaaacgggtacgagagtataaaggtcataaacagtatgaagaattactggctgaggcaaccaaacaagccagcaatcactctgagaaacaaaagattcggaaaccccgacctcagagagaacgtgctcagtgggatattggcattgcccatgcagagaaagcattgaaaatgactcgagaagaaagaatagaacagtatacttttatttacattgataaacagcctgaagaggctttatcccaagcaaaaagagtgttgcctccaaaaccgaagttaaaaaacccaacacaccaaggaagtccggtaccgactt

SEQ ID NO: 169668 - DNA, 456 bp, Homo Sapiens
ccttccttggtgtgttgtaaaaggagagaccaagtaagtgggggttgaagtcagattagagcaaaagtgaatggcagagagtactataatgtccatgaagggctgctagagtcaccgtgatcatagcccaagcagagatagggaaaggaagatgtgagcagagtttggggtctcgaacaatggaggttattcgtgcagcccaggaaaggctccccaaagccaggatcaacctcccttggaggcggtccctcatggaggcatggtcaggcaccttagatttgagaacagctatgttgctgctgaccagctgtgtgaccctgggctggtttccttccacacaatgggagtgccaatggctgcatgcatgcaaagaccgtctgaggataggaggaagcaatctgttgagcacccgtgtaccctgagtgtcaacacaccaggaagtccggaccggctcat

SEQ ID NO: 169669 - DNA, 445 bp, Homo Sapiens
tcatcgagctggtaccggacttcctgggtgtgttgggcattggattcggggtggtggtgggccgggtgggtttgaccacagccaggtctgggtcactggagttcatgttgggctgtaagctgctgctggaattaaggatgctgtttggatttgatgagacagattccaaactggagttgatgatgctgttcctttgttcctgtttctctgttgactgaacggtgtggaagagcgtcaggggcctctcgctgcaggacgggggcttggagtcactgctcttctcccgagacaggtgcagctgggcattggtgagaggcatatcgggcacggtgttaaatatcttttcgtggttttctattaggatctcaatgacaatgttctgaaatttgatgtccatgatggctgctactgtttcttcctgaggcctcagcagagtgggtccaaa

SEQ ID NO: 169670 - DNA, 432 bp, Homo Sapiens
gatgagccggtaccggacttctggtgtgttgtcaggctggtcttgaactcttgtgctcacatcttcctctcaactcagcctcccaaactgctggggctacaggtgtgagccactgtgcccagcctatatgtgcttcttatgtatatcatagattgtggccttactctatattagttcttgcattgctatttagctttccctacacaggcctcatctctacaactagaccataaactgcttgagggaaagatgtggtcttctatgtctttggatcccttacagtgcttacatagtgcttggtcccaagggagtgctcatagtattcttttttattggcagattctacataacacattgcaaatggtcacagcaatcaagactatatccatagatgtcccagaaataatatctgactatacagagcagcattac

SEQ ID NO: 169671 - DNA, 837 bp, Homo Sapiens
  misc_feature (15)..(15): n is a, c, g, or t
cggacggacttctgngtgtgttgcaaggctgcttttcctttctgctcagactcaataattcgctccatatggtgactgcgttctttgagtgcccctatcatttcttgagcttccttattgtctgttctgccattttcaaagtattgcttaaatgctgctggacaccaagaagctgctcccgttcaaaacgggcattctcagcgaggtccatgtaacgttgctctaattccatatagcgcccactttttacatcttcatctatgacataagaaatgtgatgctcatctagaagagagcggaagtattcaatctgtcgactaaagtgttccaacttatcgctctgctgacataaagactccatcagaataaccttctcttctccaagcctttcgttttcactattcagttcctgggtaatctgctgtaaatcagctagctcttgcagggttgcctggagttcctcacttgtactgtgttggttctcttccatctggtgtatccgttcagtcaggcaagccacggacacttcactggcattcccgctgctccccttccgggagcgctctatgctggggatgccttccgactctgaggaggatggtgcatccagcgcatcatcgctcgatgtgaggggctggtagaactcactgcactcactgtctaaattgtccatggagttactgtgctgatggtccattagtgtattttcatcctgactcaagagatcctccactgagccaggggcagagccttccactgaagaagtcagagttcctcctccaaactctggttccaggggtgatttctgggctcagggagatccaaagtgcggggtcc

SEQ ID NO: 169672 - DNA, 645 bp, Homo Sapiens
  misc_feature (48)..(48): n is a, c, g, or t
  misc_feature (78)..(78): n is a, c, g, or t
  misc_feature (95)..(95): n is a, c, g, or t
  misc_feature (537)..(537): n is a, c, g, or t
acgttcgttccgaaactccccctgcccttcaaagtggaaggccttagncttcttgaaacatctcgctccctctcctanggtggcgaacccaaaanctgtaaagcgtttgccgtaataattgcaaggtccccacggccgtgacactcgaatgaatggcgcactttctaaactcctcccaggcaggagccgggggaagcccagggcttggccagagccttctgcaccagcgctggtgtgcatcacaaaagagtagccgatccacagcgaggacccaccgctggggcacggtgggatctgaatggtctggctgtgcacggccatcaccatggcaggcgcctcacacacagcacacctactaataaatggtcttatgttttcccccgtgatgggtgccattgacatgggcatgggctcaggggtggacagccagtacgagtagtcatttcgtgatgcaaagttgcacacgttgttaatattgcagaacaggaagggcattgtgctgaacttgcgcaggcagctgccagccgtgcccaagtncctgccatgggcccgttcattgccttgcacgtagagcaaagagtacccgtggtaaagaattttggtcccagaaggacactgtgggtcatctattgtttgactatgcct

SEQ ID NO: 169673 - DNA, 302 bp, Homo Sapiens
cacaggatcctgacccggactagtttacaatcacacgaccctgaccgggctagtttacaatcacacgaccctgaccccgactagtttacaatcacacgatcctgacctgcgagctttccaatcacacgatcccgacctgactagtttacaataacacgagcctgacctgactagtttacaatcacacgaccctgacctgactagtttacaatcacacgaccctgacctgactagtttacaatcacacaatcctgacctgactagtttacaatcacacgatcctgaccttactagtttacaat

SEQ ID NO: 169674 - DNA, 570 bp, Homo Sapiens
tatcggcaatgggggcgagggggttgtgaggctgaagactgtatatttgaagtggacgttgctgaagttaagcttttctgcccaggtgttgaggaaaccgtgttaggggcggagactgcagtggagacaggctgccccctgatgatttgagtcatcacttgctgaggagcacctggctgtaccatcacaggtgttcgaataattgcctttcctagtgttgactgttggagtggtgttctaatcacggtcataccagggcgaatctgaggccctgtgattacttgtgaattgcttgtggttcctccagagcctgaggtattgggcctaattgtgactgttgctgtcctgggctggaatgaagtaaaggtttgctgactggtacctgtacttgatggaatgataaccaggactttctgctgtacttgaacaaggcctgaatttgactggccttgtttaacccatgtagcaaaggtttgatgaaagttcttgtatggtgggaatgtaactgtagctggagatccaactttagtagttagtacattttggtccagttgtaactgagcaattatg

SEQ ID NO: 169675 - DNA, 785 bp, Homo Sapiens
gccgtttctagaggatcccaggagtgactatacacctcatcatgattgtaatatatctgtacattcaaaagaaagagattctactttaatttcgaaacagatactatcatgactgtcgtgccgtattggtagttctgggaccctggtgtgcagataaagtagctggaatgatggtaagagaactacagaaatacatcaaacatgagcaagaggagctgcacaggaaatttttattgtttacagacactttcctaaggaaaatacatgcactatgtgaagagcacttctcacctgcctcacttgacctgaaatttgtaactcctaaagtaatcaaactgctcgaaatcttacgcaaatataaaccatatgagcgacagcagtttgaaagcgttgagtggtataataatagaaatcaggataattatgtgtcatggagtgattctgaggatgatgatgaggatgaagaaattgaagaaaaagagaagccagagacaaattttccttctccttttaccaacattttgtgcggaattatttttgtggaaagaagatacacagcagttgtcttaaacagattgataaaggaagctggcaaacaagatccagagctggcttatatcagtagcaatttcataactggacatggcattgggaagaatcaccctcgcaacaaacagatggaagcagaattcagaaaacaggaagaggtacttaggaaatttcgagcacatgagaccatacctgcttatttgcaaacaagtattgtagaagagggtgattatcac

SEQ ID NO: 169676 - DNA, 916 bp, Homo Sapiens
  misc_feature (681)..(710): n is a, c, g, or t
ggaatgatgttctgtagagatggcctttcacttgaggagtactcagttttcaggttcttcctagctcggggcttttaaattttgaaatctaaacattctttcccaccatcctttttgactgttgaccttggttttctcttctaagtttctgtccctctgcttccttactttttttcctttttgaattctatctttatctgtcttttgttcactttttaatgctatatatgggcaggggtgagagacattactgagcaccttggtgagcaagcctggctttaaagattggagaagagcttctggcaccagaaccctgtcttcctccagttctcaacacggtgttgctcttcagtcataccggaatctgaatcaaaaaagtatttttaaatatccatgatttctccctgtattgaggctagccctgatcatgctttttgtgcctgtcaccaggtctcccaagtgcactcatccaggtcagtgctcagatgtgtttaaggagaccctatattcagggaagttgcgtgaacactgcagtggggagaattgagaatagtcaggcctatcagtctcacagaatcacccctctacctttgatattccacttagctgtagagtccatctgtttgtccatctgctgaaatgagaaaagaaaaatttatgcactggattacaaccaacccnnnnnnnnnnnnnnnnnnnnnnnnnnnnnnttccctcctttctagctgaaccaaaatggtgccaggtaattactgggcgcttggaaaatggcagaaagtgaatgggggaaaccaggcctgggctggaaaacccgggaaccttcttttcctgggcttgggtttttttccctaccccagatttcctggccaaacgttttggcttctgggggatgggttaaaaattgccctaagccagg

SEQ ID NO: 169677 - DNA, 545 bp, Homo Sapiens
tggtacggtccggaattcccgggatatcgtcgacccacgcgtccgttgaattctatctttatctgtctttgttcactttttaatgctatatatgggcagggtgagagacattactgagcaccttggtgagcaagcctggctttaaagattggagaagagcttctggcaccagaaccctgtcttcctccagttctcaacacggtgttgctcttcagtcataccggaatctgaatcaaaaaagtatttttaaatatccatgatttctccctgtattgaggctagccctgatcatgctttttgtgcctgtcaccaggtctcccaagtgcactcatccaggtcagtgctcagatgtgtttaaggagaccctatattcagggaagttgcgtgaacactgcagtggggagaattgagaatagtcaggcctatcagtctcacagaatcacccctctacctttgatattccacttagctgtagagtccatctgtttgtccatctgctgaaatgagaaaagaaaaatttatgcactgatttaaaacaaaccaaa

SEQ ID NO: 169678 - DNA, 759 bp, Homo Sapiens
gggaggacaggggttatctggtggcgcacccgactctcatcgaccccaaaggacatgcacctgtggagcagcagcacatcacccacaaggagcccctggtagcaaatgatatcctcaaccaccccaactttgtaaagaaaaacctgtgcaacagcttcagtgacagaacggtccagaggttttataaattcaacaccagccttgcgggggatttgacgaaccttgtgcatggcagccactgttccaaatacagattagcaaggatcccaggaaccaacgcgtttgttggcattgtcaacgaaacctgcgactctcttgccttctgtgcctgcagcatggtggaccgactctgtctcaactgtcaccgaatggaacaaaatgaatgtgaatgtccttgtgagtgccctctagaggtcaatgagtgcactggcaacctcaccaatgcagagaaccgaaaccccagctgcgaggtccaccaggagccggtgacatacacagctattgaccctggcctgcaagatgctcttcaccagtgtgtcaacagcaggtgcagtcagaggctggaaagtggggactgttttggggtgctggattgtgaatggtgcatggtggacagtgatggaaagactcacctggacaaaacctactgtgccccccagaaagaatgcttccgggggggattgtggggagccaaaagtcccctaccgttggatgacatggggagccaataagggggattgaaggggaatccccttttaa

SEQ ID NO: 169679 - DNA, 824 bp, Homo Sapiens
tcgttcaatttcactatcatttaactggaagttatcaccactgtggagattgttagcacgtagtaagccatagaaagtcacatgtgtgctatctgatgaaacgctcaggtcatgttcctttccttctctgatcattgtacgtttaagaagactagaacatttcaaagccaactccaaagcatccatccagcaccctccatctgactctgaagtagctcggatgatcaaataactgctaggtaagggttgagtaatggatccaaccgcttcaccttttggacccttcactgcccaaatagattgctccaaaggatggaaaagtttgaaacaaaagccatccttttttgatggacgttcaatgatttcacaggcattcagaagaactgttcctacccactgaccatttttttgggttttatagatcagtagcaccccaggtttcaacacacaccataacttggtccagctctttagagtaccacgaatctttaaccaatcagccataacaataacagaaggatctgtgattgtactgagcagctcctttgtggctcttttcttttcttctcggtaatttttcttttgtaccttaagagattcttttttggtgagtttgcttgaagttgaactgtccttctctgagccattataaagtttagattcagacttgctctttgacatagaaagtgaagattcatctttattttgagaaatatcttccttccctctttcaaaaccctggctatgaggacttgctggactaagagatggctgatgcgaatctttggttggcgttggataagcttcttttccttggcgctgac

SEQ ID NO: 169680 - DNA, 604 bp, Homo Sapiens
gagggaggaagtaagagagacggatggcaacggagacgccaggcatgcgcgagggggtggacaaaccctgtgtccagggctgactttgaatagatggcagggagggagctgctctgctatgtatgaaaccacgacctaaaaactaatttctgtaagatacaccataaaggtaaaaataatgcaagtgttcagctgacagtaagtataaatggtactcattttcattcttagctggttctgacctttagcgatccatagaaagtacattcatgaaaataaccagttttaagcacacaaacaataaaagcatatacacttgatataaaatggccgtaagtcaagtattttcaaaatgtttgatttcagaacctttgatggttcattaagatagcataaaaacaaccttcagaagaaaggaataagctgatatacccagcatcatatctgatgacaccttacaactcaaacagggcttagacatttttatcttttttaaaaatgcactcttatagcctggtgtggtggcttatgcctgtaatcccaatactttgggaggtcaggcagaaactgcttcaggccagcctggcaacacaccaagaagtcc

SEQ ID NO: 169681 - DNA, 514 bp, Homo Sapiens
  misc_feature (38)..(38): n is a, c, g, or t
  misc_feature (484)..(484): n is a, c, g, or t
  misc_feature (493)..(493): n is a, c, g, or t
gccggtcgcggacttcctggtgtgttgtcctggcggangtcgtgctaggcgctcagcaatcatctggtcttgtcgtgtcagcccctggctctgggaagtgctgggcttctgctcggcttccaaggctgccacacgcttcttatagttctgaggtggtgaccacttggaggcattggcagaagaccctctggtcaggacctcatggcattgcttgcagactttctgttgggtgttcccagtccgaggcactgctgcactgaagcttaggcagcctgaacagaaggccctgccacaattcttacagccgtactacaagaaacatgaagcgggagatccccctctcacccgcccctgcaggctgctcccagggactctccaagcacacacagagagaagtcactgaagttatgaccagctgctgggaggaagaagaagagtggggcccctaaggcctaaggatggtgaagtaaaagcaattccttangtttcagtncttattaacacaccaaggaag

SEQ ID NO: 169682 - DNA, 332 bp, Homo Sapiens
  misc_feature (245)..(253): n is a, c, g, or t
cttctgtgtgtgttggggaaggggacttttaaagcactatttagaatgcttctgaggctctaaaatactcatttttaaaatggtccaaaaaattcataaattagaagcagcagtggtgaacatttttaggaaagtgacccttgagaagtttatcttttggttaggaacctattgagcttatttattaggtaagtagaacatgctcatttaaaaagtttaaattgtgcaaaagacatatgtcagannnnnnnnnctgtcttccataacactatttcctaccccgccgcgctctgtcttccgtaacactctcccctaccccgtcgccactctgt

SEQ ID NO: 169683 - DNA, 769 bp, Homo Sapiens
agtgctattctgtattgtagatggagcgataagatatcatcacggagaaaaaggccggggcctggagcgggacagtctctaagggtgctgtttgaatgggtcaggaagttctctttaccaaatgatggtgaagcagaggagatggaacagaggcaagggaccctcattctgtcatcagagggaagagaattctaggcagaaggagcagccagtgcaaaggcccagaggcacgagcaagcttgtgttggaggaacagtgaggatggctgctgctccataaggaatctctgcggctttaatccaacttcaagtttggggtgaacttgaagtttacagaggaaagaaagatgagaacgtaggggaagaactggtttctcctcctggctgtgccttggtctcccttgtgtgtggaagaggtcccaaggcagggtaaagtcgagattcagctctggcacactcttcctgtcttcatctcatgcccagtaagaagccctgattcaagccaccagcccaagcccaggcctctgtcccgacataataataattttagctaatgtttatcaagcacttactatatgccaggcactaccctaagtgctttacatactataactcattttcatctcacctgagccctatgaggaaatagtccaccattctcatccccattttacagacaaggaaactgaagcacagagaagtcaagtaactggctcaaagtcacacagctatttagtgacagagctgggcttcggacccaacacaccaag

SEQ ID NO: 169684 - DNA, 330 bp, Homo Sapiens
  misc_feature (72)..(115): n is a, c, g, or t
gagagaatgtgtttagaaagtgtgacatctcagtatggagtattaaatagtgtagtagggattggctttaannnnnnnnnnnnnnnnnnnnnnnnnnnnnnnnnnnnnnnnnnnnagtgcatttgacttatgagccctgaatataatgtgccagaagttttatttgaaaaacataaccaatttgtaattgaaacacggattagtcaagaaccatcagcaccaacacaaatgtatctttgcagaccgaaggaatcagctaaacaatttacagtcatctcaatctctactaaaacaaaaatcacatccaacacacacaggtacaacacacac

SEQ ID NO: 169685 - DNA, 534 bp, Homo Sapiens
tcctgtgtgtgttgggattacaggtgtgagctactgcgcctggccaacaatttcttgctgtagctccaggggtttccaggaagaattgggggcaatgtggtgctcccaggaaggagttggattctttctcaaagactatgcagagaatagaaagatgtgatcctttatgatttgaaatcggccctactccagcctcctgatattgttggtggatgaaaggtatattgttgccaaagtcattaggtctgtttgaggcagctggtttcagtttccgtttctggggttaagctgttttgcctctgaaatttcttccatcagaagctactctttttttgttgcttgctaataggaaatcttttgccatttctgtacatttaagagtagccttcttggtcttcttgattcttttgatagcttgaaaccaaaaaattgagcttcagtttcttcttggtttagtgctttcctccttgttcttccttccgtttttaggagttcttgtgttctcaacacaccaggaagtccggaccgagctca

SEQ ID NO: 169686 - DNA, 594 bp, Homo Sapiens
gagccgtgccgggctgcaggctggacaagctgtgtcttccgccatgctgctcacacagaagcaggctcacgccaggcagtgccagttgggtttctgaagtagctctacctctaagtctccagggcacacgatgcgagatgcaaatatcacagagctttctaggcagccagcagacgtggaaagcaggttagtcaggctatgattcagtctccagctctctcccttctcccctggcttggctgtgcctcctaggagggagttctgggccaagaaggccacacacgcccccaggcaggccacaggcccagactgcctggtcctataatacagaagatatgagagccaggaagccacagaaacagccgtcaatggggcttggtgtcccacacacaaccccagattcaacagactccagctcttactgtgccatctgggccacaagggaaatgggagcagtgaagtggagctggaccaggaaccagacacgaacctactctgctcccaggaaagtaactatgacctctgcgtcactgtcctttggtctctcaaggatcccacttccattggctgtcccttaaacgccgggaagcggct

SEQ ID NO: 169687 - DNA, 424 bp, Homo Sapiens
  misc_feature (72)..(127): n is a, c, g, or t
atgagccggtccggacctcctgtgtgtgttgttaggttgttaatttgatcgctttctttcttgcttgcttgnnnnnnnnnnnnnnnnnnnnnnnnnnnnnnnnnnnnnnnnnnnnnnnnnnnnnnnnagacagggtctcactgtatcactcagactggcatgcactggcatgatcacagctcacttcagcctcaactgagcccaagcatctttctaacttttttatgtgggtggttagcgtcacacatattttaaactaaacatattccaaactgatagaagatattttgcctcaagcttgcttctcctccaatgttccctatctaacaaagaagctaatctccattcccaacagaaaccacttgctaaatcctgctgattttacttcctacacattttgaagccctcctgcttattgctactg

SEQ ID NO: 169688 - DNA, 836 bp, Homo Sapiens
actccgccttactgccaccaagtctctgtcactctaactaccgccattacacaaaagaaatgccaaccactgcgtttcttaaaatgcagtgccttcctggccaaaacagcaccagaacacaacagaaccaaaatgcatggatggacagcacctgttacctcgctaaagacagatgagcatctcactgaggcagctaaaggcatagacagttaacagagatggaatatctaaaatgtgcagagggccaagcttggcaagaaacatccaagtgcagttggaaacaatgaacccaatcctgactgatgttaaggctcctggtggaccctatgcagaacattctaaaacatcattgtaaggaagcatggttacaatcttaccctcaaaacgaaaaaatactattttcacaaaacagcctggaatattctctcttcctcccatctttccagtgctttatctcacctctttcagaaaacattgcctgattactctccacccccatttcctctgattgtaatggttttctctgtactgcaagatcctaaatcatctcactaggaagtgcctctggaccctgtgaagggtgcacagagcagctgaatcatttccactctcaggatggtgagccgcgctgggcagacaggaatagcgaaccacataaaagatataactagtttgaagggcatgacagagtgctgagaggagggaattccattatgaaaggcttcaggtaggaggcaggactcaagtgcacttcagagagtgagttggatttccctagaagaaaattgtataaagagggatgaagacttagtaagtgtaaggcggagatgtcatcg

SEQ ID NO: 169689 - DNA, 257 bp, Homo Sapiens
cttggtgtgttggctggttgtctgaaactccattttcatttcactaataacttaaggaatgtactgacgctaataacgtcttgcagccctgttcttttcaaaggtgccaaaatattagtgcttaagtacactgatggtgtgctaaaggcagaatattcacctccctttattccaagcattcatgagaagatagcctaagagttctgtccatggtgaaacaccacacaggaggtcgggatctctgagtgactgcagct

SEQ ID NO: 169690 - DNA, 390 bp, Homo Sapiens
ggaccggacttctggtgtgttgggattacaggcgtgagccactgcgcccagtctattataaaggttttccaggtgcattcatgttgtagcgtgtatcagcacttcattaatgtttatgacctaataagtttgtattatattgatacaacacattttgcttgccaattcactgttgggttatcaacatttgggttctgaacaggctactgtgaataatgaaaaatgctatgtattattttaggctattattaataattatggtaatgctgctataacatttaggaccaagcctttgtatgtttcattcataaatttcatttctcttgtgtatgtacctaggaatggaattgctaggtcataagctacctatgtatattcttttcagcaaca

SEQ ID NO: 169691 - DNA, 290 bp, Homo Sapiens
  misc_feature (166)..(207): n is a, c, g, or t
ttggtgtgttggaggccacgtgaaaaaaataaatagagattacttcatggagagccatgaatgttggcttgagagagttttacttactgtaacaattccgcaaagatacctagaggcagcacccaggttattacgtagtctcaaaagagtatttctgacaccttcnnnnnnnnnnnnnnnnnnnnnnnnnnnnnnnnnnnnnnnnnnggaaatggggtctcactgtattgcccagagtggtccctaactcctgagcttaagcaatcctcccgcctcaacacaccaaggaa

SEQ ID NO: 169692 - DNA, 597 bp, Homo Sapiens
ggaccggacttcctggtgtgttgtctcgtttaaaactcctaaaccacacatcacagactcagagctgttaaatggcttgccgttaaaatggcggaaccaaaagcagaaatcagcccatgctcttcctcccagaccaggattactttaccctgccatcttatctcatctggaaaatgagagtacagatatctttctggcaggaatgggcattaatgcatgtaagactcccaacacagtatctgacatataactagccctaaggaaaaagtaggtgtcttagggtggcaaaattttaagatggagagttgaaatcaaaaatgtaagagggaatcctgatgctcagagatctaccttgctcagggttacacaatcagaagtggtgtggccaaaatttgagcccaaatgacctcaatgtctgtggtctttccagaataccacctttctcaaggacatcatcaggcttaaacatacaaattttccaaaatacaaggctacaggagccctgctcagatgggtcaaattttattatgttttgttttaaaagaaatccaattaggtttggatgtgtgtatgtacatatcaacacacacaggaagt

SEQ ID NO: 169693 - DNA, 435 bp, Homo Sapiens
atcagccggtaccggacttcctggtgtgttgatgctccacttctccatcgcattgcagcatccacacacatttacctctggagacaggagctccttggaagctgggaggtcactcggtggtcaaggggtagatgatcttagttttacagtgctgcgctgtctcccaggctgaatgacgctgaagccaagcaaattcgggcagtctctggacctttctaatggaggtgtcccataaccatgttccatcctagttccctggcataggcttgttgaagctgcagaaaatgtcagggatttattagtgatttaccgactccttcatacttagtgttcaggaaaatttattcatgtaatacttcttcaaccaaagaggaaatatcaattagagctttgtaagtttcttttccacttcctattttggctatcaagctatag

SEQ ID NO: 169694 - DNA, 339 bp, Homo Sapiens
gtgagccggtaccggacttcctggtgtgttgacaggaggagatgagggacgtcagaaaatcagtgcattgtggagtcacttttctgataaagggcacatcagactgcaaatggtccagacagccagattcaggacactgatgagtttctggggtcaccatagcatccctggagtcagctgctctgcagcctgaaggagggctgacagtgtggagtcactgctattacttaatgaaattatatagaaattctataatgattatgtaattgcataatgaaaactctccatatcagagttcagaatatctcccaatttccagtacagaatattatccataac

SEQ ID NO: 169695 - DNA, 581 bp, Homo Sapiens
  misc_feature (170)..(203): n is a, c, g, or t
cgatggtggtcggtcttcagtaatgaattatgtgctccactaattattaattttatgcccggctgctcttggtgcctttctacattcacaaaaaattttcctccacacgtagtaccaacagtgtacaaaccttaattcagaaacgatgccagtacaaagaactggaaccnnnnnnnnnnnnnnnnnnnnnnnnnnnnnnnnnnagacagtgtcaactataatgaccatcagcaggctgaccgcaatggtaaaatgccaccaatttaaaatgcttcccaatcgcagagatattaaaatgtagatcttggaattgatgaagtttgatgtcttcattattgttatacatagttttgggcatccagtatgttttaggcattatatagaatattaagggatgtaagtattttttaggtagctgtcaggtttatcccagataatctcaatttaaaagcctatttattcattccaaaggataatttcttgagaggagataactcccgtaaagttcagcaccagcagcagaggaaacccaggaaaaaaaccaagcctcctgcactaaccaacacaccaggaagtccggg

SEQ ID NO: 169696 - DNA, 530 bp, Homo Sapiens
  misc_feature (14)..(14): n is a, c, g, or t
accggactcctggntgtgttgcccgtctcggcataattctcataaaaacacacgtgctctccctgctgatcgtgtctgactaatctctcaaaccccaacctcttctacaaaacaacaactcctttctttccggggcatggttggatactttcgcctttggatacctggttttgccatcctaacaaaaccattatatacactcacaaaaggaaacctagctgaccccatagatcctaaatcctttccccactcctctttccgttccttgaagacagctttaaagactgcccccaccctagctttccctgattcatcccaacccttttcattacacacagctgaagtgcagggttgtgcagtcggaattcttacacaaggaccgggatcgcgtcctgtagcctttttgtccaaacaacttgaccttactgttttaggctggccatcatgtctccatgcagcggctgctgcctccctaatacttttagaggcccttaaaatcacaaactatgctcaacacaccaggaaggtcc

SEQ ID NO: 169697 - DNA, 571 bp, Homo Sapiens
tggctttccatgctgcaagtatgtgcaggtatctgctgcagcataggttttgtgctggttccactgtggcccccctcacccgcccgcagcaccagccggccacgggccatggctatccttggaacagagggtcgaggctccttctcctgccctaaaaccaagactgatgggagccccaagagcactagctctccggtaaccacctaccacctgcagcgggcactgcctgggggcatcatcctcatggaactggcattccagggctgtaacttctgtgtcaaacagtttgccctggaatgttcccgaatcccaatggggcaggctgtcaactcacaagctgtccatgctgttcacagagaagtgtgacaaggtgcgggacctgatgcacgtgcactcgttcagctatgacttccatctgcgcctcgtgcatcagcacgtgctaggtgcccatctggtgctgcggcacggctaccacctcaccacctttctgcgacacttcctggcccaccaccctgacggaccccactttggccgcaatcacatttaccaagggacattggagctccccaca

SEQ ID NO: 169698 - DNA, 187 bp, Homo Sapiens
ggaccggacttcctggtgtgttgcctggtgtgttgggaatgttggctctgttccaacctagctccctttcacagaagatctagccatcatgtggggctggaagaaggtcctggggcaactgaaggcatctggcggaggctgcaccttggtgttacctgaagactcctggactaactccagtccccaa

SEQ ID NO: 169699 - DNA, 669 bp, Homo Sapiens
tcggtaccggacttcctggtgtgtagcttcacagcattagccaactgttttacttcatgatatttaatacacacatccacacccatacatgcttacatacagctcccagttcccaacctcccaactcctgtatttgggatcccattttctagataagagatttgtggctttaagaggttcagtaatattttcaaagtcacacagaaggagggaaagcagggatgtaaaaccaaatttccctaattttaaagcccttgttctttcaaccatgccacaccacctgctacacaaagcccctggcagacccatatgttaccttccaaatcccctctgctgatgttagcaaccactaagggtcaaaggttgtattttcaaaatgcgactcatgagccattagtaagttctgaaatcaattgctgggccttgaccagcatttttaaaaaacaaaatagcgcagggtagattgagtagaatagatcagaaagagtaagaattgtttcatgaaccttggtttcaggtatgcatgtgtggagtgttctaggtcttaatgtaaaatgtatttcttattatgggcttatatttaaaaagtttgaaagtcattgggttcagtggatgctcctcacatagaactagctcatgaattgagaattactgaacactcaggtctct

SEQ ID NO: 169700 - DNA, 724 bp, Homo Sapiens
  misc_feature (652)..(652): n is a, c, g, or t
tggagtgtgatgaccggtcgtaaagcaaggtaagaacaatctcatgagtcaaatgaaggtaagcgctcctggaggcaagggagtctctatgaagaggaatcagtattttctgagtcaatcaaattaaatcctttcatgtatcccattttagtttggggggacactactctttcattatcaaactcttactttcacatactacacaagactgtgaattcagctgagtttggaatttggaaacctatataattaaactttgaatttgatctttgactatctcaaccctgtggctgcaagaaaggagatattcttttagctggttttcaatctatgccctaaattagaattttgagaatgtcattccttttttatttagctgttcagcgtctttagaaacaacacctccagcccattcctgataccaatttataagagtcaggatttttagctagaaacaaaaaataaccaagttcaactgatgaagcagaataggacattattacaaggatttgggggtagttcatagaatcattaggaatcctagacaattagggacagggctttgcaccaaaaactatgctcaaaatcacaccatagaaatgatctaatgagaaccccactgtgggcttcaccaaacaaaagttgttgcaanctgtactgcacacagaactggctctgtgttctaaatgccctaatagctagcttccatatgatccacgtttgc

SEQ ID NO: 169701 - DNA, 884 bp, Homo Sapiens
ggtactggtccggaattcctgggatatcgtcgacccacgcgtccgcccacaaagacactacctctcgtcttgaaagcagcaactgcgaccatgcctgcctctgtggtgggccagagacctaccattgctatggtgaccgccatcaacagtcagaaggctgtgctcagcactgatgtgcagaacacaccagtcaacctccagacgtctagtaaggtcactgggcctggggcagaggctgtccaaaatgtggcaaaaaaacacagtcactctgcaggttcaggcaacacctcctcagcccatcaaagtaccacagtttatcccccctcctagactcactccacgtccaaactttcttccacaggttcgacccaagcctgtggcccagaataacattcctattgccccagcaccacctcccatgctcgcagctcctcagcttatccagaggcccgtcatgctgaccaagttcacccccgacaacccttcccacatcccagaattccatccaccccgtccgtgtcgtcaatgggcagactgcaaccatagccaaaacgttccccatggcccagctcaccagcattgtgatagctactccagggaccagactcgctggacctcaaactgtacagcttagcaagccaagtcttgaaaaacagacagttaaatctcacacagaaacagatgagaaacaaacagagagccgcaccatcagcccaggctgctgaacccaaagcaaaacgggaggagaaccctcagaaacttgccttcatggtgtctctaagggtgggtaacacatgaccatctaagaagacaatccaaagcaagaggcaagagcgaaaacaacaaaaaaggggggccgtctaaagtttccatggaggggcccc

SEQ ID NO: 169702 - DNA, 734 bp, Homo Sapiens
  misc_feature (601)..(610): n is a, c, g, or t
  misc_feature (637)..(637): n is a, c, g, or t
  misc_feature (686)..(694): n is a, c, g, or t
gggtacgtgaacttgtgactttgcctgcaaatcgttggagggagcagttagactattacgctcgctgcagccaggctcctggctgtggggaactcctctttgacactgacacttggagcttgcagataaggaagacaggggatcagacagatactgactttcctcaggctatcaggatatggtacaaaactaaacctgaagggcgatcggttacatggacctcagaccagagtggcaggccatgtgtttatactgtgggatctcccataaacaacaggggccctttttccatgccagggagccaccccgttgcccatgtcaaacatgggccaggcctacaggtttcgaggcagcctggcaatcctttttgggtgggtttttaaatggagtgggggggaaaaaatttcctgggccaaaaacccaacccccacagcctttttgggggaaaagaagggggccttccacaaggccttgggggaatttttaaccttaagtgggtaaaacccttaagtggccccaaaaagtgggcgcccaagggccgctcgtctccaaaacccctttttttagtaaacaaaaaatatatgtggcgcacaaagatgtnnnnnnnnnnaaatattgggcgctgtttggggggganaccaccacgacgagacacaaaatatttgggggaaaaaagaataatagtnnnnnnnnnaaagagacacacccttgtgggggggttcacactttctccc

SEQ ID NO: 169703 - DNA, 834 bp, Homo Sapiens
gaggggaggggaggagtgggatttgggggtggttggtttgtgtccaatgcggttttcttaaactctctggtttctgcatagtcctagtaatcgttaacgtgcacggatccccaagttgtatacacctcaggtggcagattacttttttctgtgaacttcgtaccaaatctctgtgcggtcaagtttctcacaaaaagaggttaacgcttgaggtgtaaactgccgcaaagtggacttaggatgttttggtttatacaacgatatttttcatgtctgttagtaacactgtttcaccaaagagtagagagagaacttcaccctgtgaaattccaaacaaaacgatgtgctgaatggttactcacagaaagatttgacaacttgaggtataacgccacctgaggtgtatacaacttgcaagtagtatacacctcaggtggcagaaagagagcgacccagagagagcgacccaaaaagagaacaaaacagacagagcaaccgagagagagagctacccagaaagagcaaaaagattacagcaaccaaaatagagagcaaacaaaagagatgccaccttaggttatactacttggccacctgaggtgtatactacttggggatccgtgcacgttaacgattactaggactaagcagaaccagagagttagataccgcgtttgtctatcgtctcgtttcgcttcgctactcatactccctctggtctctcttatccacttctttgattccttattagcctctcaccccttttcaactctcctatcatttccttctttctctttgccctactcttcattaagaatacttctatcctctccc

SEQ ID NO: 169704 - DNA, 831 bp, Homo Sapiens
  misc_feature (456)..(522): n is a, c, g, or t
  misc_feature (621)..(703): n is a, c, g, or t
cggcctggacgaccgaccgggaagaaaagaaagcgagcagccccgatcggaagcgcacaggagcggaggaggaaggcggcccggacggcagcagaacggcggcaggggcacgcgcgccaaccgggcagccacccgcccaaggcaagacggcccaggcgcagggggagaacggcggcgaaagcgcgagagagccacggaaccggggcgggacccccgcgagggcgaacgacacagcccgccgcgagccgtgacgaggggggcgcgaggacagccgcgtgccgccgagcacacacgaggacgggggaaaacggcgagcgcaccggagacgcgcggacgccggaggggaagagagacgcagaggaggggggaaccgagcgcggcggggaggggcggacgggaggccgagacacgcagaatgccgcgcgtccgcacggccgaccggtcacggggcgagcnnnnnnnnnnnnnnnnnnnnnnnnnnnnnnnnnnnnnnnnnnnnnnnnnnnnnnnnnnnnnnnnnnncgttttccatgcggtattcttaaactctctggtttctgcatagtcctagtaatcgttaacgtgcacggatccccaagtagtatacacctcaggtggcgnnnnnnnnnnnnnnnnnnnnnnnnnnnnnnnnnnnnnnnnnnnnnnnnnnnnnnnnnnnnnnnnnnnnnnnnnnnnnnnnnnnttaggtaaggtagggtcatcacgttaggtaggtaattagtgtaattgggaagtatgtactaccgtaattaggtaggtacctcggtagttaggtaggtaggctaaggtagctaggtagtactccggatc

SEQ ID NO: 169705 - DNA, 731 bp, Homo Sapiens
  misc_feature (30)..(30): n is a, c, g, or t
  misc_feature (563)..(565): n is a, c, g, or t
  misc_feature (649)..(649): n is a, c, g, or t
  misc_feature (675)..(683): n is a, c, g, or t
  misc_feature (687)..(691): n is a, c, g, or t
gactggtaagtgtggccccggaggcccggnggagagggcggtgacccgggacaaaggggatcccccggggcaaggaagatacagtggcggtggaaccctcctgttacctacccgtgttccatactctccctgccctcccccacgttcagtcggtcggtcggggtctgtgcccacagagacatgaggctgagctggttccaggtcctgacagtactgtccatctgcctgagcgccgtggccacggccacgggggccgagggcaaaaggaagctgcagatcggggtcaagaagcgggtggaccactgtcccatcaaatcgcgcaaaggggatgtcctgcacatgcactacacagggaagctggaagatgggacagagtttgacagcagcctgccccagaaccagccctttgtcttctcccttggcacaggccaggtcatcaagggctgggaccaggggctgctggggatgtgtgagggggaaaagcgcaagctggtgatcccatccgagctagggtatggagagcggggagctcccccaaagattccaggcggtgcaacccctgnnntgtcgagtggagctgctcaaaatagagcgacgacctgagcttgtaaccagactgggggaggggcaagggggaaaaggcccccantcaggggacccaaaactgtttccccnnnnnnnnnaaannnnnaaaaaattccaaggggcttttatattttccggggtggcgg

SEQ ID NO: 169706 - DNA, 497 bp, Homo Sapiens
  misc_feature (68)..(68): n is a, c, g, or t
cgcggcgaagagatacatgaggctgagctgtttccggttcctgacaatactgtccatctgcctgaagncgctgcacacgccacgggggccgaggcaaaagggaagctgcagatcggggtcaagaagcgggtggaccactgtcccatcaaatcgcgcaaaggggatgtcctgcacatgcactacacggggaagctggaagatgggacagagtttgacagcagcctgccccagaaccagccctttgtcttctcccttggcacaggccaggtcatcaagggctgggaccaggggctgctggggatgtgtgagggggaaaagcgcaagctggtgatcccatccgagctagggtatggagagcggggagctcccccaaagattccaggcggtgcaaccctggtgttcgaggtggagctgctcaaaatagagcgacgaactgagctgtaaccagactggggaggggcagggggagaggcccccatcagggaccagactgttcc

SEQ ID NO: 169707 - DNA, 1092 bp, Homo Sapiens
gaggaggtggaggaggagggtgatgttgatagtgatgaagaagaggaggaagatgaggagagctcctcggagggcttggaggctgaggactgggcccagggagtagtggaggccggtggcagcttcggggcttatggtgcccaggaggaagcccagtgccctactctgcatttcctggaaggtggggaggactctgattcagacagtgaggaagaggaccatgaggaagaggatgatgaacatgaagaccaccatgatgatgacgaggatggcgatgaggtgcctgtacccagctttggggaggccatggcttactttgccatggtcaagaggtacctgacctccttccccattgatgaccgcgtgcagagccacatcctccacttggaacacgatctggttcatgtgaccaggaagaaccacgccaggcaggcgggagttcgaggtcttggacatcaaagctgagtcactggacctagctgtgcccccaacctagattggcagaccaccccagggcagaggactctctgggcacccgctgtgcatggagccagagtgcagagccccagatcctttagtaatggcttcccctggtcctgcaacaggcccggtcacctcggccggggcccggggctgaggtcagcctcactgccgtgcttattgcctctttctcagaatcctctttcctccccattgtggccctgggctcaggggaccaggtggggcgggtggggagctgtccggtgctaccataccgtgccctcagtggactaaccacagcagcagccagggatgggcccttgggaggttcccggccggagagtgcctctcccctctgccatccacgtcaggtctttggtggggggaccccaaaggccattcgtgggaagggctccagaagaaggtcagccctaagggcccctgaaaggttggcaggccccaaaccacagccagcaggcggcttgtagaggccacaggtagctcactgcagggtcctgaacctgctcctgctgcttagcactaccaagcccttattgggcccggcctgtaattgggcctgggtctttccagatgggttccagaggccccaag

SEQ ID NO: 169708 - DNA, 938 bp, Homo Sapiens
  misc_feature (97)..(160): n is a, c, g, or t
  misc_feature (748)..(748): n is a, c, g, or t
  misc_feature (821)..(821): n is a, c, g, or t
  misc_feature (891)..(891): n is a, c, g, or t
  misc_feature (901)..(901): n is a, c, g, or t
  misc_feature (915)..(915): n is a, c, g, or t
agcttcggggcttatggtgcccaggaggaagcccagtgccctactctgcatttcctggaaggtggggaggactctgattcagacagtgaggaagagnnnnnnnnnnnnnnnnnnnnnnnnnnnnnnnnnnnnnnnnnnnnnnnnnnnnnnnnnnnnnnnntgcctgtacccagctttggggaggccatggcttactttgccatggtcaagaggtacctgacctccttccccattgatgaccgcgtgcagagccacatcctccacttggaacacgatctggttcatgtgaccaggaagaaccacgccaggcaggcgggagttcgaggtcttggacatcaaagctgagtcactggacctagctgtgcccccaacctagattggcagcaccaccccagggcagaggactctctgggcacccgctgtgcatggagccagagtgcagagccccagatcctttagtaatgcttcccctggtcctgcaacaggcccggtcacctcggccgggcccggggctgaggtcagcctcactgcctgcttattgcctctttctcagaatcctctttcctccccatttggccctgggctcaggggaccaggtggggcgggtggggagctgtccggtgctaccacaccgtgccctcagtggactaaccacagcagcagccagggatgggccctggaggttcccggccggagagtgcctctcccctctgccatccacgtcaggtctttggtggggggacccaanaagccattctggagaaggggctccagaagaaggtccagcctaggccccctgcaaggctggcagcccccacccncaccccacaggccgccttgagaagcacagtttaactcactgcgggctcctgagcttgctttcttgcctgntttccacctncccagttccctttnttttgggccctgttccatgttga

SEQ ID NO: 169709 - DNA, 500 bp, Homo Sapiens
  misc_feature (14)..(14): n is a, c, g, or t
  misc_feature (29)..(29): n is a, c, g, or t
  misc_feature (87)..(87): n is a, c, g, or t
  misc_feature (93)..(93): n is a, c, g, or t
  misc_feature (442)..(442): n is a, c, g, or t
cccttcaataaaancgtaccctgaatgtnaacccaacctggggcctgtgctgtaggaaccagcgggtaggacaccttgtcccttccnagcccnacattccctggagtccttccacagcagcctgacctggtcactggtgtcccccgtgtgccacagggagttccggagatgctcccctggacctgtcttagacttcacagccttgagctgaatgccaggttctgcaactgctcggaatggggtggcttgccaatatgtctgctccgtctgcttccacatgaccacgtagaagctggagctatcttggtagccaaagataaagcctgcatagtcatcatctgtctgggtattcacatggaaggtcccttcgaagtcaactccattaaaagctgtgtaccccactgccaggccaggatcactgttcatggtctgtacaatctcnatgccctggttcaggaccacccagttgggatcgatctgggcatccccttcaggatcca

SEQ ID NO: 169710 - DNA, 885 bp, Homo Sapiens; identical to SEQ ID NO: 5049
  misc_feature (631)..(654): n is a, c, g, or t

SEQ ID NO: 169711 - DNA, 941 bp, Homo Sapiens
  misc_feature (75)..(75): n is a, c, g, or t
  misc_feature (189)..(189): n is a, c, g, or t
ctccctgttcgcccacagggttgaaggaccccaagcccctgaggagaaccctgcttcccaggggggctggctggnctgcgacccaggaagggccagggcagttagcccttcccacaggagggggcaggcaaagggatcgttttccttcttccggggctgagcccatgccaggccagccacagagtgccntagtcagccccatgtggctccaggaagcctgctgttgttcttctccatcccatttcacccgcagcctagtggctaactctggatactctgagcaaaattaacccaagtttcatggagaactccagaaccttgaaccagtgcatggttatcaccattctttgttactagatgtaggagaaggtactgcagagtcctctggcctggaacagcttgggggaggattcagctccctgtttctccctcactcccaggagattcgaaaacaagtttgagagaaaaaacagtaactaaaaaagtccatgaagaaggatctgacatgtcctttgtgaagtaacattaccctctccccatcacgacgcaggagatgacatgttacagtaagagggttacagcaattccccatctggagtgccattcaactgcctgcagaaatcttccattttaatgcattttaaacacattcaaaacgagtgctgactctccaacctagggaaaatgcccaataaaaaatatagatagaaaatacatgctaatgtaatggcaaacttatctccacactaaaacggcaacagtcttgcggttgagggcaggggtgcggtggaacctccctcttcccacaagaacatcagcaccagagatgctcggtccccgggctgatctgatggtggggaccacgcactgtcactcggctgccggtccggtcccagtgttggcctgggactatcagtgctgcagcaggaagttggtggcga

SEQ ID NO: 169712 - DNA, 604 bp, Homo Sapiens
ggatcctcccccaagctgttccaggccagaggactctgcagtacctttctcctacattctagtaacaaagaatggtgataaccatgcactggttcaaggttctggagttctccatgaaacttgggttaattttgctcagagtatccggagttagccactacgctgcgggtgaaatgggatggagtagaacaacagcaggcttcctggagccacatgggctgactagggcactctgtggctggcctggcacgggctcagcccaggaagaggagaaacgatcccttgcctgcccctccctgtggcagggctaactgcctggccctcctggctcgcagccagccagccccctggcagcaggttctcctcagggcttgggtcttcaacctgtggcgacaggaggcagggcagactgtggaggacaggatgcaggtcagggagagggaaggcaggggtggaccgccatgagcatgaaaagacccgaagcaagttgactcttgcaatgtgcaactgttatgttctgcaaaatgagcaacgatgtatcaaattgatgcaaatttagatgttgatacttacaataaagtttttaatgtgttttactcttcga

SEQ ID NO: 169713 - DNA, 339 bp, Homo Sapiens
atgtgcctgcaacgcagtcatggtgatagctgactcttgaggatccccttccctgactcctttggtgctggctttggtacttgtgagggcctgggcaccaggacggttccatgggtcctcacgtgccccactctgtgaccctcctccatgctagtgcctgacccagtatgtaccacggaggacctcctccttccccactgcctggtccttgccaggaaggaagccaagtccccgagtcccaagagtaaagtgcggtgcctatttgccgggctggcatcagccatcaggcaattgagactgggggacactaagtcaatggtcctctcagaagcgggtgtc

SEQ ID NO: 169714 - DNA, 1067 bp, Homo Sapiens
ccccggggcgcgtatggtgtcgtaccctacacgagtccggatgaaatcggtagatgagaactggactcgggttagctaaaataagttcagcatgatttgctttaaactgtggtgcattcttcataagaaagccaacaaaatgagatgatacagaaactttattggagaccaggcttttcctgaacttggagaaaagcccatctgcaacaacagtcagtggagcatggagttccttgatatctccagtctctttatccttgtactgaactcccatcacaacatcatcttcctctaataactgtaacacaacaccttcaataaactttgcattgggctctgccatagctgctttccggagactcatgatgaatcttccgtgatggaaagctcttccactctgcacttgattgttttctgacagagggtaaggaatctgaacctctgatttgctttcctgatcatgaatcatgtaaccatttacaacctgggcatcaagaccttccactgtatctccaagaccaaggtctttgagaacatgataaccacccggctgcaggaattctccaactattctgtcaggctcttttaagtctctctcaatgactgtcacctttcttccatctctggaaagcacagctgccaaagcagagccaagcacgccagctcccacgatgataacttctgggtcattctgagaagatgttgatgtacaggcagctgttcctattaagcttggtttctgaaatattggttccttttctgcgccgtcctggcctcgagctgctccttattttctgattcagggggggatttggcccagaagaagccaatgaaaggcaggcctgagagaatatccgagaagagggcgaactgggagccgctctgctggcgcccgaggagacccccgtttcggtggcgacagcggtaggagagcaccaggcccagcgagaggaacaccagcacgcacaacaggacctccctgttggccaaagtgatgaggtccccgaacttcttatgaaaataggtgaaagtggcgatgcccagaaaagtccacatggttccacggc

SEQ ID NO: 169715 - DNA, 437 bp, Homo Sapiens
atttgttgaatacattatttcaaagaaccacaaacacacagaatatatatttaaaaagtccatgtggggggaaatgatgccagaaactacagctcttctacttccagccctaaccgtctgggatgctagatggttgtgggcaaaccgtggaaaaagataagcttctgtttttcaagattttattttgttagagagtgcagaaaatctaagtgatgtctctgtttttgctttctagcaattaatatatgacagcagtctttgtgatttattttaactttctgcaagacctttggctcacagaactgcagggtatggtgagaaaccaactacggattgctgcaaaccacaccttctctttcttatgtctttttactacaaactacaagacaattgttgaaacctgctatacatgtttattttaataaattgaaagcaaa

SEQ ID NO: 169716 - DNA, 522 bp, Homo Sapiens
actacatacttccgacagcggcttccttgatccttgccacccgcgactgaacaccgacagcagcagcctcaccatgaagttgctgatggtcctcatgctggcggccctctcccagcactgctacgcaggctctggctgccccttattggagaatgtgatttccaagacaatcaatccacaagtgtctaagactgaatacaaagaacttcttcaagagttcatagacgacaatgccactacaaatgccatagatgaattgaaggaatgttttcttaaccaaacggatgaaactctgagcaatgttgaggtgtttatgcaattaatatatgacagcagtctttgtgatttattttaactttctgcaagacctttggctcacagaactgcagggtatggtgagaaaccaactacggattgctgcaaaccacaccttctctttcttatgtctttttactacaaactacaagacaattgttgaaacctgctatacatgtttattttaataaattgatggcaaaaaaa

SEQ ID NO: 169717 - DNA, 657 bp, Homo Sapiens; identical to SEQ ID NO: 73539

SEQ ID NO: 169718 - DNA, 897 bp, Homo Sapiens
cggagagttcctgagcagacgggccactgtgacccaggtgtacagtagagaccttcgccgctgccgcaggaggaaatcgtgtgaagctccatccatggcgtagaatacattagccgaggctgggatagtcagctctcgctcccctggtagcagctgtaccagctcatactctgaagccactgcagagtcacgattgtttttcttaaggacacgactgatgacacttggagccttgtcctggcttgtcaccaaaatgctcttatagacactgccatcttcccccaactccatctggactcggatgatacggcaatcagaggccctggcccagatccctctcccccatatccagtccccccggaggcctcttctgcacccccactcagcggggagccacaggaggctgagcggcggtgacctcgagaaggcctaggggaggaggctggtggggagaggtggctggggtcagctggactgtgcagggatggactgctttccaaggcagagtctagtgacgagacagatggccacttcatgtgctgggccagccgagtcagcagaggagcaggagttgtaggcgcctcatctcccccagtactgggccggtcacaggacacaagcggggtagggaccccaacagagcccaaaacctctgtccactgcgagatgaccaatgttggccgaagcacccgtggggcaggagggtcactggaaccaggtggctccacctcacaggatacacgatggctctgagcctctgtcagtggccggagcccctgtagccacctctggatatcatggtcaggttggaggttatagccacgacattcattctggagccgtcgcaactcagaaaggactgcaaactccttcctccgcttgtcaaaattgatgtat

SEQ ID NO: 169719 - DNA, 853 bp, Homo Sapiens
attgagataagcacggtggatcgtggcgctcacacacagtgagagacagtggcagggcctctccagcaaaggagacctgccccaggtggagatcaccaaggccttcttcgcgaggcaagcagacgaggtcacactgcagcaggcggacgtggtcctggttctgcagcaggaggatgggtggctctatggcgagaggctccgggacggagagacgggatggttccccgaggactttgcccgcttcatcaccagccgtgtggccgtggagggcaatgtccgcaggatggagcgtctgcgggtggagacggacgtgtagccctggcgaggccagccggcggcagcacagcctgtccccaatcagcaagtggtcgtgcctggctctagagagcgtggggagctggtctcaaggacccagcatggttccctggggcttcccaagagcctgtggctgtggtgccgggctccagacacttcacggaaggaagatcacatgtccccagagaggcacccccaggcaagctcgagggggccacaccgtgtcccagggagcccagcctattcccgttggctggctgggcccctctcagctgctgggccccacctccccactgcacccaggggacaactccacctggactgatgggcacaggaggcaccaatagcgattattgggggcaatgcgaggtctcctcctatgcccttcctaccggagagtgggacaagaagggccttgagtgcccaggagtgccccacgttctgagaaggggccggccggagggaggggacccggcagggagatttcggttttgaggtttctaaatacattaaagttatttcttaagaacctggaaaa

SEQ ID NO: 169720 - DNA, 142 bp, Homo Sapiens
cttccccggatacatataacctataatgtgttttttaatacattttcatatgtgtgcttatttttactccctctcaggcttatagcaatagctaggtgacttgcaaatgtataatggaagcattaaaagacagggaaggagg

SEQ ID NO: 169721 - DNA, 676 bp, Homo Sapiens
tatggattgtctgcgctcgcaccaggatcacaggcacagctctgaccagagactgggcattgcagacagtgaggaggaaggagaggtgtttatggatcaggaacgggagtcctagggatgataagccctgggctccagctgggaactatcagagtctgggggtgtcaggcaagctcggaggactgagagggaggccaccaagccctgtgagagagaaggtggaggtgaggacttgagaacagtggaaagaaggcagcctctgagggccccagggtggagcagatctgagtgatgaaaatccccttgggaccctgagagtgaggggaaggtcacggaagccgagagatccaggaatgtgaggtcagaggctgacctggtggtccacgcggatgttcgaaactcccaggatggagagaaaaacagagcaggaggaatgaggaaggtgggtgctgacagccacaggaggactggggctgcaggaggccggcggcacctcagaggccgagctcaggcttggaggggtctgggatgtgggcaacaactggctccatcagagaggcctcaggaaagtgtgtcccgggggagggtcaagttcctttactgcatgagcagaagaaagtgggaagaacaaggatagggagtttatccccagaggaaaaagggagccatggcaggt

SEQ ID NO: 169722 - DNA, 329 bp, Homo Sapiens
  misc_feature (195)..(203): n is a, c, g, or t
ctgactctatgaggatcccctccttccctggtacggagttccccactgcacgaattaatgttcccaatcccctactgatggacattttgattgtttccagttttacaaatgccacagtgaagaactttgtggcaaacacattcaggctgtgaaaagaactctgtgggtaaagtcctttcatttctttgccagagnnnnnnnnngaggcagattctagaattgctgagtctaagggcaaatgccatgtcattttgttagatgctgccaaatcctcttccatgaggctgcaacgttctgcattccacagtgactatgagagtccttgtacc

SEQ ID NO: 169723 - DNA, 495 bp, Homo Sapiens
ctgtaagcctccttccctggatctgtgtcatttctgaaatatgatagtcaaattgtggtctcttgttctaatcatctttgctgaataacaaatttccctaaatttagtagcacaaagacacaatcattttattattttcatgagttttgtggattgagaatttggagaggacaccgtggctcagctcttctccattccatgatgtctggggcttgcacaaggagactcaaacagctgtagctagaataacatgggctggaagatccactttcaagacaacttcttcatacacatatctggtagcctctccaggtggcctggacatcctaagtgcatggtggcctcagatagttggactttgtacatgggactgagaactccaaaatgtgatgatcctggtagatctaaaagtccaaggactgcacaagcatgaatcggatggccagtcttcctgggcagctaccatagccatagtccttcagttcagggaaggaa

SEQ ID NO: 169724 - DNA, 661 bp, Homo Sapiens
  misc_feature (229)..(237): n is a, c, g, or t
  misc_feature (581)..(610): n is a, c, g, or t
agtacaggaccgtcatgctgcaagcttgccctgcccagcctcaccaactaagtcgcactaggggctgtgagcaaagacagccagcatgctcagccccgctgccctaggtgccaggaaggtcacagatggacactggccattctggtcatctcagtctggaactcagtcccacttcttggcctggacaatgaacaggattcagttttgctgttaactttgcttctctacnnnnnnnnngttggtttgtaatagcacatcccagagacatcagaaaccagcaactgattcagtgtgatttccagactttttaggcatgaaattcggacacttcagtatttccaggaatagcatatgcacgctgttcttgcttcatggaatgctacatgctttctgtttttctcattttggatttctccaaaactaactgaatttaagcttcaggtccctttgtatgcagtagaaaggaattattaaaaacaccaccaaagaaaataaatatatcctacttgaaatttactctatggacttacccactgctagaataaatgtatcaaatcttatttgtaaattctcaattttgnnnnnnnnnnnnnnnnnnnnnnnnnnnnnnccacacttgtctgcaagaatattgattaaaattgctaaatttgtaaaaaaa

SEQ ID NO: 169725 - DNA, 240 bp, Homo Sapiens
ctgaggatcccctccttccctgggctacaatggcgccatcctgcaggccctggctgtgcacctggccttgaaggacgagtcttccagcgagcacttcctcaagcaactcctgggccacatggaggatctggagggtgatgcccaagtccgtcttggatgccagggagttgggcatggaggagcgtccatactccagccgcctgaagaagactggagagcttctagaccaggcatcggtga

SEQ ID NO: 169726 - DNA, 738 bp, Homo Sapiens
aggtgggggcccaccaggatgagcaagctgcccagggagctgacccgagacttggagcgcagcctgcctgccgtggcctccctgggctcctcactgtcccacagccagagcctctcctcgcacctccttccgccgcctgagaagcgaagggccatctctgatgtccgccgcaccttctgtctcttcgtcaccttcgacctgctcttcatctccctgctctggatcatcgaactgaataccaacacaggcatccgtaagaacttggagcaggagatcatccagtacaactttaaaacttccttcttcgacatctttgtcctggccttcttccgcttctctggactgctcctaggctatgccgtgctgcagctccggcactggtgggtgattgcggtcacgacgctggtgtccagtgcattcctcattgtcaaggtcatcctctctgagctgctcagcaaaggggcatttggctacctgctccccatcgtctctttggtcctcgcctggttggagacctggttccttgacgttcaaagtcctaccccaggaaggtgaagaggagcgatggtatcttgccgccaggttgctgttgcccgtggacccctgctgttctccggtgctctgtccgagggacagttctattcacccccagtatcctttgcagggtctgacaatgaatcagatgaagaagttgctgggaagtaaagtttctctgatcaggagcgggagtacatcgct

SEQ ID NO: 169727 - DNA, 803 bp, Homo Sapiens
ccatcaaccaggccagaccccacttcctcaagccagtggggccccggagtccagtgctccacccccacagcctgctcagtcagtcaactccaggcactgcgtggctcggtggagggtgacagcctggggccaggtcccatgtgggcagtgcgagcccaactggcaccctttctggctctggaagtggtggcgacaggaccctggcccgcagggtgggagggggcacagtcacgcccgggcccccagctcgctgatgcgctgtcgcaggtgaaaggcaaattcaaacatggtggccgcgaggctctggtggatgaggtaccggggcaggcggcccttgagatctgtattaagaatccagacaaaggtgcaaacacgggggttaatggccgacttgaaccacgatgaaacccccagggccattctctccccggaacatatttgtgcgtcgggggcttggcactgtgtgaaggtggcgatccctgatgaacaagtatcggtccctgcgccgctcaatgcgccggacattcacgaagtcccttggggagaccacgccgcccgcagcccctgcagacacgtcataggagatgagggtgttgtcttccactcgctgcaggatctggcaggcagtcactgtcttgttccacagcaccatcctctcgggctgcaggatcacctcctggtacacgagctccgcaggacagggcaggaaggtcttcaggataaacgtcttgccgtgaaagggaacttcaatggtgtacacggtgtccccatattcattattcttctcaaacttccagttctcc

SEQ ID NO: 169728 - DNA, 1130 bp, Homo Sapiens
  misc_feature (833)..(873): n is a, c, g, or t
ccacgcgtccgctggagcctgaaccagaggaagagatcattgccgaggactatgacgatgatcctgtggactacgaggccaccaggttggagggcctaccaccaagctggtacaaggtgttcgacccttcctgcgggctcccttactactggaatgcagacacagaccttgtatcctggctctccccacatgaccccaactccgtggttaccaaatcggccaagaagctcagaagcagtaatgcagatgctgaagaaaagttggaccggagccatgacaagtcggacaggggccatgacaagtcggaccgcagccatgagaaactagacaggggccacgacaagtcagaccggggccacgacaagtctgacagggatcgagagcgtggctatgacaaggtagacagagagagagagcgagacagggaacgggatcgggaccgcgggtatgacaaggcagaccgggaagagggcaaagaacggcgccaccatcgccgggaggagctggctccctatcccaagagcaagaaggcagtaagccgaaaggatgaagagttagaccccatggaccctagctcatactcagacgccccccggggcacgtggtcaacaggactccccaagcggaatgaggccaagactggcgctgacaccacagcagctgggcccctcttccagcagcggccgtatccatccccaggggctgtgctccgggccaatgcagaggcctcccgaaccaagcagcaggattgaagcttcggcctccctggccctgggttaaaataaaaaggctgttcctgggttggagtccctggcccaagcaaagaaaaagannnnnnnnnnnnnnnnnnnnnnnnnnnnnnnnnnnnnnnnnagggcgggggcccccatagaagaaaattaccccaaggcagggggccgacaagaaataggggcgcaaccaccggcatgttgtgtgaaaagcaggggccccacaaaggagggcagcgacgaaataaaacaagcgaaccacagggcagcgactgttaacacacgggcgacacagcgaacacacgatggacggtgggagccactgggggaagcagaacacacaacccggggggagcacacaaatggggaccaacaaccgag

SEQ ID NO: 169729 - DNA, 903 bp, Homo Sapiens
ggcctcgttgagagaaggtctcattcggtgttttgggaaggagagtcgtgtgggcccaggtatcgtagcggcgacacgagagagacgggcggtgtgacagccttccactacctgcacgagtgtattggtaacgttggggtctgtctgctatcagctatgccgctgcccgttgcgctgcagacccgcttggccaagagaggcatcctcaaacatctggagcctgaaccagaggaagagatcattgccgaggactatgacgatgatcctgtggactacgaggccaccaggttggagggcctaccaccaagctggtacaaggtgttcgacccttcctgcgggctcccttactactggaatgcagacacagaccttgtatcctggctctccccacatgaccccaactccgtggttaccaaatcggccaagaagctcagaagcagtaatgcagatgctgaagaaaagttggaccggagccatgacaagtcggacaggggccatgacaagtcggaccgcagccatgagaaactagacaggggccacgacaagtcagaccggggccacgacaagtctgacagggatcgagagcgtggctatgacaaggtagacagagagagagagcgagacagggaacgggatcgggaccgcgggtatgacaaggcagaccgggaagagggcaaagaacggcgccaccatcgccgggaggagctggctcctatcccaagaagcaagaaggcagtaagccgaaaaggatgaagaagttagaccccatggaaccctagctcatactcaagacgccccccgggcacgtggtcacgggactccccaagcgggaatgaggcaagactgggagctgacaccacaggaagctggcccatctccagacagaggcccgatcatccccaa

SEQ ID NO: 169730 - DNA, 734 bp, Homo Sapiens
tcggtacccctccttccctgggaacagcggcctctgacaccagcacagcaaacccgccgggatcaaagtgtaccagtcggcagcatggctacgaaatgtgggaattgtggacccggctactccacccctctggaggccatgaaaggacccagggaagagatcgtctacctgccctgcatttaccgaaacacaggcactgaggccccagattatctggccactgtggatgttgaccccaagtctccccagtattgccaggtcatccaccggctgcccatgcccaacctgaaggacgagctgcatcactcaggatggaacacctgcagcagctgcttcggtgatagcaccaagtcgcgcaccaagctggtgctggcccagtctcatctcctcttcgcatctatgtggtggacgtggggctctgagccccgggccccaaagctgcacaaggttcattgagcccaaggacatccatgccaagtgcgaactggcctttctccacaccagccactgcctggccagcggggaagtgatgatcagctccctgggagacgtcaagggcaatggcaaagggggttttgtgctgctgaatggggagacgctcgaggtgaaggggacatgggagagacctgggggtgctgcaccgttgggctatgacttctggcaccagcctcgacacaatgtcatgatcagcactgagtgggcagctcccaatgtcttcgagatggcttcagcct

SEQ ID NO: 169731 - DNA, 929 bp, Homo Sapiens
ccccccttaagtccctatgcccacagggattttccttgggggaaaaccaactctatgggcccccgttttcccctttcccctccgggggccccggcggcccccgaaatgaaatgggttttggaaagcttttttgaagggccgaaggcggccccccaaagacttttcataggtgtctggcgcgtgtgcatggattcatcccagcccttttatgggctgggggctagttatgcagggagcccacgcgcccagggccgcttggagtgcccagcttccggcccggggcaggctccccgaggaacatgccctacacaaggcccttcggcccaggcccgaagccaggaggccagctgggagcaccaggccaccgggcactgccctctcccactgctagacgcagggtttcagagaaggccattcactgccatttggggctgggcccatggcggtgatgatttgggaagagaggagcaaggcagacggtgaggcaggagcttggacgtcagggcccacagcagcccctccacaggggtgccccgtctgcaaatcagcatgagaaggtcactccttgtgcagacaccacaccagcgtctggcccacccccgtcatgctcagcacacggaagcccctgcgttccagcttgtccaggactatgcggggagggtcatcgacgtagtattcataaaagttgtttcccaaggctcttctctttgaagcccccagatgctgcatcagctctggatccgactgttcatcgcccaccatagtggggcccacctccatgcggatctgggtgctgatgagcaggtagggcatggtgcacgcgtcccggcctggctcccaccgggggctctaggctggacgccgactccagcccttctcgcgtcgggactgcgacgcgcagctgggagtcccgttactccggctctccc

SEQ ID NO: 169732 - DNA, 1148 bp, Homo Sapiens
  misc_feature (870)..(880): n is a, c, g, or t
cctgggtggcgaattcggcacgagggtgaggtcagcttcacattctcaggaactctccttctttgggccacggaattaacccgagcaggcatggaggcctctgctctcacctcatcagcagtgaccagtgtggccaaagtggtcagggtggcctctggctctgccgtagttttgcccctggccaggattgctacagttgtgattggaggagttgtggccatggcggctgtgcccatggtgctcagtgccatgggcttcactgcggcgggaatcgcctcgtcctccatagcagccaagatgatgtccgcggcggccattgccaatgggggtggagttgcctcgggcagccttgtggctactctgcagtcactgggagcaactggactctccggattgaccaagttcatcctgggctccattgggtctgccattgcggctgtcattgcgaggttctactagctccctgcccctcgccctgcagagaagagaaccatgccaggggagaaggcacccagccatcctgacccagcgaggagccaactatcccaaatatacctggggtgaaatataccaaattctgcatctccagaggaaaataagaaataaagatgaattgttgcaactctttgaaagaaaaaggaaaaattcgagggctctatgttcggggcgggaaaagaaggtatgaaaggggcccttggccatagcttgtttccttgaccccctttcttggaccaagcgggtaaatccttgccggccccccaataatgagaccgtatttaatttccactaagccccggttatacctggaattaaaggaattcggctggcataacacgcggaaatttttccccgccccatttgacgcgggcnnnnnnnnnnngcgaaacccaaaagggatttttcttcggaaatcccctttttgttcccggccgataaccgccgcctgccttgcccaacacataataaacacacctgtctttccctcggggtgggctcctgtcttggccggaatacatagaaaccccccctacttcctttttccccgacacgttttaacgggtttctttatcacaaagtgcccctactatacgccccatacactcgccccatctctacatggtaccatcctctctacttatcgtacctcc

SEQ ID NO: 169733 - DNA, 1068 bp, Homo Sapiens
  misc_feature (888)..(888): n is a, c, g, or t
  misc_feature (950)..(950): n is a, c, g, or t
atgtttccacccctcctcacacccccaacgtagcgaggtctgggtggcgattcccacacgagggtgaggtcagcttcacattctcaggaactctccttctttgggtctggctgaagttgaggatctcttactctctaggccacggaattaacccgagcaggcatggaggcctctgctctcacctcatcagcagtgaccagtgtggccaaagtggtcagggtggcctctggctctgccgtagttttgcccctggccaggattgctacagttgtgattggaggagttgtggccatggcggctgtgcccatggtgctcagtgccatgggcttcactgcggcgggaatcgcctcgtcctccatagcagccaagatgatgtccgcggcggccattgccaatgggggtggagttgcctcgggcagccttgtggctactctgcagtcactgggagcaactggactctccggattgaccaagttcatcctgggctccattgggtctgccattgcggctgtcattgcgaggttctactagctccctgcccctcgccctgcagagaagagaaccatgccaggggagaaggcacccagccatcctgacccagcgaggagccaactatcccaaatatacctggggtgaaatataccaaattctgcatctccagaggaaaataagaaataaagatgaattgttgcaaaaaaaaaacaataacccggcaccggaaccgactatccccctggaagattcctccctggaagggaagcccacacgcttccaccacctcatctttccagccgtggaattcctgggcgtcgaacatccataggcatatatcctgttgcctaacgctgcccctcccggggaattccctgcactccattgtacactggngccccctcgttcttgtaaatccctttcgatccgttatcctcctggtcaagaaataaaacgcntctttgcataccctcggtcccccttcaacgcgcgacatattccggctgtactccccacctttttctcaggcgtcatatctctgaaatatctagcccctcctcccccgcattctttttc

SEQ ID NO: 169734 - DNA, 454 bp, Homo Sapiens
ggggtcatttcctgggccaagttgggacccggacggcctcaccatgatgaaacggccagctgctgctgcagtgggaggagccctggcagtgggggctgtgcccgtggtgctcagtgccatgggcttcactggggcaggaatcgccgcgtcctccatagcagccaagatgatgtccgcagcagccattgccaacgggggtggtgtttctgcggggagcctggtggctactctgcagtccgtgggggcagctggactctccacatcatccaacatcctcctggcctctgttgggtcagtgttgggggcctgcttggggaattcaccttcttcttctctcccagctgaacccgaggctaaagaagatgaggcaagagaaaatgtaccccaaggtgaacctccaaaacccccactcaagtcagagaaacatgaggaataaaggtcacatgcagatgta

SEQ ID NO: 169735 - DNA, 183 bp, Homo Sapiens
cctcaggggtatatcaactctctggctttgtgtcataatgttatttggagagaacttggattgcttttcacttccacgagataccacactggtccattacattgatgacattatgctgattggatccagtgtgcaagaagtagaaaacaaactggacttactggtgagacatttgcatgccag

SEQ ID NO: 169736 - DNA, 871 bp, Homo Sapiens
  misc_feature (618)..(802): n is a, c, g, or t
gggagaagtggcccttgcaggcaagagtgctggagggcggcagcggcgaccggagcggtaggagcagcaatttatccgtgtgcagccccaaactggaaagaagatgctaattaaagtgaagacgctgaccggaaaggagattgagattgacattgaacctacagacaaggtggagcgaatcaaggagcgtgtggaggagaaagagggaatccccccacaacagcagaggctcatctacagtggcaagcagatgaatgatgagaagacagcagctgattacaagattttaggtggttcagtccttcacctggtgttggctctgagaggaggaggtggtcttaggcagtgatggaccctccattttacctctttaccctgtcgctcataatgaggcatcatatatcctctcactctctgggacaccatagccactgccccctcccctggatgcccagtaatgtatgtctactggtgggagactgtgaggatcccaggattcagtattcctggcccagagggcccttgctggctactgggtgttagtttgcagtcctgtgtgcttccctctcttatgactgtgtccctggttgtcaataaaatatttcctggcctcctggnnnnnnnnnnnnnnnnnnnnnnnnnnnnnnnnnnnnnnnnnnnnnnnnnnnnnnnnnnnnnnnnnnnnnnnnnnnnnnnnnnnnnnnnnnnnnnnnnnnnnnnnnnnnnnnnnnnnnnnnnnnnnnnnnnnnnnnnnnnnnnnnnnnnnnnnnnnnnnnnnnnnnnnnnnnnnnnnnnnnnnnnnttttccggcccccccgcccccccccaaaaaattttcaaaaaactctttttgggggcggcgcccccaccc

SEQ ID NO: 169737 - DNA, 372 bp, Homo Sapiens
tcaaagcctgcttacctgcaccttcgggtgtgtgtgaaagaagtcctcgagctctgcggggtagatgttctcaccaccccggatgatcatatccttagagcggcccacgatcttgcagaagccctgctcattcattgtggcgacatctcctgtccaataccacttgtcctgatccactgcttcctctgtcttctgaggctcaccccagtagcccagcatgacgcagtaccctcggatgcacagctccccgggcgtgttcagctttgccagcgtccctgcctccatgttcatgatccgggcctccgtgtgaggcataattctgcccacgctttctgccttctgctccacagtgtcctcagggaagggtaccga

SEQ ID NO: 169738 - DNA, 899 bp, Homo Sapiens
  misc_feature (468)..(502): n is a, c, g, or t
  misc_feature (566)..(574): n is a, c, g, or t
  misc_feature (610)..(610): n is a, c, g, or t
  misc_feature (702)..(702): n is a, c, g, or t
  misc_feature (710)..(710): n is a, c, g, or t
  misc_feature (722)..(722): n is a, c, g, or t
  misc_feature (790)..(790): n is a, c, g, or t
  misc_feature (812)..(812): n is a, c, g, or t
gggggattataggcgtaaaccactgcacgcagcctaccctctgcctttttaagatgatgtatttatttaatttttgccatcattggtgcttcaccttcctgcgaaggaaattccagagcctgtatttaagctacctaggcttttacactccctttattgcctttccaaatagtatctcatttggtgtactctagtgtcctatacctcttggaaacgaaagaaggcccaacctacaactaagaaggcacaaaccttgaactaagtaagaccttacacacccagaaagaacactgggccctccttcttcagggacaatgcagtagccacttggcttgtggaatttactgaaggctatttcctgtaacttgctagttaacttagttttgtatttcaggcagaggtgcgctctgtaatgttgggcctttgacttcacagtactggagagctgttcacacagatgtttagacnnnnnnnnnnnnnnnnnnnnnnnnnnnnnnnnnnnaacaactctttcacagaggcagtcattttgaaaggttgaaatatttggcctttaccaaagagcnnnnnnnnnccttaagcaaaatcctttcagaaagaaacaaatggnggaagggcagattaagaatgcatatgtcccaatccacttctataggagtttaatcatattcacatgagtaaaatgatggaagaactctttanggtatccnttgggataaggnatcctgggaagttctctcaggtaagaaagctacagcagatttggtatatatgtctggagagctatttnatagaaatttaggaagggatgnttttgttttcctttaataaagaattaaagcctttttactttggcaaaaagaaaactaccaaaaggtttaatagatataaactttgcc

SEQ ID NO: 169739 - DNA, 660 bp, Homo Sapiens
ggaaaggagagcgtctgcagggacagtgggcacaaggaactgaacccagctctgctaatattgtgatttcagagaaaaagcaggacatgccccttttctagccaggaggattgctcctttttggccaaatgtatggagaagtagaaaaatcaaagcagttcatcaccctttccaggtctcggaatggtgcgtgaaaaatcctctccaacactgtggatggagatcggagaaacgcaactgtggtttctcttgatttctgaggatctcagaagtttcagcagacttccttgctctgtgttattcctttgcaaaaggaaagatcattatagcatgagggctgggaatagcagggtgaacttaacccaataaatgcaatttcctaaatgacttcatgctatggaggtgattctgattcaaatagcatgatccatgcttattatttaaggctgatttttaaaatcttgtgttgcaagggcaacctcgtccattttaactggcacctcagggattaaaatcctactttttagtgtagttcccacctcattcatgaaaatgaatagaactattgtattatgggagatgtgtcagtgaaccagaaacatgtcaataacctcaaaggatgaacgggttcacatctaacaatagtatataacaatatat

SEQ ID NO: 169740 - DNA, 1261 bp, Homo Sapiens
  misc_feature (287)..(296): n is a, c, g, or t
  misc_feature (543)..(635): n is a, c, g, or t
  misc_feature (1125)..(1125): n is a, c, g, or t
  misc_feature (1156)..(1156): n is a, c, g, or t
  misc_feature (1168)..(1168): n is a, c, g, or t
  misc_feature (1189)..(1189): n is a, c, g, or t
  misc_feature (1196)..(1204): n is a, c, g, or t
  misc_feature (1209)..(1209): n is a, c, g, or t
  misc_feature (1240)..(1240): n is a, c, g, or t
cgccagaaaaaggggttgtgccctagggtaaccataaaatggtggtgtaaaaagacaaattcccctgggggagtgtttccccccccatcttgggggttgagattttggcccaattttggactcactttttgggccccctttgttcaccctgttgcgcaatatattttccccacaggggcaaatttttttatcccagggggcaattcgatttatcctacgcctttttgagggttttcatgtcggccgagatggttttcaattccaccaaatttttgatgaattacaannnnnnnnnnaaaaggggatgggtgttgcgtaaattcctatcgagattgcccggaatccccttgaaagatccagtagattccttcgaaccccttgggtatcggcggggggcttttagttgcgggaggcaagtctttatttgtgggcaggctcgccctagtaacaactcaggatctctttggattccatttttgggccacgttcgcctaacttaatggttttggaagcttttttggaggttttgggggagcttcttgnnnnnnnnnnnnnnnnnnnnnnnnnnnnnnnnnnnnnnnnnnnnnnnnnnnnnnnnnnnnnnnnnnnnnnnnnnnnnnnnnnnnnnnnnnnnncatatactttatgctttacttcttacttcaaacatacatccttgattaaagaacaaaaacaactcactgaagggtgataaaacaatcaaaatgtatttgcccctgaaagtggaattactacctcaaaaggaatacaactctttcattttccccaaaataatcatgtgagttcatgggcatgctcatcactgctgtctgtgtggaagagaagatcaaagagggatttactggactggactggcctaggaagcctttgctggcatctctcagactggactgcagcccagatccttttactcagatgcatgcacttagaacatgaaaacagtaagataaacgctggtggtattattaccttatattgcaggaacattttatgacttcctaaccctgttttcaatagaaacatccccactaatgaaattgtcaataaaatgctgctcaaaccaccctccccaaatactgaaaaacagtacatccattttctctnacccttggccaagttgtctggcaaatgctcnggtttttctaantggatggggttagggacaaantgtggannnnnnnnnccccntttctttaacacaaaccaaaaagtggggggnacaaaacccgtgggggtaaaa

SEQ ID NO: 169741 - DNA, 486 bp, Homo Sapiens
taaaaggatgaaattcttaaaactgtgtataaacctaatatagtaaagactgtatacatctccatattgcacatttttatgtacaagaataaaacattaaagtgtattgcatatactggaacagcacaaatttatcacaattaaacttaatgcataagcccatgtgagtattaaaaatgtagaaatgtaatacatatatgtacagaatgccaggactgtattaacaatgatatgtacataacaatatactgtactactttgtacttttcagcatagctgcggttattaatataggcctttggttctaaactgcttgactagttttaagctcacataattccttaagctttcatattttcttaaatgcaaggaaatgaatataaaagcactaaatctcctggttcactggtacaaaaattacaatggtcagttcccttaggtcatcaaaaactagtcacaaaaatagttcttgtattcaacctgaat

SEQ ID NO: 169742 - DNA, 132 bp, Homo Sapiens
agttatacaagaacctggaagtagatacatcacactgtggaagacaagcagtcatgtaagctttaagcacgtgcagtgctaccagaagggctggcatcctcaggagcctgactatgctagactagctatctg

SEQ ID NO: 169743 - DNA, 529 bp, Homo Sapiens
tcagattggttgatgccaccccagtcaaggtagagtctgatagggcagtatcttaataaccctacccatgacttaactgttggatttgaaaggaaaacgtaggatttgctcttgtccccttacccgccacaaaattttgataatttgtttaaaagggagaggcagaggaaaagactagaagcataaatagctgctttaggtttgccagaggcacatagcttaacattagttcttaatatcgatgttatttttactaatgtaattaatcaacagagcaccaagattctttcatggtgaaaagggtgggcttctgttttggtatcttaaaatgtatcttctaaaatatacatcacctgtgtgagaaccaggaccacctgggagagtgatgaatcattggctccactcaaaagcattgctttactgagttttaaatttcacactgttttgccgctcaagaaaggtcttaacgtagttaaaggatgccagcaatagtgcgaatagacattttcggttgtctgcataataaaaa

SEQ ID NO: 169744 - DNA, 608 bp, Homo Sapiens
atggaccctgtttagacctatctttatgtcccgtgataggattctcattactttcgcaggtggaggacagctgcacggctcggactcggtcgaggcattcagatgccgtacagcatgagcaccaagaaggtcagaaggcctttagttcttaattagcaagactgcatcagaccaagtggaggcctccttaaaatgttctgagtcgacctttaaagattgagtttttttcatgcaaaaatctagacttcttccgaaaaagaacactgtctggcaaggccggggatagtagagcagagatggagagagatacagatttcacagtggcagcaaacagccagaaccaagtcagctccaggtgggtgtggctgtcagggcggccatggtccccagcgggccactacgctcaccccggtcagccgcctggccctggaagacgatttgagttcatcacctccacttcattgtactcatctcggcaacgggtcagttattcagtaaatcaccatttctcctaagagtcccacaggctgtgtctggggatcggtagggaatgtcatgcatctccgccaaggaaaggaaggttcccaatcactgcttagcaactggca

SEQ ID NO: 169745 - DNA, 431 bp, Homo Sapiens
ttatgtacgaatgcttgctgccctgatcacagggctcctgtatcttcagtaaatacctgctccctctttgtcacgggtgtgatgtgatgtcaccccacccactcagcccagcaccctcatatgccattcatcaccagaagtgtgtcctcggtgcagcctcaactgtgggaaaaataacgtttatatatcaacccaaatttgaagacactctgtattgggttcatagtttaaagctaccagagaacagacttctctgatcctgaaagcaattaaagcctagtggttgaactcactgggtagaagcctgggttttccagtttactaaatatatgcccctgggaaagttagtttctcagcttctatttctccacctgtaaatagggaatgacgacagtatctacctagttgggcttacgggtagatttaaattt

SEQ ID NO: 169746 - DNA, 127 bp, Homo Sapiens
gtgacattgttgggtcatagagttggtatatatttaactttacttaatccaggctttaattctcttctgggacaagatgcctaggagaaggccattccaggcatgtttggcagctgaggattgtcag

SEQ ID NO: 169747 - DNA, 428 bp, Homo Sapiens
tttgtaaaatttctgacaatatgtctgctgatagttgttactgtgttcctctgtatgtgtttgtatgtatgtgtttttaattttctttctgctggttaattttaagattttctctttacaatcgttttccagaaatttggtaataatgtcctttaatatgtctatgtatgctgacagtgtgtttatcctacgtgggattcgtagagtttcatcgatctgtgggatatagttttaatgaaagtgtgaaagaaatattaaacattatttcttcaactgctattcccaatttgttctttatgagactctatcccatgtatattagccctcttgatattgaaccacaggtcactaaagcttcattcatttttttggtcaatcttttattccactctgtacttcattttggataactattaagtgtttggatt

SEQ ID NO: 169748 - DNA, 177 bp, Homo Sapiens
cggaccctggttgtcatgagtattgatcattaaaattgtactggcacccagctgtgctcactcataactaactaactaactgtctatggctccagctacactataacaacagcaaagctaaggagctgcagcactttatagcctgcaaagcctgaaataatttactatcaatcatca

SEQ ID NO: 169749 - DNA, 225 bp, Homo Sapiens
cgattatcgatcactgtactcaagaaaatgtctacttctatggtctctgtgttactctgccaggcaccattgttaatccaagtagctctgccaagaacagtagctataagggagaagagattgtgcttagtggacagcattcttcaaacatggcatcttttcaacttttttttgtaggctattatttttcagagcatctttaggttcacagcaaaattgagtgaa

SEQ ID NO: 169750 - DNA, 614 bp, Homo Sapiens
gaggagccccgcgcagctccatcccttcaaagatgttgtactctcccgcagactggtggttcttggcagagacgatcttcacagcatctggatcccagatgacgaggtcgctgtcagaacccacagatattcttcccttgcggggatacaggttgaagatcttggcagcgtctgtgcttgtcacagccacgaactggttttcgtccattttccctgtggccacagccttgtcccagatgacagacatccgctcctccacaccattggtgccctcaggaatggctgtgaagttgtccttcccaattgctttctgggcagtgctgaaggtgcagtgggcactcccagatagctgcagatccccgctggccagcaaggagttgatgtagtccggagtagttgggtcagggctcaggggtggggatgtcacaaatgcagccgccttggcccagttcttgctccaataatgggttccatctatgccgaggctggcagtgatgggctcaccaaagactacatttccttttttcctggcttgtgatatcaggtgagctgccctcttgctcatgtccgagtacacgtggcagtcttttatcctctggagtcggctatggcca

SEQ ID NO: 169751 - DNA, 863 bp, Homo Sapiens
  misc_feature (697)..(739): n is a, c, g, or t
ggcttttgggtcggggtctaaggtgatcagatgcagaagcattacacggtgacctggtttctttactcagcccctggggtagatcccagccccccatgtaggtcccttggctggaaaaggaagagggagtggtcagatgaatctgaggaggagccggagaaggagctcgcccctgagcctgaggagacctgggtagtggagatgctgtgtgggctcaagatgaagctgaagcaacagcgagtgtcacccatcctccctgagcaccacaaggacttcaacagtcagcttggtaggaggacaccccagagagcacctccaatcctgttctttctaaaaagaggaaacttccaataaccacacttttccaatgggaaagatacgcccccagtggctgagctctccacgcaggaggactcagaagtgatcactcatgagggacacttaggagacgatagaagactaggctagacttgataaaggttggcgcttgggatgagaaagcttggtttcgggccaggtgcagtggctcgtgcctgagatgctagcacgttgggaggctgacgcaagaggattgcttgtactcagcactttgagtctccagacagctatgagtgcaccactgcgctcccgcctgggtgaccgagcctaaccctgtgtccaaagaaacacgaagcccatggtctgctagctcatgccnnnnnnnnnnnnnnnnnnnnnnnnnnnnnnnnnnnnnnnnnnnagagagtcagttgttcgagacctaccagacctatatcgcgcaacctgatttatactgaaccatacataaaatccccccgcatgcctgtgtatcccaggcactcaggagcctacacgcgatcatc

SEQ ID NO: 169752 - DNA, 556 bp, Homo Sapiens
gagagacttgctccctacgagctgaacagggaggagtctgtgcagtttctgacacttgttgttgaacatggctaaatacaatgggtatcgctgagactaagttgtagaaattaacaaatgtgctgcttggttaaaatggctacactcatctgactcattctttattctattttagttggtttgtatcttgcctaaggtgcgtagtccaactcttggtattaccctcctaatagtcatactagtagtcatactccctggtgtagtgtattctctaaaagctttaaatgtctgcatgcagccagccatcaaatagtgaatggtctctctttggctggaattacaaaactcagagaaatgtgtcatcaggagaacatcataacccatgaaggataaaagccccaaatggtggtaactgataatagcactaatgctttaagatttggtcacactctcacctaggtgagcgcattgagccagtggtgctaaatgctacatactccaactgaaatgttaaggaagaagatagatccaattaaaaaaaattaaaaccaattta

SEQ ID NO: 169753 - DNA, 248 bp, Homo Sapiens
caaaaactcctatgggcaagtagctaacgcagtagtagagtcttcaataaatccaagaatatacacctactgacaatttgaatacagatagcccccgactatccctaattaatcattacggcggtcctaagaaaccaacaaaatagaaccgcacgtcctaatatcaattattccatgctaatgtaataccgagcaaaggcctgctttgaacactctaatattttacaaagtaaaagtcctggatcccc

SEQ ID NO: 169754 - DNA, 1200 bp, Homo Sapiens
aagatttcctatagtgagaaatctgccggcagcaaagatggcccaagagaaatccttcggtgacatttcggaacgactgcagctaagggaaccactgcactgtcacaactttgcctggtacctgcgcaatgtctacccagagatgtttgttcctgaccttacccccaccttctatggtgccatcaagaacctcggcaccaaccaatgcctggatgtgggtgagaacaaccgcggggggaagcccctcatcatgtactcctgccacggccttggcggcaaccagtactttgagtacacaactcagagggaccttcgccacaacatcgcaaagcagctgtgtctacatgtcagcaagggtgctctgggccttgggagctgtcacttcactggcaagaatagccaggtccccaaggacgaggaatgggaattggcccaggatcagctcatcaggaactcaggatctggtacctgcctgacatcccaggacaaaaagccagccatggccccctgcaatcccagtgacccccatcagttgtggctctttgtctaggacccagatcatccccagagagagcccccacaagctcctcaggaaacaggattgctgatgtctgggaacctgatcaccagcttctctggaggccgtaaagatggatttctaaacccactgggtggcaaggcaggaccttcctaatccttgcaacaacattgggcccattttctttccttcacaccgatggaagagaccattaggacatatatttagcctagcgttttcctgttctagaaatagaggctcccaaagtagggaaggcagctgggggagggttcagggcagcaatgctgaggtcaagaaaagtacttcaagctgggcacagtggctcatgcctgaaatcctagcactttgggaagacaatgtgggagaatggcttgagcccaggagttcaagaccggcctgagccacatagtgaggatcccatctttacgcccaccctccccccggcaaaaaaaagctgggtatggtggcttatgcctgtagtcgcagctactcagaaggctgaggtgggaggattgcttgttccccggaggttgaagctacagtgagccttgattgtgtcactcgcactccagcctgggctacagctaagactctgtctctaaacaaaactaaaaagaagaagaaaagtacttctacagcca

SEQ ID NO: 169755 - DNA, 370 bp, Homo Sapiens
ctcacctccagcagatctgcaagtgtggggtgaagaaaggtgaatctgtgtgaggatggggttagctgcagctgtggtgatgggctgagcgggggcggggggtgctggaggctgagggtgtagctggcgattagctaaggagggcgatggaagaggttgccagttcggagccgcctcaagagctccagccacagcaactagccgctcccgatgggtgcccttcatgaggctgctgttctccagggcacggcgggacaagtagggcagcacctccatcacggggccatagggcacgtacttgtacacggggtagccggcctggcccagcgggaagctgatctggtcacacatgcctcttgccgccgttcct

SEQ ID NO: 169756 - DNA, 306 bp, Homo Sapiens
acaaatgacagaactgagacttctgactccaaatcttacgctcccccgccacacctctttccctttctctttcacaccaatggactctatgggtgaccttggcataggttcttctaagaactggctcttaacaaaaacttctggccattatctgactgaatgtcacaaacaagtgcctgtaagaacttgcttagagccttcttcctaaacctgtacaccagctcttgccttgtgaatttattcaccacataacacatgttcccaggggcccaggcaaagtctccaagtacccagtcccctttcttc

SEQ ID NO: 169757 - DNA, 325 bp, Homo Sapiens
  misc_feature (257)..(257): n is a, c, g, or t
  misc_feature (279)..(279): n is a, c, g, or t
  misc_feature (284)..(284): n is a, c, g, or t
gctgcccatcatgacctccatcctgggggcctatgtcatcgccagcggcttcttcagcgttttcggcatgtgtgtggacacgctcttcctctgcttcctggaagacctggagcggaacaacggctccctggaccggccctactacatgtccaagagccttctaaagatttctgggcaagaagaacgaggcgcccccggacaacaagaagaggaagaagtgacagctccggccctgatccaggactgcaccccacccncaccgtccagccatccaacctnacttngccttacaggtctccattttgtggtaaaaaaaggttttagg

SEQ ID NO: 169758 - DNA, 851 bp, Homo Sapiens
gtccgtggaacacattgctgaagccaccaccactgatatagtcaacaatttcatttgtgatgaggaaaggttcctggaaggaagtgcctcccactgtggtgacataggggctggaggcagggaaggtagggcggaactggtgtcttccagagacagaccaacaccaggccccactgtcacctgaggcgaagagcagggtgagaccccgagcggcagccttcatgagctcagtgttgacccgctggatgtaggcgctgctgagggagtcctcatcatctccatagctcacagtatgcacatgtggcagggctgactcattactgagcagcatgagccactgcaggaagggctcctgtccctcatgtcggccagggctactgtagacccaggtggagatgttggcaccagcactcatcaggtactgcacatctagactggcctcaatcccggcccggccccggccctgttgtccaaccacacgggctacagatgcctgatgtgcaaagatgccaccgaaaaggcgcatgaactgagccagctctgagtcatgaaaatactgctccaggaactgggcacaggcttggatgtaattgctggtgccagagcccacgtcttgtgaggtcaagttgtatcgcttacggatcacagagggggttacccccagatgcaggcctacagtccctgtcacctgcggctcaggacgttgcctcagggatgatgtagggggaaaacggtgcagtccccccacaaagtccacatggggggccaaagcctgtggaagctggtagggatgtggggaccttacaacatgggtttccgtaggtcctcccacatagtgatgaaactcagcc

SEQ ID NO: 169759 - DNA, 801 bp, Homo Sapiens
  misc_feature (764)..(764): n is a, c, g, or t
  misc_feature (784)..(784): n is a, c, g, or t
ttcaaattcacttattctagtagtttgtagattcctttgaattttttatgtctgtaatcatagaagcattctatgcttgtgcagataaagcatttttcagtgttaaaagttttattgacttctttttctggagtttccatcttctcattttgtcttctccttttggtatcaagtgctaagaatagcaccacttggaaatatgacaggactgcagccagtgtggataattatcattttcaactacagatctctctcagccttgtctgcttatcacactggcttgatcgcgcccatgaagatccgcacagaggcccctgggaaccttcgtttatacagtgggagccccactcgcagcgagaaagagcaggtctccatcagctccttctactagcaaggagcggaaatcaagacgatggaaaagtaagcgtgagggatcagactctggcaatcgacagatcaaggctgctgggaaagtcatcatccaggatatcgcttgcctcctgcctgttcacaaatcgctgggagagctgtacatattgaatatgaatgatattcaggaaacatgtcagaagaatgccgcctctgccttgctcgttggaagaaaggatcttgtccaggtttggtcgctggctacggtagctacagatctttgccttggtccgaaatctgacccagatttggaaacaccctgggctcgacatccatttgggcggcagctgctggagtccctgttggctcactattgccggcttccggatgttcanacactggcgatgctctgtancgtgtttgaagcccagt

SEQ ID NO: 169760 - DNA, 314 bp, Homo Sapiens
gatcgggtagggatacccgctgaacttaagcatatcaataagcggaggaaaagaaaccaacagggattgccctagtaacggcgagtgaagcggcaacagctcaaatttgaaatctggcgcaagcccgagttgtaatttgtagaggatgcttctaggcagcggccggtctaagtttcttggaacaggacgtcatagagggtgagaatcccgtatgtgaccggttggcaccttgcacgtagctccttcgacgagtcgagttgtttgggaatgcagctctaaatgggaggtaaatttcttctaaagctaaataccgg

SEQ ID NO: 169761 - DNA, 708 bp, Homo Sapiens
tctccattcttaccaagagcaccatcatttcctttaagaccggggaagcccatgacaccaggctgacctcggggaccagatggcccaggaggacctggtcgaccactttctccttgacttccgggaggcctggttcccatcacttcctggtcctcctggacttccgggcatgcccctcattcctggacctccagggacgccatctctgccaggttctccagcagctcctctgggccctgcagggcctggagcaccacgctctccagcaggaaccttttcctcctgggatgccatttggtccagcaggtcctcggaacccaggggcacccctgtctcctgcagctcctggaagcccatttgcaccaggttctccaggtgatccatccttgccatcttcgcctttagctcctggaacacctggaataccagcctcaccgcgttcaccacgtggtccgggctctcctttggcaccattcttaccaggctcacctgcaccacctcgcagtccaggagcaccattagcaccggctggtcctggaggaccccgggctcccatcagtccaggagctccaggaatgccagcgggacccatttcgcactttaccaccaggactaccattaatcccaggagggccaggaggaccttgagcaccagcgtgtccctgaggtccaggttctactctttgtgcagggagcactaagcgaggt

SEQ ID NO: 169762 - DNA, 590 bp, Homo Sapiens
  misc_feature (79)..(79): n is a, c, g, or t
  misc_feature (218)..(218): n is a, c, g, or t
  misc_feature (284)..(284): n is a, c, g, or t
  misc_feature (422)..(422): n is a, c, g, or t
  misc_feature (462)..(462): n is a, c, g, or t
  misc_feature (516)..(516): n is a, c, g, or t
aggaaagggcaagaggaaagtgggagggcagggggtcccggcagcacccccaggggggcagcacattgctcctggcccnggcccacctgtggccgcgccaacccgcttggactgagtctgacctggcaggaactgcatgacagaaaccacagtaacaagtggcaaactctgaggacaggccacccatcaccaccaacaccactagtggtgttggtggngatgcctatgtgagtgatctcccaataaaaaccctggacatctaggcccaggccagcttccctggnagacaacatttcacacaagtgttgcacaattcattgctcaagtaattatttcccagtatgactccatgactacactaggaaaggactcttggaaacttatgactgttattcgccaggttttgctacatgctccttttncccttcctgattttgttttgtgccatttcctttgctgtcnccaattttctggtggctttcaaataaacttttcaactctcatataataattttntcactttaacattccatttttaaatataggtttcattatatgctaaaaatcttcataccaccaacaccactggg

SEQ ID NO: 169763 - DNA, 238 bp, Homo Sapiens
  misc_feature (89)..(89): n is a, c, g, or t
  misc_feature (107)..(107): n is a, c, g, or t
tccccagtggtgttggtggtaatgttatgttgctgttgttatgctggtcggtgctgctccatgttctccaggtgttcttcccttttatncgtcacagttaccccggnacacctgacaactggacatctgcgcctgggggtcttcagactaaacacacctaaaccctccaccaaacccctctgcttccgcctccccgtgtctgtgagcgcctccactgcccatcaccaccaacaccact

SEQ ID NO: 169764 - DNA, 361 bp, Homo Sapiens
gcagtgtgactgtgctctggatgaggtagcccgtctggatggacacagctcggaccaactctttccgaagtgggtatttgggatgtctgactgagtagttcataatgatgtaatcagcacccatggggagccaggagcggagggtgatgacatcacggttcttcaggggcttgggacacctccaggagtaatagcccacgtcagcgttgactgtcaagcgggcgatgtcaaaagtctcaatgacgttgctgtcccatttcttgcggtactcaatgtcgtgtaggacgtcgtagagtgtctcggatggcacatcacagcactccatccggcacttgatcttgtgcagcgtccgatccatctc

SEQ ID NO: 169765 - DNA, 767 bp, Homo Sapiens
  misc_feature (82)..(82): n is a, c, g, or t
gccccccactgggggcccaggccaagctgtaacaggtgtatgcccagggtgagacagcacttgggcacagccagaagaggtncgggtagacaaggaggtagggtccagggtcccagataagaatgcagctctggcaggccacagccaagacagaggcactaaggggcttccaggccagagacgccacatttcgctgcagccggtgcttcagggaggggactatggtgcaatttgtgacttgggcaaattcagcgatcagatcttcgctcctgagagacagatgggggaacagggacccatggagggaagaggcccatcgacagagtgccagggcccagccggatgccgtcttcacccactcaaacacctcttcttctgagtttgcaatttcatttagcaccccaaaaaggcccacatcacgccaaatgttgatgcatctcttccacacttgctcccggtgatggatgaaggcagttcttgtgccatggtccagccttccaggggtctttaggggatcctttgtcaagttgtaggacaggaagattgatccactggccccggaagtcggggggcgggctctcatagctactgcccgtcaccagctcgttattgtgctcatatagggtgacttgaccccgaggcggtggaggagggaacaaccccagagagcacatcttgccggttcgcaggacgtctgcagtcggcaaactcctggccggaacggcacagaccgcactcccgcaactcggttcccgggctagattcgt

SEQ ID NO: 169766 - DNA, 930 bp, Homo Sapiens
tggggaacacaggtcttccggtgaggacattccataccccggatagcaccaatccacgggtgaagctcgagaccacgccgcctcccaactgggggcccaaggccaagctggtaacaggtgtatgcccagggtgagacagcacttgggcacagccagaagaggttcgggtagacaaggaggtagggtccagggtccagataagaatgcagctctggcaggccacagccaagacagaggcactaagggggcttccaggccagagacgccacatttcgctgcagccggtgcttcagggaggggactatggtgctgctggcattatacacacggactgagtcatctagcagggccactgcaaacttgttggtgtgggggtgccatgcaaagacacgcaagcagcagctggaccaatttgtgacttgggcaaattcagcgatcagatcttcgctcctgagagacagatgggggaacagggacccatggagggaagaggcccatcgacagagtgccagggcccagccggatgccgtcttcacccactcaaacacctcttcttctgagtttgcaatttcatttagcaccccaaaaggcccacatcacgccaaatgttgatgcatctcttccacacttgctcccggtgatggatgaaggcagttcttgtgccatggtccagccttccaggggtctttaggggatcctttgtcagttgtaggacaggaagattgatccactggccccggaagtcggggggcgggctctcatagctactgcccgtcaccagctcgttattgtgctcatatagggtgacttgaccccgaggcggtggaggagggaacaaccccagagagcacatcttgccggttcgcaggacgtctgcagtcggcaaactcctggccggaacggcacagaccgcaccggacgcgtggtcga

SEQ ID NO: 169767 - DNA, 652 bp, Homo Sapiens
ttgcagcatagaaggagtctttacaaggatggaggcaggggatgcgggggcaggtccagagcaagtagaatgggccatcattagaatgagcaaaactcctgggaatcttgagtcatcagctggcgatggggagttaatgcttggtgtggatgacaggtgtggggatgcggatatcctggcctctctccagacgccgttcacaatcaatcaaatagtttacaccatcgatgaccagttgcaccagctccacctctgatttgcctagtcggtccaaattagaaatatcaaagacaccgcctgtagcagcagtgtccacacctccagtaccaggtttttggagtcttaggttctccaggattcttggggaacaggcatctttgcttacgagggcagtttgatgtgtaaatctgccccgagtccagtgcgcaggttagatgggcaggtcaagatgtattccgaagggttattcgaaatgaataccaggccagttctttggaaaagtctcttcacctcttttggggcagcgcaggatcctttcaacaaatcgctcatggttacacacctcctcaatgggaataaccgtgtaaggaccggctcattcgaccaggatggggaagctcttcttagtgttgtggccaaattcacggagatc

SEQ ID NO: 169768 - DNA, 969 bp, Homo Sapiens
tagtcctgggagcccattccctgctgccagtccagcaaacggggacccacaggctttatcaaaacagaaaagtggtcatccaataaggttgctgctgttccagcctctgtcatctcactggagcctatagtaacgtccaggccaggtcacccttcaggccactcagcgcatccaccacaacacgttccacctctcgtcgctctgctcgagtgcaagctggaggcagactgagtcctcggatgcttcggccagttctgactctagaggacaatacatacctctcatcaaagtagccagaacggattttactggcatctagatccgtggtgtgcttcattgtccgggggtcatatccattgtgtcgctcttggatcacagggtcaaacaggtcagcaaatacctcataggtctcctcatctccagccaccatgcccacagtcttgatgaaggggtggccagggttgtccacgccagtctggatacactgatctagcgtccaaccagtgggtgtggtcttgtcgcagagccgtgcatagactgctggggtcaggtgactggccatgcagttgttgtgctttcggaggtctgggtactcagcgctcgggggatacagcctccgtcgttcactggcagctcgtacaggttccggtcggagcagaaacccagcggctagagaccccgctccggccaaagccaggagcctgagtcccgggcgggcggacagcagacgggagaagggaccagccatggcttgaggtctggctacgggatcctggagtaggcgctggcgcaagataagatccggaacagggagggaggatgcaaccggatagaccgagggccggagctaggtccgaggctgcagccgaaatgggggtcggattggaggctggagccggaatgggagccggtgccaatcagactgcaggagaggcgcaatgagctagtggcaggcgggcgggcggaccc

SEQ ID NO: 169769 - DNA, 799 bp, Homo Sapiens
cccagctccacctctgatttgcctagtcggtccaattagaaatatcaaagacaccgcctgtagcagcaagggtccactcctccagtaccacgtttttggagtcttaaggttctccaggatctttgggaagcggctatcgtttgcttagcaggggcagtttgatgtgcactcctgcccgaagtccagtgcccaggttagatggacaggtcaagatgtatcccaaacgctcattccacatgaactcccagccacgttcttggataagtctctccacctctttgaggcctcggcagaatctttcgacactctcttcatgttaccacccttctccatggagatcacccgtgtatgatcctcctcattcacccagatcaggaagctcttctcattgttgtgccaaattccacgagcatctggccagtctcgagccattcctgctgcagtcagcaacggggacacaggcttatcaaacagaaagtggtcatcaataagctgctgctgttcagcctctgtcatctcactgagcctatagtaacgtccagccaggtcacccttcaggccactcagtgcatccaccacaacacgttccacctctcgtcgctctgctcgaagtgcaagctggaggcagaactgagtccttcggatgcttcggccagttctgaactctagaaggacaatacattacctctcatcaaagtagccagaaacggatttttactggcatctagaatcccgtggtgtgcttcattgtccgggggtcatatccattgtgtcgctcttggatcacagggtcaaacta

SEQ ID NO: 169770 - DNA, 543 bp, Homo Sapiens
gacttgtcccagagtagccagatgtaggctttaggtaagttgatgcaagctgagcatctctaatctgagggggaatgtctcacatggtgtccaagaaatggtgacacatctcacagagggtctaggctcaggagggctagagtatgagacgttccccctcaccagtgaacttaaaaatgtggccaaaaatttttgtaaaaaatggctaccctgtagttctttaactggacctatttagacaacaccttacacactggagaaggatgatactatgtgaatctagtaagtctacaagacaatacttctctcttttggctgtcttcttcctctccagggtgatgacaactccgtgagggtggagattatatgtctctcatcatttaagcaacaaggaaataaattagtggcagagtaaggggtgactcaatgagtacatccaattgttgacatagttttgggtgggagaaattttgctattatatcaacttaacttcttaaaatagtctagtgggattaacttggttttatttcacagagacctcc

SEQ ID NO: 169771 - DNA, 712 bp, Homo Sapiens
  misc_feature (24)..(24): n is a, c, g, or t
  misc_feature (84)..(84): n is a, c, g, or t
  misc_feature (248)..(273): n is a, c, g, or t
attttgaattttgtgctcattggnaaattgatatgctaatgcctcccccaccccccgccagaacttttctttttatactttgtncttgtttttactggggctaggctgggtcatgcgtgtcgtgcctttagggcagcattttaaacctttgtccaaaattgcaaatgggacatgtacattcttctgctccatcctacttaaacacctatcagctatttttatctttaaccttttctgtatgtttgaannnnnnnnnnnnnnnnnnnnnnnnnnaaagagcgagagaatgatgtcatctaaagttttttgaagaattatttggttttcattgcattaaaattctatcactcccagctttgttttcatttaaaaaaatatacaaagagctttgtaaatacaacacattttatttctcccccttcttttaatgtacagcttttttgccacttatatatacttaaaatattcccatgaattatgtccagttcttcttggaaaaaaatttggttttgaatgaacctgcaaagcatcctgcagcgtgagcagctcctccacctggagctccgaagcatcttctcaggccaaagcggcattacccgtgaatctgtcttctccgccacagcatggtttgaggcgcagtctgttaatatagctgggccatgtcagtgactgttgtgtttgtggggtcaggtggggggcatggtatttgcaa

SEQ ID NO: 169772 - DNA, 1106 bp, Homo Sapiens
  misc_feature (729)..(729): n is a, c, g, or t
catccggacctcctcctctaccaccctttatcgaaaggattcttcttctcagacaatgcctgtggaagacaagtcagaccccccagaggggtctgaggaagccgcagagccccggatggacacaccagaagaccaagatttaccgccctgcccagaggacatcgccaaggaaaaacgcactccagcacctgagcctgagccttgtgaggcgtccgagctgccagcaaagagattgaggagctcagaagagcccacagagaaggaacctccagggcagttacaggtgaaggcccagccgcaggcccggatgacagtaccgaaacagacacagacaccagacctgctgcctgaggccctggaagcccaagtgctgccacgattccagccacgggtcctgcaggtccaggcccaggtgcagtcacagactcagccgcggataccatccacagacacccaggtgcagccaaagctgcagaagcaggcgcaaacacagacctctccagagcacttagtgctgcaacagaagcaggtgcagccacagctgcagcaggaggcagtagccacagaagcaggtgcagccacaggtacagccactaggcacagttcacagggcccaaggcaggtgcagctgcagcaggaggcagagccgcttgaagcaggtgtcagccacaggtgcagccccaggctacatttcacagcccccaaggcaggtgcagctgcagctgcagnaagcaggtccagacacagacatatccacaggtccacacatcagggcacagccaagcgtccagccacaggagcatcctccagctgcaggtgtcagtacagccacctagagcagacccatgagtcagccttcatagccagccgcaggtgtcgttgctggctccagagcaaacaccagttgtggttcatgtctgcgggctggagatgccacctgatgcagtagaagctggtggaggcatggaaaagaccttgccagagcctgtgggcacccaagtcagcatggaagagattcagaatgagtcggcctgtggcctagatgtgggagaatgtgaaaacagagcgagagagatgccaggggtatggggcgccgggggctccct

SEQ ID NO: 169773 - DNA, 614 bp, Homo Sapiens
tcatcttgggcctgtgttatcctcggggcctatgagctccgtaccagccactcaaaagtgtctgaacagaaccgctccgtgactggtagctgggtctgaggattcaggattgtggcgttattcaaagaggagactttgaaattccccgatggctggaatgtggagcccaggtgcctctggtggagggtcatctgcttttccagactgtggttgtgaaccggctccttctccaagaaaggttgcaagctgagaacatccagaggtgagactcagacacattgaaagtgactgcatttagggaggtttaacgagttcttactgatcattccacttgttactggttaagataatttgcccacgggtttgtttccaagtcctcttctaggaccaggctcctggtatttcaggggctggttggctgcacagacagcccctcttctgctgtccttgaggacagacaccaaaccagaggtggaggaagaacggtaggaaggctgatggcaaaagcggctgtgtgtcgaggttattttaactttttactactttttgttactgtttctgcaaatgataacacaggcccaagatgaggggatcctctagagcgaccgcaggca

SEQ ID NO: 169774 - DNA, 433 bp, Homo Sapiens
tcatcttgggcctgtgttatcttcataaagagaaatagcaggcaaaagagaaaggagtgcacaacttgcagtcagacatactggttctaattcttacttactatacgcttgatatttgcaaatggtatcaactgttttgtaatctgtaaaatgggaataagtttagtaccaaaatcatgccatacctggcacataataagccactcaatagttgctgtcaggtttttaattatcactaaaaacttataatataaattcaaatgaaaacatcataccaagattctcatccagtgcaggaaattaacttactctgtgcaaattttgcaggattgtcattaacatcagtaagagtcactgtaagtgtcgtggtcccagacaggccaaaagagtgtccacccatatctttggcttggataacacaggcccaagatga

SEQ ID NO: 169775 - DNA, 500 bp, Homo Sapiens
agcgctcgactttaggaccctatctgggcctggttatccaagaccccttgaacttccacctcagtttacccgcgtgctgccatcaccgcctccactgtacaacagtgtcccagttaggatgaagttcagctgcgtgtgtccaaagagaacagaagaagaaaacagtgacctaaaataagagagggctttatttctctcttacataaaagaagtccaaagggaggccacccaggctaggtggggtggctttatgatgtcaggatcctgagctaaatctggcttgctactagggtctcttcaatatccttctcccatctcctcatagaccaagagagctattcaagctccacccatcacctctgcgttcctgcagatggaagggaaaggaaggagagagggagggcttgcctctgcctgttaaggacccctccccaaagctgccgtagccacttctaatgtacatcccattggctacgcctgagtcacatagccaaccaagc

SEQ ID NO: 169776 - DNA, 653 bp, Homo Sapiens
tcatcttgggcctgtgttatctgccatataacaaaagtgaagaaaatctaccctcttattctatgtgggatgtgaaaatctaacatatggaagacatttggggataattattaagtcacctaggttaaaatttgtgggcagtggtgcttaaatctagcacattatgaatactcaaattggataaccactaagtatactgaaattggtttattttataaaactttttattaaaagcttaattttttcatccagaattcctagtatcccaaattgtcctaggcagctatacccttctgatagtgatggtaaatctttgataagccgataaacaatgtggactttctagaggtatataacagtaatatttcacttccaattcccagctcttctcccatttctcctaccttctggaccaatgaggacaaacagaattgaagtttaattccactgcacaagtatcttctcaaatctgtgaaatctaccccttttacactataccattccactgctactagttcagctcttattgcctagattatacagccttttaactaatctcactgcttaataaacatgttttcttctagtctgtctgcttcactgcattctaaggtatctttcttaaaatggaactttgatttaaaaatcttccc

SEQ ID NO: 169777 - DNA, 635 bp, Homo Sapiens
ccagctttatgatgagaaacacagtccagaagttgaagctggagagccttccttgagaggaataccaaatcagttaaaccaggataaaccagctcttttgagacactgcaaaccttgcacagtgtgcatgcacacacccaagactgagtcagataatggaatgatgggactatctccagatgcatatcggttcctcacagaacaagacagacagctaagactacttcaggcacagattcagcgtttgttggaagcacagtctctgatgccctgttcccctaagacaactgctgttgaagacacagtgcaagctggaagacaaatggagttggtttctgtggaagcacagtcttcccctggcttgcacatgagaaaaggtgtaagcattgctgtgagcacaggtgctagcttgttttggaatgcagcaggtgaggatcaagagcctgactcttcaaatgaagcaaggatgataccaaaatttccagtgaggacatgaatttttctggcgatattaataatgaagtcacaaggcttccaggtagtgcatcttcattaaaagcagttgatattcccagttttgaagagagcaacattgctgtggaagaagaatttaaccagccactttctgtatccaa

SEQ ID NO: 169778 - DNA, 238 bp, Homo Sapiens
  misc_feature (11)..(11): n is a, c, g, or t
attcttgggcntgtgttatccccacagcaaggagaggcgtaaacccccttgcatcttagcctccagcttggctgcacttggacccatcttgaaagtcactcctggctcttgggaaggaaatgccacttttccatttctctatctcatcttctttacctttggcagacagacttatcttatgtccccattgaggacattttattatattgtattgtattgtatttttgagacagagtct

SEQ ID NO: 169779 - DNA, 848 bp, Homo Sapiens
accctcgagagaaagaagtagttctgcatcttctcctgaaatgaaagatggtttacccagaactccatcaaggagaagcaggtctgggtcttctccaggactcagagatgggtctgggactccctcgaggcacagcctgtctgggtcctctcctggaatgaaagatatacctagaacgccatctagagggagaagcgaatgtgattcttccccagaaccgaaagctttgcctcagactcctaggccgaggagtcgttctccatcatccccagagctcaacaacaagtgtcttaccccccagagagaaagaagcgggtcagaatcatcagttgatcagaaaactgtggctcggactcccctggggcagagaagtcgttcgggatcctctcaagaacttgatgtgaaacccagtgcatcccctcaggaaagaagtgagtcagactcttctccagattctaaagccaagacacgaaccccacttcagcagaggagtcggtctggatcatctccagaggttgacagcaaatctcgactatcccctcggcgcagtaggtctggttcctcccctgaagtgaaagataagccaagagcagcacccagggcacagagtggttctgattcctctcctgaacctaaagctccagcccctcgggcccttcccagacgaagcagatcaggttcatcaagcaaaggcagaggcccttctcctgaaggaagcagcagtaccgagtcctctcctgaacatccgcccaaatccagaactgctcgcagaggttccaggtcatcaccagagcccaagaccaagtctcgtacaccacctcgacgtcgcagctctcgatcatctccgg

SEQ ID NO: 169780 - DNA, 420 bp, Homo Sapiens
  misc_feature (40)..(40): n is a, c, g, or t
  misc_feature (48)..(48): n is a, c, g, or t
  misc_feature (67)..(67): n is a, c, g, or t
  misc_feature (82)..(82): n is a, c, g, or t
  misc_feature (84)..(84): n is a, c, g, or t
  misc_feature (368)..(368): n is a, c, g, or t
  misc_feature (402)..(402): n is a, c, g, or t
gaagaggatcgggacgggctcgtttggcaccgagtttttnagggcggngttatggcgatgtggccgngaaggtgctcaaggngncccagcccacagctgagcaggcccagctttcaagaatgagatgcaggtgctcaggaagacgcgacatgccaacatcttgctgtttatgggcttcatgacccggccgggatttgccatcatcacacagtggtgtgagggctccagcctctaccatcacctgcatgtggccgacacacgcttcgacatgggtccagctcatcgacgtggcccggcagactgcccagggcatggactacctccatgccaagaacatcatccaccgagatctcaagtctaacaacatnttcctacatgaggggctcacggtgaaagatcggngactttggctttggccca

SEQ ID NO: 169781 - DNA, 966 bp, Homo Sapiens
  misc_feature (26)..(26): n is a, c, g, or t
  misc_feature (679)..(679): n is a, c, g, or t
cggggggaacgggggaagatctaggnggcacaggcggtggtcatgcgagtcgggctttggattttggacagtgggaaaaaggcgggcgggggccctaagggggagccaatgcgaagggcgcaatgggcaaaagggccgtggaattaggaaggcagcaggtcaaaagccccctagatagtttctggagttggtttttaattctcactagggaggcagaataaattcgtgccctgaaacttctttgatagtcaaaggtaacttcacttcccttgttattgctacccagccatggggtcactctccccaaatctttgttttccagatccatctggaccagacccaaacatcatggaaggtgtcacttggcccttcttaaagtccatggcgtttctagaggcctaagggaggacactttcagaaaggagctgagtgtatggtgggtgtcctgaattcgttcatgtgaatacaggactcaggcttcccaccccactccaatgtgagtgctcgatacacaagcactctagctagctgccacgtacccaaggccacagagggaggggacagaaccaggtcttctggtctgctcactctctgccccattcccctaacagaaagtttgcttagagttgaaaagcctaagaaagcctcccacaatactagagaggccaacaaaaaaaangtcatgccccctttacttactcttttgctgctggttatgcatctcaaatctgacttccttagccttcacctccctccttggccctaagcattagaccatgtactctaagtagtggttaaagagggactgagcaaactgaacctcctctcgctcacttctctatccctgttctgttggttttggctcctttcttgattcactgccctctagcaccacccatcctggtagatggagtgcttaaccccaaccgtgccctatgtacagcctgaaccaccaaaccagacacc

SEQ ID NO: 169782 - DNA, 580 bp, Homo Sapiens
  misc_feature (462)..(462): n is a, c, g, or t
  misc_feature (491)..(491): n is a, c, g, or t
  misc_feature (515)..(515): n is a, c, g, or t
  misc_feature (523)..(523): n is a, c, g, or t
  misc_feature (550)..(550): n is a, c, g, or t
  misc_feature (558)..(558): n is a, c, g, or t
  misc_feature (569)..(569): n is a, c, g, or t
gggtcgaccacgcgtcggctccagtcccggcaagcgcggcctggtgggaggccccatggacgccagcgtggaggaggagggtgtgcggcgtgcactggactttgccgtcggcgagtacaacaaagccagcaacgacatgtaccacagccgcgcgctgcaggtggtgcgcgcccgcaagcagatcgtagctggggtgaactacttcttggacgtggagctgggccgaaccacgtgtaccaagacccagcccaacttggacaactgccccttccatgaccagccacatctgaaaaggaaagcattctgctctttccagatctacgctgtgccttggcagggcacaatgaccttgtcgaaatccacctgtcagggacgcctaggggtctgttaccgggctggcctgttgccttattcaccttctttatggcacaccttccccaccccctgttatttcccaccctngggatttgttgggcccttgccttgggggnaaggtttttccccatgttgcctgnaacagggngaacagacagaggaagggcagcagggnggcttttntttgtttaagnaaggggttttg

SEQ ID NO: 169783 - DNA, 649 bp, Homo Sapiens
gccgttgaacccggcggcgtgttccagttgcgcaagccgcgcggcctggtggaggtccccatgaacccaagcgtggaggagtagggtgtgcggcgtgcactggactcttgcgtcgggagtacaacaaagccagcaacgacatgtaccacagccgcgcgctgcaggtggtgcgcgcccgcaagcagatcgtagctggggtgaactacttcttggacgtggagctgggccgaaccacgtgtaccaagacccagcccaacttggacaactgccccttccatgaccagccacatctgaaaaggaaagcattctgctctttccagatctacgctgtgccttggcagggcacaatgaccttgtcgaaatccacctgtcaggacgcctaggggtctgtaccgggctggcctgtgcctatcacctcttatgcacacctcccaccccctgtattcccacccctggactggtggcccctgccttggggaaggtctccccatgtgcctgcaccaggagacagacagagaaggcagcaggcggcctttgttgctcagccagaggctctgccctccctccttccttcttgcttctcatagccccggtgtgcggtgcatacacccccacctcctgcaataaaatagtagcatcggcaaaaaaa

SEQ ID NO: 169784 - DNA, 824 bp, Homo Sapiens
cgacccacgcgtcgcgacccacgcgtcgcccacgcgtccgtgaggttgaggaaggaagaccctccatcctctggtattaacgccttaatgcccctgtcttttactgtaagttacttaagatcatttttggaagcaggcgtggtagagtcctgtaaatgaatgctctgggctagatacagcttggagaacctgctggccttgttagacagcacttgggcctttgccagcagcaagaggtgaagcgaagccactcttacctctcccttcccctcccacctgccccctgcgtaggcacccagacttggagagacccgtctgctgttagtacttccatcctcttccttcccaaagagcagatcccaaggcatttactccttggtctgtctcgctttatctgtcgcccctcccagcgctgagagcctcccctggctgtcagcagcactgtgtccaggctcttgtctgaacaccgcagcccctccttcgctccttccagagctcagcatgtcacagcaaggactgccgcattggtgatggagggccagctgaggggaagttgctggtgagtttccttttctccatttctagcatatggacacctggcctctgcttgagcacttaggtgacaggaacttccgcacctcctgaggccctggatgattctaattgttagaaattctaattgttagaaatccttccttataatgaatgaattctggctttcctataatttctacctattggggccttgttctgttctctggaactaaacagaacaaccatttacccctccttttcaaactagagaataaagatttggttttagg

SEQ ID NO: 169785 - DNA, 805 bp, Homo Sapiens
  misc_feature (748)..(748): n is a, c, g, or t
ggacttcgataggattggagaaggtttgtgttcccgacgccttggtagttggcataggctaaagaaaagggatctcagccccgaggaagggtcaccctcctagagatagctactaccccgtctcaggagaccctggtatttctagagcacgctttgctttcaccaaacccaaggaggtgacaggaggagcccccgcacaggacctaagaatgctgtgaccagaagatgggatcgcggaacagcagcagtgcaggatccgggtccggagacccctccgagggcttgccccgaagaggggctggcctgcgtcggagtgaggaagaggaagaagaggatgaagatgtggatctggcccaggtactggcctatctcctccgcagaggccaagtgaggttggtgcagggaggaggtgcagcaaatttacaattcattcaggccctcttggactcagaggaagagaatgacagagcttgggatggtcgtcttggggatacatacaacccacctgtggatgctacccctgacacccgggagctggaattcaatgagatcaagaaacaagtggaactggccacagggcagctggggcttaagcgggccgcccagaagcacagctttcctcgaatgttgcaccagagagaacggggcctctgccatcggggaagcttctcccttggagaacagtctcgagtgatatctccttcttgcccaatgatctgggcttcacttgatagctacttctcaaaangcttttcttgtggcatctacagcaaaagatggtcaaaatattcattggtctgctttg

SEQ ID NO: 169786 - DNA, 223 bp, Homo Sapiens
tgaactgttgactgcagctgctagtgacaagcctggggccagaactccttacgctggtgggtatctcagggaacacttccaaataatctgaacgagagctagatacaccctcccctccccaatatgcctgataaagtagtgtcagattatttcttgttgcttaggttgataggcctaaacttaacctattccattccccttcctgcctcttgccgccgtccct

SEQ ID NO: 169787 - DNA, 779 bp, Homo Sapiens
  misc_feature (645)..(645): n is a, c, g, or t
ggggttgcagctgtgggtgaggacggctctagctaggtgagcggctccggccagttcccttttagactatggcgacatacctggagttcatccagcagaatgaagaacgggatggtgtgcgttttagttggaacgtgtggccttccagccggctggaggctacaagaatggttgtacccctggcttgtctccttactcctttgaaagaacgtccagacctacctcctgtacaatatgaacctgtgctttgcagcaggccaacttgtaaagctgttctcaacccactttgtcaggttgattatcgagcaaaactttgggcctgtaatttctgttttcaaagaaatcagtttcctccagcttatggaggcatatctgaggtgaatcaacctgccgaattgatgccccagttttctacaattgagtacgtgatacagcgaggtgctcagtcccctctgatctttctctatgtggttgacacatgcctggaggaagatgaccttcaagcactcaaagagtccctgcagatgtccctgagtcttcttcctccagatgctctggtgggtctgatcacatttggaaggatggtgcaggttcatgagctaagctgtgaaggaatctccaaaagttatgtcttccgagggaccnaggatttaactgcaaagcaaatacagggatatgggttgggcctgaccaagcccagccatgccccatgcagcaaagcacggaccttgcaccaaccacagggagccacccctttttgctttcaaccaggattttcc

SEQ ID NO: 169788 - DNA, 537 bp, Homo Sapiens
gcctcctggcccgcagtgtccacaggttcatgttcattgtgcgcccgtcaactgcgccctgcgcgctgtaattgtcgaacacggtggggatgtactctttggggaaagcgttagttgtgtagcagatgagcaggcacgtcttgcccacagccccatcacccaccaccacgcacttgatgctctgcatcgtgggtgcagttgctgtagtggaggcagtgcctcctctctcttctggaaccctcttgccggcgttcctaggaacggcggcaagaggtaaaggaggagcggttgagggagcgggccgtttgcacgtggtccagcaggaagccaaactcatcagggtggctcgcattgcgcccgaggctggggccgcccaagaaagatgccgggggccttacacagcatggcagtgtcgttgatcacttggcatgtattggtggtctcaatgccgcggtacttggcacggacccggggctcctggaccgtcagcaggtgggtcccactcccagtgcctcttgccgccgttccctggggatc

SEQ ID NO: 169789 - DNA, 822 bp, Homo Sapiens
  misc_feature (752)..(753): n is a, c, g, or t
  misc_feature (772)..(773): n is a, c, g, or t
gggggagtccagaatgagaagaaggaaagcgggtccggttccttcaggacccgcttcagggggcaccgcggcggcttggggaccatttggagccccgtcctggggagaaaacagctcacgtctatggccctgactgcttaggcgggagctgcgtgcagctcagcttctccggggcatttttttctacacgctgggtgagctatgaacaggccaactgcaagggcgagcagtttgtgtttgagaagggcgagtacgcccactgggactggtggaccagcagccagaggacagactcagcagcctgaggcccatcaaagtggacagccaagagcacaagatcatcctctatgaaaaccccaacttcaccgggaagaagatggaaatcatagatgacgatgtacccagcttccacgcccatggctaccaggagaaggtgtcatctgtgtgggtgcggagtggcacgtgggttggctactagtaccctggctaccgtgggctgcagtacctgctggagaagggagactacaaggacagcagcgactttggggcccgtcaccctcaggtacagtccgtgcgctgcatccacgacatgcaggggcaccaatgtggtgcctttccacccctacaactagtgcccacccccaccatgccctccttccccaggacccagggtccggctgcccaaggaacccctccagaacctcccaggagaatgaaataaagcggtgactttccaaacttaaaaacccccnnaacccccccacatccacannaacccttggtccgggccgcccttcggcccctccgaagaagctttttcta

SEQ ID NO: 169790 - DNA, 454 bp, Homo Sapiens
agaagctgcgaattgctacctaaccctggggcccaaagacgggcacccacaaatgctgaaagaaggcaactgccccacagccagctgtgcccaggacaggccagccagggcagagctgccagcggaagagaggtctgaaaagcatgaagaggacagtgctgctagctaggatacccaggacactggtgaggatgaagaagggcagtgcagagtcatccagcaggttacaggagtggcagggggcagctgcttccaggttggcatcatagtctccatctgggaaggaatcattcacaccataggaagaattccatacatcttcgaagtccagctgacttgagttctcagttgagggggagagtccgccctgtgcagacagttccccatggcaccgtttggttcaggcccgcagacagaagggctgggacggctgtcaagcgcctgtgcttccaag

SEQ ID NO: 169791 - DNA, 194 bp, Homo Sapiens
aggaacggcggcaagaggggttatataacttgtcctgggtcaccaagctattaagcagcaaagctgtaatttgaactcatgtgtttatgtatgaagaaaaagggtttattttaaccttaggtttttaaaaaatttttattttcgttcttcattctttataatatctctactctttatccttcctccctacaagc

SEQ ID NO: 169792 - DNA, 367 bp, Homo Sapiens
gtatccagcccctccttgttccagccggtggtgtgacttcgttggttgaggtgtgtctccaacctacatcagaccatgaagttcaacccctccagggaagctcctgagtttcccctgcataattgaaaataggatatttctcagctattgaacagttactaatttatggggtggaaacagcattaagaatactgaatcaaatggaaaaacaaatgaatacaggaagataagtgttcgttcttttctgaaaaagagtatgtgtaccacaagagctggttttaattgggtgaattgtttttgtcctcattctgtacagaaatttgtatatatgatggttcttaggaacttgttttaatttttgtgggcc

SEQ ID NO: 169793 - DNA, 334 bp, Homo Sapiens
gaccaagcaccagcgcacacacacgggcgagcggccttacaagtgcctagtctgtgggaagggctttagcgaccgctccaacttcagcacgcaccagagggtgcacacaggcgagaagccctacccgtgccccgagtgtgggaagcgcttcagccagagctccagcctggtcatccaccgcaggacacacagcggggagcggccctatgcctgcacccagtgcgggaagcgcttcaacaacagctcgcacttcagcgcccaccgccggacgcacacaggtgagaagccctacacctgcacggcatgtggccggggcttccgccggggcaccaca

SEQ ID NO: 169794 - DNA, 497 bp, Homo Sapiens
agtatgcacaagggagaattatgctccagagaaatgaatggtcatatcctgtagcacaccttcctctcagatgcctcggtgccacaatattcactgaaccacctgcctttaaaagaatagagttttgtggcatcagctatgatgctgcttattcttttctgcatagtcagtcatcataaggttggtggctgactgtgcagaaaacagtaaacatggcaggccagagatgactatctttagaaggtaggcctgcaaggttgggcattgactggtaagctgttccctacagccacatgaaactttccctaaacaatcagggtagctcactgtgccttgcaatgtgtgcagtcaatttggtttatgctttccttctgggactgcatagcattggcacccactaggcagagggtgcctaccagcacccaacaaaaacctgagcattgaatctctaatgacttgcctgatggacatttcatatgtgttgtgctaaccacagg

SEQ ID NO: 169795 - DNA, 387 bp, Homo Sapiens
cgaatcgagctcggtaccaggtgcacatggaaagtctatgaggattagttcaatcccattggagaatccagaaagatttcatggatgagggaggatttgtactggattttgtttgagaaaaaaagactgcctagccaagttacatagaaggtacttggtaaatgctaaatggaatatcaagaaacaagtaagtactgaactagatcgtggctttgatgtgtaagctcaagatagagtcaacagtacatgtgcatgagtgtgcatgcccgtgtgcacgtgtaaatgagagcatgatctgaacacatgtgtgctggagggtgtgctacgtatgcgtgcatgtgtgtgtgcagatgatgtgcccgtgtacaaatatgtgtgtatcctgtg

SEQ ID NO: 169796 - DNA, 386 bp, Homo Sapiens
cgtatgcaacaacagtgccagatggaggacacagcccacatgacaggctcaggcaggaaggggccatcgaccatctagacatctgctcagcacagacaccttccactgaaaacagagcctcatctgaacacgctgggtgcagggtgacaattttctcccagtacattagggaagtgatacggtttagctgtgcccccacccaaatctcaacttgaattatatctcccagaattcccatgtgttgtgggagggacccgggggaggtcatcgaatcatggggaccagcctttcccgtgctattctcttgatagtgaataagtctcacgagacctgatgggtttatcagggttccacttttgcttcttcctcattttctcttgtgcata

SEQ ID NO: 169797 - DNA, 604 bp, Homo Sapiens
actacaagtgtgagccaccgagcctggcccaagccctccacattttcaatccaggagccttgagtctgggttgtgtcctgacacctccaagttctagggccgtcaggacacgggaggggtttggggacagaatgtccttcctctgtcctctcatcccagtcctgatggccgcttggtgagtgtctggtgccctggtggcctgccccagctctcttctggctttcttgagcaggaagcgagcagaggctccacaggcttacgctgctctcctgacagccacacgcgaccctcggtgcagagtgcagaggcggctctggttcctccagccacctcagtccctctttgggaggtgatgttcccattgttttttcaaggcctcacctttcactgtctgtcttaaaaatcccctctggagggctaaggccctccctatggtttttccttcccaccctctctaccttaaattcctttcccagcaacatcccccatccctgtggcccttggggaatgtccctcactggctgccccctggcccgaacccctgaatataaaatcccccatgccccggccgccatacaaaaaacacaagccacataaaaccacc

SEQ ID NO: 169798 - DNA, 1104 bp, Homo Sapiens
  misc_feature (621)..(629): n is a, c, g, or t
ggaatgctaattatatattgagaatatacattagaactcttcaaaatgggctcttctaatgaggtcactactgaacaaaattgttccctcttctgttaaatagaataggtttaaatgactagtcaaatgaattattttcttcttgttaaataaattaaatcttactttcttttaatgaccaaccttaggtaaaacaaaaatattgtaatcctagaaattatcctccagctttctcacctgaaaatctattgaagtgatccctggtcatcctaataatgggatgagggaagtttccagcagatttcaggctgttcttaaagtttttgttggtcattttctcaatagtacatgaaatcaagatgcttatgagcatggaaatgtatttaaagtttttgcttgtgtcctcctcagtcagaatagaaaagtaactgaaatactcttacctttctgtccttgataaaatagtaaagaaaaccaaacaaacccaggcctgatgggaaaaatgattcctttattctagcaacttactttctgttggtatgggaaatgttattaatttctattactaaagttcatatcacaaaatgatatttaataataaccttggggtaaatcatgaannnnnnnnnctacgtgtgagtataaaagacaaaagttgaacagcatggaatctcattgccaaattattagtgaatgtatagttcaggtattctttgagacacacagtatcattaatttccgaattgtatttcagtgttattttttgtttgtgaccactaagcttctgtcttaatacaaagctgttaccttctacagaatttaagtctgaagatgtaaagagagaacaggccttgtgtaacagaagatactcttttttatgctccttactgtgatcacagaaaaattaaaaatccaagtgctctctagatttgttgataaacattttatgcttgcatttaaacttgaaatgtatgagcagaatgagacaatcagttaaatcagaaatgagaagtattataatgtaaaggccttgttttgctgtagcaataaaatgaccaagtgcaatgacttgatttaataaaatcatattttatagtcgctgct

SEQ ID NO: 169799 - DNA, 320 bp, Homo Sapiens
  misc_feature (254)..(254): n is a, c, g, or t
  misc_feature (265)..(265): n is a, c, g, or t
  misc_feature (278)..(278): n is a, c, g, or t
  misc_feature (287)..(287): n is a, c, g, or t
  misc_feature (294)..(294): n is a, c, g, or t
  misc_feature (309)..(309): n is a, c, g, or t
agtggaaggccgcacaggcgcacccaaggctgggctctccacccaccatgcccaagactcccaggaggctggttgggcagggccatccccagttcacaccacagaccccacagacgctgagacaccccacctccagagaatggagctgggaggggcagcctgagcctgctcacccaccttccagcggtttccacactcgttggcagacaacaaaggtggtcatgggctcatcagagctgtcgggtctgcacctngtgtgtaggtncagttcttttttnctgcacttnccgcagntgcaacaggtctgtntggcgtgccgc

SEQ ID NO: 169800 - DNA, 400 bp, Homo Sapiens
  misc_feature (38)..(38): n is a, c, g, or t
ccagcatttccaacagcggctgggctaaacgcatctcncatgtatattgctccgcggggacccatatcacccattatcatttcctgtactctatttaccatataatttggcttaaagccctcttgctgtcgcctcagttcctcctgttctctgtgtcggatcatttcttcctcacgccgccgatgctcctcttcatgtcttagttgtatttgcttccgtttttgcaactcttggtttctgagttcttccaagcgtctgagttcttcttgacgcctcattagatcttgcctcattagcattaattggtgttcatgcctagctgcttccatttctgcctccagtttctctttggcttctctgatgtttctatcaacctgctcacgctgactgaaaatgctga

SEQ ID NO: 169801 - DNA, 478 bp, Homo Sapiens
caggatctcgggcagcgtgctatgatgcttcccggtccctaaaagcccaacttttcctcgaagctgggcacctgacctttagccaggtttcttaatcttttcatgcttttcataatagcaaattccactaggtctcttagaaactctaaaaccaaggcttaagcactttaaataaataagtcctcatgtcaccactgattttgaacttttagtttttaaaataaggctagctcaacttttgagtcattttgaaaagttggagatggcctggtttaaaggtaccagactagacatgggcttccttactatgtcccgacacagacagataggcatcactattcaagaggactggggcttgcaaccacagattagcatcttatttgccatttaggtcccagattgcttgagccccggagttcaagacccgcctgggcacatagcagacctcatcttaccaaaataaaaaaataattagcca

SEQ ID NO: 169802 - DNA, 330 bp, Homo Sapiens
tcagcatgtgcagcgtggtggtggccttcttggagcctccagacttctcaatctcctggatgcagaacttggcagtggaaatggcagcaggatgatgggcagggcccttttcaaacatgaattcactgccattgaggactgagcatactccatgctgggcagccttccggatcttgggcttgggatgcaccgtgaagctcaacagcccatggtacacatgaagggtcacggtgtagccccaggcctccaggtcttgctttcgcagaagggtgggcaggcaggaaaggacccatctgccgacacaggtggaggcgctgcgtgaaatgctga

SEQ ID NO: 169803 - DNA, 429 bp, Homo Sapiens
aaatccctccatgaaaagttaaaacaagataagcgctttagcaccttcctcagcctacttgaagctgcagacttgaaagagctcctgacacaacctggagactggacattatttgtgccaaccaatgatgcttttaagggaatgactagtgaagaaaaagaaattctgatacgggacaaaaatgctcttcaaaacatcattctttatcacctgacaccaggagttttcattggaaaaggatttgaacctggtgttactaacattttaaagaccacacaaggaagcaaaatctttctgaaagaagtaaatgatacacttctggtgaatgaattgaaatcaaaagaatctgacatcatgacaacaaatggtgtaattcatgttgtagataaactcctctatccagcagacacacctgctggaaatgctgac

SEQ ID NO: 169804 - DNA, 450 bp, Homo Sapiens
cgcacagtggagggatgaggatggatgggtcctaacaccctgattttgatgggatgtgttcatgtcctatctcctctcctggacacgaggaaggggtggggacaagaagagactcctgtgagatcagcagacctcgtgtttaaggagagaatgcctgcctgcaacactcatggagagggacacttcccggccccacctgctaaatacctccaaactctgggcaggcgcctgcattctcaacacaggacttcccttaacagtttccggatcagtgaccaccaccacgttcaggtttctgaatgcagacccaccacgagggatggattccacccgcccgccctgctgcagatacatgcggcacagcaggcacgtgcctggagagaacagctcctgagcacagcacccttgagcccttcatccgcttatccaatgggggatcctctagagtga

SEQ ID NO: 169805 - DNA, 1301 bp, Homo Sapiens
  misc_feature (608)..(623): n is a, c, g, or t
  misc_feature (1230)..(1255): n is a, c, g, or t
ggcatagcagatgctcgttcttgcctccttcaggcaccaatcaggagaagggttctgcctcccatcccctctacctgcagacagggtcggaggtgttagcgagcctttggtgctagaagcctgcggggtcatgtgctaagaggacagtctttctccgggagcccgctcactcattctgagttaggaaaagacacaagaccttccccacatcctgtctgcctgggttagggaggcctttgccttgttacctagaggcggagggactgaagccattgcgttccttccctgctagaaacacaggaagaagttgaggacggtctgccttccctcgtccctttacctggccagataactccagccgctgaatacagtgttaggactgggggctcctgagatgagagtttgagattcaggcaatgagaccacctctcatttcttccagcatgatcgcgccctgctcccgtgccaccgtagtccctggcagacaggcaccgctctgcccagggcagcctgccacttgcatagctttcggttggtttggtgttctgtttatttaataagtgggcaggttgcaagcgttgcacagaaattctgagattttactgccnnnnnnnnnnnnnnnnaagaaagttgtttgttggactccataagtgaatttcaagcagtgaggattttgtggtgcctgagatggccgagggcacagggagtgagctgtatgtgtgaggaatttggtgagcgagataaaagtccacggtgtcaacccctaaaacatgggtgaccgtacatttttatacatctccactctacggccttttacaggctttccgattttacaggcctttccaagtttccattctccttagagagagaactgtgcttccaaacagaaatcaggagtgaccacaaagcctgaaaaacactttgccacccagcaaagaactggcacaattggtttgggtctgcattgccatagggcccgagttaaaactgcaggccactctgccttgcagtggcctctgatttcattgtgggtgcttccacaggggggcccgagctgttctttcagctgctccaaagattgagacccaagtcatcatgaaaaaggccccagtacagtcttaatgcgaaaattccactaactaaaacgtcgagtgccaagaacacccttccagccgaggtttggaaacaagcctcccgtttcccgtgactccggggaaaaggtgcttgggnnnnnnnnnnnnnnnnnnnnnnnnnnattacttttggcccaaaccgaaacctttcttcccccccggcataca

SEQ ID NO: 169806 - DNA, 1434 bp, Homo Sapiens
  misc_feature (90)..(100): n is a, c, g, or t
  misc_feature (292)..(302): n is a, c, g, or t
  misc_feature (466)..(466): n is a, c, g, or t
  misc_feature (482)..(482): n is a, c, g, or t
  misc_feature (487)..(487): n is a, c, g, or t
  misc_feature (492)..(492): n is a, c, g, or t
ggcaggcacggcgatcaggggcggtgaagcgggagccgagtacttaccagttgggcattcctgcgggggaagtaggcaacgcgtacggannnnnnnnnnnaacgtcgcgcgggtcttgtgtgggtggtccgcctgtgaagcgtagggggggcggaggcgagctgagtggcaagccaatatgggaggtgggggaaatatgtcccgaaggtatgaggggacatggggaggggataagatagggcccaggttccattcccgtaccaatttttcgggcagccggcaaagggaggtnnnnnnnnnnnacgtgttatcaggtcgtataccagagagtggaggagaggtggagtgctttatagggccaaggagcccgcgctttcggaggggggtcttcggtcgccaagggtaccggcccgagtacacggtggcagctgggttagagggtggacggcttggcccactggacgtngaggatgagggtggtngtagncaaanccggacaccccggcaatggcacgcgcagcatcctcgcggcggtggaagctgatgaaggcgaagcccttggattggccagtggtctggtcctttagccaggtaaatgcgggagatggagccgaaaggccggaagagctcctgcaggtcggtctaacgcgtgtcctctgacaaagttggtgacacggaatggtggcgttgtcgtcggctctgcggttggcctgcatggactccccgcggcggctggccccgtcgcgcaggctcggcggcacatacttccctgtcttgttctgcgtggcctgcaccggctctagctctcccggcagcttctccttctcgccagtagacaggcccagctgctcggccagctccttctgcatgggccccagcgtatccttgtaggggcagcgggtggtccagtggtcgccctttgcagatgcggcaggacacgatcttctggcccttgagtttgttcatagggtcctcctcctcctggcagttcaggtcctctttgctggtgatgaacgtcatagagacatcgtcactgacagtgtggtggccacattgggtccgggggggtcaaactctgagttcccgaacttcttccagttcttcctccttgcgacagcctttgaagccttccgggtctcaatcctgaaggtgcggacaatcttgaacttcttgccatcctcatctatcttgtactcatgtcactgtctttatgtttccgttgatgacctccttgggaggcggcagtggagctcccggcagtagctctggctctgggctggtgtcacctgtggccagagggatccccttgaggagctttctggtgacacatttgtcgtcctccccctcctcctccacctggtcggcccaactgggcttcgaactcatactccttccgtaaggtactcagcggataactatctacccacgcgtccg

SEQ ID NO: 169807 - DNA, 1287 bp, Homo Sapiens
ggggctctctggccgggcttgggctgcgtggagaatactttttgcgatgcctactggagactttgattcgaagcccagttgggccgaccaggtggaggaggagggggaggacgacaaatgtgtcaccagcgagctcctcaaggggatccctctggccacaggtgacaccagcccagagccagagctactgccgggagctccactgccgcctcccaaggaggtcatcaacggaaacataaagacagtgacagagtacaagatagatgaggatggcaagaagttcaagattgtccgcaccttcaggattgagacccggaaggcttcaaaggctgtcgcaaggaggaagaactggaagaagttcgggaactcagagtttgacccccccggacccaatgtggccaccaccactgtcagtgacgatgtctctatgacgttcatcaccagcaaagaggacctgaactgccaggaggaggaggaccctatgaacaaactcaagggccagaagatcgtgtcctgccgcatctgcaagggcgaccactggaccacccgctgcccctacaaggatacgctggggcccatgcagaaggagctggccgagcagctgggcctgtctactggcgagaaggagaagctgccgggagagctagagccggtgcaggccacgcagaacaagacagggaagtatgtgccgcccgagcctgcgcgacggggccagccgccgcggggagtccatgcagcccaaccgcagagccgacgacaacgccacaatccgtgtcaccaacttgtcagaggacacgcgtgagaccgacctgcaggagctcttccggcctttcggctccatctcccgcatctacctggctaaggacaagaccactggccaatccaagggcttcgccttcatcagcttccaccgccgcgaggatgctgcgcgtgccattgccggggtgtccggctttggctacgaccacctcatcctcaacgtcgagtgggccaagccgtccaccaactaagccagctgccaccgtgtactcggtccgggacccttggcgacagaagacagcctccgagagcgcgggctccaaggggtcgacattaaaaaggccaggccttcccaaccttccttccaacagagaaacaacgaaaacacgcctcttatatccttctgtcacagtacacacgtgatgagacgaccgaccgccgcgctactgcagcccactctcacactgtcgccgcacgcacgcatcccgcccgcgcagtgggggccggcccctctagattgactgccgg

SEQ ID NO: 169808 - DNA, 729 bp, Homo Sapiens
  misc_feature (426)..(427): n is a, c, g, or t
  misc_feature (434)..(434): n is a, c, g, or t
ggggcgaccactggaccacccgctgcccctacaaggatacgctggggcccatgcagaaggagctggccgagcagctgggcctgtctactggcgagaaggagaagctgccgggagagctagagccggtgcaggccacgcagaacaagacagggaagtatgtgccgccgagcctgcgcgacggggccagccgccgcggggagtccatgcagcccaaccgcagagccgacgacaacgccaccatccgtgtcaccaacttgtcagaggacacgcgtgagaccgacctgcaggagctcttccggcctttcggctccatctcccgcatctacctggctaaggacaagaccactggccaatccaagggctttgccttcatcagcttccaccgccgcgaggatgctgcgcgtgcatttggccgggggtgtccgnnttttggntacaaccacctcatcctcaacgtcaagtgggccaagccgtccaccaactaagccagctggcactgtgtactcggtccgggacccttggcgacggaaacagcctccgagagcgcgggctcccagggcaataaaggcgctccactctggaaaaaacaggaaagggaagacgaccaaaaccgggctccgccgccccccgctccccaaaaaagctttcataaccacttggtttgggacccgcgggccacaataagaaaattgcaacggggccaacaccgtggtctcccacagaaaaatt

SEQ ID NO: 169809 - DNA, 830 bp, Homo Sapiens
  misc_feature (121)..(121): n is a, c, g, or t
cgggaagatggaacccgaaaggcccggaagagctccctgccaggtcggttctcaacgcgtgtcctctgacaaagttggtgacaccggatggtggcgttgtcgtcggctctgcggtttggcntgcatggactcccccgcggcggctggccccgtcgcgcaggctcggcggcacatacttccctgtcttgttctgcgtggccttgcaccggctctagctctcccggcagcttctccttctcgccagtagacaggcccagctgctcggccagctccttctgcatgggccccagcgtatccttgtaggggcagcgggtggtccagtggtcgcccttgcagatgcggcaggacacgatcttctggcccttgagtttgttcatagggtcctcctcctcctggcagttcaggtcctctttgctggtgatgaacgtcatagagacatcgtcactgacagtggtggtggccacattgggtccgggggggtcaaactctgagttcccgaacttcttccagttcttcctccttgcgacagcctttgaagccttccgggtctcaatcctgaaggtgcggacaatcttgaacttcttgccatcctcatctatcttgtactctgtcactgtctttatgtttccgttgatgacctccttgggaggcggcagtggagctcccggcagtagctctggctctgggctggtgtcacctgtggccagagggatccccattgaggagctcgctggtgacacatttgtcgtcctccccctcctcctccacctggtcggcccaactgggcttcgaatcaaagtctccagtaggcatcgcaaaaagtattctcc

SEQ ID NO: 169810 - DNA, 271 bp, Homo Sapiens
gaaataagcgctttcctaatttcaagcaattataaaagaactgctgttttcttccacactcacttgccagaggctcgaattggaagtcacatatatgtctatgaacggaagttaaaagggaaattcaacatgaagatgaaattctgaactttcctagataaattaacattgctgggtggaaatattcagatgctgcttaaatacttcggtatacactgggtaagattcatggaacttagaaaaaagcttatgactgctttacctaatatcg

SEQ ID NO: 169811 - DNA, 587 bp, Homo Sapiens
  misc_feature (234)..(234): n is a, c, g, or t
tatactatctcgacagtcacctgcatggtcactccatcggctaaggccagcctggacctcaccaaataaatcatagccacctctgaatatacctgccagatagagcgaatgggaattcttgtactcaggtactttatacggacctctcacatggctgcatgcccagaaatgtgatgatattgttgacagcctcttcaagggttatggtagaactgagggcaaaggtttcctctnttctcaaaggtatctcccacctcttcccaagcagcagcaaagttaggcttcagtactatctgaatatggtcagacacagtcacttcgagatcttccagcacatactcatcatcatacccatcctcatctggaaccccagtgttagggtcacagtcccggactgtaaacttcatggtgcagctaaaggagcctgcaaactgctgtagggtcatcatcaggcaaacgaacaagagtgtaacatattcctggttggttataaggaaggctgggggctgggatacaagacagcacttcataggactctgatggctccatctgcactgtcactaaacccgcagctggtcattgagagt

SEQ ID NO: 169812 - DNA, 137 bp, Homo Sapiens
gcggccgcctactactactatacggctgcgagaagacgacagaaggggaggatgaggcaccattccaggagaaagattccggcagcgatgaagatttcctaatggaagatgatgacgatagtgactatggcagttcg

SEQ ID NO: 169813 - DNA, 1040 bp, Homo Sapiens
  misc_feature (129)..(167): n is a, c, g, or t
  misc_feature (701)..(702): n is a, c, g, or t
  misc_feature (704)..(704): n is a, c, g, or t
  misc_feature (706)..(707): n is a, c, g, or t
gggatccattttgaagagacgggggagcggggggctcgtctgttccaggagccctgaaccaaagagcagcggagtttgagaagccagcagctcggggttcggcagcagcggtcccatcggctgaagttnnnnnnnnnnnnnnnnnnnnnnnnnnnnnnnnnnnnnnntcctggtctttggcttctcgactcggtcctgtttcgacagcgaacatgtcgcggcctgtcagaaataggaaggttgttgattactcacagtttcaggaatctgatgatgcagatgaagattatggaagagattcgggccctcccactaagaaaattcgatcatctccccgagaagctaaaaataagaggcgatctggaaagaattcacaggaagatagtgaggactcagaagacaaagatgtgaagaccaagaaggatgattctcactcagcagaggatagtgaagatgaaaaagaagatcataaaaatgtgcgccaacaacggcaggcggcatctaaagcagcttctaaacagagagagatgctcatggaagatgtgggcagtgaggaagaacaagaagaggaggatgaggcaccattccaggagaaagattccggcagcgatgaagatttcctaatggaagatgatgacgatagtgactatggcagttcgaaaaagaaaaacaagaagatggttaagaaggtccaaccaaannananntgagagcagatacacgaaaagctaaaaataacaggcgatctggaaagaattcacaggaagatagtgaggactcagaagacaaagatgtgaagaccaagaaggatgattctcactcagcagaggatagtgaagatgaaaaagaagatcataaaaatgtgcgccaacaacggcaggcggcatctaaagcagcttctaaacagagagagatgctcatggaagatgtgggcagtgaggaagaacaagaagaggaggatgaggcaccattcccagagaattccggcagcgatgaagatttcctaatggaagatgatgacgatagtgactatggcagtt

SEQ ID NO: 169814 - DNA, 803 bp, Homo Sapiens
  misc_feature (28)..(28): n is a, c, g, or t
  misc_feature (32)..(32): n is a, c, g, or t
  misc_feature (34)..(34): n is a, c, g, or t
  misc_feature (612)..(650): n is a, c, g, or t
ggggccgaagcggcgcccgaccaaggantatntntgcgtcgtggggcgcgtgaattttccctcccgggtttggacttttttaaccccatccgttgagtttttccttttgggaactggccataggccaactatggtccatcatctttcccattaggaaatctttcatccgctgccgggatcctttctcctggaatgggtgcctcatcctcctcttctggttcttcctcactgcccacatcttccatgagcatctctctctgtttagaagctgctttagatgccgcctgccgtggttggcgcacatttttatgatcttctttttcatcttcactatcctctgctgagtgagaatcatccttcttggtcttcacatctttgtcttctgagtcctcactatcttcctgtgaattctttccagatcgcctcttatttttagcttctcggggagatgatcgaattttcttagtgggagggcccgaatctcttccataatcttcatctgcatcatcagattcctgaaactgtgagtaatcaacaaccttcctatttctgacaggccgcgacatgttcgctgtcgaaacaggaccgagtcgagaagccaaagaccaggannnnnnnnnnnnnnnnnnnnnnnnnnnnnnnnnnnnnnnaacttcagccgatgggaccgctgctgccgaaccccgagctgctggcttctcaaactccgctgctctttggttcagggctcctggaacagacgagccccccgctcccccgtctcttcaaaatggatgaatcaaaccagccgaaaatgcgccccc

SEQ ID NO: 169815 - DNA, 411 bp, Homo Sapiens
  misc_feature (36)..(36): n is a, c, g, or t
tgacagatgacctccttgccacttcacttctgcctntggggcaggcttctgcaccactgtcatcgcctcccctgtagacgtggtcaagacgagatacatgaactctgccctgggccagtacagtagcgctggccactgtgcccttaccatgctccagaaggaggggccccgagccttctacaaagggttcatgccctcctttctccgcttgggttcctggaacgtggtgatgttcgtcacctatgagcagctgaaacgagccctcatggctgcctgcacttcccgagaggctcccttctgagcctctcctgctgctgacctgatcacctctggctttgtctctagccgggccatgctttccttttcttccttcttcctcttccctccttagcttctcaccttcaaaacttt

SEQ ID NO: 169816 - DNA, 527 bp, Homo Sapiens
  misc_feature (196)..(206): n is a, c, g, or t
ccacactggccacacccctctttgattaaaatattgaaattaacctgtgcactggttgcatgcgccatatattccaactgctcacggaggctgaggactgagatctgcttgacctatggaggtggaggttgcatcactctgagatcataccaccttcactttcagcctgggtgacagagccagactctgtttcacnnnnnnnnnnnggaaaactctgtgatggacatttgtttagtaaatcccttcagtatttatccctcctttccccacagcagctttctttcctgtcaactagaaaggagcaggatgtaataaatacattttggtgtgactaggccacaccaactcttaatcatctcccattttccttagacatttaaatttcaaggcaggtaccctctgtgtactcagaaatttgaagaagttatttggttttccaaaatgcacactgcgggttattgatttgttctttacaactattgttctcatatttctcacactaaataaatctctatgagagcttcttg

SEQ ID NO: 169817 - DNA, 1360 bp, Homo Sapiens
gaggacccccgagcccgtcaatacctgacccattgtcatcaaacatgtcattagtgtcgaccctaacgaccagaagaagacagcctgttacgacatcgatgtggaggtggacgacccactgaaggcccaaatgagcaattttctggcctctaccaccaatcagcaggagatcgcctcccttgatgtcaagatccatgagaccattgagtccatcaaccagctgaagacccagagagatttcatgctcagttttagcaccgacccccaggacttcatccaggaatggctccgttcccagcgccgagacctcaagatcatcactgatgtgattggaaatcctgaggaggagagacgagctgctttctaccaccagccctgggcccaggaagcagtaggcaggcacatctttgccaaggtgcagcagcgaaggcaggaactggaacaggtgctgggaattcgcctgacctaactgctcagggatctttcttcccagccctggagcctggagggagaccaccctctgggtccttgctggggccgcagacacgtaggctggggtgaggagtgtctgctgtcaccctctactctccagctttagttttataaatgtagtgataggattccttgttgcttggtccccaaagccttatactttttgcattggctttaattgggttcagcagatgcctcctctgcccccctgcaggcaggcccaagtaggactgctggaggctgtgctttgacattgtaagacatttccgaaccaaaggctgctgggtttgcatgtttacagactccccctggggcgagggtcagagctggctctgggagagctgggctaggaagaggaggtgcagcccagactcttcctagcctttctaaaccaaagttctttgccattcctacaagcccagccttgctgctggttttttcctttcctttgggtatttgcactattttgggagcaagttttctatgtgggagccactttttttgtacaggggtaagttgggggttttcagggagcctgttaggtgcctccttcttttctttcctcaatctatgcaagcggctctggccgccatcatctcctgggatgccagagggctgcctctccagcggcttgggccggggaggggacactccagttctctagcatggcctgaggtatggggtatgtgcatgtggaggccagggtaaggtgaatggggaggctgggaggactggtgttgccctttggagcttggtgaggagggtgggcctagggcttggcgagtgccacttctggcaggtttggaaatttccaaataaatccttttgtctattaggacttgaatcactccttccttgaaatccttgt

SEQ ID NO: 169818 - DNA, 1182 bp, Homo Sapiens
gtggactgtgctagcagctggaacgagatccagggaggccatcaaaaagcctgtgacacaaaagcgaaagcttcggatctacatttccaatacgttcagtcccagcaaggcggaaggcgatagtgcaggaactgcagggacccctgggggaaccccagcaggggacaaggtggcttcctgggaactccgagtggaaggaaaactgctggatgatcctagcaaacagaagaggaagttttcttcattctttaagagcctcgtcattgagctggacaaggagctgtacgggcctgacaatcacctggtggagtggcaccggatgcccaccacccaggagacagatggcttccaagtaaaacggcctggagacctcaacgtcaagtgcaccctcctgctcatgctggatcatcagcctccccagtacaaattggacccccgattggcaaggctgctgggagtgcacacgcagacgagggccgccatcatgcaggccctgtggctttacatcaagcacaaccagctgcaggatgggcacgagcgggagtacatcaactgcaaccgttacttccgccagatcttcagttgtggccgactccgtttctccgagattcccatgaagctggcagggttgctgcagcatccagaccccattgtcatcaaccatgtcattagtgtcgaccctaacgaccagaagaagacagcctgttacgacatcgatgtggaggtggacgacccactgaaggcccaaatgagcaattttctggcctctaccaccaatcagcaggagatcgcctcccttgatgtcaagatccatgagaccattgagtccatcaaccagctgaagacccagagagatttcatgctcagttttagcaccgacccccaggacttcatccaggaatggctccgttcccagcgcccgagacctcaagatcatcactgatgtgattggaaatccttgaagaggagagacgacctgctttctaccccccacccctggggccccggaaagcagtaagcaggcaccattctttgcccaaggtgccaaccagccgaaggcaggaaaactggaacaggggggctggggaaattcgccctggaccctaacctggctcaggggaatcttttctttcccaagcccctgggaagccctgggaagggaagaacccacccccttctggg

SEQ ID NO: 169819 - DNA, 935 bp, Homo Sapiens
gcgcccagagctgctgatgatctctgaagggattggagatcctgaggacgaaagaccagctgcttgctactgccagccctgtggccaggattccggatgctcggccctctttgcctgcgcgcagcaccgagatgccggaactgcaacaagtgctgcgatttcgcctgacctaactgctcacggatctttcttcccacccctgcagcctggatggagaccaccctctgggtccttgctggggccgcacacacgtaggctggggtgaggagtggctgctgtcaccctctaatctccagcgtttagattttataaatgtaatgataggattccttgttgcattggtcacccaaagccattatactttttgcattggcgttaattgggttcagcagatgcctcctctgcccccctgcaggcaggcccaagtatgactgctggaggctgtgctttgacattgtaagacatttccgaaccaaaggctgctgggtttgcatgtttacagactccccctggggcgagggtcagagctggctcttggggagctgggctaggaagatgaggtgcagcccagactcttcctagcctttctagaccaaagttctttgccattcctacaagcccagccttgcgtgctggttttttcctttcctttgggtatttgcactattgtgggagcaagttctctatgtgggagccactttttttgtacaggggtaagttggggggttttcagagaaacactgttaggcgccttccttcattttcattccttcatctatgccgagcggaatctgggccggcatcctttctcctggggatgcccaaagggtttggcctccttccaccgggctttgggaccggggggcagggggatccccttcccttgtcctccctaaccattgggacctgtcaggaaatagagagtttattagcta

SEQ ID NO: 169820 - DNA, 442 bp, Homo Sapiens
  misc_feature (85)..(85): n is a, c, g, or t
aaccttaaaaccgcccgaaaaggtgcccaactttcaaaaaggccccagcaaaaaattgctgctggtgtcttctcccaaaccctgnggtgcgaaaaccgcagtgcccaaatgagccgctggggctgctgaaaatgccttccgggccccgtgacccctgactgggatgccctggccctgctacttgagggagctgacttagctcccgtccctaaggtctctgggacttggagagacatcactaactgatggctcctccgtagtgctcccaatcctatggccatgactgctgaacctgacaggcgtgtggggagttcactgtgacctagtccccccatcaggccacactgctgccacctctcacacgccccaacccagcttccctctgctgtgccacggctgttgcttcggttatttaaataaaaagaaagtggaactggaactg

SEQ ID NO: 169821 - DNA, 844 bp, Homo Sapiens
aagcaggctggtaccggccggaatttcgggatatcgcagcacgctggctcttctcctgaacttcctcgcctgcctggccagcttctgtgtggaaaccaacaatggcgcaggctttgggctttctatcctctgggtcctccttttcactccctgctcctttgtctgctggtaccgccccatgtataaggctttccggagtgacagttcattcaatttcttcgttttcttcttcattttcttcgtccaggatgtgctctttgtcctccaggccattggtatcccaggttggggattcagtggctggatctctgctctggtggtgccgaagggcaacacagcagtatccgtgctcatgctgctggtcgccctgctcttcactggcattgctgtgctaggaattgtcatgctgaaacggatccactccttataccgccgcacaggtgccagctttcagaaggcccagcaagaatttgctgctggtgtcttctccaaccctgcggtgcgaaccgcagctgccaatgcagccgctggggctgctgaaaatgccttccgggccccgtgaccccctgactgggatgccctggccctgctacttgagggagctgacttagctcccgtccctaaggtctctgggacttggagagacatcactaactgatggactcctccgtagtgctcccaatcctatggccatgactgctgaaacctgacaggcgtgtggggagttcactgtgacctagtcccccccatcaggccaaaatgctgccacctctcacacgccccaacccagcttcctctgttgtgccacgggctgttgcttcggtttatctaaataaaaagaaag

SEQ ID NO: 169822 - DNA, 1536 bp, Homo Sapiens
ggacaagacgcaggcgcaacccacggctgctgcggggatccttgtggcccttccggtcgatggaaccaatccgtgcacagagaagcggggcaaactgaggcgagtgaagtggactctgagggctaccgctaccgccactgctgcggcaggggcttgcgagggcagagggccgcggaggcgcagtttgcaaacatggctcagagcagagacggcggaaacccgttcgccgagcccagcgagcttgacaacccctttcaggacccagctgtgatccagcaccgacccagccggcagtatgccacgcttgacgtcttacaacccttttgagacccgggagccaccaccagcctattgagccttccagcccctgccccattgcctccaccctcagctccctccttgcagccctcgagaaagctcagccccacagaacctaagaactatggctcatacagcactcaggcctcagctgcagcagccacagctgagctgctgaagaaacaggaggagctcaaccggaaggcagaggagttggaccgaagggagcgagagctgcagcatgctgccctgggaggcacagctactcgacagaacaattggccccctctaccttctttttgtccagttcagccctgctttttccaggacatctccatggagatcccccaagaatttcagaagactgtatccaccatgtactacctctggatgtgcagcacgctggctcttctcctgaacttcctcgcctgcctggccagcttctgtgtggaaaccaacaatggcgcaggctttgggctttctatcctctgggtcctccttttcactccctgctcctttgtctgctggtaccgccccatgtataaggctttccggagtgacagttcattcaatttcttcgttttcttcttcattttcttcgtccaggatgtgctctttgtcctccaggccattggtatcccaggttggggattcagtggctggatctctgctctggtggtgccgaagggcaacacagcagtatccgtgctcatgctgctggtcgccctgctcttcactggcattgctgtgctaggaattgtcatgctgaaacggatccactccttataccgccgcacaggtgccagctttcagaaggcccagcaagaatttgctgctggtgtcttctccaaccctgcggtgcgaaccgcagctgccaatgcagccgctggggctgctgaaaatgccttccgggccccgtgacccctgactgggatgccctggccctgctacttgagggagctgacttagctcccgtccctaaggtctctgggacttggagagacatcactaactgatggctcctccgtagtgctcccaatcctaatggccatgactgctgaacctgacaggcgtgtggggagttcactgtgacctagtacccccatcaggccacactgctgacacctctcacaacgccccaaaccagcttccctctgctgtgccacggctgtagctacggttatttacactaaaacgacagtggcactggacacaaaa

SEQ ID NO: 169823 - DNA, 1696 bp, Homo Sapiens
gggaagggcgagcggcgcggcagagtgcggcgcaccgcagctcctgaggttttggttatgaacaggattcggattcacgtcttgccaaccaatcgggggaggatcactccagtgcccaggtctcaggaacctctgtcttgtgcattcactcatcgtccatgctctcaccctcgtctggaggggcaggagttttgcattaagcatatccttgaagacaagaatgcacccttcaagcagtgtagttatatatcgacgaagaatggaaaaagatgtcccaatgctgccccaaagccagagaagaaagatggggtgtccttctgtgctgaacatgtccgtaggaatgccctggcacttcatgctcaaatgaagaagaccaacccagggcctgtgggtgaaacactcctgtgccagctgagctcatatgctaagacagagctggggtctcagactccagaaagtagtcgcagtgaagccagccgaatactagatgaagacagctggagtgatggggagcaggaacccattactgtggatcagacatggagaggtgaccctgacagtgaagctgatagcatagacagtgatcaagaagatcccctaaaacatgctggtgtctacacagcagaagaagtggccctgattatgcgtgaaaagctaattcgtttgcagtcgttgtatattgatcagtttaaacgacttcagcatctgctcaaggagaagaagcgccgatacttacataatcgcaaagtggaacatgaagctctaggcagtagtctccagactggcccagagggacttttggccaaagaacgagagaacttaaagcgattaaaatgtctgcgacgataccgccagcgctatggagtggaagccttactgcataggcagttgaaggaacggagaatgctggccacagatggtgctgcccaacaggcccataccactcgttccagtcagaggtgcttggcctttgtggatgatgttcgttgttccaatcagtctcttccaatgaccagacactgccttacccatatttgtcaggatacgaatcaggttctcttcaagtgctgccagggatctgaagaggtaccctgcaacaaacctgttcctgtaagcctctctgaggatccctgctgcccactgcatttccagttgcctcctcagatgtataagcccgagcaggtactgtctgtgccagacgatctggaagccggccccatggatctgtacttgagtgctgctgagcttcagcccactgagagtttaccttctggaggtcaaggatgacttggatgttgtgggtgatggtatgcagtgtcctccttcacctttgctttttgatccttcactaacccttgaagatcatttagtcaaagaaattgctgaagacacagtgggatattttggcaagtgaagaacagtcccacctgtttccctcatgtagtgacctggccaggcagagggttccctgctagatagcatgtgctcctggaggggagtggggtgtcatcactagtataaagatgctccacatgtctctcacttattgaataccatataagcaaagcacttttaaaaatgccctactctgctcctgtgtacccttgttgctgtagttctccagatgggctcttcgaacaacctaatggcccgtgatcctcatatcccagactagcacatacattcatgaaacata

SEQ ID NO: 169824 - DNA, 994 bp, Homo Sapiens
ttgccgcctgcaggtccctctagaggatccccccaatcaacatccaaccttcacagagtagctgtgagttcttggtaatgtgaaaaaggccttgtttttcagaaactcctgggtttcctgttaaaaaatcttaaagcccaaccttaggaatatagtgccccaaaaggcggatgcttcttccattatcttattttctttgatactttatttaattagatgtttataaagaaatgggtttatttttccagcataaacctcagaatttaaggaaagaaaatgatgtctgttgttatagttcattgttttgcctactcagcagaagtgatgactcttaaaaattggctttgaccaaagttctcttgttttcagggaaagaacataaaagctttttgaactacagcctttttaaaagagggatgggaggatattacagtaagaaattaggctttctaaaagtatgaaacatccttcaactgggctctcttgttaataggacatcatatggtaatagactggtttgactatattgttagctgccacagtaagcaggtcattgtataggtaaatgcctgcacccataattttctagtaatagccacgaccaatttattaacagtcagggcctatccttgcctgtagttctcagtcactggatgcacaaaatcactgtgtaacattggctcacttggtgagcatagggttgactgataaaatgtttaattcccttgctagcttgtgagaagaatgagttgatgacatgctccataccagtggctagatggagtattaaggtggagcagaaaagaagtgagaacatcttgattcccctttcttttacttgatggggtttatgaacatgccgtagtgcctttatggccagtttgagtccctgcctactttgacttttacgttcccatttcctgtgttacaaccttcctccccaatttgttcacctattttgtgctttaaatctcaataaaatacttactgaggg

SEQ ID NO: 169825 - DNA, 1410 bp, Homo Sapiens
  misc_feature (1251)..(1263): n is a, c, g, or t
  misc_feature (1278)..(1298): n is a, c, g, or t
ataaccctcagtggcccaaagaacaaggcctgaaatttccatgaaaagaaactgggatctattcatctgttctgttgagaacccatagttccataaccatagaaatgggccacagtggatttaggggggagagttgtaagtgtaagctgtctgttcctctgtttactgagaattgtgggtgtccactgaggcagttccatatttggcagatgattgagtcctgatttctcagggccggcagattctggtgttactgatcttgtggaaaagtcaacccattgagaagattttatgcagaagttttaaatgcacattgatcataatttgaatatgtcacagtctttgtttttcttttcagccaatcctgaggcaaaagaaacattttaattcactgcacattccaaaagcctttgcagaaggccctgccatttaagaacaagcccaagacccaagcaaaggcaggcaaggtgccaaaggacaggcggagaccggccgtcatacgcgagcctcatgaaagaaagatccttgcactgctggatgctctgagtacggtgcatagtcagaagatgaagaaggccaaggagcagcggcacctgcacaataaagagcacttcagagccaagcagaaggaggaggaggagaagctgaagcggcagaaggacctcaggaagaagctcttcagaattcaggggcagaaggaaagaagaaaccagaagtccagtttgaagggggctgagggccaattgcagtgagcctttggactggagggactgtccctggatctgcggaggtagacagtttcaaacatcacagtttgaatgcctgtgaatgacaagtcagtgggaaagagctcaagagatgtctctactcaaactgtgcctgcaggaggaggaacagagaagcctgggctgctgggactgggttcattctcatgacttggggctgtcgagatttaaagtgatgtaagctgtggttatgtggattctcttactttcctctgcctgcctcagtttaattattttgtccctacagacatatcattaaaatatttttttggggcgtgagaagccatgagcagcaaagtctctcgcgacaccctggaacgagcggtgcggggaagtcctgcccgggaaccagcgccaacgcccgcaagttccctgaagaccgggggagttgcaaaatcagctttgaagaactatgatccccacgaagggccagggctttcttggggcccccgtccaggcttaaggnnnnnnnnnnnnngccctaagatccccnnnnnnnnnnnnnnnnnnnnnacccagtaagcccctttgtaacaagggcctataggcccggtggattattcccccccacaatgggaacatcccgaaggcggcctgaaaaacacacctcgcccccaggcaataa

SEQ ID NO: 169826 - DNA, 1046 bp, Homo Sapiens
  misc_feature (161)..(221): n is a, c, g, or t
aattaaaatttacttgattatggaagtctctgatttattccagccaaaatattagatgagccactgagaatcaccacaaagcaatcgccctcacggcccttgccagggtgacggcacagcaggaggacaggtgcccaggccagtggttctagctcttcacnnnnnnnnnnnnnnnnnnnnnnnnnnnnnnnnnnnnnnnnnnnnnnnnnnnnnnnnnnnnntttccagtgttgctacaatctcagccacctggctggtggagatgtgaacatcttctttgtccaccagctcaatcaccttgacgaggtcgtcgatgttgaccttgccatccttgttttcatccagtgctgcggccaggctggtgagcttgctttcgggaatgtgcttgacttgcttcatggcgttgatgagctcagcgacactgatgacgttctcccccgtgggcatgccgttggccggggccagcttgccagcctgctggtccatctccagctgcgagatcaagccatcgatctgcccgatcatttgctgcaccctttttgtcaatctcttgctggctttagatttcttccacggtatttttcttcaccagtctttgaaagttccttcttgatctcctgcaagtcctcgctgtagtcctgcacatcctccttcagcagctccagctcctccttctcctttggtgagtgacttcttctgctcctgcagcttagagcaggcatcgctgaagatgtcgatttcctccttcgtgaatctcttcctccttcaagccctccaacaccggggcagtgtccttcaaggtctctgaatgcaggactgtgtcaggcatttctggctgtggctcggtccccggcctttggggagcagctaccacaagtacgggctcaaaatccttcgccacctccgagcccttctgcagctccttctcacggtgctcctgctggatggccgcctcctcctgcagcgtggccgacagcgtgggtccaggacgcctgggtccgcaccgcgtcgggtacgacgcacgacgtgggtcgacccacgcgtcc

SEQ ID NO: 169827 - DNA, 1089 bp, Homo Sapiens
gggttggcgcggcggcagcggcagcggcggctgggagagcggtcggcggggtttcttcgttgcattgcctgagaggagcggagtctgccaggtggtgtccatcatgttctctttcaacatgttcgaccaccctattcccagggtcttccaaaaccgcttctccacacagtaccgctgcttctctgtgtccatgctagcagggcctaatgacaggtcagatgtggagaaaggagggaagataattatgccaccctcggccctggaccaactcagccgacttaacattacctatcccatgctgttcaaactgaccaataagaattcggaccgcatgacgcattgtggcgtgctggagtttgtggctgatgagggcatctgctacctcccacactggatgatgcagaacttactcttggaagaaggcggcctggtccaggtggagagcgtcaaccttcaagtggccacctactccaaattccaacctcagagccctgacttcctggacatcaccaaccccaaagccgtattagaaaacgcacttaggaactttgcctgtctgaccaccggggatgtgattgccatcaactataatgaaaagatctacgaactgcgtgtgatggagaccaaacccgacaaggcagtgtccatcattgagtgtgacatgaacgtggactttgatgctcccctgggctacaaagaacccgaaagacaagtccagcatgaggagtcgacagaaggtgaagccgaccacagtggctatgctggagagctgggcttccgcgctttctctggatctggcaatagactggatggaaagaagaaaggggtagagcccagcccctccccaatcaagcctggagatattaaaagaggaattcccaattatgaatttaaacttggtaagataactttcatcagaaattcacgtccccttgtcaaaaaggttgaagaggatgaagctggaggcagattcgtcgctttctctggagaaggacagtcattgcgtaaaaagggaagaaagccctaagtgaggactgttggctgattggaaaataataaaagaatcatttgcgaaaaacaaccacgtca

SEQ ID NO: 169828 - DNA, 745 bp, Homo Sapiens
ctgcagggcctcagcaccgtggcctccgaatagaccaaagaacaactgagtacgggaatggtggggagggagatcagatggcaggaggcgactagaggctctcagcactttgctgtaaaatgcaaatcaagacagcagttgtgggccggcagaaaacctgtgcctctagcttttccctctagagggcgctctgaccccgcaagataaaagcctagagttgcagcttgcagggggctctaaagaagataacacaaggtaccagtgtaaacattcagaacatgcccagagaagggcagcagccgtctgctacccacggagatagactgcgaagtgccaatcacgtcaaaggacaaaagggtcactccggattctctctgagggagcacaggaagtatcacaaaaggcagcgggaggttttcaggatttctgggccctgccacttaggtcagaattgtggctgcagaggcatcttgatgactcaaaggcaggtggctgacccctggctctgccagtccggcgggggcagcatgaaggcagtggctggggaatggcacaactgtagattgtgtcctctagccggtgccgaatggtccccggtgtgggtatggcctacttccgattatggactggccctgtcctccttgttgtagagcaacgacgggtggccggggcgggtgcgttcaaatctggcaagcttgttgaagattgcgactcgcctttaggtgaggctaacgtattcattaga

SEQ ID NO: 169829 - DNA, 253 bp, Homo Sapiens
tacccgtcagcatatcagcagccggcagcagagaaaaaagcggaggcagcagcacaggagcagaaggtctctaagaaggcggcagcagcctggcattgagcttcccgagacagagctgagtcttagagtagggaaggatcagaggaggaataatgaggaactggtagtgtcagcctcctgtaaggaaccagagcaggagccagtgccagcacagttccagaaagtaaagcccccaaagactaatcataaacgc

SEQ ID NO: 169830 - DNA, 1018 bp, Homo Sapiens
ttacaggctgctaccgcagggctggaggctgccgagtgccctatgggcccccagttggtggtggtaggggaagagggcttccctgatactggctccgaccattcgtactccttgtcgtcaggcaccacggaggaggagctcctgcgcaagctgaatgagcagcgggacatcctggctctgatggaagtgaagatgaaagagatgaaaggcagcattcgccacctgcgtctcactgaggccaagctgcgcgaagaactgcgtgagaaggatcggctgcttgccatggctgtcatccgcaagaagcacggaatgtgaactggtgccccggcagcctgctggactcccagaccccatccagccaggggaccgcaggccattgttgaactcctctatactcctgggcactggttgacagtactgaggcttaaggcagctggactctcttgctggtgacctggcatcctcaattgtttcctcctgaagtggaagctggggccttagactctgccctggtgacaccagcaattatgactttgtctacccttcctccccagttattgttgcagattctggttaagcagaggcttcagaaccactgaacttgaaacttaccctctagggatgcaggtgggatgtccagggactataggtttgggaaaaccataccttaaggttggtcagcagtcagacaactctaatgtgtgtagtgataagagattcaagtaacatcagttctcctccttttcatgcttttccttcccaggtgcagcctgtgattctgatggggactggtaaatctgtgcctctgcctcctaggacttattttcccaggaggccatttacaaggggatctggatgacctgctgatggagatccagcttgccagggacttaggtttatcctgttctgttgctactggttacaaatcctattttctgtacaattagtcagactaaagtttcactgtgttcgttgccaaaacacatttaacaaaagtcaggttttaacacccgacaaa

SEQ ID NO: 169831 - DNA, 557 bp, Homo Sapiens
ggatcctcaattgtttcctcctgaagtggaagctggggccttagactctgccctggtgacgccagcaattatgactttgtctacccttcctccccagttattgttgcagattctggttaagcagaggcttcagaaccactgaacttgaaacttaccctctagggatgcaggtgggatggtccagggactataggtttgggaaaaccataccttaaggttggtcagcagtcagacaactctaatgtgtgtagtgataagagattcaagtaacatcagttctcctccttttcatgcttttccttcccaggtgcagcctgtgattctgatggggactggtaaatctgtgcctctgcctcctaggacttattttcccaggaggccatttacaaggggatctggatgacctgctgatggagatccagcttgccagggacttaggtttatcctgttttgtttgctactggttacaaattctattttctgtacaattagtcagactaaagttttcactgtgtttgtttggcaaaacaaattaaacaaaaagtaaggtttctacc

SEQ ID NO: 169832 - DNA, 313 bp, Homo Sapiens
tcagctagaacccgacctgagctgtgtggagcgggcatggccgggccctgctggggaggggcctgggcagagggcctggaactgggatcaaggcccacgcgcttccctggggtttactgaggtgatgggtgcaggaaaggttcacaaatgtggagtgtctgcgtccaatacacgcgtgtgctcctctccttactccatcgtgtgtgccttgggtctcagctgctgacacgcagcctgctctggagcctgcagatgagatccgggagactgacacgaagccagcagaggtcagaggggactctgaccacaagcc

SEQ ID NO: 169833 - DNA, 407 bp, Homo Sapiens
tagaattcagcagcggcactgaaatcccttgaaattgaaaagtcagcctacatgaatgcttaggagcaaaggtttgaaacataataagtctgtatatattcagctgagagaattttcagaaacatttgcagtccattgctaccatttatggatacctatagattcatttgcatacttctcacgagttcttatttaggtggtcaatttgagttatctaaaatggtaacaaaactccccaaggttacttaaaatattttatgtcttttgaaaacacagtcattcgtacaataacctttccttaaaaataaagccaattaaaatgaagaaatatcttttgatttccccctatttccgtctatacgaagacaaacgacatctctttcgaccctagcctccatgaacctctg

SEQ ID NO: 169834 - DNA, 340 bp, Homo Sapiens
  misc_feature (316)..(316): n is a, c, g, or t
  misc_feature (323)..(323): n is a, c, g, or t
ccttgtcacattccagcagcgcacactgagacacctgcacacccctcttctgcttttgcgcgggcccagcggagcctgtctgtctgattatctgactctgcaactagcctggcagcaaggagaacagccaagctctgtgttccagaagctgcgtggtgcacactctgagaaggtaatcccgggtgcttgttagaaggtgccggagcgcacacacacacacgataaattggggaaggcggttctgtgctcgtacccacatcaacttcctggttctggttttgcacccattacctaagatgtcaccgctggggaaatncaaaaanggaccgagctgaattga

SEQ ID NO: 169835 - DNA, 657 bp, Homo Sapiens
  misc_feature (614)..(614): n is a, c, g, or t
  misc_feature (632)..(632): n is a, c, g, or t
cgacactgactctttctagctccgtttccttgtatttctcgggggcagaagtctcatctctgccttttatcggtgtatcaccttctgacttgccttcattgcttgtctgatgtgaccaacagttgtgatcttggacacactaaggattttagaatgcaaagaaactttatacaacattatgaaagactatcctttccatgatggttatttcagcattttagttgcaacctggggattagattagagtttccaacgtgatgaaaagtggaatgatagcattctataatttccataattttcctactggtccgtaccaaattctagagtctctggagttgcttatttccagagttatttggtcaaacgaaaaagaatttattgctgtctgtttaacatgtatttgttaggttgaaaggatctttttagaaactgtaggaaaataaacagaaccaaccaggtgaaacaaagcacagacattgggttaggatgtagtgagttgtgaacaatcaggattctgggtgtgaatgggggtccctgtctcataggtgatcctttggtgccatgtgaccgagagacatggtgtctaaggcccatggcctggagacctgggcgcnggctggaaatgaaaaacnggaaaagagccgaatcgataatcga

SEQ ID NO: 169836 - DNA, 762 bp, Homo Sapiens
  misc_feature (155)..(245): n is a, c, g, or t
tgaaacaaagcacagacattgggttaggatgtagtgagttgtgaacaatcaggattctgggtgtgatgggggtccctgtctcataggtgatcctttggtgccatgtgaccgagagacatggtgtctaaggcccatggcctggagacctgggtgcnnnnnnnnnnnnnnnnnnnnnnnnnnnnnnnnnnnnnnnnnnnnnnnnnnnnnnnnnnnnnnnnnnnnnnnnnnnnnnnnnnnnnnnnnnnctctctttcaatcatgctttgaggatacagtgagattggttacagtgaaccttcaatgagtagaatgtggtatgccatggtgggttgtagtagatggtgctccctgccttttctcctctgttttcctcaatttgggaacaaatgagattggcagaaggagggagcctcacggtgcagtacttttcctacccaaagtgtgccccactggtgtcacctcctaatgttaacttggatttcctaaagcagtccccactctgttatgagagtcactgactcccgtggacatccccacagtaagcagccttacaaaatcccagtccccttagggcagagtgagtgtcatagaataatgactccaaacccacgtcaaaaatggcttgttttcagcgatgttataaaaacaaaggcctgtttttttggaattggggggtgactggggtggtttggattgaaatgtggacaaagatagcatgtgtaattttgaataaaataaaaatttttgtaataaaaacttttt

SEQ ID NO: 169837 - DNA, 314 bp, Homo Sapiens
  misc_feature (292)..(292): n is a, c, g, or t
ccagcagcgagaggcttgctctttggccagcatttcctctttatcgctccattcggcggccagctcatttttttcttctacctggatgaaaatgttccggtcgcgcaactgcatgaggcaatgattcctggcaaccatgtagagccagcttttgatgtataccactttgtattttgccagttcggtaatggctttcaggaatatttgctgcaccgcgtctttggctgcttcttcatttttgaggtatttcatacaaacacccagcaataaaaatgtgaccgctggggaaatncaaaaggaccgagctgaattga

SEQ ID NO: 169838 - DNA, 391 bp, Homo Sapiens
tccttcatcttggtcagcaccatggacgagatctcctcggggtagaatgccttggtctcccccttgtagctcacctgcaccttgggcttgtctccgtcgttgatcacctggaaaggccagtgcttcatgtccgactgcaccaccgggtcgccgaacttgcggccgatcagccgcttcgcgtcaaacacggtgttctgcgggttcagcgccacctggttcttggccgcatccccgatgagccgctcggtgtccgtgaaggccacgtagctgggggtggtgcggttgccctggtcgttggcgatgatctccaccttgccgtgttggaacacccccacgcaggagtaggtggtgcccaggtcgatgccgatcgccttggggttgtaccgggtac

SEQ ID NO: 169839 - DNA, 1032 bp, Homo Sapiens
  misc_feature (499)..(594): n is a, c, g, or t
  misc_feature (721)..(742): n is a, c, g, or t
cctccaaacgcctgcaacaactaatgtcctatgttgagctggtttattttgatatatgataataattatctttgaagtagaacaattctgttaactggaaaatcacaggatatatccatcatatttttcaggacagatagtttttactgtggggcaaataggttaaaattacactatgttagttgcatttaggttttaaagcaaagaatctgtagagaaatctatgcaatatatagtttgtccagattagctttcatttggggaatgaagttctgaaatatctaaagcagtttactcatcaattgaaaagtcctccaaaaagagaactattgggaaaccatggtgtggtggtggaaaagaaaagctccctcagttttttggagggaataacttaaaaaaatacttaaatggctaagtttacttggtgcagttaagaattaaacttgtcaattttaacattgctgttacatctgaaataaacttatgtgatgttctggtnnnnnnnnnnnnnnnnnnnnnnnnnnnnnnnnnnnnnnnnnnnnnnnnnnnnnnnnnnnnnnnnnnnnnnnnnnnnnnnnnnnnnnnnnnnnnnnnttgggggccgccccgccccctaaaaactttttaaaacctttttttgggcccgggtgcccaaagggaaaggaaacggggccaatactggttcccaaggaaaccggggtacggaacaagggttggaatnnnnnnnnnnnnnnnnnnnnnngggggaaaccggaaggtttggaaaaaatcccaaaaggggtgttcgggggcctttccggggatcctttcaacgggggtccccagggggaccctcaaaaccaaattacgccccccgccccgtggcctttcttcggaaaaaacgggggggaaatccattttaagcttttccgcccgaagggggaaacccttcccaaaagggggtgtgataaacctgagaccccccggggggattcaagacccttgggcgccttgggaaaaaaatatttgcccccggggggaaaacgggggggc

SEQ ID NO: 169840 - DNA, 671 bp, Homo Sapiens
  misc_feature (221)..(221): n is a, c, g, or t
ttaacccaatttggcccccacagtaaaaaacctaacctgtcctggaaaaatatggagggatatatccctgtgattttcccagttaacagaattgttctacttcaaagataattattatcatatatcaaaataaccagctcaacataggacattacttcagtctttactgactcataggcatatgaacttgtgcccagctttttacctcttccacattctcntcctcctccataagtggatggaattatttaactaagtttgatgtaggacaattaaccctttacaaacatttacaattcaggttaagtcactgactaccgtggaaaaagaaactctatatatatgatagggagcctacacactcaattcaagaatttaatattttttccgtccttaaataacatgtacttgtcatgaggcagctattacgttttcaataaccacatttagggatacattcataggactgattagatagtccaggtgaaatggttatagaaatagaggcagtgtcatctcagaaaaccatttatatatcaaagtctattttgatatctgggaagtttacaaaaaggctgctgcattcttcaaactacctatgccttctgtaactcaagcactcttctcttgccaagagcaagctgaagcttattcatgaagataaaggtgct

SEQ ID NO: 169841 - DNA, 347 bp, Homo Sapiens
ccaatgaaccactctgtccagatgaacagcatgggctcagtgccagggatggccatttctccttcccgaatgcctcagcctccgaacatgatgggtgcacacaccaacaacatgatggcccaggcgcccgctcagagccagtttctgccacagaaccagttcccgtcatccagcggggcgatgagtgtgggcatggggcagccgccagcccaaacaggcgtgtcacaggtgcctggtgctgctcttcctaaccctctcaacatgctggggcctcaggccagccagctaccttgccctccagtgacacagtcaccactgcacccggcttttcgcccgtcttttccgcc

SEQ ID NO: 169842 - DNA, 641 bp, Homo Sapiens
cgacgagctgggcttccgcaagatcgacatcatcacaatcgtgtctcagaaggacgagcactgctgggtgggggagctcaacggcctgcgaggctggtttccagccaagttcgtggaagtcctggatgagcgcagcaaagagtactccatcgcgggggatgactcggtgacggagggggtcacagacctcgtgcgagggaccctctgcccggcccttaaggccctgttcgaacatggactgaagaagccatccctgcttgggggcgcctgccacccctggctgtttatcgaggaggctgcaggccgggaggtcgagagagactttgcctccgtgtattcccgtctggtgctctgtaagaccttcaggttggatgaagatggcaaagtcctgaccccggaggagctgctctaccgggctgtgcagtctgtgaacgtgacccacgatgcagtgcatgcacaaatggatgtgaagctccgctcactgatctgcgtggggctcaatgagcaggtgctgcacctgtggctggaggtgctctgctccagcctgcccaccgtggagaagtggtaccagccctggtccttcctgcgcagcccgggctgggtccagatcaagtgtgagctccgagtcctctgctgctttg

SEQ ID NO: 169843 - DNA, 884 bp, Homo Sapiens
  misc_feature (616)..(616): n is a, c, g, or t
gggagagttgctggttcaccttgacgatccagagagggccatccaggatgcaattttagaggtcctcaaagagggcagcgggctgttcccagatctcctggtgagggagacggaggccgtcatccacaagcaccgctcggccacctactgcgagcagctcctgcagcatgtgcaggccgtgccagccacacagtgaccacgctggtttcagccacggcacacccttgtccccacctgagccagagtttgtggcctttaaatctcataaacaaggcacctctgtgccagcagtgagactgtgacagcaagaatgtactcctcaggacacctgcccactctttccctggaataacagcctctgagtggattctgcatgttatgtgatttgttctgttcatcaagagggctcccaaacatctgcagctgatttgaaattaaaagtaagtcgcagccgctcctcccgcagccacttcagcagcatcttagattttaagcctcacgtgcgcagctggttcatgaactattggctgcatcctgcttaggtgcccaccaagaaggtttttacctacttaacaaaaaagaaagaagccaaagtgattagaaagaaatgaaatcntcttttttggggtcctgtctactgaaaatttaatatctcagttgaacagactaaaaggaaatttagaatccctaacaacttaaccagatttctccctgtttttaaatatactggggactttaaagggttatatgtccgggtcacccgtatgttttttaagtccggtgttaatggctaacaggtgttggaaaaacaatattttcatgaagaatctaattggggggtggccccccattagggtaggcagggaaaggtaaaagttggcatt

SEQ ID NO: 169844 - DNA, 1520 bp, Homo Sapiens
  misc_feature (588)..(875): n is a, c, g, or t
  misc_feature (1279)..(1279): n is a, c, g, or t
  misc_feature (1288)..(1289): n is a, c, g, or t
  misc_feature (1305)..(1305): n is a, c, g, or t
  misc_feature (1312)..(1312): n is a, c, g, or t
  misc_feature (1383)..(1383): n is a, c, g, or t
  misc_feature (1431)..(1431): n is a, c, g, or t
aatattctagcgcgtggctcgttctcgctcgccaacagcggtggtgggcgcggcctgtctcttgcgcgggagtaatatcggggcggggagacagggggttgagtagatgttgatgtcagtatgttgccctcgcgtgatggtttctttcactcagaggaattattatggtatattagggtgggcacacacaaatgccctctgggtgtgtttcgttttccccacgggttttttacttatcggggcggtggatgcgttatatcgcgggcggggtgttttcttacagcgcccgatttttttcccggcgcgtagtggtacacagttttttatatcaccgcaacagttttgtgccagggggggtggggtggaatttccgcgtggggagggaattctctagagtttgacttcaccccccgccttctggtggagaggggtgtgtaaatgagggcgggcgagaaaaacctttatatagagtgtgaggccgggattggcgacttttcttggccagggggccgggctattaaattggtagaaaaaccccccccgggggaagtccctcgcggagagggtgcccggctaaccgcctcatgnnnnnnnnnnnnnnnnnnnnnnnnnnnnnnnnnnnnnnnnnnnnnnnnnnnnnnnnnnnnnnnnnnnnnnnnnnnnnnnnnnnnnnnnnnnnnnnnnnnnnnnnnnnnnnnnnnnnnnnnnnnnnnnnnnnnnnnnnnnnnnnnnnnnnnnnnnnnnnnnnnnnnnnnnnnnnnnnnnnnnnnnnnnnnnnnnnnnnnnnnnnnnnnnnnnnnnnnnnnnnnnnnnnnnnnnnnnnnnnnnnnnnnnnnnnnnnnnnnnnnnnnnnnnnnnnnnnnnnnnnnnnnnnnaaaacaaatatttttaattaaattctcaaacatgaaagtataaacgttaatatttgttgaaaaatatatacggcatttcccccgtgtgaacacaatggcttccggtaacactacccacttacaatgagatcttttaggcacttgggtgtagaatgtgcgagagggaaatgcaactttactttcctgctacctataggggcaaccacaattagatctcatgaaatattgttttcaacactgttagcattaacaccgacttaaaacatacggtgaccggacatataacctttaaagtcccagtatatttaaaacaggagaaatctggtaagttgtcaggactctaaattccttttagtctgttcactgagatattaaatttcagtagacagaacccaaaaagaganttcatttcnntctaatcactttggcntctttcntttttgttaagtaggtaaaaccttcttggtgggcacctaagcaggatgcagccaatagttcatgaaaccantgcgcacgtgaggcttaaaatctaagatgctgctgaagtggctgcggnaggagcggctgcgacttacttttaatttcaaatcagctgcagatgtttgggagccctctcgatgaacagaacaaatcacctgtgccgaa

SEQ ID NO: 169845 - DNA, 884 bp, Homo Sapiens
aacacgttcttaaaaacctcgggcggcatgacggatccagagaaactcatcaggatttatcctgaactcttaaaacgcctagatgacgtgtccaacgatgtgaggatggcagccgcctccaccttggtcacctggctgcagtgtgtcaaggggtgccaacgcaaaatcctactatcagagcagtgtccagtacctgtaccgagagtggctggttcaccttgacgatccagagagggccatccaggatgcaattttagaggtcctcaaagagggcagcgggctgttcccagatctcctggtgagggagacggaggccgtcatccacaagcaccgctcggccacctactgcgagcagctcctgcagcatgtgcaggccgtgccagccacacagtgaccacgctggtttcagccacggcacacccttgtccccagctgagccagagttcgtggcctttaaatctcagtaaacaaggcacctctgtgccacgcagtgagactgtgacagcaagaatgtactcctcaggacacctgcccgctctttcccttgggaataacagcctctgagtggattctgcatgttatgtgattcgtgctgttcatcgagagggctcccaaaacatctgccagctgattgcgacattcagacgtaagtcgcagccctcctcccgcagccatttcaagcgagcatcttagatgtgaagcctcaacgtggcgcaagcgggttacatgaactatgggctggcatcctggcttaggtggccagcaagaaggtttttacctacttaacaaaaaagaaagaagccaaggtgattagcaacgaatgaatctcctagggtacctgctactgaattaatatctcagtgacccgctaacggcattacgac

SEQ ID NO: 169846 - DNA, 643 bp, Homo Sapiens
ttctcttttgaaataactcatcaattcgggatgctgtatcttctaacaatggcactgccccactctccaaagtcagataactgtggtgcaactcatctagtgctttggatttaattgcaagtggatgttctatatcctgacagtccaggagcagcttctgcactgagatcacactttcaggtttttcgaaagttttcagtctctcttcttgtggcttccagccagtttgttcaagaactggatttttattttcactctcagtgatactttctagaaattggtctaaaagttgtatctttctattcagcattccatgtacacggcgccactggcggttcatctccgccaggtgctctgcaaactccgttctttcatagcgcttgctttctacatcacaggtgcttagctgaagtaatgactggttaacgatgtcaactatccactgtttatagtccatttccattctaaactccttgtgcttctgaagaagatgtttaacttgagatgcagaacttggtgaatgcacggagtcttcatctgaagtttgatgctccacattgttcatccagctaatcatttctgtgattgcgtttacgagacggcaatttctccatttgaagctggtgaagtttttggtgatact

SEQ ID NO: 169847 - DNA, 664 bp, Homo Sapiens
  misc_feature (361)..(361): n is a, c, g, or t
  misc_feature (593)..(593): n is a, c, g, or t
tgtctcattcagaacaaaaactaactctgtctaactactgtaaggcaaactcttggtaccaaccaacagagtcaacttgccacccctggcacacagctctattcctatcacatgacttcctgcatgctgcccttcctttctccatcccaattacacctcccagccagatacacaagacacatttgctggtgaactccactcctcccagctctctatgcatttccactcaactacctctactgccttcaggtatgctttacttactcagttccttcaccattgtcttctgaaaaattgtcttttatctgtgtttggtgggaaaccttaatctgtcagaatctcccagaaggtcattaccagnttgccagggtgtttattcggcaatctctaaggcaaccctttggggaatccaagggggaggacccccacaagccattgtgtcctgcctcaaaattaaggccctaactcccccctctaaaataaattcaccaggacgcaggggctttgattcaagtttggaaggtcgggaagctttgttttaactaaaagctgccacaaccagaggaaattgaagaaataaatacaacaagggnggggtactatggcatagtattaattatgcctagccagcaagaaaggcagactttcaacagggtgggagtgc

SEQ ID NO: 169848 - DNA, 961 bp, Homo Sapiens
cagtattcggggacctgcgacatccatcatggagccgccggcttgctgcaggacagacatgggtgttctagagctgccaaggggttcaagcatggcaggtgatctgcagcgatcaagaggtgttggggacatgctaggacgactgaagcagctcattctggaactgttgagtgctactggaggtgtccgtgaaccagaatgatttcttgttgctggaggagtagcagatcgtgaacgatcagaactacttccagatgcagaacgcctgcggatggctggaggagatcttgttaaggaccgtttaccccgagctgttcgtggagtacgggatctggagcggcggcggatagcaagtggtgagcgactccgagaacgtttgcgtggtaacaatggcgttcgagatctagagcggcgccgaatagctggaggtgtccgggacctagagcggcggcgtgtcactggtgaggttcgagagcgggaccttcttcgagttactggagatgtgcgagatcgagatctccttcgggtgaccggagatgttctggatcttgatcttctgcgagtgataggcgaagttctgcttcgagatcgcctcctggttactggtggagtcctggatctggaccttctgcgagtcactggtggagtcctagaacgggagcggcggcgtgttgatggcgttctagaccttgaacgacggcgggttactggtggcgttctggatctggatcgccttctgctcactggggatgctcttgaccgggatcttcgtcgagtcactgaagtcctggaccttgaccgtctccggctgactggtgaagttcgagatctggacctacgtcggcttatcaggggggttctgaacctggatcgccggtgagtggctggagaggctcgagatctagagcgccactgttaccacgattgtcaccgttgtcacgattcgttgtcacgattgtca

SEQ ID NO: 169849 - DNA, 635 bp, Homo Sapiens
agtgggtcagtgtcttccccggagccagccgaaaaatcgaggtcttcacgccgacggcgctcagcttcatctccacgcactaagacaacctcaaggagaggccgctctccttcgccaaagcctcgtggactccagaggtcccgttcccgatcaaggagagagaaaacaagaacaacccgacgtcgagataggtctggatcttctcagtcaacctctcggcgaagacagcggagccggtcaaggtcgcgggttactcggcggcggaggggaggctctggttatcactcaaggtcacctgcccggcaggaaagttcccggacctcctctcgacgccgaagaggccgctctcggacacccccaaccagtcggaagcgttctcgctcacgcacatcaccagccccgtggaaacgctctagatctcgagcctctccacccactcaccggcgatccaggtccagaacccccctgataagccgacgtaggtccagatctcgaacttcaccagtcagccggagacggtcaaggtccaggacttcagtgactcgacgaagatcccggtcaagagcatccccagtgagcagaaggcgatccagatccagaacgccaccagtaaccccgccgtcgtttcaggtcta

SEQ ID NO: 169850 - DNA, 772 bp, Homo Sapiens
tcagcggactcggcagcggcactgggaaacccagcaaagctaaagctatgctgaaggcggggacggtcagcggagaggtcccgggccccggcaaggcacggcgctcttcagcgttgtggatgaagtggcagcggggcccgtaggggcaaaagccgatggtgtggaaggtgcggcacagctccgtcttgtacttggggtgcgggtcaggctgcggagctcgtggatgccgtgtgcgaactggcacttgtccccgtacttacaggcaccgttttcctcaaaggggcggcacagctccgtcttgtagcggctggagttgacctggccgcccccgggctgcttctgggtgggcagcagccgctcgcccccttccgagaaggagcggtctcggaagcggctgtctcgcgagctcagagcgggggctggctcacccttgaggctgctgaggagctggttctggtggaacttggagctgggcagggtgactgagtgcctccgagggaagcccccaccagcaggggtgcccactgcctttctgtccagcaggcaaccccctgcactgggagcactatagttgagcatcttgttacccttgcataaaacttcgctcaagtcgaagatggtggcagacacgagggtggtggtcatcctgtgcgttcgcgcgagccaggggcgaggatctggtgtgtcgcgaaggtcccggtgcggggaaggcgcagcctctcctgtctggagtcccacacgccagttcccggcgcccctcgcctttctgact

SEQ ID NO: 169851 - DNA, 1553 bp, Homo Sapiens
  misc_feature (1525)..(1525): n is a, c, g, or t
tcagagcagaacaacatccatgtgaaagacatcgttaaggtcattgatggcccccactcaggccgagaaggggagattcgccatctcttccgaagcttcgccttcctacattgcaagaaactggtggagaacgggggcatgtttgtctgcaagacccgccacctggtgctggctgggggctcaaagccccgtgatgtgaccaacttcaccgtgggtggctttgcgcctatgagtccccggatcagcagccccatgcaccccagtgctggaggtcagcgtggcggctttggtagcccaggtggcggcagtggtggcatgagcaggggccggggccggagggacaacgaactcatcggccagaccgtgcgcatctcccaggggccctacaaaggctacatcggtgtggtgaaagatgccacagagtccacggcccgtgtggagctgcactccacctgccagaccatctctgtggaccgtcagcggctcaccacggtgggctcacggcgcccgggcggcatgacctcgacctatgggaggacgcccatgtatggctcccagacgcccatgtatggctctggctcccgaacacccatgtacggctcacagacacccctccaggatggtagccgcaccccacactacggctcacagacgcccctgcatgatggcagccgcactcctgcccagagtggggcctgggaccccaacaaccccaacacgccgtcacgggctgaggaagaatatgagtatgctttcgatgatgagcccaccccgtccccgcaggcctatgggggaacccccaatccccaaacacctggctacccagacccctcgtccccacaggtcaacccacaatacaacccgcagacgccagggacgccggccatgtacaacacagaccagttctctccctatgctgccccctccccacaaggttcctaccagcccagccccagcccccagagctaccaccaggtggcgccaagcccagcaggctaccagaatacccactccccagccagctaccaccctacacccgtcgcccatggcctatcaggctaaccccaacccgagccccgtgggctaaagtcctatgacacctggaactccctcccctgggtggctacaaaccacacacgccaggctcaggcatcgagcagaactccagcgactgggtaaccactgacattcaggtgaaggtgcgggacacctacctggatacacaggtggtgggacagacaggtgtcatccgcagtgtcacggggggcatgtgctctgtgtacctgaaggacagtgagaaggttgtcagcatttccagtgagcacctggagcctatcacccccaccaagaacaacaaggtgaaagtgatcctgggcgaggatcgggaagccacgggcgtcctactgagcattgatggtgaggatggcattgtccgtatggaccttgatgagcagctcaagatcctcaacctccgcttcctggggaagctcctgggaagcctgaaagcaggcagggccggtgggantttcgtcgggatggaagaattgattcct

SEQ ID NO: 169852 - DNA, 689 bp, Homo Sapiens
  misc_feature (157)..(157): n is a, c, g, or t
  misc_feature (161)..(161): n is a, c, g, or t
  misc_feature (199)..(199): n is a, c, g, or t
  misc_feature (525)..(541): n is a, c, g, or t
  misc_feature (552)..(552): n is a, c, g, or t
ggacgcgtgggtccggacgcgtgggtccagaagcagatggagatccagtacccgtccatgctgctcctcactgctgaccatgatgaccgacgtgggtcccgcttcactccctgaagttcattgccaccctttcagtacatcgtgggccgcagcaggnaagncaaagcaaccccctgcttatccacgtggacaccaaggncggggccacggggcggggtaagcccacagccaaagtgatagaggaagtctcagacatgtttgcgttcatcgcgcggtgcctgaacatcgactggattccataaacagttttcgtgcttcctcctgacagcgacagaaaacctcaagggctttcccacgttgacaccaagaaaccactgggcataatgcttccccacgggaacattattcctgcactcacaggctacagttgaacagaactgccgtgggaattttatcttttttaggcttctcctttttagcaaggccttggtgtttctttttccaccctgtctaggcacatgtggnnnnnnnnnnnnnnnnnaagggcatgtngggataaatagctaaatggcaacaaacacattgtgaatattagattgctgaattaaggatcatagtcgggcatacttatctatatccaataacctctataatctttaaaataaaatgtgagaacctgttcaaaagac

SEQ ID NO: 169853 - DNA, 971 bp, Homo Sapiens
cgtctctcggttccacttggaacccctgggttttcgttcgcgttcaggaggacctctgtacttgtgtatggaatccgttcgacgttcagcaccgcgcgagtgacgccaagcatgttggagacctcctcgtatcactttggcttgtgggctttcccccgcccccgtgcctccgccttgggtttccacgtggataaaccagggggtttgctttgctttcctgctgcggccccacgatgtactgaagggtggcaatgaacttcagggagtgaagcgggaccacgcggtcatcatggtcagcaatgaggagcagcatggacgggtactggatgtcatctgcttctggtaacttcacattatgcaatggagagtatttgacaagccattcaaagtgttgtttgctgtccgagcacccataatcagtggtccaagcatggccgatggtatatttacgaaacttcagcatgtccattactccaacttgggcaataacacaaccaaagaggtcaggtctctgatttgcacaagcagccactaagaggcctccatttgaacctccattaatagtcagcctcttgggagatgtgtaaccttccttgatcagatactcagcagcacactgaaagtcatcaaagcagttttgtttgttggccaagataccacctttatgccacgtctctccatattcgccacctcctctgatgttggccactgccaggataccacccatgtgtctcacaaaaataagcctggaaacactgtagttgggtgtgatggatatgttgaagccgccatagccatataagaaagctggatgagagccatccaattttatgccttttttatgcacaatgaacattggaatcttcgtaccatccttgctagggtagaaaatctggactgtctggtaatcagaagcatcaattccttttacggtcacctctcggaaaactcttggctccagctcctctttg

SEQ ID NO: 169854 - DNA, 396 bp, Homo Sapiens
tctgctgctgtggccgatcgaaagatgtgggccgagatgaagatgagcccaaccgatctcgttgacgtgagcgggcacacctacacctacctcatgaacggccaggcgccaaatgggaactggacgggaatcttcaagccaggggagaaaatccggcttcgctttatcaatggctcggcgatgacctatttcgacgtgcggatccccggcttgaaaatgacggttgtcgcagccgacggtcagtacgttaagccagtgtcgatcgatgaattccggattgccgttgctgaaacctacgatgtcattgtcgagcctgaaaacgagcaggcttacaccatctttgctcaatccatggatcgcaccggctattcaaggggtaccttggctgccgtcaaa

SEQ ID NO: 169855 - DNA, 586 bp, Homo Sapiens
tctccatcatcatctccacatcttcctgacctctctactggcaccctcctccaaaaagtccaatcagtttagggtctgagtatcatctcagagcctgagatgaggagtaataacaccgataggagatggctaggcaggctcagagcctataaaggattatgccatctgaggaaaggactctagtgtgttctagctgactgaaaacagaaaaatgccaagtactaaaatattttaagaatgttatgagcatctgtaatgagtgggggtgagatgtaaagtacaaagagagtaagagctgtgctccatgaagacagcattcagaaaacactaggcatagtgtttaagagcccgacccttggctgtgagctggaaggctcccctatgtttccttctgccatcaacccaaccaattagactatttcatgggagaaacagaatccctcctttcttctccctcctttcctccaaacactcacccactgttacaaatgaactaacaattaggagaggaaatgagtgtaaaccaaatgcaccaaaaaagaaattcctcagtgccattagccactgcaaaataacttcaggcccc

SEQ ID NO: 169856 - DNA, 514 bp, Homo Sapiens
  misc_feature (453)..(453): n is a, c, g, or t
  misc_feature (462)..(462): n is a, c, g, or t
  misc_feature (467)..(467): n is a, c, g, or t
  misc_feature (488)..(488): n is a, c, g, or t
  misc_feature (497)..(497): n is a, c, g, or t
agattcggaacgaggaacctcttgaggatcgaatcttcactcccgctgtctcagcagtctacagcacggtaacacaagtggcaagacagccgggaacccctaccccatccccttattcagcacatgaaataaacaaggggcatccaaatcttgcggcaacgcccccgggacatgcatcgtcccctggactctctcaaaccccttatccctctggacagaatgcaggtccaaccacgctggtataccctcaaacccctcagacaatgaattcacaacctcaaacccgttctccgtttttccagaggcctcaaatacagcctcctagagctaccatcccgaacagcagtccttccattcgtcctgggtgcacagacacccactgcagtgtaccagggttaattcaggcacatcatggatgggttaaccatctgcccttgccgtacccagtgcccngggggcttnagtantgtattaccacagttaccgtnatagttggncttcttatgtttggggc

SEQ ID NO: 169857 - DNA, 874 bp, Homo Sapiens
cccacaaattcaccctcttccaaaccatctcacacatcacgccgagctacaactacgcgcccaacccggacaaacactggatcatgcgctacacggggcccatgaagcccatccacatggaattcaccaacatgctccagcggaagcgcttgcagaccctcatgtcggtggacgactccatggagacgatttacaacatgctggttgagacgggcgagctggacaacacgtacatcgtatacaccgccgaccacggttaccacatcggccagtttggcctggtgaaagggaaatccatgccatatgagtttgacatcagggtcccgttctacgtgaggggccccaacgtggaagccggctgtctgaatccccacatcgtcctcaacattgacctggcccccaccatcctggacattgcaggcctggacatacctgcggatatggacgggaaatccatcctcaagctgctggacacggagcggccggtgaatcggtttcacttgaaaaagaagatgagggtctggcgggactccttcttggtggagagaggcaagctgctacacaagagagacaatgacaagggtggacgcccaggaggagaactttctgcccaagtaccagcgtgtgaaggacctgtgtcagcgtgctgagtaccaggacggcgtgtgagcagctggggacagaaagtggcaatgtgtggaagaacgccaccggggaaacttgaaacctgcataagtggccagggcccccatggcggcttggggcgggccaacaaaaaccccctcttccaaccttcggtggccccaattacttaacggggaaggggcaacccagggccctggcaccctggggaacagcggggggaaacatccaa

SEQ ID NO: 169858 - DNA, 848 bp, Homo Sapiens
cgactcgtacctcgggacacggccgtccacggtaccacatcggccagtttggcctggtgaaagggaaatccatgccatatgagtttgacatcagggtcccgttctacgtgaggggccccaacgtggaagccggctgtctgaatccccacatcgtcctcaacattgacctggcccccaccatcctggacattgcaggcctggacatacctgcggatatggacgggaaatccatcctcaagctgctggacacggagcggccggtgaatcggtttcacttgaaaaagaagatgagggtctggcgggactccttcttggtggagagaggcaagctgctacacaagagagacaatgacaaggtggacgcccaggaggagaactttctgcccaagtaccagcgtgtgaaggacctgtgtcagcgtgctgagtaccagacggcgtgtgagcagctgggacagaagtggcagtgtgtggaggacgccacggggaagctgaagctgcataagtgcaagggccccatgcggctgggcggcagcagagccctctccaacctcgtgcccaagtactacgggcagggcagcgaggcctgcacctgtgacagcggggactacaagctcagcctggccggacgccgggaaaaaactcttcaagaaaaagtacaagggccagctatgtccgcagtcgctccatccgctcagtggccatcgaggtggacggcagggtgtaccacgtaggcctgggtgatgccgcccagcccccaaaacctcaccaagcggcactggccaaggggcccctggaggaccaagatgaaaaggatggggggggaattcagtgggaactggcagggcctt

SEQ ID NO: 169859 - DNA, 208 bp, Homo Sapiens
ggaaaaaccgaagggcgcaggactggcaaaacccaaagtccagaggcagaaaggtgcatgtgctgggaagggccagtgactgcagccaaggtttctgccaggaagttgtgagaaacaaggctggagagatgaacagggtccaaaatgcagggcttggcccgtccagcagaaagcagagacctggactcaggccctgacttgaaccttc

SEQ ID NO: 169860 - DNA, 743 bp, Homo Sapiens
  misc_feature (87)..(87): n is a, c, g, or t
actaccgggcaggcacctctccgggcacccccaatcgcattttcttcaacgacattccctttgggaaccatccaacagatcacgacngatggctccaggaggatcaccattgtggaaaacgtgggctccgtggaaggcctggcctatcaccgtggctgggacactctctattggacaagctacacgacatccaccatcacgcgccacacagtggaccagacccgcccaggggccttcgagcgtgagaccgtcatcactatgtctggagatgaccacccacgggccttcgttttggacgagtgccagaacctcatgttctggaccaactggaatgagcagcatcccagcatcatgcgggcggcgctctcgggagccaatgtcctgacccttatcgagaaggacatccgtacccccaatggcctggccatcgaccaccgtgccgagaagctctacttctctgacgccagcctggacaagatcgagcggtgcgagtatgacggctcccaccgctatgtgatcctaaagtcagagcctgtccaccccttcgggctggctgtgtatggggagcacattttctggactgactgggtgcggcgggcagtgcagcgggccaacaagcacgtgggcagcaacatgaagctgctgcgcgtgacatcccccagcagcccatgggcatcatcgccgtggccaacgacaccaacagctctgaactctctccatcccgagtccgctgcattggtacc

SEQ ID NO: 169861 - DNA, 1073 bp, Homo Sapiens
  misc_feature (427)..(435): n is a, c, g, or t
  misc_feature (736)..(739): n is a, c, g, or t
  misc_feature (741)..(749): n is a, c, g, or t
  misc_feature (752)..(757): n is a, c, g, or t
  misc_feature (766)..(805): n is a, c, g, or t
  misc_feature (853)..(928): n is a, c, g, or t
  misc_feature (972)..(981): n is a, c, g, or t
  misc_feature (1013)..(1022): n is a, c, g, or t
aaggagcgaggcctgggtggcgaattcggcacgaggcttcctcagagattcgtgatacgcgtttctccactgacagacatttaaaaacaaccttcagctccgtttcaatcaatcacctcgacttgttttttagcatggacactgccagcaggacagacagggatggagtaaaccgaagtcaatttcagggctcttggcgtgttggacacagaagaaatcctagtgcagcctttggtagctaacagtcactgattttataattggagaatgcgtaaagattcatttttcaaggagaagagcctgcaaatggccaatgaaggaggtaaataaactaagatattccgagggaagggacccaggccacctcccttccgcaggtctgcagatgaagggttttttgaatgaaatgccactgtgcattttcagnnnnnnnnntctctgataaacagactttgaatggatgtttgttcctcctgattctcttttctcttcgtggcgacttagagttggcggatattcggaactgtgaatgtacatagcgttgagttaaaccccttgtgtgtgagacaggacgcagcgggcccctggtggcctgggggccagacccgtgggcaggtggggcatgggccctggcctgcggggacctgctggggtgtgagggcagagggagggttgccatgaaggaacttgggattttcaatggaataaataaaacataaagtctatacttgggaannnnannnnnnnnnaannnnnnctcgaggcnnnnnnnnnnnnnnnnnnnnnnnnnnnnnnnnnnnnnnnncatgggtcatagctgtttcctgaccccgctttcttgtacaagatggtnnnnnnnnnnnnnnnnnnnnnnnnnnnnnnnnnnnnnnnnnnnnnnnnnnnnnnnnnnnnnnnnnnnnnnnnnnnntgcaggtacccggggaatttaccccgccctaaggaagccgggcnnnnnnnnnngggaacccaaagggatcttccttggaaatccnnnnnnnnnnctgcgagaaaatctgctggcctggcaaacaaaaaaaccaccggttaaccaa

SEQ ID NO: 169862 - DNA, 953 bp, Homo Sapiens
  misc_feature (891)..(891): n is a, c, g, or t
ggccctggatggggtattttggtgtcacctgaagtccctctgacatcaccttgtttcatcattttttatgacagaattagaaacccatccttcaagcacaataatcatcacagacttgagtttgcttcctaaagcaaaggctccgggtttgtttggaaaatttttttgatttctgaaatgaattgatttttatatttggggcatctctatagaaagtgaccaccaaggccagtaagtacgggaaaaaatgtttactaacttcctcagagattcgtgatacgcgtttctccactgacagacatttaaaaacaaccttcagctccgtttcaatcaatcacctcgacttgttttttagcatggacactgccagcaggacagacagggatggagtaaaccgaagtcaatttcagggctcttggcgtgttggacacagaagaaatcctagtgcagcctttggtagctaacagtcactgattttataattggagaatgcgtaaagattcatttttcaaggagaagagcctgcaaatggccaatgaaggaggtaaataaactaagatattccgagggaagggacccaggccacctcccttccgcaggtctgcagatgaagggttttttgaatgaaatgccactgtgcattttcagaaaaaaaaatctctgataaacagactatgaatggatgttcgttcctcccgattcctcttttctcttcgtggcgacttagagattggcggatattcggaactgtgaatgtacatagcgtcgagttaaaccccttgtgtgtgagacaggacgcagcgggcccctggtggcctgggggccagacccgtgggcaggtgggggcatgggccctggcctgcggggaacctgctggggttgtgagggcanaaggagggttgccatgaaggaacttggggattttccaatgggaataagtaaaaacataaagg

SEQ ID NO: 169863 - DNA, 629 bp, Homo Sapiens
  misc_feature (34)..(34): n is a, c, g, or t
  misc_feature (54)..(54): n is a, c, g, or t
  misc_feature (82)..(82): n is a, c, g, or t
  misc_feature (105)..(105): n is a, c, g, or t
  misc_feature (120)..(120): n is a, c, g, or t
  misc_feature (128)..(128): n is a, c, g, or t
  misc_feature (175)..(175): n is a, c, g, or t
  misc_feature (177)..(177): n is a, c, g, or t
  misc_feature (181)..(323): n is a, c, g, or t
tccaagccttcttaacccccttcttacccctctntgggccttggtttctttaangggtaacattgggatgataatatctctnacctggttcctcccaacctggcnccttggccaagaccntcatctcntcatgagcaattgccatagacttctggtctcttcccttcagattccntngggnnnnnnnnnnnnnnnnnnnnnnnnnnnnnnnnnnnnnnnnnnnnnnnnnnnnnnnnnnnnnnnnnnnnnnnnnnnnnnnnnnnnnnnnnnnnnnnnnnnnnnnnnnnnnnnnnnnnnnnnnnnnnnnnnnnnnnnnnnnnnnngtgtgagttcttttaagctgtgtgaccttggccaaggtgcttaacctttccctgccaagtctcaaacacctctttgtccagctactatgcttccatcaagaatcaataggacctatgtccctacaggtgtcagggtagctggcagaatggtgatgcccttggcagaggcaggcaaggccaaaggaagggctggttctggcagggagtgaaggatcttactttgagaggtattgaatatgaggtggctgcagacagatggtgacgccatctgagaggcagcaggaagtaggtaagagggctaggagg

SEQ ID NO: 169864 - DNA, 637 bp, Homo Sapiens
  misc_feature (49)..(88): n is a, c, g, or t
cagcccaggatcccagcccattccatgaccaactccatggagtctctannnnnnnnnnnnnnnnnnnnnnnnnnnnnnnnnnnnnnnnggtcagagcccagggggcctaccccaaccccactacaagctactccaagttggctactggggggaaagcgaggggggaaattaggccagaggctcaacccccatctccggcagtgtccagaggcttcttctttctgtcttcagtgttgcagcacatgccttttaccctacccctctccctgccaccctgggcaggggaaggggctgcactctcagtacttattgattccaaaaatccggactccgtggagctggggcagcttggggataagcacgctcatcagggacacggtgttgagcacaaaatggatctggtcgtacttagtgtagaagctggtgaggaagtacagcacgatgggtgtgatggtcaagaacttccgagaggccgtgaactggaccccataatccatctgctccagtgggttagcagcctcgccttgcctggtccggggtctcaaaaggtgtccccttcaccgtgtgcaggaagatatacatgcccatgttgtgaatgaggttggtgagggtccagacgaggtaagagggctaggag

SEQ ID NO: 169865 - DNA, 701 bp, Homo Sapiens
  misc_feature (467)..(503): n is a, c, g, or t
  misc_feature (534)..(534): n is a, c, g, or t
cttcctagccctcttaccgctccccaacctccaccaggcaggatggcagcagccctggccccctcacctctggaaccaagccatctacactctaccccatctttccccaacctgacccttccccactcccaaccaggacccacggtgggttgcagagaagctgccaaaagcctgggacttggattagacagctccctacccagaaaggcaaagacccatcccacacttgcttccatacacaaaagcacacactgcgtggcatcgaaaaaaacctaggaatcacagtgaaacaatccagaagccgtaccgccctctgctccctatgcaggggttaaagtgctttggctgcctgagggcaaacaagtgagcaggggtttttcccctggcctcctgtcgcaactgcgtggtccatgttcagcccaggagcccagcccattccatgaccaactccatggagtctctattcnnnnnnnnnnnnnnnnnnnnnnnnnnnnnnnnnnnnntcagagcccagggggcctaccccaaccccantacaagctactccaagttggctactggggaagcgaggggggaaattaggccagaggctcaacccccatctctggcagtgtccagaggcttcttctttctgtcttcagtgttgcagcacatgccttttaccctacccctcccctgccaccctgggcaggggaaggggc

SEQ ID NO: 169866 - DNA, 687 bp, Homo Sapiens
cagcgttaaattcgtcctcagctccagcagcccatcagacgcctaccacagccgtcgtaccagacgccaccgtcactgccaaatcacatctccagggcgcccagcccagcgtccttccagcgctccctggagaaccgcatgtctccaagcaagtctccttttctgccgtctatgaagatgcagaaggtcatgcccacggtccccacatcccaggtcaccgggccaccaccccaaccacccccaatcagaagggagatcacctttcctcctggctcagtagaagcatcacaaccagtcttgaaacaaaggcgaaagattacctccaaagatatcgttactcctgaggcgtggcgtgtgatgatgtcccttaaatcaggtcttttggctgagagtacgtgggctttggacactattaatattcttctgtatgatgacagcactgttgctactttcaatctctcccagttgtctggatttctcgaacttttagtcgagtactttagaaaatgcctgattgacatttttggaattcttatggaatatgaagtgggagaccccagccaaaaagcacttgatcacaacgcagtcataggaaggatgacagccagtccttggcagacgattctgggaaagcaaggaggaagatgatgaatgtattgatgacgacgaggtaagagggctaggagg

SEQ ID NO: 169867 - DNA, 1697 bp, Homo Sapiens
  misc_feature (128)..(128): n is a, c, g, or t
  misc_feature (972)..(972): n is a, c, g, or t
cccctggtccctcagcaaccagaccagagccctcccaccaccagggcaggacagaggcaaagtcagaagcagcagcggtggcagggagggagcagccagcacaggcccagggctctcctgaagtcatntaagctgtctgccatgcggctctgggactggccactaggtgggcgtaggcggctgtgatacaggtacttggacacctttctgtcctgatgctagctgatacttgtctttggctgctgcccgctccttggcatcaaaataccagacagtgatggcgtacctggtggcataggctggcttcacctcgtgggggttccgccggtcagaccagaaaatgagcaaccggtcaaagagtggctcgatgttggctaccacgggccggccctcagggaagatctgcagcaggccgccatgcaccttaacgtcccagttctgattcaggtaatagatacaggtgatgcagcgcccatcgccgtggggattgtcaacgtgccttacgtacccgagcccgttgcctgggtaacacgccaccatggccttggtgcgcccgttgatgacatagctgcccagccgccctgcgcagtggcggatgacggcgtccacatgggccatgagggcaccaatgcttcgacagcctggttcatggccttccacccaggcaatctggtccccacggatgctgcgcggcgggatcgccctctggctaactagctgcccgtctcgcaggcgcccaccccgtttgagggcctccacctcggccagcacgcgaccgcccagtgctgcccccaggaagctgtccttgacgcagatgccgtagtaccgcatgcagggcacgatatagtccagggcccagggctcgggcgcagagggcagcgcctcctccatcagcccagcactggcctcaccactgccactgtgcagctgcagctcatgccaccctcccgctctgcctcctggttctcttgncctgcccagggccgtttgctgggtgaaggggcatccccaccatcctcggcccatttccgtttgggggcctcaggccgtgcgccctgggctgccaatcgctggcaccccttggtgaccagcgctgcagcgccttcactctgcagcggccgcagctcaccaccatcctgcccgccaaaaccgtcccgaagagggctggcagtggtagaggtggctgtggctctgggggtcccactccctgccaaggcctcactaggcactcctggacagtggtaggaggggagcaggggacagggcaggtaactctccactcccatcctggcccggccaggctgcaggctccaagggctctgacgaagaccctggtaactgagggagagcctgacttaggggctgcggctggcacgggctgtccatggcagcagtgtcttcatcccccgggcatggagggcaccgccagggcccatggtgccaccctcctccgcctcctcctccgcctccacttgatgcagctgggggccaccgggcctggcgtggggcagggtgaggcagggcagacagcaagagctcttctcgtgccctgggggttgcttgctggtccccaagtcctctgcggtccctaagggcttgggaagggacccttcagggtggcgagctttttcctccggccccggcgccgccgtttgtgccagccgccctgcgccgcacagcgcgccataccccgcccc

SEQ ID NO: 169868 - DNA, 893 bp, Homo Sapiens
  misc_feature (723)..(724): n is a, c, g, or t
  misc_feature (726)..(727): n is a, c, g, or t
  misc_feature (729)..(732): n is a, c, g, or t
  misc_feature (736)..(736): n is a, c, g, or t
  misc_feature (742)..(747): n is a, c, g, or t
ccacgaggtgaagccagcctatgccaccaggtacgccatcactgtctggtattttgatgccaaggagcgggcagcagccaaagacaagtatcagctagcatcaggacagaaaggtgtccaagtacctgtatcacagccgcctacgcccacctagtggccagtcccagagccgcatggcagacagcttaaatgacttcaggagagccctgggcctgtgctggctgctccttccctgccaccgctgctgcttctgactttgcctctgtcctgcctggtgtggagggctctgtctgttgctgaggaccaaggaggagaagagacctttgctgccccatcatgggggctggggttgtcacctggacagggggcagccgtggaggccaccgttaccaactgaagctgggggcctgggtcctaccctgtctggtcatgaccccattaggtatggagagctgggaggaggcattgtcacttcccaccaggatgcaggacttggggttgaggtgagtcatggcctcttgctggcaatggggtgggaggagtacccccaagtcctctcactcctccagcctggaatgtgaagtgactccccaacccctttggccatggcaggcaccttttggactgggctgccactgcttgggcagagtaaaaggtgccaggaggagcatgggtgtggaagtcctgtcagccaagaaataaaagtttacctcagagctgccnntnncnnnnaccncccccnnnnnnaaactcgaaggcatcttatgtccggggtccgggataaaaaaggtaaatggaaatgggcccatgggcccataatctggttttcctggaacccaaccttttcttttgaaacaaaaagggggttaaaaattctggcccgggtcttcccc

SEQ ID NO: 169869 - DNA, 409 bp, Homo Sapiens; identical to SEQ ID NO: 97911
  misc_feature (378)..(378): n is a, c, g, or t

SEQ ID NO: 169870 - DNA, 531 bp, Homo Sapiens
gctccagctcccagattccgatgcagtgtctttaggcagctgtgctggcggatgaggccctcgtactcggccgattgccgctcgtgcagcgtgcccaggtgctcgtggtcctgcagcagggcctcgtaggccgctgtaatttgctcctgctgcctctgcaggctttcgttctccgtctccttggccgtgtggtggttctgcagcagcgtgtactgcgcggtgagcgctgcgctctgggaactcagcgtggagttctccacctgcagcttgccggtctgggtctgcagtgtggtgttgtgctcctgcaggaaggcgctctgtttctgcagtgtcaagatctggctgctgaaggtcacgttctgggtctccaggtgctgcagctgttcctttagcagctgcttctcagcctgcagagctgcattattccgctccagctcgatggcccaggtccttcactcggagaagctccatggtggcttccttatgccgggcccccagcctctccctggtgacgtcggtgtcccgggatcc

SEQ ID NO: 169871 - DNA, 826 bp, Homo Sapiens
cctaactggctccgcaagctgacccttgccatccccatcatcgctgccatcctcttcttcttcgtcatgagctgcctgctgcagacaagcttcaccgaccctgggatcctgccccgggccactgtctgtgaagcagccgccctggagaaacagatcgacaacacaggcagttctacataccggccaccccctcggacccgggaggtgctgatccacgggcagatggtgaagctgaagtactgcttcaccgccaagatgttccggccaccccgaacctcacactgcagtgtctgcgacaactgtgtggaacgatttgaccatcactgcccctgggtgggcaactgtgtggggagacggaactatcgcttcttctacgcgtttattctctccctctcattcctgacggacttcatcttcgcctgtgtggtcacccaccggacgttgcgcgctcagggaagcaacttcctccccactctgaaggagacaccagcaagcgtgctggagttggtgatctgcttcttctccatctggtccattctgggcctctcagggtttcacacgtacctcgtcgcctccaacctgactactaatgaaaacatcaaaggctcgtggtccagcaagaggggcggtgaggcctctgtcaacccctacagccataaaagtattatcaccaactgctgtgctgtgctctgtggccccctacctcccagcctaattgaccggaggggatttgtgcagtccgacaccgtgtcgccctcacccatcagaagcgatgagccagcctgcagagccaagcctgatgccagcatggtaggaggccacgcct

SEQ ID NO: 169872 - DNA, 748 bp, Homo Sapiens
ggatcccagcgcggtgctcggcgtacagcagacgctggaggagatggacttcgagaggggaatctggtcggcagccctgaatggagacctgggccgagtgaagcatttaatccagaaggccgaggacccaagtcagcccgactcggccggctacactgcgctgcactatgccagccgcaatgggcactacgctgtgtgccagttcctgctggaaagcggagctaagtgtgatgcccagacccacgggggtgccactgctctgcaccgagccagctactgcgggcacactgaaatcgcgcggctcctgctatcacatgggtccaaccccagggtggtggatgacgacggcatgaccagtctgcataaggctgctgagaggggtcacggggacatctgctccctcctcctgcaacacagcccagccctgaaggccatccgggaccgaaaggcacggctagcatgtgacctgctgccttgcaacagtgacctgcgggacctgctatccagctgagccgccaccctatctccagctgcctttaaagggtacacagaccagttctccaagcccctgccttggtcagcatccatgctgctgggcagggaactgaggccagaccacccaggaagagccccagtctggtcactgtggaagcgagggagtagatttggtgtggctaaaagtgtttaagactggacagatgatcatattctaaattagttcatatgagacatctatttatttggaaaa

SEQ ID NO: 169873 - DNA, 237 bp, Homo Sapiens
aaatcacatttgatactatccttctgaaaagtctgagacagatctacaaactacagtcaaaattatagattaagaggaatgaatgcacctatttggctttaagttgaagatgaattatttctcatgctcattttcttgcggcagttatcttagaaagaccccccaaggctttgtgattgtaagcactgtcatgatcacagaatgcaagcttctggtaccatgaccctcaacttagag

SEQ ID NO: 169874 - DNA, 624 bp, Homo Sapiens
cggcacgaggctagaagataccagacatttgtgaatttcaattattgtactggcatcctgggctctcaaagtatcacatcagggaaacattactgggaggtagacgtgtccaagaaaactgcttggatcctgggggtatgtgctggcttccaacctgatgcaatgtgtaatattgaaaaaaatgaaaattatcaacctaaatacggctactgggttatagggttagaggaaggagttaaatgtagtgctttccaggatagttccttccatactccttctgttcctttcattgtgcccctctctgtgattatttgtcctgatcgtgttggagttttcctagactatgaggcttgcactgtctcattcttcaatatcacaaaccatggatttctcatctataagttttctcactgttctttttctcagcctgtatttccatatttaaatcctagaaaatgtggagtccccatgactctgtgctcaccaagctcttgaaccttcttacacactcagccccttctgtacagcacctcttgtccaggtgcatctcatacacctgaactcatttgcatcattttaaccatctttaccctcgtccggggatcctctataatcaccgcagca

SEQ ID NO: 169875 - DNA, 1322 bp, Homo Sapiens
  misc_feature (901)..(901): n is a, c, g, or t
  misc_feature (1084)..(1084): n is a, c, g, or t
  misc_feature (1192)..(1192): n is a, c, g, or t
gtggggtcatgatgaggcaccggacaggcctctacaactactacgacgacgagaaggaaaagctgcaaatcgtggagatggcccctggcccacaagctctccagcctcatcatcctcatgccccatcacgtggagcctctcgagcgccttgaaaagctgctaaccaaagagcagctgaagatctggatggggaagatgcagaagaaggctgttgccatctccttgcccaagggtgtggtggaggtgacccatgacctgcagaaacacctggctgggctgggcctgactgaggccattgacaagaacaaggccgacttgtcacgcatgtcaggcaagaaggacctgtacctggccagcgtgttccacgccaccgcctttgagttggacacagatggcaacccctttgaccaggacatctacgggcgcgaggagctgcgcagccccaagctgttctacgccgaccaccccttcatcttcctagtgcgggacacccaaagcggctccctgctattcattgggcgcctggtccggcctaagggtgacaagatgcgagacgagttatagggcctcagggtgcaccacaggaatggcaggaggcatcccaagggtcctgagacacatggggtgctattgggggttgggggggaaagtgaaggtacccaccccttgggaaactcccatgcgggtggggggggtgggaaaaaacacaacacgggcgtttcccccgcggtggccctggaaaccgggaacccttttcccccggcgcttaaaaaattccgccctcccaccccttttgtgaacccatgtggggcccccccctccgaatataacccaatgggatatgggcctcgcaagaccccccgggaaaaaaactttcccaacctattccacccggcggggnggggaaaccctcgcggcggccccaataaaaacaccccttttttctctggcccgctgggcacacctggaaaaagagatcctcccaatcaatatcataagctcccctgggccctcttccaaatccccgctgtatttgtccagtaatcccacacgacggcgcacgagggggacgcatctttctttnaaccccgcgtgggacgcgactaacacaatttggtgaggcctacccggtggggggcgcctatttcacacagccctccctctctttccctttggaaaagccttacagatntaaaaccatctccgcagtttgtcacgctatacttccacagatcttcttatatcatcctcagcgccgccctttttgttctatagccgcggtataaaaatatctttactgggcctctattgacgatacgccc

SEQ ID NO: 169876 - DNA, 863 bp, Homo Sapiens
tgaggataccgatggcagccctttgaccaggacatctacgggcgcgaggagctgcgcagccccaatgctgttctacgccgaccaccccttcatcttcctagtgcgggacacccaaagcggctccctgctattcattgggcgcctggtccggcctaagggtgacaagatgcgagacgagttatagggcctcagggtgcacacaggatggcaggaggcatccaaaggctcctgagacacatgggtgctattggggttgggggggaggtgaggtaccagccttggatactccatggggtgggggtggaaaagcagaccggggttcccgtgtgcctgagcggaccttcccagctagaattcactccacttggacatgggccccagataccatgatgctgagcccggaaactccacatcctgtgggacctgggccatagtcattctgcctgccctgaaagtcccagatcaagcctgcctcaatcagtattcatatttatagccaggtaccttctcacctgtgagaccaaattgagctaggggggtcagccagccctcttctgacactaaaacacctcagctgcctccccagctctatcccaacctctcccaactataaaactaggtgctgcagcccctgggaccagggcacccccagaatgacctggccgcagtgaggcggattgagaaagagctcccaggaggggcttctgggcagactctggtcaaaaagcatcgtgtctggcgttgtggggatgaactttttgttttgtttcttccttttttagttcttcaaagataggggagggaagggggaaacatggagccctttggttgctaatcaatccaaagaatttattttggaacaa

SEQ ID NO: 169877 - DNA, 1124 bp, Homo Sapiens
  misc_feature (562)..(591): n is a, c, g, or t
  misc_feature (911)..(911): n is a, c, g, or t
  misc_feature (1112)..(1112): n is a, c, g, or t
tctccttgcccagggtgtggtggaggtgacccatgacctgcagaaacacctggctgggctgggcctgactgaggccattgacaagaacaaggccgacttgtcacgcatgtcaggcaagaaggacctgtacctggccagcgtgttccacgccaccgcctttgagttggacacagatggcaacccctttgaccaggacatctacgggcgcgaggagctgcgcagccccaagctgttctacgccgaccaccccttcatcttcctagtgcgggacacccaaagcggctccctgctattcattgggcgcctgggtccggcctaagggtgacaagatgcgagacgagttattagggcctcagggtgcacacaggatgggcaggaggcatccaaaggctcctgagacacatgggtgctattggggttgggggggaggtgaggtaccagccttggatactccatggggcgggggtcgacccctcgaccggtgctcccgttgccctttagtcccccttcccagttataattacttccccttcgacccgcgggccccccatctcacgcacgnnnnnnnnnnnnnnnnnnnnnnnnnnnnnngtgggcaaccgccctacatcaggaaattctcccctttcaaattccatgatcccatctatccgcctttccctctccctcttatctctcccacccccttttaccccactctgccctttcccacacccatctcgcattacctcaatctccgagctataaagagatggtacgcgttccgtcctcccccccttcccctccctcgttacgatctctatcaccgccccgtcgatacttccctcaccttctctcaccccgccccgattcattatttcaatgtttgcccccctcaccctcctgtgcgcttctatacgtacttcgggatncgcactcatctcctaccaccctcacaagattcccaacctctcattgctcttctctacgaccccactcacctctgcatcgcacacttccttattagtccaacttatgtgggtcttatcctatgtgtcgcacactatttaccgcctggctacctctataacatcgccctatgcgcgaaagctgctctccctctccgactgaantcaccaccacag

SEQ ID NO: 169878 - DNA, 496 bp, Homo Sapiens
  misc_feature (81)..(81): n is a, c, g, or t
  misc_feature (441)..(450): n is a, c, g, or t
gggtgggacctgggccatagtcattctgcctgccctgaaagtcccagatcaaacctgcctcaatcagtattcacatttaanagcccaggtaccttctaacctgtgagaccaaattgagctaggggggtcagccagccctcttctgacactaaaacacctcagctgcctccccagctctatcccaacctctcccaactataaaactaggtgctgcagcccctgggaccaggcacccccagaatgacctggccgcagtgaggcggattgagaaggagctcccaggaggggcttctgggcagactctggtcaagaagcatcgtgtctggcgttgtggggatgaactttttgttttgtttcttccttttttagttcttcaaagatagggagggaagggggaacatgagcctttgttgctatcaatccaagaacttatttgtacannnnnnnnnncaataaaacttttcccacccccctcacacctcttctccctagaata

SEQ ID NO: 169879 - DNA, 752 bp, Homo Sapiens
agtcaccagcaagtcaccacaggtgtccaaacaagagactttcccagaaactgatgccaagaactgtacaaaggccacatccatcacaggcctgtcggtcacagtaagaggaaatgtctggggtttcaacgtcagccctgctctggtttctgcctcaggaaccatcacctgcactttgtaagtccctggttttgctttaaaacaaaatgatccatgagcatctgtctccacggtgaccaaagacttgtccttgtcttgagatgacaggacaactttgtatttattcatctgcttgacggtgtcggggaagcgaatgattgatatctgaccacagacactgaaccctgttgcaacaatgtcagccagctgaggtgtgttcggtgcaattttgatggtgaccgtttcaaagtagaggtgctctttctgagcatggatggtgtatgtccctgtggttatgttctcaaggcggaatgagccatcagcttttgttttaactttgatttggttattcagggtgactactgcttctggaacaccatctccttcgggtccgttcaagaccctcccggtgacggagaatcccatgacgtggaacacgggctcgattttcaagctgtcatgctccactgtgaagtcaagcctggaaggcgccacatcaaaggtaatcctctcccctcgatagaacggaatcacagtgtagcccccactttgcaaggaatagaaagagacgagccatcttctctgagttcgag

SEQ ID NO: 169880 - DNA, 434 bp, Homo Sapiens
ccgcgtttcaagctgggttctaagcatatctttgagatggaaagtgttcggggtcagctccagaccatgctccaaacctcacgtgatacagcctatcgggatcctctcattcctggcgctggctcagagagacgggaagaggactcctttgacagtgatagcacagccaccttgctcaacacccggcccctgcaagacttgtctccatctagctcagcccaagccctggaggagctgtttccccgctacaccagccttcggccagggcctccactcaatcccccagattttcaggggctgagagaagcattggattcagagcatacccgccgcaagcattgtgagcgccatattcagagcctgcagacccgagtgttagagctacagcaacaattagccgtggctgtggctgccaaccgcagttgaaagacgca

SEQ ID NO: 169881 - DNA, 468 bp, Homo Sapiens
tcaggaggctccagctcacatcaagaaacagaaaaaaagagttgcagagcttgccctgagcctcagctccacgtccgatgatgaacccccctcctctgtcagtcatggagcaaaagcatcttactacaagccttagtgggtctgatagtgagaccgaggggaaacaacacagctctgactcttttgacgatgcattcaaagcagactctcttgtggaaggaacttcttctcgctattccatgtataatagcgtctcccagaagcttatggccaagatgggcttcagggaaggtgaaggattgggtaaatacagccagggtcggaaggacatcgttgaggcttccagtcagaaaggtcgaagaggcttgggtctgacactccggggctttgaccaggagctgaacgtggactggcgagatgagccagagcccagtgcttgtgagctggaggtgagctggagcatctgga

SEQ ID NO: 169882 - DNA, 782 bp, Homo Sapiens
  misc_feature (202)..(202): n is a, c, g, or t
ccccattaacccttttaagttggaagttggatttcgattttgaagtttgcccatgccccttaccccccaaatgcctgggaggagaaatgaagttgaggcccccggggccttagtgccccaaaatgaaagaaatcctgtttcaaaagaagaaaatcccccttccaaaagacggaaatccactgaccgcagagaaaacgacccncgtccctcggcttctgcttcctcggggaccccttcgattcccaaagaagtcctcaaaagggtcttcaaagaagtcaaatgaaaatgggtcccttccaccaaaaaaattccctgaagacatcatctgggttacggaatgtgaagccaaattcaaatggactgtcaaaatgacttccacctcctcctccaccatttaatccttctttgccatatttgtcatagatgtcccgtttcttagcatccgacagcacttcatatgcctccgctacttgcttgaattttctctctgcttcttctttattctcaggatttttatctggatgccacttcagtgccagtttccgatatgcctttttaatatcctcgggtgaggcatgtctctgcacgcctagaacttcatagtaatccaccatgttttacgagattgttggaatgggtccgaggacagaagcggccggtggcgggacgcaggggaggcagggtgacggcccgaatctcctcacagctccaggactgctgcgctggtggtggcggcggctcctcgcgctttcctttctctcctttctccaacaacaaacccc

SEQ ID NO: 169883 - DNA, 876 bp, Homo Sapiens
cggacgcgtgggtcgacccacgcgtcgcaccagcgcagcagtcctggagctgtgaggagattcgggccgtcaccctgcctcccctgcgtcccgccaccggccgcttctgtcctcggacccattccaacaatctcgtaaaacatggtggattactatgaagttctaggcgtgcagagacatgcctcacccgaggatattaaaaaggcatatcggaaactggcactgaagtggcatccagataaaaatcctgagaataaagaagaagcagagagaaaattcaagcaagtagcggaggcatatgaagtgctgtcggatgctaagaaacgggacatctatgacaaatatggcaaagaaggattaaatggtggaggaggaggtggaagtcattttgacagtccatttgaatttggcttcacattccgtaacccagatgatgtcttcagggaattttcttggtggaagggacccattttcatttgacttctttgaagacccttttgaggacttctttgggaatcgaaggggtccccgaggaagcagaagccgagggacggggtcgtttttctctgcgtccacgtggatttccgtcttttggaagtggattttcttcttttgatacaggatttacttcatttgggtcactaggtcacgggggcctcacttcattctcttccacgtcatttggtggtaagtggcatgggcaacttcaaatcgatatcaacttcaactaaaatggttaatggcagacaaaatcactacaaatacgaatgtcgagaacctgccacgaaagagtacgacagttgacgaagatggccagttaagtccctaccaatacctggtaaggagccgtgctgcgctgggtaacacgtattcaag

SEQ ID NO: 169884 - DNA, 341 bp, Homo Sapiens
attattagaagactagattattgctcagcagtaaccactcctttcccacaaactcccctctctaggaggaatgtacctccccacccattcctgttaggcttggccaggtgaatcgctttggccaatagaatgtaactgacaaggtgagcagagatttgcagtgggcttgtgcttggtgctggtcctccggggctcctgcctttagccaggggaagcacactccccagcccctccttagccctctggccctggggagaatgagaggcatgtggaacagtcctggatacagccgtggctgggagcaagcctggaagcttgagcgagagataaatgcttggtct

SEQ ID NO: 169885 - DNA, 500 bp, Homo Sapiens
ccagccctacaacgacttatcagtagtcactgacaggacttgtaatgaactatccacatattacaaatcttaccaaattgggacagagcactgaatatcgtcacatctggtccctcgaaatctccaataagcccaatgtatctgagcctgaagaaaccaaagattcgttttgttgctggtacccatggaaatgcgccagttggaactgaactgcttttggactctggcagaatttctctgcctgaactacaaaaagaaacccagctgttacccaattggttgacaggactaggattgtgattgtcccttctctaaatccagatgggcgagagagagctcaagagaaagactgtacttcaaaaataggacaaacaaatgctcgtggcaaagatttggatacagacttcacaaataatgcctcccaacctgagaccaaagccatcattgaaaatttgattcaaaaacaggactttagtctttccgttgccttagatggtggt

SEQ ID NO: 169886 - DNA, 600 bp, Homo Sapiens
  misc_feature (586)..(586): n is a, c, g, or t
tcctcgggacacggctgtctcattctccaccacgtcacatccacctctgagccatcaggcgtgcacacgggtgcacgtcactttgcctttgcctgccgccttagtgtccacagtgatcaccgtctcctccccaatctgaatggtggggccgatgccagcacctgtgacagtgcacttgctggcgtccccggtgggcacggcacgcacgcggtacggggagaaggggatctcgtcaccaccgtacttgatgaggatggtgtagcgacctgtcacgtctggcacgtaggccactgtatacgtgccgtcatggttgtcttggatgtgtgtcttcttcggcttgccttcgggatccgtgatctggacagccagcaggccctccccggcgtcctttgcatcgatggtgaactccacgggcaggctggcaggcacaccagtggtgttgagcccggggccactggccttcaccttgctggcatcaatgagtaggcagcaccattgaccttgaaggggctccggggtacctcttcatctccatacagtactgagatgctgtagggcccttctcggctggcacataattgacagncttgtgtacacgaa

SEQ ID NO: 169887 - DNA, 643 bp, Homo Sapiens
tctagaggatccctctcgtggacaccggccgtcacattctccaccacgtcacatccacctctgagccatcaggcgtgcacacggtgcacgtcactttgcctttgcctgccgccttagtgtccacagtgatcaccgtctcctccccaatctgaatggtggggccgatgccagcacctagcccgtgacctccgattgacactgtgacagtgcacttgctggcgtccccggtgggcacggcacgcacgcggtacggggagaaggggatctcgtcaccaccgtacttgatgaggatggtgtagcgacctgtcacgtctggcacgtaggccactgtatacgtgccgtcatggttgtcttggatgtgtgtcttcttcggcttgccttcgggatccgtgatctggacagccagcaggccctccccggcgtcctttgcatcgatggtgaactccacgggcaggctggcaggcacgccagtggtgttgagcccggggccactggccttcaccttgctggcatcatgagtaggcagcaccttgaccttgaaggggctccggggtacctcttcatctccatacagtactgagatgctgtagggcccttctcggctgggcacataattgacgcttgcgatacaaggatactctag

SEQ ID NO: 169888 - DNA, 927 bp, Homo Sapiens
  misc_feature (767)..(775): n is a, c, g, or t
  misc_feature (778)..(778): n is a, c, g, or t
  misc_feature (780)..(781): n is a, c, g, or t
  misc_feature (783)..(783): n is a, c, g, or t
  misc_feature (786)..(786): n is a, c, g, or t
  misc_feature (792)..(792): n is a, c, g, or t
  misc_feature (795)..(800): n is a, c, g, or t
ccaagtccttcgaggcaccaataaaattggtgtttccccaggatctgctggagaaaggcctcgaagcaaacaactttgccatgctgggacttggagatgtcgtcattccagggatcttcattgccttgctgctgcgctttgacatcagcttgaagaagaatacccacacctacttctacaccagctttgcagcctacatcttcggcctgggccttaccatcttcatcatgcacatcttcaagcatgctcagcctgccctcctatacctggtccccgcctgcatcggttttcctgtcctggtggcgctggccaagggagaagtgacagagatgttcagttatgaggagtcaaatcctaaggatccagcggcagtgacagaatccaaagagggaacagaggcatcagcatcgaaggggctggagaagaaagagaaatgatgcagctggtgcccgagcctctcagggccagaccagacagatgggggctgggcccacacaggcgtgcaccggtagagggcacaggaggccaagggcagctccaggacagggcagggggcagcaggatacctccagccaggcctctgtggcctctgtttccttctccctttcttggccctcctctgctcctccccacaccctgcaggcaaaagaaacccccagcttcccccctccccgggagccaggtgggaaaagtgggtgtgatttttagattttgtattgtggactgattttgcctcacattaaaaactcatcccatggccaaaaaannnnnnnnnaanannanaanaaaaanaannnnnnccctcaaggcatctatggtcgggtgcgggagaaagaggaaatgaaatggccccttgggccatagctggttccctggacccagcttttcttggaccaagggggaagaatcttgcccggtcctccctta

SEQ ID NO: 169889 - DNA, 1036 bp, Homo Sapiens
  misc_feature (513)..(569): n is a, c, g, or t
gggatgatgccccctatgggagggccaccaatgggacaaatgcctggaatgatgtcgtcagtaatgcctggaatgatgatgtctcatatgtctcaggcttccatgcagcctgccttaccgccaggagtaaatagtatggatgtagcagcaggtacagcatctggtgcaaaatcaatgtggactgaacataaatcacctgatggaaggacttactactacaacactgaaaccaaacagtctacctgggagaaaccagatgatcttaaaacacctgctgagcaactcttatctaaatgcccctggaaggaatacaaatcagattctggaaagccttactattataattctcaaacaaaagaatctcgctgggccaaacctaaagaacttgaggatcttgaagcaatgatcaaagctgaagaaagcagtaagcaagaagagtgcaccacaacatcaacagccccagtccctacaacagaaattccgaccacaatgagcaccatggctgctgccgannnnnnnnnnnnnnnnnnnnnnnnnnnnnnnnnnnnnnnnnnnnnnnnnnnnnnnnncaatgctaatgcttccacttctgcttataataactgtcagtggaactgttccagttgtacctgagcctgaagttacttccattgatgctactgttgtagataatgagaatacagtaactatttcaactgaggaacaagcacaacttactagtacccctgctattcaggatcaaagtgtggaagtatccagtaatactggagaagaaacatctaagcaagaaactgtagctgattttactcccaaaaaagaagaggaggagagccaaccagcaaagaaaacatacacttggaatacaaaggaagaggcaaagcaagcttttaaagaattattgaaagaaaagcgggtaccatcgaatgcttcatgggagcaggctatgaaaatgattattaatgatccacgatacagtgctttggcaaagttaagtgaaaaaaagcaagcctttaatgcctataaagtccagacggaa

SEQ ID NO: 169890 - DNA, 801 bp, Homo Sapiens
  misc_feature (588)..(600): n is a, c, g, or t
  misc_feature (676)..(676): n is a, c, g, or t
  misc_feature (753)..(753): n is a, c, g, or t
ggatagtcttgcttccgttgcccactgcctatgagctagacagcaccaaactgaagagcccacgaatcacttcccccatgttccgtaatgtgcccacagcaaaccccacggagccgggaatcagacgggttccggggggcctcagaggtgatccgggagtcgagcagcacaacagggatggtcgtcggcatagtggctgctgccgccctctgcatcttgatcctcctgtacgccatgtacaagtacaggaacagggacgaggggtcctatcaagtggacgagacgcggaactacatcagcaactccgcccagagcaaccgcacgctcatgaaggagaagcagcagagctcgaagagcggccacaagaaacagaaaaacaaggacagggagtattacgtgtaaacatgccgaacactgcctcacacgccgagttttttcaccagttattttctaatccaacgccctattgaaattctttgggaacgggtggaagatccttccaccagaattgtgtcaaaaaacctggcttgggaaaacttattgaaaaaatgggggggtaattattaaaacccaaacggaacttccttnnnnnnnnnnnnnaaaaaaacccccgggtattttttctataaagggggaacaaacaacacgcgcagctcaccaaccaagggggggaaantggcgacattccttcctgccccccgctaaaaaagagccctctcaaggcccccccctaccggtcatttgtcgcccggncaccaaaaagaggtgtgtctccccccaaaaagcgggagggatatcgct

SEQ ID NO: 169891 - DNA, 1182 bp, Homo Sapiens
ccccaacgctggccgctccctaactgtgtcagaaatgtgcgttttggaaccaagcttggatcagatatcaagcgggaagaatctcaatgggtatcattaacagatcagcatgtccagctccccatggcaatgactgcagagaatcttgctgtagaacacaaaataagcagagaagaatgtgacaaatatgcccggcagtcacagcagagatggaaagctgctaatgatgctggctactttaatgatgaaatggcaccaattgaagtgaagacaaagaaaggaaaacagacaatgcaggtagacgagcatgctcggccccaaaccaccctggaacagttacagaaacttcctccagtattcaagaaagatggaactgttactgcagggaatgcatcgggtgtagctgatggtgctggagctgttatcatagctagtgaagatgctgttaagaaacataacttcacaccactggcaagaattgtgggctactttgtatctggatgtgatccctctatcatgggtattggtcctgtccctgctatcagtggggcactgaagaaagcaggactgagtcttaaggacatggatttggtagaggtgaatgaagcttttgctccccagtacttggctgttgagaggagtttggatcttgacataagtaaaaccaatgtgaatggaggagccattgctttgggtcacccactgggaggatctggatcaagaattactgcacacctggttcacgaattaaggcgtcgaggtggaaaatatgccgttggatcagcttgcattggaggtggccaaggtattgctgtcatcattcagagcacagcctgaagagaccagtgagctcactgtgacccatccttactctacttggccaggccacagtaaaacaagtgaccttcagagcagctgccacaactggccatgccctgccattgaaacagtgattaagtttgatcaagccatggtgacacaaaaatgcattgatcatgaataggagcccatgctagaagtacattctctcagatttgaaccagtgaaatatgatgtatttctgagctaaaactcaactatagaagacattaaaagaaatcgtattcttgccaagtaaccaccacttctgccttagataatatgattataaggaaatcaaataaatgttgccttaactacaaa

SEQ ID NO: 169892 - DNA, 334 bp, Homo Sapiens
tattaaaaaactctttttgaggtgtaggactgaaagtatactgacaccaggagataccccggaactttctcgaaaaatcctgcattatccctgagggttgttcaggtacgttcttcagatgtgtcatagtttgatagagaactcatcaaaaagatcaccactgcgaatctagatctttgttgaaaagggaagagaaagagaagcttaatgagcacattgaagcacttaccagaaagaagagggaagacttctggatgaaacctctgtgagtaccttaacattcacatggaagtagtaaaaaataagaatctgggtgcagttctccaatgacagg

SEQ ID NO: 169893 - DNA, 554 bp, Homo Sapiens
  misc_feature (60)..(60): n is a, c, g, or t
  misc_feature (421)..(421): n is a, c, g, or t
  misc_feature (513)..(513): n is a, c, g, or t
  misc_feature (533)..(533): n is a, c, g, or t
cttgatcctgcatatcaggttgacaaaggaggcagagtgaggtttgttgtggagctggcngatccaaagttggaggtgaaatggtataaaaatggtcaagaaattcgacccagtaccaaatacatctttgaacacaaaggatgccagagaatcctgtttatcaataactgtcagatgacagatgattcagagtattatgtgacagccggtgatgagaaatgttccactgagctcttcgtaagagagcctccaattatggtgaccaaacagctggaagatacaactgcttattgtggggagagagtggaattagaatgtgaggtgtctgaagatgatgccaatgtaaaatggtttaagaatggtgaagaagattatccccggtccaaaatcaagatacccgaattagagttgagggtaaaanaacacatcttgatcatagagggagcaacaaaggctgatgctgcagaatattcagtaatgacaacaggaggacaatcatctgctaaactaaanggtgacttggaaactttganaatttgcacctttgattggca

SEQ ID NO: 169894 - DNA, 1115 bp, Homo Sapiens
  misc_feature (20)..(20): n is a, c, g, or t
  misc_feature (26)..(26): n is a, c, g, or t
  misc_feature (31)..(31): n is a, c, g, or t
  misc_feature (95)..(95): n is a, c, g, or t
  misc_feature (102)..(102): n is a, c, g, or t
  misc_feature (115)..(115): n is a, c, g, or t
  misc_feature (117)..(118): n is a, c, g, or t
  misc_feature (125)..(125): n is a, c, g, or t
  misc_feature (137)..(137): n is a, c, g, or t
  misc_feature (150)..(150): n is a, c, g, or t
  misc_feature (162)..(162): n is a, c, g, or t
  misc_feature (195)..(195): n is a, c, g, or t
  misc_feature (204)..(205): n is a, c, g, or t
  misc_feature (259)..(259): n is a, c, g, or t
  misc_feature (392)..(392): n is a, c, g, or t
  misc_feature (415)..(415): n is a, c, g, or t
ccatttaggcccccgaaaanaaaagnggttnaagaggaaccttaaaccttggtaaataaaaacttccttttacgccagggagtctttccagaaangaatttnggaaataattggnannccagttnaaaggttaaacncgtctgctgaaancaactgttaaancagcccggaagtatggaatttgtatccatggcntctggatgnnagtttggatcctgggttggcacagagttccagttgacccaaaactccatgaggnccatgcccagtaggttcagtgaatgatactatccattaaagaagttcttgcctatgaacaaaagaaggaaagttacttgtcccagatgtggcaaattataaacttttgtataatgtgcaaaaggcctaacccntcatatcctacaccctccactcntcattctaagagagcctgagtaaacagccaggggctgggttttcccttgaatggctgccagatgggggttaaaatctgcttctcaccttctaggctgtagcagtgaggagctaatataaaaagaaactacaagatttcaagggaagagggaccacacccatcttcacaataaaatgtcattctcaacctagagcagaggtgctcaaacatggtattagagatgcatccaaagtaatgtttctggttagtggtttaaatactgagttttgaaaatgctttacttttagaaagaataaattactgtagatcacaagggtagccatacaacaaagtcactctcagatatttgtatgccttcttgaatgagaaaaaggcagatttcaactattagtacataaacatcttttgttatgtgtcatcatagctaaaaggttgaatactgctcctctagagcaagaaaaagcgggagcccctgggcaaaacagagcctagggagaatgccagggaagagatgagatttttggaggtaagcacagtgtcccaaaactgggggaaaagggagcttaggaaatgtgatacaaagtgaactaagcaggaggcatgtacttgaggctttaggaagcaggattaaccctctgcatgttcaaatggacatgctggtactcagtatttatattagcacagacaagaaggcagcgcc

SEQ ID NO: 169895 - DNA, 401 bp, Homo Sapiens
ttatgactgtgggaatttgaccatctcggaccaccaggtttacaatcccacctgcagatacatgcaagaagtatggtcccaatacttatgtcacgttattccgttgaggtcatcaccaactaagcttataattaatgtgtggtcaatttggtcaatgtcaccagcgtagcatactaacaaaaacaagggttgcaaagtcaaatgcctataaggcggaacgtaagacggtaggaagcaaagtctatagggagctatataatagaggctgcagattcatggcagattcttaagcacagcagtccccaacatttttggcaccaggaaccggctttgtggaagacaatttttccacaggcggcaagggatggggcgcaggatggtatggtcttgggatgaaactg

SEQ ID NO: 169896 - DNA, 396 bp, Homo Sapiens
tcggggacaccggcgtctcggggacaccggccgtctcggggacaccggccgtcaagtgtagagggctgtgagagtctgacgagtctacgaacaaatctacagaagcagaagacttcatatcgagacacagagcatctttttccttatgtatggtgctgagctgggcacaagccagccattgcaagttggatacatccatttgctcccgaactcagaaggctgcaggtcctcaggtgcctggttggagattcagtgtaccaggtcgttcacgaacacgaatgaactttgcttttgatgatgagtacacccagtttgaccattaaatttctccaagtggggacttcgactgattgtaagaatctactgcttttgcttctgtggagttctcaccgttcc

SEQ ID NO: 169897 - DNA, 539 bp, Homo Sapiens
ggtgctgcaaaaaatgcttcttgggctactgtgttagtctgaagattattcatgggactctgggaaagaaatatgttggttgactgctggtcttgaggaactgaagagccctgtaacacagcaatggtactttgagagtgaaacattggaggctgcatttgttcagaggaggttgtagaagtctgactgtggacaataggatttggactatgaaagagagaaccttgagtttcctgggaaaggttctgagcatcggcaataggattttgaggatgaaaaagttgggcctgtgaatgagaagactgctgcaaaaaatttccagattgaagtgacatcatctcattcccttgctggaataaaccattaccttgttgttgggtaccactattctgaacactcatcatactttttgtggatgaaaaaaggttaacttgaggttgattgtccccactatgttgcatttggaccatggtctgaaagacactgttctgaatctgttttgcttgtgttccagtttcttctccatctcctgaacttgg

SEQ ID NO: 169898 - DNA, 191 bp, Homo Sapiens
cgaaaaaagacatttcagttaaaccatgacctagtatttaactaaaaactactccaaggcaaaacgtcaaaagatggtatcaaccatagtagaaggaaaaataaatgagtaattcagtagtttcttcttgtaacaggcatatacattttattctcctgtaatgaaaccaaaagtcaaataaagtaaagaaa

SEQ ID NO: 169899 - DNA, 439 bp, Homo Sapiens
ctcgtattgtgcgtgcaccaaaaacgaccaataagagatcaactcctttcaaagaaacacaaacttgcgatacaacgagcacaaaaacacgtataaactcgagttcaagatcacaggataaatgaatatacgatttacaaactccggataaatgaaaatttaacaaattatttcattaaccaataaaaaataggttctatggcactttagatgtaactttacatacacacgccgatcttactcctcccaatcaaagagcccgaatagatagatggtcttggcatccagaatgccagtctactgtgatatttattggctatttatctccgaggcttattattttattttaaccaccacttttattcatttatattaacggcaacattgaaacttgattcaaagacaaagatttgagagccgtgaattctcgaatcaattt

SEQ ID NO: 169900 - DNA, 1304 bp, Homo Sapiens
gacaaatgtttatcctttatttctggtccaaaaataagtgaggaggaggaccactcaggaatctgaatcctcttgtgattaaagaaaaatataaagatgtgttcctcaggaaaatcttatttgtaaactgaggactagcagattttgaatctagaaataatactagatgtctgtttactaagaccggaggtaaatccttaacttttaggttatcagtgcttccttgttcaggcttcagtttgacagatcttcacaaaatgacacatctgttaaaatgtctttatgtcaagatggtcagccccaccaagagggcgtactactacaaagtctggtgagactccagaatcagccatgaacctttgtgtcaactggaattcaaatcaaattttgccaaatccagttatgcttccccttggaatggctagatgtcgcaggtctattatggacaccaactggaaaaagacttctacctgtaacatctctgtagaaattgcacagtaactatcttcatcaagactttgatggccaccataccatcactactcataaagctacatgtgagagaatcgtttgtcgttatcaatcctaatagtctttgacctatcaagctctcgtatcaagctgtaagactgacgctcatggttatgtctctcactcgtaagctgggcctttcaccaagatggccttcttaaacaacctaccttctaaacatttaattcttttgagcttgatagtgcatcacactctaaatacaagaaaagatacgcacatcagtgccctggaaaatgaaggatgttacacgatccaggcatgcaaatctgaactccgtaagaccaagaattccaaacatgcctgagcaatctggtccccttattgtagataaacgagggataccatcagtctagattttattgagaatccttaacgatttaaaggcatagctgtggatgtggtgaagagaacaagccacacagctctggtttctggatatctaagtgatgatatccattgaatgatttgaaaggctgaaatcaagatttaagtgatacgctcttggttaataggttacttaactttagtcagattcttagtgtaagagacagcttatctttttgctcccaattggtcccattaatagttgaggcaccatactggtaactggcagcagatacctcaattatatgtcccacagtatcttgctctttatactcaaggtagtggatgtatggtatatcagcccttagatccatgtcttcacagcatgacatcaggaatggagaatatgtcaaatttgaggggtctga

SEQ ID NO: 169901 - DNA, 1031 bp, Homo Sapiens
actcacaatgactctgttgtgattgttgacgaaagaagaagaccaaggaggaatgctaggaggctgccccaggaccatgctgacagcgtgtgtggtgagcagtgacgatgaggagttgtccagggacagagacgtatatgtgactacccatactcccagaaacgccagggatgagggcgctacaggcctcaggccctcaggtactgtcagttgtcccatctgcatggacggatactcagagatcgtgcagaatggacgtctcatcgtttccacagaatgcggccatgtcttctgtagccagtgcctccgtgattccctgaagaatgctaatacttgcccaacttgtaggaaaaagatcaaccacaaacggtaccaccccatttatatatgaagtattcagagccccccaggagagacggatggacagacagacagccaggttctccagtggtatctgcctccattttcctgagatcaaaaagactgtttcgaaaccaacatctgatatgtaaactgctcttttgtttccaaccccttccttttgttatctccagtttgatgctatggcgctggacccagggccctcccaggccatctctgttcttctggggtggtccagttctagagtgggagaaaaggagtcaggcgcattgggaatcgtggtttccagtctggttgcagaatctgcacatttgcccaagaaattttccctggtttggaaaagtttgccccccgctttccccgggcaccaccacccttttttcccaagtggtcttggccggtcgaaccaatcctgcctgccacaacattgacccaaggcacgaacccggtttcacccagccccgaggaatcccaggtttgaaagagggggccccttggggggccttggaaaaaacccaatccctggggatttctttccccttggaagagccgaaggtcccccccggggattcggccctgcacccttattcattgaaactggccaaggctttttccccacaatcaaaaagaacctctggcgggggcccacc

SEQ ID NO: 169902 - DNA, 1131 bp, Homo Sapiens
  misc_feature (1084)..(1084): n is a, c, g, or t
gtaaacagtgggatgctctctatacagatcttccaaacagacaacttaaagttcaggttgcagacaggagagttattagcactaccgatgctgaaagacaagcagtcacacccccaggattacaggaggcaatcaatgacctggtgaagaagtacaagctttctcgagcttttgtccggccctctggcacagaagatgtcgtccgagtatatgcagaagccagactcacaagaaagtgcacatcaccttgcacatgaagtgagcttggcagtatttcagctggctggaggaattgtagaaaggtcccaaccagccttctgaagataattctcatattcctgagaaactgcactcttcttacaagtctttactcaactgtcaataataatggcacgtactacgagatttataatcataatgcctacaatgcaccctactggattgtttctagatctgcttttcttaaccactaacacaataatttctttacaaataagtaagcccttcactctggctaaaccaaaatttaccatctcaactttcagcccctacctcaatggcacaactgcctgggctacttcaatgccacacactttttcagatttaacgccattttgcctatcgagccccttcttaatggtgtcgtggtctaccacccatttttccatgggtctccgcttactatcctggggctacatgcatttctacgctcctcatcgtacgttcttcctcccgccgtttgcaccaatcgacttacacagtccattctcttgtagcacgcctcttcctggtgcctacccccttactatccgcccactcttttatggcccgcgttctcaactactcccacgggcttatactggccagtcacttggtcgttctcacactagcaatctcaacgcagacactggatcctggacactgcgaatacacccaagaatgtctattaacagtgccttcctagcgaacagggagtagacaagcagctttgcactcaccgtccacgccctcttctattatacgattgcccccgatcaattatcagtttaaaataccgtggctccgtatcacgccgttaattcgngcatttacacacgcttggcgcccactacatttcgccacactgtcttg

SEQ ID NO: 169903 - DNA, 1037 bp, Homo Sapiens
  misc_feature (24)..(24): n is a, c, g, or t
tacagttgtagtccgtatgcaatncagtactaactgtgtatatcataatctttgttgacgacgaacaattgtatgagaagagagagttgacctgtaggaccattggaagacatgagtaagccgtagaatttcggttttgaatactctgtaggaattcctctaagctctgctttatttggggtattaagaaggccataaaaataggaggggaaatctcttgaaatctctttcgttagcactcgctaatagtaagatatagcatagagtggtcaaataatattataaaatgaaggtagcgtgaaattgttgctcgggctcttgatgagcttcctaggcctagagttgatgaacgctttcatgtaaatgctatggctccaccatgctgttgacctgcatgtttatgagaaaggccatgttatgtagagaccctggcaaattctcaactcctgtattggcaaattatatctcactatcatcgcaatgaggactacgtggggagaacaattatttacacccacggtatattgtatgattcgctctttatttatatctgtcactgacgaaacctatgaaccaacgcgcgttttaaggcgctcaacttacacacgatgagggaagcaagatttcccagaaaaggaccagaagggcatttttattccacaaggaaaattgggttccctggccccagatgaacagaaaaaatgggagctctggctaagttggccttaagtctgactgacttcagtggctcataaccgtgagccaagtattttggtgggtcataactgttgttttgtgaactatgtcttacatgtctagagttctggctggatctaaggaaaggaggagctatcgaagtacaacggatcaaaaaaccacagggcttttggcactgcctccttgggaagttagtggccacagaagagagatgaaacctgtaagaagtctggagtcttttggaacttcagccatttccccaggttgttactttcttagtatgtacagtcttctcaggatgagcagtaaaacctttgaac

SEQ ID NO: 169904 - DNA, 943 bp, Homo Sapiens
  misc_feature (107)..(107): n is a, c, g, or t
caaacaaataccttggctcacgggttatggagcccatggaggtccagtcagactttaaggccaacttagaccagagcctcccatttttcggtcatcctgggcagganaccaatctccctgtgttataaaatgaccttctgggtactgtctggaatcttggctccctcatctgtaaagtgaggctaataccgcttactcatagttttgttgtgaagatgaactaagagcaggacatattacccgttttaaaattgtacacacagaccctgctttaaccagatgcctgcaaatgctcaggttttccttctacatatagaaaacaatttctcagctgccagggctgaagccagcagatatgcactaaacgacagaacaacggattgtgccaataaagtaggcaaagcttccttgcccagaatataaatcaaactgagtaaaaactgggtatattggctccaggaaaaggagtaaggacacccagctttcaggcaacctcgaattctctctgtttaggattcaccaaccccaaggtccaccgggtccttcaatctgagggtccatccaaggccttccttcctggggttgggtatggctagctgcctgatggagagaccccaggctgttcagcagcaacgcctggcacagccgaggcagcctcgtagtctgcgatgcggcgctgtaccagggcaggcatgagctgcacgtaagcggccatgaggcggtggttggaatggatcagcttcccagcacagctgtgcagacaggcctcctcctcagcgtccagagctcggtggtgcaagctgggcacacagcgctggaagcagagttctgtcatccgattgtagaccaacaggaagtcacgcaggtttctcagttgctgttgctgctgctgctgccgctccatcacgccaccggcgcatgccgtacgccacttccgtttccc

SEQ ID NO: 169905 - DNA, 861 bp, Homo Sapiens
  misc_feature (786)..(788): n is a, c, g, or t
  misc_feature (790)..(790): n is a, c, g, or t
  misc_feature (792)..(792): n is a, c, g, or t
  misc_feature (795)..(796): n is a, c, g, or t
  misc_feature (798)..(798): n is a, c, g, or t
  misc_feature (800)..(801): n is a, c, g, or t
  misc_feature (803)..(805): n is a, c, g, or t
  misc_feature (807)..(812): n is a, c, g, or t
gataatagattctcttgtataagatcctagatcctaagggtcgaaagctctagaatctgcaattcaaaagttccaagagtctaaagatggactttctaaggtccggtgttctaagatgtgatattctaagacttactctaagatcttagattctctgtgtctaagattctagatcagatgctccaagattctagatgattaaataagattctaacggtctgttctgtttcaaggcactctagattccattggtccaagattccggatcctaagcatctaagttataagactctcacactcagttgtgactaactagacaccaaagttctaataatttctaatgttggacacctttaggttctttgctgcattctgcctctctaggaccatggttaagagtccaagaatccacatttctaaaatcttatagttctaggcactgtagttctaagactcaaatgttctaagtttctaagattctaaaggtccacaggtctagactattaggtgcaatttcaaggttctaaccctatactgtagtattctttggggtgcccctctccttcttagctatcattgcttcctcctccccaactgtgggggtgtgcccccttcaagcctgtgcaatgcattagggatgcctcctttcccgcaggggatggacgatctcccacctttcgggccatgttgcccccgtgagccaatccctcaccttctgagtacagagtgtggactctggtgcctccagaggggctcaggtcacataaaactttgtatatcaacccnnnananaannanannannnannnnnnacatgtcgggccgcctcggcccctcgaggagctttctaaaccatttctt

SEQ ID NO: 169906 - DNA, 1000 bp, Homo Sapiens
  misc_feature (22)..(22): n is a, c, g, or t
  misc_feature (184)..(184): n is a, c, g, or t
ctggtttcagtttctcctgagncagaaaacagctgtcaacaccctcagacacaagctccctgcacagatgcggcctcccagttttgtgcatggccccagctggccacgggcaagcagtcatcttccccacagctggaactgggtccactgtcccaggcttccagctggatacatccagcatttnattagactccaactgggtagctggagtctttctgaggtgatgggatggcagagcggaatgtgacactgtccctaaatctgtccccactgacctcccaacaacctctgggtcagccccaggagcacctgagcacctggtaggctctggaccagatatgagcagaatcaaggatgcaaagaactaaaggagctcagagaaagaagtagaaatttcctcctagttgggcagcagaagaatacaatggacattgagtggtttctggaaagatgaggagatattcagaggatgagtggaagaaaggagggggaaaaagagcctctggctgcccctaagctgtctgttaggaaaattcgctgatctcagtgtatgtcaagagagcactcggaagacaccaaaatttcaggtgccattactcctttgttttgcacttgttttcctcatagtttgtgtattcctaaagcaggcagatgatataaaccactgggagagatggcccaaagcacaggtcatgggtcagaggtggaagggattctggaagtaaccattactgtctagagagtgaattcataccctggggagtcaggattctataagtagattggtggggaattgatttagaggtttttatttgacacgactttggggtttgagggtcaactctgggggcagtataggaaatagctttgagggatgagtagcactaaagaggtcaaaccagaaaacaggaccccgtgtattttggcaggaacacttgccttggcttcctgatcaaaaatgaggaggtaaagcttggcttggcttttggggcaaggggag

SEQ ID NO: 169907 - DNA, 453 bp, Homo Sapiens
gagatcccccagccgttttcagggtggttgacatgaaaactataatttcattttaaatggtatatgccctatactcaaattttaaagactctccattgttctttttcattggcctataatacatatgaaaaccaaggctttgggctttatgcttctctccactcagacaatattatcgagaaatttatgtaccccaacacaggtactattatttaagggattccagagtaagtatttccataaaaatattattcactatttattctatatgtttttttccaataatatacacatcatgcttcaatttcacaggccttgaatgcacttggaagaatgcgcaagagcaaaatatcaagtctccacttgtggcttgtagaccacgggcagaactgaagggacagtggctcaaacaagcacagcctcagggccaccttaaccctgaaaatgacctcg

SEQ ID NO: 169908 - DNA, 667 bp, Homo Sapiens
tcacagcacatcaaggaggccagtgggctacaggggcagcaagaactgacttcttatgttgattgctgtgttcgtattgcagagatgccttgctttgtatgtgtctatagatacagatctaagcagggtatagggctagttgactcccctgaattcctgagctaccaagccttcaaatgactacccaaaaaaggtcattcacggtattgttagtctaaacatctgtttccatgaaaacggggagcatagcttttcctcatggctaagagttaaccttgctcagttttacctcttctccagaatactgtattccagacacacttgtttggggtccaagaaaattccaacctttgaaaagagggagaagcattactccaaaaagaaaaggaatagggattttctaattatgttagaaatacacttaatacctcacccttggattcattgtatggagggttaataccaggagtacaacccacatctttcgtggctacagaaagaatgagttagtgtggtgctaacagaaaatctcataatgagtaccagtttctggttttccagttatgccaatcaaggattgctgctggggattgtcattggtccaattctccagacagcccagatgggtacaaataggtcaaccataaaaatcggactcgggggatcc

SEQ ID NO: 169909 - DNA, 1296 bp, Homo Sapiens
  misc_feature (614)..(857): n is a, c, g, or t
  misc_feature (881)..(1004): n is a, c, g, or t
  misc_feature (1014)..(1076): n is a, c, g, or t
  misc_feature (1226)..(1226): n is a, c, g, or t
  misc_feature (1258)..(1258): n is a, c, g, or t
  misc_feature (1272)..(1272): n is a, c, g, or t
gcccagtccattgaacagttctggcagctctcagggcagaacaagtcctgctccagctgtaacagcagcatctgtgaccaacatacaggctactgaagtttctgtgccacaagtaaattccagtgaaagcttcagggggtacatcgagtgaaagcattcctcaaactgccacacaaccagccatttctccaccaccaaagcctacggtctccagagttgtttcttcaacacgtctggtaaacccaccacctagatcttcaggaaatgcagcaccttcaggaaatgcagcaccaaaaatacctactcctatagtaggagtcaagaggacatcctcacctcataaagaagagagtcccaagaaaacccaaaacagaagaggatgaaacaagtgaagatgctaactgtcttgctttgagtggacatgataaaacagaagcaaaggaacaaccttgatacagagacaagtacaactcaatcagaaactattcagacagcggcttctctgttggcctctcagaaaacatccagtacagacctttctgatatccctgctctccctgcaaatcctattcctgttatcacgaacccaataaaactgagattgaactccgcannnnnnnnnnnnnnnnnnnnnnnnnnnnnnnnnnnnnnnnnnnnnnnnnnnnnnnnnnnnnnnnnnnnnnnnnnnnnnnnnnnnnnnnnnnnnnnnnnnnnnnnnnnnnnnnnnnnnnnnnnnnnnnnnnnnnnnnnnnnnnnnnnnnnnnnnnnnnnnnnnnnnnnnnnnnnnnnnnnnnnnnnnnnnnnnnnnnnnnnnnnnnnnnnnnnnnnnnnnnnnnnnnnnnnnnnnnnnnnnnnnngaccgggccaccaacacctccgcnnnnnnnnnnnnnnnnnnnnnnnnnnnnnnnnnnnnnnnnnnnnnnnnnnnnnnnnnnnnnnnnnnnnnnnnnnnnnnnnnnnnnnnnnnnnnnnnnnnnnnnnnnnnnnnnnnnnnnnnnnnnacgtcctgannnnnnnnnnnnnnnnnnnnnnnnnnnnnnnnnnnnnnnnnnnnnnnnnnnnnnnnnnnnnnngacgcgctccaaccacgaaccccctcaagacgcccgcccacaccgcgcaaccgacccccccacgcaccggacaccgcgcacatcgtggacctggcacgcaacccgctaccaccgcgccgcacgccgccccacacgtgccgcacgctacgnaaggtccgcaccacgcgccctctcgccacgcnaactcccccgcggncgcgcagagcgctacccgccgccc

SEQ ID NO: 169910 - DNA, 924 bp, Homo Sapiens
ggcatccccgtaagatgaatgtcaggaaagacatcagctgcagagataagccacagccaagtcgaggagctctacaagtggagccactagctttggtactaatgaggaaatcagtgagtgcctaagtgagaaaagcctttctatccatagcaatgttcattctgacaggctgttggaactcaagtcccctactgagctgatgaaaagtaaggagcgcagtgatgtggagcatgaacagcaagttactgaatccccttccttggcttcagttcctactgcagacgagttatttgatttccacattggtgatagggtgttgattggaaatgttcagccaggaattcttcgattcaaaggtgagactagttttgctaaaggattttgggccggagtggagttagataaacctgaaggaaataacaatggaacatatgatggtattgcatattttgagtgcaaagaaaagcatggtatttttgctcctcctcaaaaaatatctcacattccagaaaactttgatgactatgtagacattaatgaagatgaagactgtttctcagatgaacgatatcagtgctataatcaagagcaaaatgatacagagggtccaaaagacagagaaaaggatgtcagtgaatatttttatgagaaatccctacctagtgtgaatgatatagaagcctcagttaatagaagtagaagccttaaaatagaaacagacaatgtacaggacatttctggggtacttgaagcccatgttcaccagcagtcttcagtggattcacagatttcttcaaaggaaaacaaagacctcatttctgatgccacagaaaaggtttccatcgctgcagaagatgacactttagacaataccttttccgaagaattggagaagcaacagcagtttcagaagagggagacaac

SEQ ID NO: 169911 - DNA, 1568 bp, Homo Sapiens
  misc_feature (1388)..(1388): n is a, c, g, or t
  misc_feature (1442)..(1442): n is a, c, g, or t
  misc_feature (1524)..(1524): n is a, c, g, or t
  misc_feature (1534)..(1534): n is a, c, g, or t
aaatgagacttggagtttaattaaaaacagaacagggatacattaaacaaacaaacaaaaattacttttctgattatcaattttttttgagactcaaagcatccccaaaacattggagatccagcttattcctgagacatcaaccatcacaaaaggttttcactctgaactattcacatttttgtggcagaaaacagaacaaagttctgcagacatccttcctctctttctaaaatatattcacaaacagggtcttttcatagttcaaaagaaaaacaaacaggtttctttcttggccaaatggcctgttactctcaccctgggatctgatttcttaataaaaaagttcagggcaccaaatccaaccagaaattcccaggacaccagtggctacttaactatgaggggatggatgcttttgtctttctatgaggggaatcattctcccgggattattatgctgctcaacagccccaggacaggtaggtgggaaggagggtgaatgcaaaagcgaaagggtcacagaaaagaatgaggctttcttgaacaacccatagcaaggcagaatggtccagttttacaaaccacccactacaaactccaaacatgcacacccaaaactagaggggaaaggaaagagctcctgggggactaggggagacaaaagatggtaacatagaacagcagacttgcctatgaacgtttctcaacttcctaacactgggagatgtttaattaaaaaggtgctgttcaaaattgaactgaaaacatatctaaaaataggtctgtagtcatcttaaaaataaaaggtcacttctcagataagaggagtgacagatattctcagataccaacacttcaggtatctttgatgtaaatttgaaaaatggcctggtagagaaaaaggaaggaaaggaaggagagaggaagaaagtgagggatgcagagtccagctgcgctgcacagcctgggcagcaggctgaataagggcccctcactcccaacctcccggccttcaaaggcccctactgttgcccccagacagccatctttgtgaaacacaggtcttgggaggaagcggctggacttccatgtaggccagagatcttctcccaagccctcaaatcgggagatgaagtccttcaggtttgggaaggcatcccaggcagctgggctcaaatacttggtttctctcaaggacatcataagcgatgaaatccacaaaggtgatcttgtccccaagaaaccatggctgcttccccagaaactgtgagtagagcttcagcatttcagggagtgcctgcaggtattctggtttcagtttctccaatcagcactctgtaaaaacagaccaatcagcactctgtaaaacggacccaatcagcacnctgctcaggttgtcttccaggctgtggaagtgtattttctttcactcgtcaccnataaatcctgctgttgctcactctttgggtttgaactacctttatgagctataacattcactatgaaggtctgcagcttcantcctgaagcnagccaggccatgaacccaccaagaggaataaacc

SEQ ID NO: 169912 - DNA, 1284 bp, Homo Sapiens
  misc_feature (1224)..(1224): n is a, c, g, or t
  misc_feature (1238)..(1238): n is a, c, g, or t
  misc_feature (1261)..(1261): n is a, c, g, or t
tgtacggtcggaattcctggatatcgtcgaccacgcgtcggaacactcggaggtggcggtggatcttactccttccagccagtgaggatccagcaacctgctccgtgcctcccgcgcctgttggttggaagtgacgaccttgaagatcggccggttggaagtgacgaccttgaagatcggcgggcgcagcggggccgagggggcgggtctggcgctaggtccagcccctgcgtgccgggaaccccagaggaggtcgcagttcagcccagctgaggcctgtctgcagaatcgacaccaaccagcatcatgtccatgacactggggtactgggacatccgcgggctggcccacgccatccgcctgctcctggaatacacagactcaagctacgaggaaaagaagtatacgatgggggacgctcctgactatgacagaagccagtggctgaaatgaaaaattcaagctgggcctgggactttcccaatctgccctacttgattgatggggctcacaagatcacccagagcaacgccatcctgtgctacattgcccgcaagcacaacctgtgtggggagacagaagaggagaagattcgtgtggacattttggagaaccagaccatggacaaccatatgcagctgggcatgatctgctacaatccagaatttgagaaactgaagccaaagtacttggaggaactccctgaaaagctaaagctctactcagagtttctggggaagcggccatggtttgcaggaaacaagatcacttttgtagattttctcgtctatgatgtccttgacctccaccgtatatttgagcccaactgcttggacgccttcccaaatctgaaggacttcatctcccgatttgagggcttggagaagatctctgcctacatgaagtccagccgcttcctcccaagacctgtgttcacaaagatggctgtctggggcaacaagtagggccttgaaggccaggaggtgggagtgaggagcccatactcagcctgctgcccaggctgtgcagcgcagctggactctgcatcccagcacctgcctcctcgttcctttctcctgtttattcccatctttactcccaagacttcattgtccctcttcactccccctaaacccctgtcccatgcaggccctttgaagcctcagctacccactatccttcgtgaacatcccctcccatcattacccttccctgcactaaagncagccttgaccttncttcctgtttagtgggttgtgtntggtttaaaggggttggctgggg

SEQ ID NO: 169913 - DNA, 840 bp, Homo Sapiens
  misc_feature (749)..(749): n is a, c, g, or t
  misc_feature (816)..(816): n is a, c, g, or t
  misc_feature (821)..(821): n is a, c, g, or t
accggtaaagattctcaacccaaattctcctgggtgtgttgtcatcagctgtgatatgtttgtgcacattacgtatagcagaggatgtaagcaatattattgtttgtgaagttttgtttttaatgtcttgagtataagttatgtttagtcactgtcagcatctgagaactttaataagcccttgagatattccaaagctttattttacttttttaaagaacagaaaaagatgaatgaaagaaccaaggagagatgcagagactatatttagcatgtataggttaaagtaagaaggaggttgtggtaactaaataggagtcctataaaatcaaatacattgtcaaccttttctgcacatctagtttcctaccatagaatcccactggaataccacatagcttttgcactgcagttactatttactaatgtaaacgtagggtttgtaaaagtcacaaacttgtaagcaatgaacttacctgctagtctttttattttggcttgcatgaagtcactgcaaattcaaatgtcagtaccggcatttaaaatatatctatatcactttgttggtacaaagttatttcaagataagtgtaattttgttacaagtttattttgaagagacaaatctcctgtgatctatgcaggacctctgtactttctaaagaacaaaatgttatgtagacattatacatggttggttgtctcttcttgaaactgtaatgtaaatctagggtccagtcatatcctangtatcatcatttatccaagtacttggaggaatccaagtatatataaaatacagtcattgagaataantcganttgaggcattccaagaata

SEQ ID NO: 169914 - DNA, 553 bp, Homo Sapiens
  misc_feature (23)..(23): n is a, c, g, or t
cttccttaatgtaataaaagcantcgctaaaagtgccatctacaaaagctggagactgaccacaaatatggggaatttatatgccctctccccatagccacactgtgtttacaacttcacttgtcaggctcttcaactgcagctgaaacattcctggcaataggtccaaccaaggctggctctacaggcaaagggcttcacagaaaaggagctggcctggagtcccacactcaaaggcagagatgatgggcacaggaaacaagtctgggagattcccacatccctgagggggcagaacagagaccgtgcatcctgaagatcaaaggctctatcacacctcctgtggtccagtggcttccacttggcgtggatgatggggaggtgacaccatgtgggagggtgtcctgggaacaggtagaggtggcggcacagagtgctgcagtattcagacatctccttgcaccggtggaattctgtgccaggagcatccttcccgatccttgataagtgcgttcaccttaaccagcatgttcgccacgtgcatatcacaagc

SEQ ID NO: 169915 - DNA, 415 bp, Homo Sapiens
  misc_feature (321)..(346): n is a, c, g, or t
gagggctgtgggcagagggagcatgacggggagagtgaggaggaaagaggaaaggaaggccagggtgggaggaaggatcagctaaatctgagggaagaagaaggaaaggagagggactattgcatagcagatgcaaatgaagggacttggggctagtcaggaagaaagggaaagggaaggaaggcaagagagaggggtgaagggaacctcaggaaggggtgttaaggacaaccggaaaaatcatctagtaataaaactacaaacagaccaaatatataatattatatatgtataaataacagctggctatttacagggggnnnnnnnnnnnnnnnnnnnnnnnnnnggatccaggggagggggggctgaaagatatggctgagaggtggaggaacggctgagggttgggggagag

SEQ ID NO: 169916 - DNA, 156 bp, Homo Sapiens
gtggaaaaggtgaggaaaagcttgaaatatagcttcaaattcatgagacattttcatgaagagatatgcagtgggagagagaagcagacgtgtttccagtttggtgtttactttctgtgattccagagggaggggttcccagaggactcagcataa

SEQ ID NO: 169917 - DNA, 918 bp, Homo Sapiens
aactgtacgtgaaactgtcaatgttattactctatacaaagatctcaaacctgttttggattcatatgtttttaacgatggcagtttccagggaactaatgaacctcactggaacaatccctgtgccttatagaggtaatacatacaatattccaatatgcctatggctactggacacatacccatatcatccccctatctgttttgttaagcctactagttcaatgactattaaaacaggaaagcatgttgatgcaaatgggaagatatatcttccttatctacatgaatggaaacacccacagtcagacctgttggggcttattcaggtcatgattgtggtattcggagatgaacctccagtcttctctcgtcctatttcggcatcctatccgccataccaggcaacggggccaccaaatacttcctacatgccaggcatgccaggtggaatctctccatacccatccggataccctcccaatcccagtggttacccaggctgtccttacccacctggtggtccataccctgccacaacaagttctcagtacccttctcagcctcctgtgaccactgttggtcacagtagggatggcacaatcagcgaggacaccatccgagcctctctcatctctgcggtcagtgacaaactgagatggcggatgaaggaggaaatggatcgtgcccaggcagagctcaatgccttgaaacgaacagaagaagacctgaaaaagggtcaccagaaactggaagagatggttacccgtttagatcaagaagtagccgaggttgataaaaacatagaacttttgaaaaagaaggatgaagaactcagttctgctctggaaaaaatggaaaatcagtctgaaaacaatgatatcgatgaagttatcattcccacagctctccaagggg

SEQ ID NO: 169918 - DNA, 848 bp, Homo Sapiens
  misc_feature (834)..(834): n is a, c, g, or t
atgcactcaagcagagaagaaatccacaaagactcacagtctgctggtgggcagagaagacagaaacgacatgagcacagcaggaaaagtaatcaaatgcaaagcagctgtgctatgggaggtaaagaaacccttttccattgaggatgtggaggttgcacctcctaaggcttatgaagttcgcattaagatggtggctgtaggaatctgtcacacagatgaccacgtggttagtggcaacctggtgaccccccttcctgtgattttaggccatgaggcagccggcatcgtggagagtgttggagaaggggtgactacagtcaaaccaggtgataaagtcatcccgctctttactcctcagtgtggaaaatgcagagtttgtaaaaacccggagagcaactactgcttgaaaaatgatctaggcaatcctcgggggaccctgcaggatggcaccaggaggttcacctgcagggggaagcccattcaccacttccttggcaccagcaccttctcccagtacacggtggtggatgagaatgcagtggccaaaattgatgcagcctcgcccctggagaaagtctgcctcattggctgtggattctcgactggttatgggtctgcagttaacgttgccaaggtcaccccaggctctacctgtgctgtgtttggcctgggaggggtcggcctatctgctggtatgggctgtaaagcaactggagcaccagaatcattgcggtggacatcaacaaggacaaatttgcaaaggccaaagaattgggtgccacttgaatgcatcaacccttaagactacaagaaacccattcaggaatgctnaaggaaatgacttg

SEQ ID NO: 169919 - DNA, 163 bp, Homo Sapiens
cagggcaggaccagagccaggccatagagagagtagggcaaatgccaagtcaaggccagggtagtgccagggctgaggcaaggtcagggaaggtccagggctgagtcaaggctagaaccaagacaggggcaaaggccggggcagatctagggcacaagcagac

SEQ ID NO: 169920 - DNA, 410 bp, Homo Sapiens
attccaaactagctgctttggaactgattcttcatttggctccaagattaagtgttgaaatccttttggatcgtattactccatatcttttgcatttcagcaatgactctgttcctagggtgagggctgaagccttgaggacgttgaccaaagttcttgctctcgtcaaagaggttcctcgtaatgatatcaatatttatccggaatacattctgccaggcatagcccacttagcccaagatgatgctactatcgttagactagcctatgctgaaaacatagctctgctggcagaaacagctctgagattcccggaattagtacagttaaaaaatcttaatatggaaaatgaccccaataatgaagaaatagatgaggttacacatccaaatggaaattatgacacagta

SEQ ID NO: 169921 - DNA, 386 bp, Homo Sapiens
ggaataactttagaaggaagtcatacctcattgaacatcagcgaattcacacaggtgaaaaaccttatgtttgcaatcaatgtggaaaggccttccgtcagaagacagccctcacccttcatgagaaaacacatatagaggggaaaccctttatttgtatcgattgtgggaagtccttccgccagaaggccaccctcactagacatcacaaaacacatacgggggagaaagcctatgaatgtcctcagtgtggaagtgcctttaggaagaagtcatacctcattgatcaccagagaactcacacaggagagaaaccgtatcagtgtaatgagtgtgggaaggcatttatccagaagacaaccctcactgttcatcagagaactcac

SEQ ID NO: 169922 - DNA, 434 bp, Homo Sapiens
gttttacaaaagttgccaaattaagacaggattataactgctcgagtccttgtcagggctgaaaggttgggagcctcaaatatgccccggcagtgttgatgaaaagcttaaaaagtaataaaagggagaaaagagcgaggaaagtaacatgtaaaactcttattaaagagaagagccacagagaggttgtgaacttgaatcactgtttgaactttaatttgttcattaacaggatttgccccttactgtgaatgttattacttccctttgccactcagcaacaactctgggcataataaaagagcctggcaaaaagttaaacgcctggcaattaattcatttaattgaaaaaagggggaagagagaaagagaggtcccaatgcaaaagcagaaggcagagaggttggaggagggggcaaggctgaaataacatt

SEQ ID NO: 169923 - DNA, 477 bp, Homo Sapiens
attccaggcatgagccacaacggcccagcccatcatttgcgttagcatcatgtgtgtgtacttagtgatcaagttctcttagtaataaatacctgcgcaaaaaggcaagggtaggagagagttctatttagttatatttctcagaatattcagcctcgcttaacatttcttctgggaaatccattggccacatgctgtcttatgagactcttcagatattttccatgccttctctgattgccatcttcccttcccatttgattttcttcagcgggaagagaggcagagcacttgtcctccccttggggagaatcctcaccagaagagctccgctttgggagtctgacctacagtgatccccgtgagcgagaacgcgaccagcatgataaaaataaaaggtaaccaccctcccaggtgagagctgcaatgccaggactccaggcaggactccagtttctccacaatcacaactcttac

SEQ ID NO: 169924 - DNA, 808 bp, Homo Sapiens
gcagaagaaccagagaagccagaggagtgtgttcaagactgtcttcaataattgggctcagcttcttgatgctgagagtctgactgtagatagtgccacaagctgtctgctggtcctcagaggtctttacatctagatcttcttccggtaacagtctctcaggatcagaagggagatccttcaaggacattatctcatgaaaaggagtggatacaaaacgagctgctctggcaaagtcacaagtgtcttctgggttaggacaaattgttacatttctgaagcctgtgataatggcatcctcgctcaagggttcaattcctgtgaaattcatcacaaacatctggagacacatcttcatttgaggtgatgctttctgaggttttgagaactgcaaggggtcttcgttgagctaaaactcgtgggggatctgcaggaggacttttacttcttcttttctgaaagaagaaactcatcaaaaactggagaaaggtacactgggacctttagaatgaggttgttcctgccaaatgttctccgcaagtgaagtctctctggcacaacagtttacttgacaaacagaactggatagagtcattcctggtattttctgagactcggaagcaatttgcagtttagttgtctcctttgtaggcatcgtctcttcttgctgatcacctgttctttcttgctgagtagctttggatttcttttagcttcttctccatctcttcatctgtttctgcagtttctgctctcttccgcacgcgtgggtcgacgatatcccggaattccgagccgtaccagcctt

SEQ ID NO: 169925 - DNA, 774 bp, Homo Sapiens
  misc_feature (294)..(410): n is a, c, g, or t
  misc_feature (504)..(564): n is a, c, g, or t
  misc_feature (653)..(663): n is a, c, g, or t
tcttgctggaaacgagcccatggtgttggctctcaacgtgacccgcagtctgatcccctgtgaagagccggacatcccaggcacacgtgtgcgccaccttcagcaggcattcgggtgctgggctggtggctcatcaggcctgggccccacactgacaagcgccagatacgccacaaataccactgtgtcaaatgctttcaagatatatttttggggaaactattttttaaacactgtggaatacactggaaatcttcagggaaaaacacatttaaacacttttttttttaaggnnnnnnnnnnnnnnnnnnnnnnnnnnnnnnnnnnnnnnnnnnnnnnnnnnnnnnnnnnnnnnnnnnnnnnnnnnnnnnnnnnnnnnnnnnnnnnnnnnnnnnnnnnnnnnnnnnnnngtcggggggcccccccgaccccaggaaagtttttaaaacccttctagtgggccccgccccccaaggggaaggggcccgggtaaaggattttccnnnnnnnnnnnnnnnnnnnnnnnnnnnnnnnnnnnnnnnnnnnnnnnnnnnnnnnnnnnnntctaggggtttcaaaaagacccccaggggttttaagggccctttagtgtttcatacaaggggacccgaggaggtttaaatgttattagnnnnnnnnnnnttcaatgttaaaagaaatgttgaaattttttaaccctttcgccgttgggaaccccctccaggggggggaggaaccgtatcccgcgggggaaccgccccatttgccccatgc

SEQ ID NO: 169926 - DNA, 568 bp, Homo Sapiens
aaaccgagagggtcaagtacgggcgcatttgagagcaagggcctacttggccgggactgaagcttgcgagttgagctccagttcggccggcagttccatcccgcttcaggaacaggaatccaagggcccacgctctgtctgccaagggccattcctgcccggagcaccctcctttcccttgcgcttgctctccggtacctgttccgcacctgagctcaagggcagggagaggccgggcctctggcagtccacgaaggaagccgtctgccttcggttatgattttaggaacaagtccaacgagggtgttcaagcagttaatggttgtgctaactcttgtttctactgaagcgggttttgcaaagctgacatcccttaaagataacttgggctttcggaagcggcaaggaaatggcacctgtagttgccaggacaggtggtgtcctcggccaggactaagagccagctcatctttgtaacattcataatacgggaaactgaggaccaggtggctcggaaaagagatgagttccagcttttacctaacacagggttctctcgtcgtcccca

SEQ ID NO: 169927 - DNA, 835 bp, Homo Sapiens
  misc_feature (108)..(108): n is a, c, g, or t
aaagattggagaaggctggctcgtcagctcaaagtctcagacaccaagatcgacagcatcgaggacagatacccccgcaacctgacagagcgtgtgcgggagtcactngagtaatctggaagaacacagagaaggagaacgcaacagtggcccacctggtgggggctctcaggtcctgccagatgaacctggtggctgacctggtacaagaggttcagcaggcccgtgacctccagaacaggagtggggccatgtccccaatgtcatgaaactcagacgcatctacctccgaagcgtcctgatgggccgctgcttagcgctggtggaccacaggcatctacacaacctggactatggttctctccaggaaggtagcccagcactagtgaagacccagcaggaagccaggctgagtgagccacagaccacctgctactgaactcaagctgcgtatattaatggcctctcccgcaccaggccgggcttgggccctgcacagatatatccatttcttcctcactatgacactgagcaagatcttgtctccactaaaatgagctcctgcgggagtagtaggaaagttggaaccgtgtccagcacagaaggaatctgtgcagatgagcagtcacactgttactccacagcggaggagaccagctcagaggcccaggaatcggagcgaagcagagaggtgggagaactggggattttgaccccccgccatcctttcacccagagcccatgggctcacccactgttggcgtttctgcctgccccctgcagtttggccaaaaaaggaatggttttgttccccattttcctttggaaaggccac

SEQ ID NO: 169928 - DNA, 885 bp, Homo Sapiens
gcagaacgacctggagcccgggcacaccgagctcctgcgcgagctgctcgcctccctgcggcgccacgacctgctgcggcgcgtcgacgacttcgaggcgggggcggcggccggggccgcgcctggggaagaagacctgtgtgcagcatttaacgtcatatgtgataatgtggggaaagattggagaaggctggctcgtcagctcaaagtctcagacaccaagatcgacagcatcgaggacagatacccccgcaacctgacagagcgtgtgcgggagtcactgagaatctggaagaacacagagaaggagaacgcaacagtggcccacctggtgggggctctcaggtcctgccagatgaacctggtggctgacctggtacaagaggttcagcaggcccgtgacctccagaacaggagtggggccatgtccccgatgtcatggaactcagacgcatctacctccgaagcgtcctgatgggccgctgctttgcgctggtggaccacaggcatctacacagcctggactttggttctctccaggaaggtagcccagcactgtgaagacccagcaggaagccaggctgagtgagccacagaccacctgcttctgaactcaagctgcgtttattaatgcctctcccgcaccaggccgggcttgggccctgcacagatatttccatttcttcctcactatgacactgagcaagatcttgtctccactaaatgagctccctgcggggagtagttgggaaagttgggaacccctgtcccaccacaagaaaggaatcctggtgccaaattgagccaattcaccacctggtttaaccttcccacaagccaggaagacaagcaacaaaaggccttctcagaagagcgcccccaagg

SEQ ID NO: 169929 - DNA, 456 bp, Homo Sapiens
tgtattggtggtgctgccagcccacactcctcagctttctggggccacaccctgctcaggcagacataccactcgccctggcttgttcctgggaccccaggctgcccaagggaaaggtaccgctcccaggtgctgcgcggctctgccctgcccactctaaccctggggctagcaagacgtgtcaggggaaccaaggctcagatcattcccccttcatctacaaccctgccagccctacagggataaatcaaaagacaaaatctccccatctcacagcgagtgacaagccgacctgggctactacatgtcccaagatgcacagctccgtaaccatacaccacctcccccaagcgggatctatcagaaatgaggccgggcacaccgcactctgggatttgtagtccccaggagccagcaccaaacacccaaggaagagagtgcacaggctaagactac

SEQ ID NO: 169930 - DNA, 553 bp, Homo Sapiens
tactaactgtgatgatgggaactcgtgaggagagcttggaagatgccttaggtccacccgctgacaatgatgatgttgttaatgactttgatattgaagatgaagtagttgaagtagaaaatagggaagaaaacctactgaaaatttctcgcagagtgaaagagtacaaagcggaaattttgaatcctcccagggaagggaaaaagcttttggtgctagatgttgattatacactatttgaccacaggtcttgtgcagagactggggtagaattaatgcggccatatcttcatgaatttctaacatctgcctatgaagattatgacaatgttatttggtctgcaacaaatatgaagtggattgaagctaaaatgaaagagctgggagtgagcgcaaatgcggattataagattactttcatgttggatagtgctgctatgataacagtacatactccaaggagaggattaatagacgtaaagcctcttggtgttatatggggaaagttttcggagttttacagcaagaaaaacaccattatgtgtgatgtcag

SEQ ID NO: 169931 - DNA, 1352 bp, Homo Sapiens
  misc_feature (14)..(14): n is a, c, g, or t
  misc_feature (21)..(21): n is a, c, g, or t
  misc_feature (32)..(32): n is a, c, g, or t
  misc_feature (136)..(136): n is a, c, g, or t
  misc_feature (1116)..(1116): n is a, c, g, or t
  misc_feature (1150)..(1150): n is a, c, g, or t
  misc_feature (1289)..(1289): n is a, c, g, or t
  misc_feature (1291)..(1293): n is a, c, g, or t
ccctcctaagcctnttactgncttggggaaancgaaatgacccgctcggctctgagacaccggtcagcggacaagcacttcgccgccgagtgcacattgtccattataactcaagacctttatcctgacgccagcnctgccagcaacaagtcagaaggcctcgctgtcctggctgttctcattgagatgggctccttcaatccgtcctatgacaagatcttcagtcaccttcaacatgtaaagtacaaaggccaggaagcattcgtcccgggattcaacattgaagagctgcttccggagaggaccgctgaatattaccgctaccgggggtccctgaccacacccccttgcaaccccactgtgctctggacagttttccgaaaccccgtgcaaatttcccaggagcagctgctggctttggagacagccctgtactgcacacacatggacgacccttcccccagagaaatgatcaacaacttccggcaggtccagaagttcgatgagaggctggtatacacctccttctcccaagtgcaagtctgtactgcggcaggactgagtctgggcatcatcctctcactggccctggctggcattcttggcatctgtattgtggtggtggtgtccatttggcttttcagaaggaagagtatcaaaaaaggtgataacaagggagtcatttacaagccagccaccaagatggagactgaggcccacgcttgaggtccccggagctcccgggcacatccaggaaggaccttgctttggaccctacacacttcggctctctggacacttgcgacacctcaaggtgttctctgtagctcaatctgcaaacatgccaggcctcagggatcctctgctgggtgcctccttgccttgggaccatggccaccccagagccatccgatcgatggatgggatgcactctcagaccaagcagcaggaattcaaagctgcttgctgtaactgtgtgagattgtgaagtggtctgaattctggaatcacaaaccaagccatgctggtgggccattaatggttggaaaacactttcatccggggctttgccagagcgtgctttcaagtgtcctggaaagtctgctgcttctccanagctttcagaaaagaatgtgcactctctgcttangttttgcttgggaaactcaacttctttcctctggagacggggcatctccctctgatttccttctgctatgacaaaacctttaatctgcaaccttacaactccgggaacaaatggggggacaggaaaggatccaagttgntnnnagaggaaaacgaaaacccggaggatttccttttggggatataattaagggaaacacctt

SEQ ID NO: 169932 - DNA, 939 bp, Homo Sapiens
  misc_feature (259)..(259): n is a, c, g, or t
  misc_feature (298)..(298): n is a, c, g, or t
  misc_feature (308)..(308): n is a, c, g, or t
  misc_feature (592)..(610): n is a, c, g, or t
  misc_feature (700)..(710): n is a, c, g, or t
acaccagtcccagaagagccatggagaaacaagtctcctgaggccatgaagatccgcaacaggctgagtgagagtagcacttggaacatagccacgttctgtggtggaggaggtgggcctcgttagaccgctcagattactggaacctcgttatcacatcccattctaacaagttttccactgaatgttttcctgacatctataaatgaggggtgcctgcccatgttaatgctgattaaaaaacacaaagtacacaaantctatctccttcattgctggtgtatggaccccagaacanccatcacaanaatatttccttggcctaaaagatcactggattaacaaggagttttaacagaggaacaggagtgctgtactgagaggctttcgaagggaaacacaggtaccgccatttccgatgagtttctgaaaatgctagaaaaatgacagactgccaaagacagctgtcatgctgttctccatgataacggcactaatattaaaaaaaataagaacttttaatgattgtaatgtatacagtttgggctgtttggcaaacccctgcagatgtgcattaatgatgctttatttnnnnnnnnnnnnnnnnnnncagtccatgttgaaattgatcagtgtaagttaaatggtggtttttaggctggacccatgatttaagctgtacccatccagctcaaaccgnnnnnnnnnnntcatttgactgttaaagcaattgttcagagtcttgaagaagaaaccaggcaggaaaatgccaataatgatgattggcgaaatcaaaatcgaaaacaaagaaactgtttatcaagccgccgacaaagaaatcttgcatggagactacaagtctggagtttctgggatgaaattgtacaggaatctcagtccacagtttcctcaatcgctgcggagacggagctgtcaccc

SEQ ID NO: 169933 - DNA, 831 bp, Homo Sapiens
  misc_feature (702)..(702): n is a, c, g, or t
  misc_feature (707)..(707): n is a, c, g, or t
  misc_feature (710)..(710): n is a, c, g, or t
  misc_feature (713)..(713): n is a, c, g, or t
  misc_feature (721)..(721): n is a, c, g, or t
  misc_feature (728)..(728): n is a, c, g, or t
  misc_feature (731)..(731): n is a, c, g, or t
  misc_feature (734)..(734): n is a, c, g, or t
gggggctgcgggaagatggcggcggccatggcagcatcttccctgacggtcaccttagggcggctggcgtccgcgtgcagccacagcatcctgagaccttcggggcccggagcagcctccctttggtctgcttctcgaaggttcaattcacagagcacttcatatctaccaggatatgttcctaaaacatccctgagttcaccaccttggccagaagttgttctgccagacccagttgaggagaccagacaccatgcagaggtcgtgaagaaggtgaatgagatgatcgtcacggggcagtatggcaggctctttgccgtggtgcactttgccagccgccagtggaaggtgacctctgaagacctgatcttaattggaaatgaactagaccttgcgtgtggagagagaattcgactggagaaggtcctgctggttggggcagacaacttcacgctgcttggcaagccactcctcggaaaggatcttgttcgagtagaagccacagtcattgaaaagacagaatcatggccaagaatcattatgagattcaggaaaaggaaaaacttcaagaagaaaagaatcgtccacgacccccgcagactgtcctccggataaaacagcattgagattgctccgtgttttgttgtgattacccgagttaatacttaccaaaaggataaaaataaactcctgccttccccngaaanaanaanaaaaaacnacaaaanaanaanaccttgtgcgggccggccttcggccctttcgagaaggctttttctaaaaaccaattcccgtttggggggcgccgggggcccccaaataggggtaaat

SEQ ID NO: 169934 - DNA, 809 bp, Homo Sapiens
gtacagttctgtcctggcatcgtcattcattgtagtatgttctataggtgccatgaaactcagtagcttgctaaggacatgaaaccgaagtttccggcctttgctggctttcctatctacttttttgtggattttgcttcgtaacttctggattgcaagccactgccttcccatggccacctgatcgttgggatccaaggagctggtcttccgttctatgagttctcgaaggagctggtggtaaaagtcatcatcatcaaagatttcttcatccaagtccttcagatgagcattagcaggggcttgaggaaggatctccggttcccctggcaaactctctgggacaggctgagctgctggctcaggtttgccaagaactcgatagacggagcgcttggtctgtgtccttcgaagtaatctctctttgtccatcagaatatggtcgatctgagtcaagattgagcgttcaaaaggcaccaaaacccttccccagttttccagaagccagtttggtcttatcgtgccatttctgaagtgtgcggttcctgtagactgtaaagtcggcaaagcgctttgccatgaagctgggatagtcctccatctccagcttcctctttgcagggacccttcttcgttgctgcttcttctcttctaccagctcatcatcttcactagaaatctcctcacttcccgcattgggctttgtcccatctactagatatctagtgtctgggtactggaaaagcaactcttcctgaagacactgacccactcggggatcctctagagcgagggcaggcaacaagatg

SEQ ID NO: 169935 - DNA, 500 bp, Homo Sapiens
ggtccgtaatactgccgtactatgtagtctcgaaaggagctggtggtaaagtcatcatcatcaaagatttcttcatccaagaccttcagatgagcattagcaggggcttgaggaaggatctccggttcccctggcaaactctctgggacaggctgagctgctggctcaggtttgccaagaactcgatagacagagcgcttggtctgtgtccttcgaagtaatctctctttgtccatcagaatatggtcgatctgagtcaagattgagcgttcaaaggcaccaaaacccttccccagttttccagaagccagtttggtcttatcgtgccatttctgaagtgtgcggctcctgtagactgtaaagtcggcaaagcgctttgccatgaagctgggatagtcctccatctccagcttcctctttgcagggacccttcttcgttgctgcttcttctcttctaccagctcatcatcttcactagaaatctcctcacttcccgcatt

SEQ ID NO: 169936 - DNA, 638 bp, Homo Sapiens
  misc_feature (483)..(483): n is a, c, g, or t
  misc_feature (509)..(509): n is a, c, g, or t
  misc_feature (531)..(531): n is a, c, g, or t
  misc_feature (543)..(543): n is a, c, g, or t
  misc_feature (549)..(549): n is a, c, g, or t
  misc_feature (556)..(556): n is a, c, g, or t
  misc_feature (566)..(566): n is a, c, g, or t
  misc_feature (577)..(577): n is a, c, g, or t
  misc_feature (591)..(591): n is a, c, g, or t
  misc_feature (597)..(597): n is a, c, g, or t
  misc_feature (613)..(613): n is a, c, g, or t
cttctccaaagtcatgggatttgctcgggtcatcaactataaggagttcacgaaggccctggaagagctggcgaccaagagattcaaggggaagagcaaggaggaggccttcgatgccatctgccagctggtggcaggcaaagagccagccaatgtgggcgtcactaaagcaaaaacagggggtgctgtagaccggctgacggacaccagcagatacacgggctcccacaaggagcgcttcgatgagagcggcaagggcaagggcattgcgggacggcaggacatcctggacgacagtggctacgtgagcgcctacaagaatgcaggcacctacgatgccaaggtgaagaagtgaggcttgggaagaccgccctgcaaagtgcggctgcccctgccagaggctcaggcctggggtcttaaggggcacgttggagcaagagatcctgggtccccttcccttgcttggaccttgccacccagagntttccttgccttagttcccattgggnttggccccaccagggctttttnaacccagggttntttttngggcccntttcttcttncttttttcttntttccaattttttntttcanttggggggatagtttnttttcttttaggctttatttaaccc

SEQ ID NO: 169937 - DNA, 1068 bp, Homo Sapiens
gcacacaaggtcagcatgctgctcctctgtcacgctctcgctatagctgttgtccagatggttatcttctcagaaagctgggcatttgccaagaacatcaacttctataacgtgaggcctcctctcgaccctacaccatttccaaatagcttcaagtgctttacttgtgaaaacgcaggggataattataactgcaatcgatggcagaagacaaatggtgtccacaaaatacacagtactgtttgacagttcatcacttcaccagccacggaagaagcacatccatcaccaaaaagtgtgcctccagaagtgaatgtcattttgtcggttgccaccacagccgagattctgaacatacggagtgtaggtcttgctgtgaaggaatgatctgcaatgtagaattacccaccaatcacactaatgcagtgtttgccgtaatgcacgctcagagaacatctggcagcagtgcccccacactctacctaccagtgcttgcctgggtctttgtgcttccattgctgtgatgccaccattcctaggagaggcagagaccagcctctaaagcacaagccaaaaactgtgtgaacggtgaactttggagtgaagatcaatcttgcacttggtgaagagtgcacattggacctcaaggcgaaagccagtggtttgcttggataaaatgttcccgcatgaggccacaggactgaggatgggaatttggcagggcctgagaagatggtctgacttccaggcttcctggtcaaagagagctacgtttgggcagttctgcagagaggatcctggcaactagtcccacctgactaggcctttagctgaaaggatttcttgacctccttgactgcctcagaggctgccaggtcaaaccctcttgtttatgtgattagctcagagcatctctatgaaatataacccttcgccctcatgagaaagcagatttccccaccaacagcatagttaatgagaaaggcaactgtacgaaaaaaacttcagtggaactaatatgaaatctatttgcaaaattatggggggaaataaagcttttaaattgtt

SEQ ID NO: 169938 - DNA, 927 bp, Homo Sapiens
  misc_feature (809)..(809): n is a, c, g, or t
gtagtggggcctgcggtgggagtgggaaggaaggcggagggaaccatgcgaggttctgagaattgcggcgagggtcgcctcgagagacggtttctgagcaggaattctgaaatccccaccacttcctccctccgggggatttgatcccctatggccaccgctaacagcatcatcgtgctggatgatgatgacgaagatgaagcagctgctcagccagggccctcccacccactccccaatgcggcctcacctggggcagaagcccctagctcctctgagcctcatggggccagaggaagcagtagttcgggcggcaagaaatgctacaagctggagaatgagaagctgttcgaagagttccttgaactttgtaagatgcagacagcagaccaccctgaggtggtcccattcctctataaccggcagcaacgtgcccactctctgtttttggcctcggcggagttctgcaacatcctctctagggtcctgtctcgggcccggagccggccagccaagctctatgtctacatcaatgagctctgcactgttctcaaggcccactcagccaaaaagaagctgaacttggcccctgccgccaccacctccaatgagccctctgggaataacccttccacacacctcttcttggaccccacaaatgctgaaaacactgcctctcagtcttcaaggacccgtgggtcccggcggcagatccaacgtttgggagcaccttgctggcgctctatgtggcaaaaaatccggcggctgcaagaaaaggggttggaattcctccgatttggatgaccccnactccgcattcctgcaggagggacgggttgaaacggtaaacctgatcccccctccttggggccgcacattgggaacttaaaaaaatgcttcttttcctgtgacccgccccgggttaat

SEQ ID NO: 169939 - DNA, 1199 bp, Homo Sapiens
  misc_feature (377)..(454): n is a, c, g, or t
  misc_feature (1093)..(1093): n is a, c, g, or t
  misc_feature (1156)..(1156): n is a, c, g, or t
gggggggcctgcggtgggagtgggaaggaaggcggagggaaccatgcgaggttctgagaattgcggcgagggtcgcctcgagagacggtttctgaggcgttgaccctgcactatcagatcctgtgttggcccggcgccttcgggaaaaccggagtttggccatgagtcggctggatgaggtcatctccaaatacgcaatgttgcaagacaaaagtgaggagggcgagagaaaaaagagaagagctcggctccaaggcacctcttcccactctgcagacacccccgaagcctccttggattctggtgagggccctagtggaatggcatcccaggggtgcccttctgcctccagagctgagacagatgacgaagacgannnnnnnnnnnnnnnnnnnnnnnnnnnnnnnnnnnnnnnnnnnnnnnnnnnnnnnnnnnnnnnnnnnnnnnnnnnnnntctggaacagatgcaggagggtcaggaggatgatgaagaggaggacgaagaggaagaagcagcagcaggtaaagatggagacaagagccccatgtcctcactacagatctccaatgaaaagaacctggaacctggcaaacagatcagcagatcttcaggggagcagcaaaacaaaggacgcatagtgtcaccatcgttactgtcagaagaacccctggccccctccagcatagatgctgaaagcaatggagaacagcctgaggagctgaccctggaggaagaaagccctgtgtctcagctctttgagctagagattgaagctttgcccctggataccccttcctctgtggagacggacatttcctcttccaggaagcaatcagaggagcccttcaccactgtcttagagaatggagcaggcatggtctcttctacttccttcaatggaggcgtctctcctcacaactggggagattctggtcccccctgcaaaaaatctcggaaggagaagaagcaaacaggatcagggccattaggaaacagctatgtggaaaggcaaaggtcagtgcatgagaagaatgggaaaaagatatgtaccctgcccagcccacctttccccttggcttccttggccccagntgctgattcctccacggagggtgggactctcccagccatggggcctgggtgaccagctccccntctggcatcccctttctccccagccccggggctggtccccaaa

SEQ ID NO: 169940 - DNA, 867 bp, Homo Sapiens
  misc_feature (797)..(811): n is a, c, g, or t
gggatcttcaggggagcagcaaaacaaaggacgcatagtgtcaccatcgttactgtcagaagaacccctggccccctccagcatagatgctgaaagcaatggagaacagcctgaggagctgaccctggaggaagaaagccctgtgtctcagctctttgagctagagattgaagctttgcccctggataccccttcctctgtggagacggacatttcctcttccaggaagcaatcagaggagcccttcaccactgtcttagagaatgaagcaggcatggtctcttctacttccttcaatggaggcgtctctcctcacaactggggagattctggtcccccctgcaaaaaatctcggaaggagaagaagcaaacaggatcagggccattaggaaacagctatgtggaaaggcaaaggtcagtgcatgagaagaatgggaaaaagatatgtaccctgcccagcccaccttcccccttggcttccttggccccagttgctgattcctccacgagggtggactctcccagccatggcctggtgaccagctccctctgcatcccttctccagcccggctgtcccaaaccccccattcacagcctcctcggcctggtacttgcaagacaagtgtggccacacaatgcgatccagaagagatcatcgtgctctcagactctgattagctgcctccccttctccctgcctccagaatgttctgggataacatttggaggaaggtgggaagcagatgactgaggaagggatggactaagctaatccccttttggtggtgtttctttnnnnnnnnnnnnnnngcttaagttttacacagaaacattaataaacaataaagttcttttaatattaatta

SEQ ID NO: 169941 - DNA, 561 bp, Homo Sapiens
agtgtcgcctccagcacacagagctacatccttcgggacctggacgacacctcagtggtggaagacggccgcaagaagcttaacacgctggcccattacaagatccctgaaggtgcctccctggccatgagtctcatagacaagaaggacaacacactgggccgagtgaaagacttggacacagagaagtatatccatttggtgctgcctacggacgagctggcggagcccaagaagtctcaccggcagagccatcgcaagaaggtgctcccggaaatctacctgacccgcctgctctccaccaagggcacgttgcagaagtttctggatgacctgttcaaggccattctgagtatccgtgaagacaagcccccactggctgtcaagtactttttcgacttcctggaggagcaggctgagaagaggggaatctccgaccccgacaccctacacatctggaagccaacagccttcctctccggttctgggtgaacatcctgaagaacccccagttgtcttggcattcgatagacagacacatcgacgcctgctttagtctcg

SEQ ID NO: 169942 - DNA, 147 bp, Homo Sapiens
ccagtgtcttccaaaagacaaaaaatatttaataggcccatcaaggaaaagaactatgaaggaaggtaaaatataaacttattcatacaaacaaatgccaaataaagtcagttgccagcataactgcactacaaaaaatgtgaaagg

SEQ ID NO: 169943 - DNA, 976 bp, Homo Sapiens
  misc_feature (484)..(484): n is a, c, g, or t
  misc_feature (545)..(545): n is a, c, g, or t
agtcagtgtcttcggcttttgtaagccaagggaagagatggtgttgagtggaaaatacaaatctggggaacaaattcttcgtttggccaatgagagatttgctgttccggaaatactctttaatccttctgatataggcattcaagaaatgggaattccagaagctattgtctattcaattcaaaatctacctgaagaaatgcagccgcatttttttaagaacattgtcttgacaggaggaaattcccttttcccaggatttagggatcgggtttactcagaagttcgatgtcttactccaacagattatgatgtttctgttgtgctgcctgaaaaccctattacttatgcctgggaaggtggaaaattgatatcagagaatgatgattttgaagatatggtggtaacaagagaagattacgaagaaaatggacatagcgtctgtgaagagaaatttgatatttaagcaacatttttgaatganagttgtgaccataaggtttaatttcaaagttccttttaaaaaagtttaaggaactgtgttnaccttttgtcctaagaaaaaagcttgaaatttatgtaaatactttgatcgattgctaattttcaaaagcttcttaggtaagttactacagtaaactgtaactcagtccacattttcatttaagagctagactaccataacaatgcctatgctgtttccaagggtaggttatttttcattaaaagaaaaatgaatgcattttaagtttaattcctcataactgaaagcacaaatttaacggcttcactggacagttttccttagaaggtagttttgtgtgactgtgactaaagtattttattttaaaatgtcattcttatttatacattctaaagttggaaagactgatcttatatgtgtataatgtttattttgtacctagagtacatttaaaagggtggagactaagctaataaagtttttttggccact

SEQ ID NO: 169944 - DNA, 1235 bp, Homo Sapiens
ggagctgcagctggcgaagttgggcgactggcggatgcaggccttgcggcacgtcgtgtgcgccctgtccggcggcgtggacagcgccgtggccgcgctgctgctgaggcggagaggttaccaggtgacaggggtgtttatgaagaactgggactcactggatgaacatggggtctgtactgccgacaaagactgtgaagatgcttacagagtttgccagatcttagacatccctttccatcaagtgtcctacgtaaaggagtattggaatgatgtgttcagtgactttttgaatgagtatgaaaaaggaaggactcccaatcctgacatagtttgcaacaagcacatcaaatttagttgcttttttcattatgctgtggataatcttggggcagatgccattgccacaggtcactatgcaagaacttccctggaagatgaagaagtctttgagcagaagcacgttaagaagcccgaagggcttttcagaaatcggtttgaagttagaaatgcggtaaaactcctccaggcagctgacagctttaaagaccagaccttctttctcagccaggtttcccaggatgcccctgaggagaaacatcttccctctggggggattaacgaaagagtttgtaaagaaaatcgctgctgagaatagacttcatcatgtgcttcagaagaaagagagcatgggcatgtgtttcatcggaaagaggaattttgaacattttccttcttcagtatctgcagcctcgacctggtcactttatttccatagaaagaaaataaggttctgggaacacataaagggtgggtcctgtataccttgggccagagagcaaacataagtggcctgagagagccctggtacgtggtggagaaggacagcgtcaagggtgacgtgtttgtggccccccggacagaccacccagccctgtacagggacctgctgaggaccagccgcgtgcactggattgcggaggagcctcccgcagcactggtccgggacaagatgatggagtgccacttccgattccgccaccagatggcactagtgccctgtgtgctgaccctcaatcaagatggcaccgtgtgggtgacagctgtgcaggctgtgcgtgcccttgtcacaggacagtttgctgtgtactacaagggcggacgagtgcctgggcagcgcggaagatcctgcggctggggccgtctggctacacgctccagacaggccagcgcag

SEQ ID NO: 169945 - DNA, 677 bp, Homo Sapiens
agtgctcgtctttggtaacatttggagtagcatctgacagaacggagctgctcactcctggaccggttatttggttaaaacccaaaatgttaggtcgaaagaatcaatcatctacccaatacaaataaatattgcgttatgaaagagacgggcagagtcccacggtatccctttttaaagcggcatttccagcacagcagcgtggcgctcacagagaccagcagggcgcagctctgggatgccacatgggacacagctgcaagtacccgtaggcaccgtcccgccgcacgcgtccctccaccgagcgtgaggatgtggcgcaagggcacgtgcactccgtctgcgacggggaccggttcgtcctgactgcagaatgaccccgtgttcaaaaacagccgctcccatttgcagaccacatgggccctggctgggctctcaggtccgagggccagcacctgctttggtgacctgcagctgtgccggacgcccggcaaggagcgtgatgtgcgcagccccccgaggacgggcctcctgtgctgcccatcagccctcccgaaaggacccagaacaaaggagtgggagagggtgacgccggggtaaggcctgtgctttatttgtgggtcaatctcgggggaccgcgtgggtcgacccgggttaaccggagctcgaattcgaaa

SEQ ID NO: 169946 - DNA, 898 bp, Homo Sapiens
gtgccgattcggcacgaggctgaaaccatggatagagaaaacagtaaagagggtcctgggtttctcagagcctacggtggtcacagcagcattgaactgtgtggggaagggcatggacaagaaagaaggcagccgatcatctgaaaccttttcttgatgattctacttctccgatttgtggacaaactgtttgagggctgtggaggaaggccgaagctctaggcattccaagtctagcagtgacaggagcagaaaacgagagctaaaggagttccaggaagcgctcgcccctggccgaggatatgtccttgcaaaacacgagccctcctagtgaagaggggatgtcacccaaagcctaccaccggaggtgtttggtgatgactctgagatctctaaagaatcatcaggagtaaagaagcgacgaataccccgttttgaggaggtggaagaagagccagaggtgatccctgggcctccatcagagagccctggcatgctgactaagctccagatcaaacagatgatggaggcagcaacacgacaaatcgaggagaggaaaaaacagctgagcttcattagcccccctacaccctcagccaaagactccttcttccctcccaaccagaacgacttcctattggcaacactattcagcccctccccaggctgccactttcatgaatgatgccattgagaaggccaagcaaagcagctgaactgcaagctccaatccaagccccactggcactggaaccaagaactcatccggcatgcccacatgggggggccttggctaatctccctggccagtgggcattgctccccccgaagggggagtttaaaagaacaaaccgaaacctaccccattgaatccctggaattaacagggccgccactg

SEQ ID NO: 169947 - DNA, 1103 bp, Homo Sapiens
gggcgcgcgctctgcgagctggatgtccaggctgcgggcgctgctgggcctcgggctgctggttgcgggctcgcgcctgccgcggatcaaaagccagaccatcgcctgtcgctcgggacccacctggtggggaccgcagcggctgaactcgggtggccgctgggactcagaggtcatggcgagcacggtggtgaagtacctgagccaggaggaggcccaggccgtggaccaggagctatttaacgaataccagttcagcgtggaccaacttatggaactggccgggctgagctgtgctacagccatcgccaaggcatatccccccacgtccatgtccaggagcccccctactgtcctggtcatctgtggcccggggaataatggaggagatggtctggtctgtgctcgacacctcaaactctttggctacgagccaaccatctattaccccaaaaggcctaacaagcccctcttcactgcattggtgacccagtgtcagaaaatggacatccctttccttggggaaatgcccgcagagcccatgacgattgatgaactgtatgagctggtggtggatgccatctttggcttcagcttcaagggcgatgttcgggaaccgttccacagcatcctgagtgtcctgaagggactcactgtgcccattgccagcatcgacattccctcaggatgggacgtggagaagggaaatgctggagggatccagccagacttgctcatctccctcacagcccccaaaaaatctgcaacccagtttaccggtcgctaccattacctggggggtcgttttgtgccacctgctctggaaaagaagtaccagctgaacctgccaccctaccctgacactgagtgtgtctatcgtctgcagtgagggaaggtgggtgggtattctccccaataaagacttagagcccctctcttccagaactgtggattcctgggagctcctctggcaataaaagtcagtgaatggtggaagtcagagagcaaccctggggattgggtgccatctctctaggggtaacacaaagggcaagaggttgctatggtatttggaaacaatgaaaatggactgttagatggcc

SEQ ID NO: 169948 - DNA, 472 bp, Homo Sapiens
ggcactgtgcccattgccagcatcgacattccctcaggtgctgggatccagaaggatgggacgtggagaagggaaatgctggagggatccagccagacttgctcatctccctcacagcccccaaaaaatctgcaacccagtttaccggtcgctaccattacctggggggtcgttttgtgccacctgctctggaaaagaagtaccagctgaacctgccaccctaccctgacactgagtgtgtctatcgtctgcagtgagggaaggtgggtgggtattctccccaataaagacttagagcccctctcttccagaactgtggattcctgggagctcctctggcaataaaagtcagtgaatggtggaagtcagagagcaaccctgcggattgggtgccatctctctaggggtaacacaaagggcaagaggttgctatggtatttggaaacaatgaaaaatggactgttagatgcca

SEQ ID NO: 169949 - DNA, 230 bp, Homo Sapiens
aaatagctcttaagttcactctgtcttctccaaacccactgccactacatttctgacgcttaactcttgcctaaactgatgtcctctatcccaattttgctccccttaaatccttccccactactgaaaaagtgatctagttaaaaatcatgactttgtcattctaatactctaattaaattccatcttttggcaagcagaagcgtcagaaatgagatgtggaagggggc

SEQ ID NO: 169950 - DNA, 478 bp, Homo Sapiens
atttctagtttagacttaaattggcagtgtcaggtgcaagcatgcacattttgtgttatcttagttggacaacaagggcacaggttggggggatggagaatggaaaatgtgggtagggtctgaatctcattgcaggctgttaaccatttccagagcctttagagtgcaaggctgccattagctcataaataagagaacacctccttagttcagaagtggctcctgctgctactcatgtcatgggcagagtgacttacacgtgggtcctttggagtgagagctttctttcgttatgttctctctccactcatcggcgggtgaggggctattctcagcagataaatgagatgcttcacagtactaggccagaaaacagttgggttgacctatctatctccctaaattccttggggataaagagaactcatgtagtgtacctcagatagctttctaaagtaagaaatgagatgttggcagg

SEQ ID NO: 169951 - DNA, 396 bp, Homo Sapiens
ctacttccttccccctcagctcccatcctagcttggccacagtaacatctgggttgccaaggatgggtggctgagagacctcctggaccctccgtagtatggatggaccctgggtgtgaattgcccttctcctggcatccttgcatactggacagtttcagctccatctctgggcttctcagggcccataacagatgctgccctaccctgtccctataacttgggtggtttcctctccccaccccagaggaggctccagattccaaaaaacaggtctctccctaacagagggaaacctcccctttcctcccccaatccctcccactccgtatctccctcatttcctccacatcagggtctggcccgctaatgtggaacaaatgagatgtcggaagg

SEQ ID NO: 169952 - DNA, 271 bp, Homo Sapiens
ccagccagtagccagtaattggagagccaccattgtccaaaggaggagtccagctcactagcattgatcctttggaaaagtgccaaaacttttggttttcctggaggtccaggaaggcgataaggatcttgaatgactacctttattttgatttgcaccttcatcactgattccaatatttattcactgccctaactcggactcatactgaccattgggataagtttcagatctagaaatttagaaagacagaattttattgaagagatat

SEQ ID NO: 169953 - DNA, 700 bp, Homo Sapiens
aaagctaacactttaaaaaggaaaactaatagttcttgccttagggaaaagcccaggtatgaagtatggccatatacttgacactgtcctgtgtaaccctttactttgcctcaggctttcaagattgagtcttttttcccccaaattaggttaacatgcatttgaccccaacctgtggggtttgagtaagctggaaatctgtgacggtaggctttctagtgtcacgaggtggtggtgactgaaggaaaagctgggatcacaggttccttctgatggagaggaaggtttatttctatgcccctcccaccaccctccacctagagctcacccaagtctgctccagtcccaggggcaggccattctgcaaaagcaggacctcacagaaacaagggctgggttgaggtcacccccttcagagttggttcctggccagatgggtaagaggcatttgtaattttaaaaatgtcaaacttgggtatggtgtatacttctaagtgcctaaataaacaaaccaggctgttgatattttagccagacaaatcggcaagctcaaattaacccgaatctcacgtttagaatcttgattttcatctgcatcatatcatgccgcttagatgaggaacatttgcactgaagagtggcgcaaggcacacgaagtgtaagtcaacattaattgttccctaacccttaaaattttgaa

SEQ ID NO: 169954 - DNA, 152 bp, Homo Sapiens
ctcagctccctcttcaccttatgtaatgtctgggcctgagatttctctctggctttaagttcttgatgttcctgtgatatggcttctgccagcaatgaaaactggtccttatagtagttctccatggagtccagttcatcctggtggcgtct

SEQ ID NO: 169955 - DNA, 862 bp, Homo Sapiens
ccttccgacatctcatttctctctcctcctcaagcgatcctgatttctcttctcctgcttttcagcgacagttttcctcaactgatcaagcttctctcggatctgaatgaaccccaagtgtaacttgccaccgaagtggtctgccaggcgacggtcattgtcatggagaccaaggtaggctgaacagacctcgcagacacgcagcttttgctgctgaaaactggatgcaggcatggaatttctgtattcttcctcagcttcttttgttcttcgcacgaactttttccacttccataagaatcttctgggattcatccacattaccttcagcccctagctgttcggctttagcaaggagttttcctatttcttcatttaactcatgtactttttctgcctttgcagaaacttccgcactgatttcctcctgtgtttctgccagccgcttcttggcgagctcagttctccgatcacattcagcaataaaggactccaagtgatccattgcatctaattcaaaaaacaggtctctttctttacttgcaatctcataatctgctcggagggccaagtcgtggattttggtacattctcctaaatccatgcgcgtcccagccaggatgtcatgggggcagcagtccagaaggtgactcttgcagacacggtcatctgtaaacttgaccctctgtctggtttcgtctccgtcccgagccgtgcccatgagctggtccagcagggcccgcatctgcgcctgggcggacatggtagccggcggaggcgacggggtcggccgcgacgacttctctcaggcaggcggtggcacgcggcgtcgacaaacgatggtcgcgtcggcctcgagccc

SEQ ID NO: 169956 - DNA, 551 bp, Homo Sapiens
  misc_feature (334)..(334): n is a, c, g, or t
agaccagtaatccgatcacatacagcaatcaaggactccaagtgatccatcgctggtctttgtgagcacgtaaatattattccctcatgtacatgagaggtagggtcccccctttcacatctaatacaaaaaacaggtctctttctttactcgcaatctcataatctgctcggagggccaagtcgtggattttggtacattctcctaaatccatgcgcgtcccagccaggatgtcatgggggcagcagtccagaaggtgactcttgcagacacggtcatctgtaaacttgaccctctgtctggtttcgtctcctgaaattcatttgtggttttnaaataagacaatattatcacattaaccaccaaaaaataactagtataacaattcaactggatgatatgcagactatcatttctgtgttctccccatcaaatgcaatgaaaagctgatctaaagatatttacaactggagtggaatacacatttgtatgaggctagttatatcatggagactcacacttaatgagatctgactccatcagtgtaccaa

SEQ ID NO: 169957 - DNA, 547 bp, Homo Sapiens
ttccaacatctcatttctcccatgaactatttggaaaaagctgcaggcgtaatattggatccctaaatactttattctccttataccattatcagacccaagtatcatctaatagtccataatcaaactgcctaaacagtttctacactgtctttttaactatttcaaactatcaaggtccgcattttcttccttagaacttttagtctttttcttccccaaaatatttgagtccatgccagttgcctttagttgtacccaaataatggtttgtctatttcctaaaagtagtactcttaaatttaaatttagtgttatttttgttgtcatcgttccttcttcctcatgtggttgtgcaggcagagcttgagcatccagatttcaaaattaaaaaataaaagataatctagtttaatatatagtagttgaatcaccttaagtctagactgctgtatgagcacccattatctttcactatattccatcatcccccaacatatccacagtagatgaaggaatatagtgaaagaaatgagatgttggaagg

SEQ ID NO: 169958 - DNA, 427 bp, Homo Sapiens
  misc_feature (350)..(350): n is a, c, g, or t
aaaaccagttattttcttgtacatttgtgccatgcactgttgttatacaagaataggtgtacaaagctaaagaaaaattgtggtcattgatgatggaatatatgacttgcaggctttgaagtctgcagaattcaagaaaagagctgcaaatgcatttttgtatctttattcaggactcacatgctttaccctaaagaaacctggggctaggggaaatgaaaggaagcctgaagactgactaccaaaacatgcaatatacttattcactgtctaagtctgtagtataacatgaactggagtctctatccttttctaaaatcgcattttgtaaggaaagaaagaaaaaaaanccccaaagaatgtagtcccacaactcctgatttgaaagaaacaccttgtattttttatatacatcattacgaaaatg

SEQ ID NO: 169959 - DNA, 698 bp, Homo Sapiens
  misc_feature (15)..(15): n is a, c, g, or t
  misc_feature (610)..(610): n is a, c, g, or t
  misc_feature (616)..(616): n is a, c, g, or t
caactcctgcctgcngtcgctctagaggatccccccttccaacatctcatttcttcaaagagcgtgagggtgagtacaggtggcggggggaatgaaaaggcggtcgctgtcatctgaacagacatcggaaaaatgccaatagagaacatgtctggctgtacgtctgacacagacaataaaaactgcacaagccagaatgcaaaacttcagtgagtggcggaaggaacatttctgcatttgacaagaaacataagctttatttttacctttattaaatggcggaacaaaaggttaaaaaacagaaaagcaacaagaacaaagcagacccttacatttgacaaagtgcacttcacttggctccatgatctatttcttagaaagactaaacaaaagtcaagtctttctaagaaatgagatgtcggaaggccttccaacatctcatttctgcataaattccaggttctaaggagccaacgatgggatctgctttcaactcgatgtaattttcaaagagtctttgatctagttctttcaatgaggccatgctaacctgtgtgattttttctattccctggaagttgtgcttttcaaaatgttctgcgatatttangaaggngtgacgttctagatagcaaccaattacttaggactatcaaaagggcgctgttctgaggtcaagctgaagcttcatggatctt

SEQ ID NO: 169960 - DNA, 760 bp, Homo Sapiens
  misc_feature (540)..(558): n is a, c, g, or t
aaaccaagcgcgagatgcagctagcacccttcatatccatccccgttctcagcgggacaacaccatggacagccgttttcagagcctccagcatttgcacaccactactcaccctctctgctgctggcatgttggtagagtcatccctgtaatcaagaaatggcctgtggaatgttattgttcaacgttgtttacagctcttaaaacatggtgaggaatgcctaagtcttagtgaccaaacgtgaccttgaaagcagacatagcatgacagaccttcctagagtgtttggtcgggttcacagtgaccgagagtcaggtccagcacacacctgggaaagggatgctgccccaaggggaccaaaagggccggacgttacagggtgaaaccctctgacccctcgcgacaccgtaggacttgacttttgtttagtctttctaagaaatagatcatggagccaagtgaagtgcactttgtcaaatgtaagggtctgctttgttcttgttgcttttctgttttttaaccttttgttccgccatttnnnnnnnnnnnnnnnnnnngcttatgtttcttgtcaaatgcagaaatgttccttccgccactcactgaagttttgcattctggcttgtgcagtttttattgtctgtgtcagacgtacagccagacatgttctctattggcatttttccgattctgttcagatgacagcgaccgccttttcattccccccgccacctgtactcaccctcacgctctttgaag

SEQ ID NO: 169961 - DNA, 373 bp, Homo Sapiens
tccatccccgttctcagcgggacaacaccatggacagccgttttcagagcctccagcatttgcacaccactactcaccctctctgctgctggcatgttggtagagtcatccctgtaatcaagaaatggcctgtggaatgttattgttcaacgttgtttacagctcttaaaacatggtgaggaatgcctaagtcttagtgaccaaacgtgaccttgaaagcagacatagcatgacagaccttcctagagtgtttgggtcgggttcacagtgaccgagagtcagggtccagcacacacctgggggaaaggggatgctgccccaagggggacccaaaaggggccggacggttacaggggtgaaacctcttgacccc

SEQ ID NO: 169962 - DNA, 868 bp, Homo Sapiens
  misc_feature (814)..(814): n is a, c, g, or t
  misc_feature (821)..(821): n is a, c, g, or t
gtagctgttcagagtacttagtgccgggaatccgtgttcatgtatatagctattcatcgagtagcactggtttaccgggtccttcatcgccatgatccctcatgcgtctgtggccgttctgcagacttctcagaaggcagagtggcagccgggcaccctacagaaactcagagggcagagtggcagccaggcccacatgtctctcaagtacctgtcccctcgctctggtgattatttcttgcagaatcaccacacgagaccatcccggcagtcatggttttgctttagttttccaagtccgtttcagtcccttccttggtctgaagaaattctgcagtggcgagcagtttcccacttgccaaagatccctcttaaccaacactagcccttgtttttaacacacgctccagcccttcatcagcctgggcagtcttaccaaaatgtttaaagtgatctcagaggggcccatggattaacgccctcatcccaaggtccgtcccatgacataacactccacacccgccccagccaacttcatgggtcactttttctggaaaataatgatctgtacagacaggacagaatgaaactcctgcggctctttggcctgaaagttgggaatggttgggggagagaagggcagcagcttattggtggtcttttcaccattggcagaaacagtgagagctgtgtggtgcagaaatccagaaatgaggtgtagggaattttgcctgccttcctgcagacctgagctggctttgggaatgaggttaaaagtgtcaggggacgttgcctgagcccaaatgtgttagtntggtctnggcaggcagacctttaggtttttgcttgctttagtcctgagggaagt

SEQ ID NO: 169963 - DNA, 514 bp, Homo Sapiens
  misc_feature (11)..(11): n is a, c, g, or t
  misc_feature (32)..(32): n is a, c, g, or t
  misc_feature (42)..(42): n is a, c, g, or t
  misc_feature (67)..(67): n is a, c, g, or t
  misc_feature (81)..(81): n is a, c, g, or t
  misc_feature (86)..(86): n is a, c, g, or t
  misc_feature (119)..(119): n is a, c, g, or t
  misc_feature (502)..(502): n is a, c, g, or t
aaaatgacctntacaaaacaggaacaaaaatnaaaacccctncgcccctttgcccctgaaaattggnaaatggttgggggnaaaanaagggccaccaaccttattggtggtccttttcncccattggcagaaaacagtgaaacctgtgtggtgccagaaatcccagaaatgaggtgtagggaattttgccctgccttcctgcagacctgagctggctttggaatgaggttaaagtgtcagggacgttgcctgagcccaaatgtgtagtgtggtctgggcaggcagacctttaggttttgctgcttagtcctgaggaagtggccactcttgtggcaggtgtagtatctggggcgagtgttgggggtaaaagcccaccctacagaaagtggaacagcccggagcctgatgtgaaaggaccacgggtgttgtaagctgggacacggaagccaaactggaatcaaacgccgactgtaaattgtatcttataacttattaaataaancatttgctccgt

SEQ ID NO: 169964 - DNA, 430 bp, Homo Sapiens
  misc_feature (221)..(233): n is a, c, g, or t
taaatcatttcattccaattgttggacatgttttccatataggagattttaaaactctgctatttattccccaagcaccctctaattagctatttagttcccattataagtgtgtttgttgccatttaattaagagcagtgatacgacaattccctttttgttttaaaaagatatcacggaaataaatctccctgatcagttatttggttattgctactgnnnnnnnnnnnnnctattcccgaaaaatgggcttgcttaatttggctctttttagtctctcacaacaatttttcccctttttttccatgatttccacttcccgtggtaaagttagctcacagtgtggaaatgccctctttgaacacatatttttacttcctcatcctcctctccctgtggtaacccagggagaaatgagatgttggaagg

SEQ ID NO: 169965 - DNA, 356 bp, Homo Sapiens
ggggcctgggatccggaagtcggagcctagctgcgcgagagtttctgctcgctcaaccgagttgtcgtgttgccctcgcttctcagatccccgccggaagtgaagagagcaagcagatttgaacctatctgctttcaagctggtcatcatgatgaaacttagacacaaaaataaaaagccaggtgaaggttccaagggccacaagaagataagttggccctaccctcagcctgcaaagcaaaatgggaagaaagcaacctccaaagtgccctctgcacctcattttgttcaccccaatgatcatgccaatcgagaggctgaattaaagaagaaatgagatgttgaaggggtgcggt

SEQ ID NO: 169966 - DNA, 356 bp, Homo Sapiens
acatctcatttctgggttgaataggttaagcaaagacagacctcactgttctcaattcactttatgatcctcccatcataaaaaataatatcagcaccttgcttttcatgtcagaactacatttgagccgctattccctatgcccatgagtaaatcccataaaagccaccccgttgtactgttgctatttttccttgtgggtgattgattgatggatgagtgctgacacttcaatgaagctatttcgactgccatctcaatccgatgatgtgaggggtatattttctgtccatgcctcattacttcagaatgacattcctggaacttcattctgaagaaatgagatgttaaagggg

SEQ ID NO: 169967 - DNA, 553 bp, Homo Sapiens
taaaataattcagttatgaaaataataatcacaattaaaggtttggcatagtagcataccatcaatcttcagtcatccacaaatgttaaccgcccaggcccttcattcttcatccatctcctgtatctcttccatctggggtcatttgccaactatttctttaattcttcctcttgtacttgcttgtagacctcataattctccttgatccagagctctcgtataagaaaagtttctatctgatgatcttctagactatcaaattgagactttgacatcttcatagatttacgtataatgtataatctctcttcctctccatattctttgcctttgatgttaaaattatagatccaccgacaataccaaactatatatgagcataggtgaaaaggagctaagataatttgaaacaggagaagatcacagatttggggtttctgatagcccccctttatatctattttcccccctataatgttctttatgatgttctcctcctcgtcacgaatttcttctttggactttttgtttttgcctttcacatttcgcg

SEQ ID NO: 169968 - DNA, 310 bp, Homo Sapiens
ccttccaacatctcatttcttctcctgattatctgtcactcagttatccccactctcttccacaactttaacttcagcttctcgtattctaagagactctgctctgcagggctcaaggctctctctacccgtccatcattcctcccgtctaccccagcacagccagcatgtgtccagctagtctatccttcagccaaacttccttagaaagaggacttacctcactgtccctacccctctactctctgactcacttcttagctccatgactgggttctggagctaagaaatgagatgttgaatgggtgcc

SEQ ID NO: 169969 - DNA, 433 bp, Homo Sapiens
gcacccttcaacatctcatttctctgtcagtaacaacatggataggaatctggaggctgtgcgtgtttacggaaatctctcccaggaccatgatgtctagcgatttcattgtgcagaacaatgtccacaggttcatgatggcgctgctggatgctcagcatcaggatatctgcttttctgcctgtggtgttctcctcaatctcactgtggataaagacaagcgtgtcatcttgaaagaaggaggtggcattaaaaaatgaagaactagcactggatggcagttttgatccagacctaaaaaactatcacaaactccattgggaaacagaattcaaacctgtggcacagcagcttctaaaccgaattcagagacatcacaccttcctggaacccctgcccattccctctttctaacatgatgcagattaacagt

SEQ ID NO: 169970 - DNA, 602 bp, Homo Sapiens
cttttactgtagctcaaaggtggagggagtttattagttaaccaaatatcgttgagaggaatttaaaatactgttactaccaaagatttttattaataaaggcttatattttggtaacacttctctatatttttactcacaggaatgtcactgttggacaattattttaaaagtgtataaaaccaagtctcataaatgatatgagtgatctaaatttgcagcaatgatactaaacaactctctgaaatttctcaagcaccaagagaaacatcattttagcaaaggccaggaggaaaaatagaaataaatttgtcttgaagatctcattgatgtgatgttacattccctttaatctgccaactgtggtcaaagttcataggtgtcgtacatttccattatttgctaaaatcatgcaatctgatgcttctcttttctcttgtacagtaagtagtttgaagtgggttttgtatataaatactgtattaaaaattaggcaattaccaaaaatccttttatggaaaccatttttttaaaaagtgaatgtacacaaatccacagaggactgtggctggacattcatctaaataaatttgaatatacga

SEQ ID NO: 169971 - DNA, 945 bp, Homo Sapiens
ttcatctcatttctattattccaacgttcttcgttttgacttgtctaatggaacaaattgatgttaccttgaagtggtatgaggacctgataccttcagcctactttccccactcccaaacaatgatacatcttctccaagcattggatgtggccaatcggctagaagtgattcctaaaatttggaaagatagtaaagaatatggtcatactttccgcagtgacctgagagaagagatcctgatgctcatggcaagggacaagcacccaccagagcttcaggtggcatttgctgactgtgctgctgatatcaaatctgcgtatgaaagccaacccatcagacagactgctcaggattggccagccacctctctcaactgtatagctatcctctttttaagggctgggagaactcaggaagcctggaaaatgttggggcttttcaggaagcataataagattcctagaagtgagttgctgaatgagcttatggacagtgcaaaagtgtctaacagcccttcccaggccattgaagtagtagagctggcaagtgccttcagcttacctatttgtgagggcctcacccagagagtaatgagtgattttgcaatcaaccaggaacaaaaggaagccctaagtaatctaactgcattgaccagtgacagtgatactgacagcagcagtgacagcgacagtgacaccagtgaaggcaaatgaaagtggagattcaggagcagcaatggtctcaccatagctgctggaatcacacctgagaactgagatataccaatatgtaacattgttacaaagaagaaaagatacagatttggtgaatttgttactgtgaggtacagtcagtacacagctgacttatgtagatttaagctgctaatatgctacttaaccatctattaatgcaccattaaaggcttagcatttaaaaaaa

SEQ ID NO: 169972 - DNA, 374 bp, Homo Sapiens
aatgatatgaaaggtcatcctgacacaatgaagaaccgtcttcaaaaatctatttaatgaccttagatatttctatagaacattattgtggcactattagtggggattttcacgataaagattgttagtgttttgtttttaactgttccattaagaactttttattttgagcctattaaactaaaatcccctgttgcttaataaagtataaaaatagtactgacctggtaatatttaataaaacgtagcattcattcacatcataaaagtagaactgaaaagttttagttaccatggcaaaatatcttcccattaaggtatatacagaatgagtaatgttacactacggtacctgcaatggttatttagtgatg

SEQ ID NO: 169973 - DNA, 786 bp, Homo Sapiens
ccgaaccagaggcagctgcagctaaagctgaagcttcagtctgtggaaaagtcttgtttgcaaatctgccacagccccaaaagccaaagagccactcatctgagagcttgctgtgctgctggcggaatctgcaaacctgtaccctctgcaagtcttgcccattaactgaagacggaccagttgttcccaaatcaattcccagtcctttccagttcatcactgtccaaaaatgaactagcactcgaagcatcagtacgttcagtaacatgaccaactttcattggtcttcctgctagttcaaatccattaagttgttccaaagcctttttggcacattctgagtcagaaaatgtaataaatccatatcccttggatcgaccagtttcactgtccatcatcagctggatactttcaattcttccaaaaggctcaaagatcccacgaagcatatcttcagttatgttgaagtgtaatgagcccacataaagcctcataggtccagcacttcccttttgtaaattgtttgccattgctgcagctctgtttttttctgcctgtgatgcctgtactatgattggcacgcctaaaactcgttggccagttaatcctattgctagaggcactgagctaacatcgacgaactccacataagcaattcctttggaacgtcttgaatttctgtcagaaatcatcctcacatctcgaacctttcctactgtagagaaaaaactcttccaaatcccttggtcgaattcttgccgccagctgcaaacacacaatgcggat

SEQ ID NO: 169974 - DNA, 1318 bp, Homo Sapiens
  misc_feature (35)..(35): n is a, c, g, or t
  misc_feature (47)..(47): n is a, c, g, or t
  misc_feature (83)..(83): n is a, c, g, or t
  misc_feature (177)..(177): n is a, c, g, or t
  misc_feature (184)..(187): n is a, c, g, or t
  misc_feature (193)..(194): n is a, c, g, or t
  misc_feature (196)..(196): n is a, c, g, or t
  misc_feature (237)..(237): n is a, c, g, or t
gaaacaaaaagcagatccctattacccgcgcgttntgggccaacaanacaccaacaaccggcaccggctctgggcaaaatagnagcacaagtctcgggttgggcaaggggttacccattaaaagcgcgcggacgtccaaggtgattctcgccggtggggggcactcacagagccggntcggatnnnnagaggnnancccaatgtggcccggggccagtcctcttaacataaacactntaatgtcaatcaagctttcaactcaatgttaagtcaaactcaagtcaatgctgaactgactctagtgtcaattaatgcttgatgggtttgctatacacattgtatttgaacaaactatctccaaaatgaattttctgatatcctgcaaggagtgagctcagactgaagactttgcgacactgatgacatttataagatttctgtacagtatgcattctctgatgtctagtgaggtgtgaatgtgaattaaaggctttgccgcaatcatcacacttgtgaggtttctctcctgtatgaattctcctatgttttgcatagaatgaagcttgactaagaccttgtcacaatcatgacatttgtaaggtttctctccagtacgagttcgccgatgaactgcaagttatgaacaatgtctgaaaaatttgccaaatttattaaactagtatgatctctcttcattatggattctccaatgattcgcaatggttgtagtgtaactgaagactttgtgacaatcattacataagtaaagtttccctacaccatggattgcctgatggtaaacaagtgttgactgcccactaaagacctgtcacattcattatacttgtaagctttctctccaatgtgaattctaggatgttgtgccaggtgcgaattatgcctgaaagccttgtcacaaactcttacatttttatgctatctctccagtaggaattctcctgtgtctttcaaggtttgagtgtgactgaaaacttggtgacattcttcacatatgtaagctttctctccagtatgaattctcctgtctttggaggcttgatttgcgactgtaaactttacttatgtaatgattgtcacaaagtcttcagttacactacaaccattgcgaatcattggagaatccataatgaagagagatcatactagtttaataaatttggcaaaattttcagacattgttcataacttgcagttcatcggcgaactcgtactggagagaaaccttacaaatgtcatgattgtgacaaggtctcagtcaagcttcattctatgcaaaacataggagaattcatacaga

SEQ ID NO: 169975 - DNA, 425 bp, Homo Sapiens
tcctgctgtgtgaccccgggtccctaagggacccatggaccaagtaccaattatgtggcccccaggggttggggaacccctgctccttaaggttccccaattatcacctctgaggtagttcaagcaacagagccccttgacgatgttcagggagatagtcccgatatcctaagggggccaattagattctaatggtgttaaaacacatcttaatttttattgtaaaaatatctactctcctaagattagaacaatattgagaagaaatgaagtggatggtggaagccctggggggtgggccttcacagtggggaaggctgtgggtggagagccagggcatcgggtaggtgaaggccagggatgccactcagcatcctgtagggcccggtatagcccgcagcagcacagaatgacctgttccgaat

SEQ ID NO: 169976 - DNA, 744 bp, Homo Sapiens
ctcggtacccctgctgccaatgtgtcagtcactcagccagaatctacaggggacccaaacaacatgactcttttggcagaagaggctcgaaagcttgctgaacgtcataaacaggaagctgatgacattgttcgagtggcaaagacagccaatgatacgtcaactgaggcatacaacctgcttctgaggacactggcaggagaaaatcaaacagcatttgagattgaagagcttaataggaagtatgaacaagcgaagaacatctcacaggatctggaaaaacaagctgcccgagtacatgaggaggccaaaagggccggtgacaaagctgtggagatctatgccagcgtggctcagctgagccctttggactctgagacactggagaatgaagcaaataacataaagatggaagctgagaatctggaacaactgattgaccagaaattaaaagattatgaggacctcagagaagatatgagagggaaggaacttgaagtcaagaaccttctggagaaaggcaagactgaacagcagaccgcagaccaactcctagcccgagctgatgctgccaaggccctcgctgaagaagctgcaaagaagggacgggataccttacaagaagctaatgacattctcaacaacctgaaagattttgataggcgtgtgatacgatactagacgccgcagtaggaggcactaagaattcctgccatcaaccagaccatcacatgccactcatgc

SEQ ID NO: 169977 - DNA, 851 bp, Homo Sapiens
gggagcccagagtaactgcacgcctttgtgcagctctggagctccaccaactctcggcctgccagttctcaagcgagctaatcttgtcattaatcgatagaagctaacttccgaagttaggacctagttactttgctctcaacatttaaaataatgcagttgctctagtgaatggggcgttaggggcctgtctctgcacctgtctgtccatctgcatgcagtattctcacccatgttgaatgcctgctgcttgtttaccctttggaaaccctggggtgaccaaggtttggaaagccacctgagaccacttcatagcaagggaaggctttaagcagttactagaaagagatggggatttggcccctggatcctccagcctgaatgagctatttaatccactgtccatgttcctcatcagtcaaatccaaagtcaaaggatttgaacctgcatctggaaacgtaaccactcacagcacctgggcccgccaaggttgggaggattgtacactactttcatttaaaggggaaagtttgataatacggaattaattaatatgaatgagatgcattaataagaacctgagcatgctgagagttgcaaatggtggttttctggtttgattgatttccttttttcttaaacacatcaaagtcaaaaaagatgggttttacctttactgacccagctggacataggtaactaagactgtttttaaatgtctttcttcatgaatgcttcatggggctccaggaagcctgtatcacctgtgtaagttggtatttgggcactttatatttttctaaaaacgtgttttggatcctggactctaataaatcataagtttcttttt

SEQ ID NO: 169978 - DNA, 1413 bp, Homo Sapiens
  misc_feature (489)..(527): n is a, c, g, or t
  misc_feature (848)..(848): n is a, c, g, or t
  misc_feature (914)..(914): n is a, c, g, or t
  misc_feature (1122)..(1122): n is a, c, g, or t
  misc_feature (1147)..(1147): n is a, c, g, or t
  misc_feature (1181)..(1181): n is a, c, g, or t
agggctacgcgcccgcgcccgacggccgcagttgcttggatgtggacgagtgtgaggctggggacgtgtgtgacaatggcatctgcagcaacacgccaggatctttccagtgtcagtgcctctctggctaccatctgtccagggaccggagccactgcgaggacattgatgagtgtgacttccctgcagcctgcattgggggtgactgcatcaataccaatggctcctacagatgtctttgccccccacgggcatcggctgatggagggcacgaaatgccaagacatagatgactgcaaacaccaccccagtctgtgacttccccctggcgcctgccggaaccttgcgggctcccctgcgccgcccttgaccaccaaggccctcccctctccccccataacgaccccggattgcttacgaggcgtaccccggcgtccacacgggaaagccgggggtaccggcaaccgtcgcatcacgccgctgtactcnnnnnnnnnnnnnnnnnnnnnnnnnnnnnnnnnnnnnnnatacgcagatcgcgcctggactataccggacgacccgctaccgtgccgttgcacccatcttgtggcgccatttttccctctcagggcaccagtttaaacgggcccggtaggccacgcgcgcgtcttaactcaccgcccgctacgctatccgcaccatagagagacgccaaacgccgctacatagcgaacgaattgatcacccagatatcgtgcccgggagatataactcccgcgccggctcgtcgtactcggaaagccgccacgccaacagttgagagcgcgcgtacgactccgcccgcggcgtcacgcgcgctggcggtntggtgcgcgatataacagacgcctctcgctgccgcccgcgttgctatgtatagtgcgccgatagtntacggtaacggcgcgcccgaaaagatagagagctgcagaattatcgcccgtatgcgcgcggcgctcgcattgagatatgagtgtgtctgctcctcaccccccgcataatagggcgatcgcgcccttctgcccgtcgacacgaaaatttagcgcccgccgcgtctccgcctgctatgtgtgtatcgcgccaccgccccgcatacaccgncaaccccagtgggatatgacccccntacgtgtgtctcgccccccgcaacacaaaatganatcctcgcggcgccctcatatcttatcttccgcgccgccgcaccgatgctgcatagataccccgcagcccgccaaagtttacatacggagcctcatcggattgtaatatgtccgccgctcgcggcgtcgtcgcacgtagtgatgcttcccaccttacggccggctccggtataaagaccacatgatccgccggctggaacccaaatgtataaggaggttatcgccatcgtcg

SEQ ID NO: 169979 - DNA, 498 bp, Homo Sapiens
ccttccaacatctcatttctgaggctggtattactttttcctcatattacagataaggaaaagatttagacagttcccgttcttttggaattgatagtctcatgtaagaggaactttaaggttgagacaatgtaaaagtacagtgttagagagatgaatagggtcatccaatgtggtttcaaggtgcataagatttttcctgaaggtaatactaacagattgggcatggggtccgagggtattctaggtggaaaggacaacttaaagtcttgttggcaagaaaaagatcggtatgtatgagaagccaccctctgctgttggaggtaaggtgtgttcccaaatgaaataagggagagacaggggccagatattggagctcctgacgtgccatactaaagaatttgattttagaggccgtcaggagtcagtgaaaggttttaaagtagagaaatgagatgttggaaggggggatcctctagatcgaccgcaggcagcgag

SEQ ID NO: 169980 - DNA, 738 bp, Homo Sapiens
catcctgggggttacaaaaaatagtaggtgagttcacaaatacaaaagctgaaaacaaggaggatcgactgtattttcgtagacaatccaatctcagaagatttcagttcagacaaaaatcatgataattactgtattacaaaagggcactagatagggggaaaagagtaaaaatcacaattaaaacaaaggttcaaagattctgcagcaaccatatccagttacactttaatatgtttgtggcagactacattattgttcccaactcatcacccctccctatatctaaaacctttccccaagacaatgcagttcctcctgctagagatcaggtatatttatcaatactatcaatgttagccatggacaaggtatgtgctttggctgactgaatgttagtggacatgatagaagcaatggcttaaaatgtacttccagaactggagtttccttgtgattctatcactgtgacaaaaacacattctcaggtagtccactgatccaagggggaacaaacacacagaaaacatacctagactctatctgcagctcgcagcctcaccaagccaggaacagtcaactcacagatatgttagcaaaaataaatgtttttcgtaccttaagttttatataattattgacctatagttaactgatatacaatatacattaatcttaaaatatcattatcccattaaaaatatttacattaaaaactgagaccactttctttcctcc

SEQ ID NO: 169981 - DNA, 450 bp, Homo Sapiens
gaccccttcaacatctcatttctaagcaatcacgatctcaccgaatctaactcacaaatagctctgaatttaaactctcctccctattacctattatctgttttacatactggctttcatatataattccttttgagagtaggggtacgaagctaattttttttaaagtttgaaagccactgagataaaagataaagcttaagcaccttcacatggtgctttaatggactcgcctcatttcccaccacacctgtctccccgcacgtggtatttcctgcttcccactttgcttgggccacctagttctcccagaacacactgcaacccatctgcttccatcatctgaatatatctactcatccttgaatgtcacctcctccaagaagccagtcctaatcacctcaagctgagacaggtgtggtgagaaatgagatgttaaagggtgccgag

SEQ ID NO: 169982 - DNA, 266 bp, Homo Sapiens
ccattctgctcactagtggccatgaagggggctgtgaccgtggccaggtgagaaaggaaggcctgaactaagatgggaggtgggtggccagaatggagaggggagaagtggatggccagaatggagagatgcttagagggctgtgttgggaagtggtgactggatacaggggagggaggagagatacaagagggcacctgggctcatttgtggactacgtgattttgagactccaaataagcactgggtatttgggttggagatac

SEQ ID NO: 169983 - DNA, 400 bp, Homo Sapiens
cttcgacaatctcatttctaccttccaacatctcatttctccttccaacatctcatttctccttccaacatctcatttctccttccaacatctcatttctccttccaacatctcatttctccttccagcatctcatttgtcctgccaaaatctcgtttctccttccaagatctcattcatcctagtactatatcactaatatcttctatgttttacctattcatctcatttctggctcatcttctagccactagaatatacacttccatgagagtcacataattttatattcaatgactcttattcgtccttgcctctgatcatatctaacccctagaaggtactcaccattagctgtagtattaataaattcgcataagtaatacccgagcctgaagta

SEQ ID NO: 169984 - DNA, 1497 bp, Homo Sapiens
  misc_feature (572)..(596): n is a, c, g, or t
gaactattgcctcatgctcagaaggccaagcactaggctcccatacaatacctacaagacagacactctgggaggcagatttctcttttggagggagaccccaggtgctctcctctgggtgcccgagtgttggaatgggcggatgccaagacttcattctagctcttggtcagcagcagcactaagggtctctgagaagcatcagagatttcaccactgatgaactgccaggaggctagtgggggcggactgaggagacactgaaacaccgtaagctgccgccaccaccggctgatgcaagttttattgagacaatatacaaacaggccatggaaacaagggttttgatgctgggaccagtaacgtaaaacggaatacaaaaataaaaaggcactaatctgttaagaaaagacactcgatgtattctaagaatataagtcatttaatactgttaattttatagcacaaaataaaacaagctatgatccccaaaaataattttaaaagcttacacagaaaatattattgcctgaagtttatgatctttaagttacaggtcaaaagagttttannnnnnnnnnnnnnnnnnnnnnnnnttaaaacacacagtgaagaccgtctaagaagcaaggccactgttcctcctgtagggacaacgatcctgtctcagagacctgtccttctgctcctttagaaaacagaaccagcacagcgtccacaccgacagcagttactaggggcatagtcctccggtcgcagagggtggagttgaggcagagctcagtggtgtccacagaaagcattagtcttaggtactgtgttaaaacaatcaagaattcattcatgtttaagaggttaataaccataatattaaaggattaattataaacacctggcaaaaaaccacatcatcccttttccaaaataaaatgttcatattcctctgagcaaacatcacaagagcagtggccatctgcctcaggcctgccttgtctgtaaacagctgtaaaggaaagctagcacagcgccagggacacatgagctcccaggagggcacagctgtccttccctttcagctttccaaacatgagcacagaaggtgtctagtctgggtgaccaaagtcctcaaacggcagccggtcaacacatcgtcttcctcgttaaccatgtcatcaggtggttccacacagcacagacatggctgactcctgtaccgcaggtccttcccgggatacacaagtttttaaccaatcaatgccctctagtacgtaatttgtttcccttcccaggtgaaaaaccatagtgagttaatttaacatccaaatatttctttaaacatggtagagcagagcaagtagcagttatgaacacccaccctctgggtcagatgtgcactgctctatggagcacacagtattcccagaccagtggggaacccaggcacgaagatgagctgaggcagcagtgctgcattcatatgtttagtgtgaaaaacag

SEQ ID NO: 169985 - DNA, 377 bp, Homo Sapiens
gaccctttcaacatctcatttctcagacagagactttgaatgcaaagagtgtgggaaaggcttcagtcagagctccttacttactcgccatcagaggattcacacgggaggaaaggccctatgagtgcaatgaatgtgggaaatccttcataaggagctcgagcctcattcgccattatcagatccacacagaagtgaaacagtatgaatgcaaagaatgtgggaaggcattccgtcatcgctcagaccttattgaacaccagagaattcacaccggagagagaccctttgaatgcaatgagtgtgggaaagcctttattcggagttcaaagctcattcagcatcagaggatccatactgaggagaggccttacgta

SEQ ID NO: 169986 - DNA, 287 bp, Homo Sapiens
caaattaagtcttatgtgaaatcacagtatattaaatagaagaattactttggcactgggttggggaggatctggaacccaaactgcaccttcttctcatctctctgagttgccccagaggcatctatacctttccaacttttctatccccaaaacaccctaatctccagcgatactgaacaattccatctctggacttctgcacagtgctccttcatcttccttgaacctgccagacctctcagctccaggagcacttccctgccttccttcccctttatcacaac

SEQ ID NO: 169987 - DNA, 329 bp, Homo Sapiens
cacttcaacatctcatttctggctaatattagccaggaagggggatgtttggtattttggggatgacacggtagccttatttttttgcacatttagaaaaaaatgtgtgtttatcttgtattgcatcactttagcatggtctcagattggccttgtctaatgctgatgttttgtgaaactatgtccaacaggagagcgccaaagcctaccagtgagtgccaggctggccccacaggtcaagggctgcccttctctttctcagcatccctaatatggtacatatgattttaattgccagcacttaaaaggaacttgtgagaaatgagatg

SEQ ID NO: 169988 - DNA, 581 bp, Homo Sapiens
  misc_feature (493)..(493): n is a, c, g, or t
  misc_feature (501)..(501): n is a, c, g, or t
gcagccagcagggaactacagcctgtccagtgtgctgcccaacgcccccgacatggcgcagttcaagcagggagtgagatcggttgctggaaaactctccgtctttgctaatggagtcgtgacttcaattcaggatcgctacggttcttaatactgaagtcatgatgtgtacttcctggagaaattcctctttaaatgaacaagtaaccacatctcaggcggcagtgaagtccagatagttttgcagattgttttgctactttttcatatggtatatgtttctgatttttaatatttcttttgagaaattctgagttctgatgtaggagctttcctgtgatttctgtttcacgttccttcctgtcacaccctcctttggcgtctctgtgtatatccttgctttattttcttggaacctttgatttcaacactgagggcctggagacctcggctcctcctgctcctgaaccggcttatgtgggggaggaggaanaaaggctncatgtgacacatgggctcagggctgccagaatcagcggatgctgggatgggcctgcagaaacaacactcaccacacacac

SEQ ID NO: 169989 - DNA, 937 bp, Homo Sapiens
cctccagggggtcgcatgcccggctgtggctctggaggcagaacgtgcagctgtctttacctctgtctgcataagcgtctctctcctgctcgtcccaggccttgcctccagccagcgtatagggcgtgtactgagtgaagagggagactacatggcagccagggggagccagggtggggtccagcgaggaagggatgcagagctcaatcacaggcctgtgcgggcagggaggagacggcaggtctaaagagcagcagggcgaagggtagggcatccgagatgacttgggacacagtgaaggcgctgagatgacaccaattctgggcgattgtcgctctacagccacagtggttgtccacctgcacgggcttagcggctgctagcgtggtccagagcacctgtgaggagctcgcctgaccccagacccccgaatgcatggcctgtccttgcctgccttcatcacacgctgtgctctaaccacagctcccaaatgcaaatgtctcgaaggtccacacagacagtgggagtgtggaaaggggccaggcctaagacagcaggcgcccaagcagccagatttcagccaggctttagtggcctgactgccttttccagagcagaccaatggaagacagagctgctagggctgccccgagccccagcagagctgtgacctgcttcccaccccaccacctttgcctgccacaccttttctacctggagcatgttctccctctgatctccaaatatgagtctccttcaaggccacgggaaatgccccttctccctgcgtccctcagctgcaatgttctcgctgaactcggatgtccaccagggatctcaaacatcccctgttcaaaccccaatgcctgattagcctctaaaatctgctccacccccaccacctcttcctcttttcagtaaatggaggcatcatttc

SEQ ID NO: 169990 - DNA, 387 bp, Homo Sapiens
cgataaggagacaggtgtcagacgggtgtgggcagcagcgtgtgcacacgctcacacggaaggtcacacgcttacacggacggtcacacagacggttgcacgctcacacggaggctcacaaggacgcctacacggttacggatgatcacacggatgctcatacggttatgcggacacacactcacacgaacggacacacagatgctcacacgaacggtcacacagaagctcacacggacagtcacacggaagcccacacggacggtcacagggatgctcacacggacggtcacacggatgctcacacgctcacatggccactcaataccggtattgagtggccatgtgattgggagttcattcatgatttggctctctgattgtcta

SEQ ID NO: 169991 - DNA, 392 bp, Homo Sapiens
cctatcttgaaatgcaatagttcataggctcttagaatcctgccagatcaagccatgaattatgcttggtagcaggttgtagcagtctcagtaatataccttgtgttggctccccctattttcccgcctctttcccctcattccttcactcctgctttcttgggcttgaactctcagctaaagtagcaagacataaatgtgtttgccttaggctctgtactctggagaactcaggccaagacagctggaattagggaaaacctttgaaagcagatgcctcaggataagattttggagttgcgtttctctccagcctgatgccaatagggaccgtgttactagcggttaagtaggggtggcgataactcctgcttgaaatagtatcagaatca

SEQ ID NO: 169992 - DNA, 774 bp, Homo Sapiens
  misc_feature (64)..(96): n is a, c, g, or t
  misc_feature (725)..(725): n is a, c, g, or t
cggtccaggtgacagaggcccaggaatttgaggctatagtgtgtatgattgtgccagtgaatannnnnnnnnnnnnnnnnnnnnnnnnnnnnnnnnatcctgtcccttaaaagcgtatctgctgctctgaatttggtattttaacaccacttactgatacctttcctgtaaacctgtagatggtttaattcttagtcaagagaccagtctcatctaaaactatcctgttgtggtctgacggcaagtaactcatcttgagtaatttttgtttctccttaagtggcattttgactgtccattgcagcattctgatcttaaaagacatccactttgctaatgcacacgagattctcttagttgaagtaggagaatcaaatggagcagttgtcctccccccaccccatgttcttagaagcacctctgatggagttattctgaccttgagtcactgcctctcatcatttcccagatgtttggtccttgctctccctttgagaatcatctcccattttctttcctctcccacctctatttgaggtaatggcatctgtgccattgggtggtttcactgctccttgacttcatttgcagtttctttcccatgatagtttttagttgggcagtcttaaaactcatctgataggaaggaaattagatgtaatgtgagagagaccacagtaaaatgtggggtatttttggggagtggggtggggttttcaatcttntctttcctccccatccccccatggggtagttattgggagatccacttcc

SEQ ID NO: 169993 - DNA, 605 bp, Homo Sapiens
caagggagcgtgccgacaagtgggcactggaaccagactctccctgtacgttcttatctgcaggtgaagatgcagtagttttcaccattgacctgagacaagaccgcccagcgtcgaaactggtggtgacaaaagagaaagagaagaaagtggggctgtatacgatctatgtgaatcctgccaatacccaccagtttgcagtgggtggacgagatcagtgtgtacaggactttatgaccagaggaaaactggatgagaatgagaacaactggagctactcagagaaggttcgtgtcctcatgacctgtgtgaaccagctgacgtccacaagcaagacagtcaccgtggtcgttgctgtacgagccgaccgacggctaccagagcctcactcgcccagcttacgaatgcatcgaacgacactattaccgtgcttcgaacgtgcctcatcacgaggtgcatgaggggcccacgtactggttaacgacgactagcaaggcgccgacacgaacactacactgcgcaacacgctagaacagcgcagtcacactcgatcctactgcgcacaccagacgacgctgacgctccacgctgcgctgcacgccagc

SEQ ID NO: 169994 - DNA, 1027 bp, Homo Sapiens
  misc_feature (884)..(884): n is a, c, g, or t
  misc_feature (963)..(963): n is a, c, g, or t
gccaggggagccacagccccgaggatggtcttgctctgggaaacaggtgaccttcctggggaggccccagaagagtgaatcagggactcttgagaaattcctaaccagcctcctgtgacccagggagcagggtcgctaaggtcctgcccactgaggggacagccttctgggcagggacctcggggggcttcaagggctctgcacggctgtgggccctgtgcctttgtctccttgtgtctcctttcccccgaagtagatgaaacagtctcacatacccaactgctcatcaacagagcagagctgatggcatgagtgagggcttgggcgggggtggggcctccagagctttgcagggaaccctgggaaccctaggaacaaggagcctttgtttccaacagagcagagaaggaggttctctatgttcagaccactggagaggatagagaggtaaaaggtggcgacagtttcccttaggggtctgcctggcaggagccacagctcaggagagttgtgagggatgggacggaggctggcgaccaggcgaggcctaggccaggctcgggagacttttctgtgctcctttctacacatgccttaaaccttccttcctgtggggtgcctggaccccttccccatctctggcagctcagagggtctctgctgctctcccctgggaaatcccctcatcctgccctctggctgcctcccagctgggcttgttctctgagggaggttccggagactcatggacttggggctctgcctgtaggaaggaggctgggccggagggaccagccaccattgtctctgttcagccaagtgtgcaagtaggctgcccgccaagagggggcctctgctacccgtctgactctgccggctgacanactgcctccccagccttcctgctaggccaccctcctcccttcccatgcttgtaaccagctctggggcttgcacctccanaaagtaaggttggcccttggaggccatgtttgggtccatgcgccaggcctagggctaggccccg

SEQ ID NO: 169995 - DNA, 2121 bp, Homo Sapiens
  misc_feature (97)..(160): n is a, c, g, or t
  misc_feature (253)..(267): n is a, c, g, or t
  misc_feature (1409)..(1417): n is a, c, g, or t
  misc_feature (1837)..(1988): n is a, c, g, or t
  misc_feature (2037)..(2046): n is a, c, g, or t
tgctaatacagcaacaatttatgaattgaattatcttggttgaaaataaaaagatcactttctcagttttcataagtattatgtctcttctgagctnnnnnnnnnnnnnnnnnnnnnnnnnnnnnnnnnnnnnnnnnnnnnnnnnnnnnnnnnnnnnnnnatttgcatgtggatcaaccatcgctttattggctgagatatgaacatattgttgaaaggtaatttgagagaaatatgaagaactgaggagggnnnnnnnnnnnnnnngaaaagaaccaacaacctcaactggcctactcccaaattgtggggtcatttaatgttaaggggaaaaatcccagggtttgggcctatggagtgtccaattttgtgggcagatttccagcaaactcttttccccacggtgtaagggagtcagtgggattactggccattcacttcataatcccagtaggatcccagtgatcccttacaagttagaaaacttataatcttctggccttctcatgatccaattaatgccttactcttcttgaaattttaccctatgatattttctggtgcctgaatattggtctatgtagataacaagacctcagtgcctccctgttttccacatttcccttttcaaataggggtctaactcagcaactcgctttaggtcagcagcctccctgaagaccaaaattagaatatccatgacctagttttccatgcgtgtttctgactctgagctacagagtctggtgaagctcacttctgggcttcatctggcaacatctttatccgtagtgggtatggttgacactagcccaatgaaatgaattaaagtggaccaatagggctgagctctctgtgggctggcagtcctggaagccagctttccctgcctctcatcaactgaatgaggtcagcatgtctattcagcttcgtttattttcaagaataatcacgctttcctggaatccaaactaatccatcaccggggtggtttagtgggctcaacattgtgttcccatttcagctgatcagtgggcctccaaggaggggctgtaaaatggaggccattgtgtgagcctatcagagttgctgcaaacctgacccctgctcagtaaagcacttgcaaccgtctgttatgctgtgacacatggcccctccccctgccaggagctttggacctaatccaagcatccctttgcccagaaagaagatgggggaggaggcagtaataaaaagattgaagtattttgctggaataagttcaaattcttctgaactcaaactgaggaatttcacctgtaaacctgagtcgtacagaaagctgcctggtatatccaaaagctttttattcctcctgctcatattgtgattctgcctttggggacttttcttaaaccttcagttatgannnnnnnnncatacacttattggaactctgcttgatttttgcctcttccagtcttcctgacactttaattaccaacctgttacctactttgactttttgcatttaaaacagacactggcatggatatagttttacttttaaactgtgtacataactgaaaatgtgctatactgcatactttttaaatgtaaagatatttttatctttatatgaagaaaatcacttaggaaatggctttgtgattcaatctgtaaactgtgtattccaagacatgtctgttctacatagatgcttagtccctcatgcaaatcaattactggtccaaaagattgctgaaattttatatgcttactgatatattttacaattttttatcatgcatgtcctgtaaaggttacaagcctgcacaataaaaatgtttaacggttnnnnnnnnnnnnnnnnnnnnnnnnnnnnnnnnnnnnnnnnnnnnnnnnnnnnnnnnnnnnnnnnnnnnnnnnnnnnnnnnnnnnnnnnnnnnnnnnnnnnnnnnnnnnnnnnnnnnnnnnnnnnnnnnnnnnnnnnnnnnnnnnnnnnnnnnccttgggggccccccccccccccaaaaaattttttaaacccttcctttnnnnnnnnnncccccaaaggaaaggaaaaggggccaaagtggtcccaaagaaaacccgggaaagaaaaagggtgggatcccccac

SEQ ID NO: 169996 - DNA, 724 bp, Homo Sapiens
ggggtgcacggagccgtagctgtcggagcggttagttcgatttcgagctcgaggtttcccccgccgccaggctgacttctcatcgcttgtttttctttttgcatttttcctcccaccgccgttgccgccctccccgtcctggccgtccgccctccgccctctgcagggacatctctacaccgttcccatccgggaacagggcaacatctacaagcccaacaacaaggccatggcagacgagctgagcgagaagcaagtgtacgacgcgcacaccaaggagatcgacctggtcaaccgcgaccctaaacacctcaacgatgacgtggtcaagattgactttgaagatgtgattgcagaaccagaagggacacacagttttgacggcatttggaaggccagcttcaccaccttcactgtgacgaaatactggttttaccgcttgctgtctgccctctttggcatcccgatggcactcatctggggcatttacttcgccattctctctttcctgcacatctgggcagttgtaccatgcattaagagcttcctgattgagattcagtgcatcagccgtgtctattccatctacgtccacaccgtctgtgacccactctttgaagctgttggggaaaatattcagcaatgtccgcatcaacttgcagaaagaaatataaatgacatttcaaggatagaagtatacctgattttttttcctattaatttt

SEQ ID NO: 169997 - DNA, 1027 bp, Homo Sapiens
  misc_feature (97)..(160): n is a, c, g, or t
  misc_feature (253)..(267): n is a, c, g, or t
  misc_feature (818)..(818): n is a, c, g, or t
  misc_feature (833)..(833): n is a, c, g, or t
  misc_feature (863)..(863): n is a, c, g, or t
  misc_feature (895)..(895): n is a, c, g, or t
  misc_feature (906)..(906): n is a, c, g, or t
  misc_feature (987)..(987): n is a, c, g, or t
  misc_feature (1005)..(1005): n is a, c, g, or t
  misc_feature (1013)..(1013): n is a, c, g, or t
tgctaatacagcaacaatttatgaattgaattatcttggttgaaaataaaaagatcactttctcagttttcataagtattatgtctcttctgagctnnnnnnnnnnnnnnnnnnnnnnnnnnnnnnnnnnnnnnnnnnnnnnnnnnnnnnnnnnnnnnnnatttgcatgtggatcaaccatcgctttattggctgagatatgaacatattgttgaaaggtaatttgagagaaatatgaagaactgaggagggnnnnnnnnnnnnnnngaaaagaaccaacaacctcaactggcctactcccaaattgtggggtcatttaatgttaaggggaaaaatcccagggtttgggcctatggagtgtccaattttgtgggcagatttccagcaaactcttttccccacggtgtaagggagtcagtgggattactggccattcacttcataatcccagtaggatcccagtgatcccttacaagttagaaaacttataatcttctggccttctcatgatccaattaatgccttactcttcttgaaattttaccctatgatattttctggtgcctgaatattggtctatgtagataacaagacctcagtgcctccctgttttccacatttcccttttcaaataggggtctaactcagcaactcgctttaggtcagcagcctccctgaagaccaaaattagaatatccatgacctagttttccatgcgtgtttctgactctgagctacagagtctggtgaagctcacttctgggcttcatctggcaacatctttatccgtagtgggtatggttgacactagcccaatnaaatgaattaaagtngaccaatagggctgagctctctgtgggctngcagtcctgggaagccagcttttccctgcctntcatcaactgnaattgaggtcagcatgtctattcagcttcgtttattttcaagaattaattcacggcttttcctgtaattccaaacttattnccttcaccgggggttggnttttagtnggcttcaacattgt

SEQ ID NO: 169998 - DNA, 940 bp, Homo Sapiens
ggctccggtgtagagacttaggcagtaggtggactatcatctgggacagttggggaagcctcgacagccctgagttcagcagcccaggtagctttgcagtctctctctcatgcaatggcttcagccgagcaacagctacaggtgctgcaagagaaacagcagcagcttttgaagcttcagcaacagaaagcaaagctggaagccaagttacatcagacaacagctgcagcagctgcagcagcatcagcagtaggtcctgttcacaactctgtgccttccaacccagtggctgcccctggattcttcattcatccatctgatgttattccacccactccaaaaacaacacctctttttatgactccaccactcactccacccaatgaagcagtttccgttgtgattaatgccgaacttgcacagcttttcccaggctcagtcattgatcccccagcagtcaatcttgctgcacataacaaaaattccaacaagtccagaatgaatccacttggttctggtctagcccttgcaatttctcatgcttcacattttcttcaacctccgcctcaccagtccattattatagagcgaatgcattcaggagcaagaagatttgtgaccttggattttgggaggcctatattgttgactgatgtattgattcccacttgtggagacttggcctctttgtcaattgacatttggacattaggagaagaggtggatggaaggcggttggtagtggcaactgatataagcactcattcactaattcttcatgacttaataccacctcccgtgtgcagattcatgaagatcactgttattggacgttacgggagtacaatgccagagccaaaatcccattaggattttactatggtcatacctacatcttgccttgggtaactgaacctgaagtgtctacggtaccgactga

SEQ ID NO: 169999 - DNA, 849 bp, Homo Sapiens
  misc_feature (769)..(770): n is a, c, g, or t
  misc_feature (782)..(782): n is a, c, g, or t
gggagctcagttctgcggtttctgcggcggctggagaggtggtcggagaagtaggaacctcctgccgggctcgtggcggcttctgtccgctccgcggcgggaagcgccttccccacaggacatcaatgcaagcttgaataagaaaaacaaattcttcctcctaagccatggcatatcagttatacagaaatactactttgggaaacagtcttcaggagagcctagatgagctcatacagtctcaacagatcaccccccaacttgcccttcaagttctacttcagtttgataaggctataaatgcagcactggctcagagggtcaggaacagagtcaatttcaggggctctctaaatacgtacagattctgcgataatgtgtggacttttgtactgaatgatgttgaattcagagaggtgacagaacttattaaagtggataaagtgaaaattgtagcctgtgatggtaaaaatactggctccaatactacagaatgaatagaaaaaatatgacttttttacaccatcttctgttattcattgcttttgaagagaagcatagaagagactttttatttattctagaattgcagaaatgactacactgtgctataccagagaattccagtagaaagaaacttgtaactctgtagcctcttacatcacctttattatacagcatgaaaaaccataacttcctttttaaggacaaaagttgttgccttccctaagaaccttcttttaataaactcatttttaaaactcttgannccccacttcccntccaaatgaaaaatataacccccccctgccagtccaaaacgcctctcccaacttggggacacccagc

SEQ ID NO: 170000 - DNA, 894 bp, Homo Sapiens
tggacgtgtatgacaaagtggactatctgagctccctgggcaagacgcagactgccgtggtgcagagagatgctgacattggcgtggccgaggctgaacgggacgcaggcatccgggaagctgagtgcaagaaggagatgctggatgtgaagttcgtggcagacaccaagattgctgactctaagcgagccttcgagctgcaaaagtcagccttcagtgaggaggttaacatcaagacagctgaggcccaggtggcctatgagctgcagggggcccgtgaacagcagaagatccggcaggaagagattgagattgaggttgtgcagcgcaagaaacagattgccgtggaggcacaggagatcctgcgtacggacaaggagctcatcgctacagtgcgccggcctgccgaggccgaggcccaccgcatccagcagattgccgagggtgaaaaggtgaagcaggtcctcttggcacaggcagaggctgagaagatccgcaaaatcggggaggcggaagcggcagtcatcgaggcgatgggcaaggcagaggctgagcggatgaagctcaaggcagaagcctaccagaaatacggggatgcagccaagatggccttggtgctagaggccctgccccagattgctgccaaaatcgctgccccacttaccaaggtcgatgagattgtggtcctcagtggagacaacagtaaggtcacatcaaaaatgaaccgactgctggccgagctgcctgcctctgtgcatgcccctcacaggcggtggaccctggctaaaatacccctgatcaagaaggccccctggggtggaaggtggtgaagcttcctggcaggccccacttctcttcagcgagccacccgggcccctccctcaggaaccccgc

SEQ ID NO: 170001 - DNA, 350 bp, Homo Sapiens
atttctagcagagtgaggatgtgttttgcacgtcttgctatttgagcatgcacagctgcttgtcctgctctcttcaggaggccctggtgtcaggcaggtttgccagtgaagacttcttgggtagtttagatcccatgtcacctcagctgatattatggcaagtgatatcacctctcttcagcccctagtgctattctgtgttgaacacaattgatacttcaggtgcttttgatgtgaaaatcatgaaaagaggaacaggtggatgtatagcatttttattcatgccatctgttttcaaacaactatttttgaggaattatcatgggaaaagaccagggctttcccaggaa

SEQ ID NO: 170002 - DNA, 388 bp, Homo Sapiens
  misc_feature (160)..(160): n is a, c, g, or t
ggcccgaatgaaaaatcgtggtgtgttgccttgaaggaatggaatttcaggctctcccctgtgcacagccggtgggcaaaggtcacccttaaatgactttttcctcccctatctgtctgttaatcccccagaccggttgcattttcccagttgctccccngggtgtctgtacatagtttgtctttgtataggagtgagtgtggtgaccgtcaatcccctaatctcccaggttctaatttaacagatgatggctgtatgaggaaaacgatgtaaatagagaatacaaattaaactggatctctgtggcctaggttttgtacatacagaaactgcatggtatttaaattattgtttgtctcctctgatgatgtatgcagtttctttaaaa

SEQ ID NO: 170003 - DNA, 549 bp, Homo Sapiens
  misc_feature (519)..(519): n is a, c, g, or t
acctcagctaccctgggccccagggtctccacagacgcaggtggccctgccagtaagaagagtccaccacctttctcatcgcccacagttaagaacaggagggtctcctctgacccaatctcattggcaatgatattcatgaactctgaatcaccctccttcctgtgtaatatgaccatcacctccccagtctggactgttcctgaccctatgggcaatgtgcacagccaggtctctgagcagattcaggttattcttctgcaggatcttggtggagttctggagctttttcactgcttccacatgatactctgctccacacttaagcagagcagtcagtgctttttcagttccatgacttctctccatccacttcagcacccggttcccagacagaaatatcaggttggttctgttctttttccccttctcagtgcccagaatcttaatgacctgaaggtcactgagattgctcacatgggtcccacagcacatgttggaatcaacgccctcgatgtntacgacccgagtgggcccagcatgatcatc

SEQ ID NO: 170004 - DNA, 1141 bp, Homo Sapiens
ggacacacgcctgcaggtatggcgttctggtgtcagcgtgacagttatgcccgagagttcaccaccaccgtggtctcttgctgtcccgcggagctgcagactgaagggagcaacggcaagaaagaagtgctgagcggtttccaagtggtgctggaagacacagtgcttttccctgagggcgggggacagcctgatgaccgtggtacaatcaatgacatctctgtgctgagagtgactcgccgtggggaacaggctgatcatttcacccagacacccctggatccaggaagccaggttctggtccgggtagattgggagcggaggtttgaccacatgcagcagcattcagggcagcatctcatcacggcagttgctgaccatctatttaagctgaagacaacatcatgggagttagggagatttcggagtgcgattgagctggacaccccctctatgactgcagagcaagtagctgccattgagcagagcgtcaatgaaaaaatcagagatcggctgcctgtgaatgtccgagaactgagcctggatgatcctgaggtggagcaggtgagtggcccggcgtttgcctgatgatcatgctgggcccattcgggttgttaacatcgagggcgttgattccaacatgtgctgtgggacccatgtgagcaatctcagtgaccttcaggtcattaagattctgggcactgagaagggggaaaaaaacagaaccaacctgatatttctggctggggaaccgggtgctgaagtggatggagagaagtcatggaactgaaaaagcactgactgctctgcttaattgcctaagagacctcctcagaatatctcctggtccctgactgcagggaggcaccatagcaagaaggaaattattgatttatgtcccccacatcagaaacgactgggaagctgcgcaggtctcctctgacctttctctttccagtgtgggagcacaggatcatgtggaaagcagggaaaaagctccagaacctccaccaagattctgcagaagaataacctgaaatctgctcaaaagactgggctgtgcacattggcccatagcctcaggaacgtcccaaacttggggaagggggggtcctatttacccagggaaggaagggtgatt

SEQ ID NO: 170005 - DNA, 315 bp, Homo Sapiens
ttgactctactgtcccttctgcgctctcctctgtcctttcctccatttcaactgttgtctctagagtctcctctgtcctttccggtatcatttctgctgtctccccaggctttcctgcctgctcctcctcctcctcctgctccaggatgcgaagatcattctccgtgcctccttccatcttaatcacggctgcatccagcatcttgacaatgggcatcagctttgtctatgtccagggagaaggttatcaaaccagccagtctccatgaggggacagggaaggaccctcagtcgggtttttgcaggggccccccg

SEQ ID NO: 170006 - DNA, 562 bp, Homo Sapiens
cgctgtgcttcaagacgtgttctcctgaaagccagcagatttatggggacatcaaagacgtcagactggatggcgagtcccagtgaggcgatgtgcgcagaggagctccgagccgcccacccaaggtggcttcacatccacacaggcacttcccatccacctaggtttggcttagcagaaacttcttttcattcttccaaagcatcgatggtcttcgcgtctcctcaggaggtctcccaggaggaattcttggatggtgtcctcatgtcggcggagaacagtgctcagagctggcgcttgcagacgcagctgtcgtggggcagggcggtggcgccttcctgacctttggaagacatgacaaagctgcctggacacggacgcccctgctgtacggccacagcacccctgggtttgcagagcacgcagccttcctagggctttccacctggcgagcccccgctctgctcaacacggtgcaaagtgaatgctgctggcttggagccttggcacgattggggaagtcctgcctcaaactgagctgccccgcataagccaggaaaaa

SEQ ID NO: 170007 - DNA, 751 bp, Homo Sapiens
agttaataaagacaagttgacaatagcaggttggcgggttggaatttcgggaattgtaatccagcagtcgggctcgggggtgcaggttgctgactcccggcctcagtggtcctagggcgaaaaggggtcggggtattgcccttgggtcttccttctttaatactttaggaacttccagctcttcgaagttggttcttgcgcaaagcccaagggctgaaaacccgtcacgattgaccagcatgactcagtctctgcggaaggtgataaaggccatgaccaaggctcgcaattttgagagagttttgggaaagattactcttgtctctgctgctcctgggaaagtgattcgtgaaatgaaagtagaagaagagcataccaatgcaataggcactctccacggcggtttgacagccacgttagtagataacatatcaacaatggctctgctatgcacggaaaggggagcacccggagtcagtgtcgatatgaacataacgtacatgtcacctgcaaaattaggagaagatatagtgattacagcacatgttctgaagcaaggaaaaacacttgcatttacctctgtggatctgaccaacaaggccacaggaaaattaatagcacaaggaagacacacaaaacacctgggaaactgagagaacagcagaatgacctaaagaaacccaacaatgaatatcaagtatagatttgactcaaacaattgtaatttttgaaataaactagcaaaaccaga

SEQ ID NO: 170008 - DNA, 871 bp, Homo Sapiens
  misc_feature (746)..(746): n is a, c, g, or t
  misc_feature (750)..(750): n is a, c, g, or t
  misc_feature (753)..(754): n is a, c, g, or t
  misc_feature (757)..(757): n is a, c, g, or t
  misc_feature (770)..(772): n is a, c, g, or t
  misc_feature (775)..(777): n is a, c, g, or t
  misc_feature (856)..(856): n is a, c, g, or t
cggacaagggtgcgaggaaagtcagtgagcaaatcgcggaccaccggggctgccagctcgcctgactcccggcctcttgcgctcctaggggcggagaagggtgcgggctcttcgccctttgtgtcctccttctttcactaacttctggactttccagctcttccgaagttcgttcttgcgcaaagcccaaaggctggaaaaccgtccacgatgaccagcatgactcagtctctgcgggaggtgataaaggccatgaccaaggctcgcaattttgagagagttttgggaaagattactcttgtctctgctgctcctgggaaagtgatttgtgaaatgaaagtagaagaagagcataccaatgcaataggcactctccacggcggtttgacagccacattagtagataacatatcaacaatggctctgctatgcacggaaaggggagcacccggagtcagtgtcgatatgaacataacgtacatgtcacctgcaaaattaggagaagatatagtgattacagcacatgttctgaagcaaggaaaaacacttgcatttacctcctgtgggatctgaccaacaaggccacaggaaaattaatagcacaagggaagacacacaaaacaccctggggaaactggagagaacagccagaaatgaccctaaaagaaaaccaaacaatggaatatcccaagtattagaatttgactccaaacaatttggtaattttttgaaataaacctagcccncggnggnnggncgcgggaaaaaannnaannnacaatgtgggggccgccttcgggcccctccgaaaagccttttctaagacccatttccgtttggcggcggggggcccccnagaaggttaaggtgt

SEQ ID NO: 170009 - DNA, 323 bp, Homo Sapiens
aacagtgaacattcggactcgagataatcgtcgccttggggagtgggacttgcctgaggctgtgcagcgactggtggagctacagaacacgagggtcccaaatgccgaagaaattttctgagcctttgtacatagatgaggcaaaaacctgcgagtgccatcagcctccctcacatgggagaccccaacccagctgacaatgtggagcccccagaacttcagaactgtgtggaggcacatgtctgctctcctgaaaagagacttggtttggggaccccacaaaaggagggaagctgtagctgtttgatgtgagagatcgcgca

SEQ ID NO: 170010 - DNA, 2031 bp, Homo Sapiens
  misc_feature (127)..(135): n is a, c, g, or t
  misc_feature (1968)..(1968): n is a, c, g, or t
ttttttggtggggggaagaaaatcccccttgttagtttatgatttggggagggtggaaaaagaaagcgcgccgaacaaatatggggtgttttagtttgcccttttccccagccctcgcgattgttcnnnnnnnnnggtgggccccaggggggtctgtttcagggacaagcagggggttgaagcctttgggaaggggattgggagggagaagctttggggggattctgtgtgttccggggttgggagagaaaccttataatgaggtttttgtgcaaaaacttctgggaaggagtgagaggacaagagaaaagctccaaaggggctgtggggcgcacaatggcccggctggggggtgcagagggctgggctggggccctgtgtcctcaaccactcctgagaacacggacggtcaggaatgaggggctcagaccccgggttggtgagagggaggtgacagggagggaaggagcctgctggagggaaacctggctgggaggatgggtctgggcccaggctggggcctaaggagggggaagaacagagcagggaaaggcagaaaaactgacacggtgggaggaggggagatgaatgggagatgaaacagaatgtctgaggggccacagacagcatgtatggtggcggggctctgcctcccatctctccaagtccaggcagagctgtgctgggtgaggggctgggaggcagaggcaggagcatcattaacaagggtggaagccacgaagacagcgaccagtgcacagggtgtgtcacatggtaccaaccaagagacttggcgtgcaaagaaccaaagaaacactcaggacacacacgacatctgcagggaacctgggggtggtgaggaagtcgtgcacgggtggtggggggagactgggaggcccctctgtcctagaaacgctgtgtcaccatagcaacagggtcctggaggcaggggagctgcctcctgcccctgtgagctgtgaagtaggggtcctgtgggctcagggtgcccccttaccctcccttgagaagctctggggcaggtggagaaccccataagagttgaaagtggccttgggtcctgctggaggcagcagagtgagtggatctggcagctgcatcctagaggacaccctggtggctggaggggctgggggaggactaggctctcctgctggggaccaggattccagctttctcatttccgagaaggaaactgataccacaaggaagagtttggaagtcgggtgaaggaaggcctgggggactcagtccaggggactatgggcaccagaaggcaaaaccaacacgccttgggcctggagcaggagggagaaggggaaaagcgggaactttcttgttcttttctttggtgaccacagtcatggccatggtgccagaaagctgggcctccccactatggggcaggcgggacacctgcactgagcggaagacactcttgagggtgttcttcgagctggcgtccctcttgtcgccttccctcctccgctccccggggtggcccagccagtagtccacctggaggccaatcacgtccccatatgggctattagggctccccacgatggccagggcgctgctcatagatggggaggagggaggggtggccgtggcgtctcggctcaggcccgagctggagggtggtgatgtggagggcacagtaaggctgaccacaggagaatcgtccccatcgcctgctgtggagggagagtcttcaaccagacccaccttcaccacgccaatgaagggaataaacttctgataggagtcttcatcagggaacttatgccggcaagtcagcatggcttcggccacgggaagctggtgtgtcgtggctgccccgttgacgtactgcatcacccgccctgccacgtccagttgctctgacactggtggctccgagcgactgaacagatctctccaaccagaatccaggaaagaactactggnatttactggcgactgacccccagtatttgggcacagggtgaaaaaccgaagggggatgatgaa

SEQ ID NO: 170011 - DNA, 953 bp, Homo Sapiens
tttggaacccccccatatgggagagtggaccatcttttcaaaggcataagttcctgcttggactggctttggccggaggcaggatggagggccggctggaatgccctttcaaatgaccctggcttctttagaaatcccacctccctttttttccggggttttcttgttcaaggaagatggtgggaacctttcttgttctttttctttgggggaccacagttcaatgcccatggtgccagaaaagctgggccccccccacttatggggcaggcgggacacctgcactgagcgaaagacactcttgagggtgttcttcgagctggcgtccctcttgtcgcctcccctcctccgctccccggggtggcccagccagtagtccacctggaggccaatcacgtccccatatgggctattagggctccccacgatggccagggcgctgctcatagatggggaggagggaggggtggccgtggcgtctcggctcaggcccgagctggagggtggtgatgtggagggcacagtaaggctgaccacaggagaatcgtccccatcgcctgctgtggagggagagtcttcaaccagacccaccttcaccacgccaatgaagggaataaacttctgataggagtcttcatcagggaacttatgccggcaagtcagcatggcttcggccacgggaagctggtgtgtcgtggctgccccgttgacgtactgcatcacccgccctgccacgtccagttgctctgacactggtggctccgagcgactgaacagatctctccaaccagaatccaggaaggaactactgtatttactgtcgactgaccccaagtatttggccacagggtgagaaccgagggggatgatgaggaagcgcatgtagccaagccagtcggaggtcttgttggccagggacttgacaaagaacctgaggatggagctcaggtagc

SEQ ID NO: 170012 - DNA, 915 bp, Homo Sapiens
  misc_feature (20)..(20): n is a, c, g, or t
  misc_feature (48)..(49): n is a, c, g, or t
tctccagccattagttctgnctgctggccttgggctgagccagatgannggcgggctgatgccctttcaatgaccctggctctttagaatcccacctcttttttctcggggtttcttgctcaaggaaagatggtggggaaacttttctggttccttttctggggggaccaccagtcaatggcccagggtcccagaaaagctgggccctccccactaatgggccagccgggaaacctggcactgagcgggaagacactcctgaggggggttttttcgagcgggcgtccctctggtggcctttccctcctccggctcccccggggtggcccagccagtagtccacctggaggccaatcacgtccccatatgggctataggggctccccacgatggccagggcgctgctcatagatggggaggagggaggggtggccgtggcgtctcggctcaggcccgagctggagggtggtgatgtggagggcacagtaaggctgaccacaggagaatcgtccccatcgcctgctgtggagggagagtcttcaaccagacccaccttcaccacgccaatgaagggaataaacttctgataggagtcttcatcagggaacttatgccggcaagtcagcatggcttcggccacgggaagctggtgtgtcgtggctgccccgttgacgtactgcatcacccgccctgccacgtccagttgctctgacactggtggctccgagcgactgaacagatctctccaaccagaatccaggaaggaactactgtatttactgtcgactgaccccaagtatttggccacagggtgagaaccgagggggatgatgaggaagcgcatgtagccaagccagtcggaggtcttgttggccagggacttgacaaagaacctgaggatggagctcaggtagc

SEQ ID NO: 170013 - DNA, 1610 bp, Homo Sapiens
  misc_feature (1243)..(1252): n is a, c, g, or t
aaaaaacggggtttttggtgttggaaaaggacatcttttctgttttccggacctctgcttgcctcatgccaggtgagacaccttcatgcctgtttccatgattgagaacatgggagtacgcttctttccacctacgttcctggtggattttcactggagttgggctgcactgtggaaaaggggttgggcagctcctgtggcacagtgagggggcatagaagcccaaggcagtcggtaagaaatcaccaatttattgaatgaaaaacccaacatcaactcagtccctcccacccccatctcctctctctggcccaggagacgctcaggacagcagggctgagccctgggaagggctggaggagagcttgggggaggtatggagaatgagaaaaacactttcaaaatgaagttctgtgcaaaaacttctgggaaggagtgagaggacaagagaaaagctccaaaggggctgtggggcgcagatggccgggctggggggtgcagagggctgggctggggccctgtgtcctcaaccactcctgagaacacggacggtcaggaatgaggggctcagaccccgggttggtgagagggaggtgacagggagggaaggagcctgctggagggaaacctggctgggaggatgggtctgggcccaggctggggcctaaggagggggaagaacagagcagggaaaggcagaaaaactgacacggtgggaggagggagatgaatgggagatgaaacagaatgtctgaggggccacagacagcatgtatggtggtgggggtctgcctcccatctctccaagtccaggcagagctgtgctgggtgaggggctgggaggcagaggcaggagcatcattaacaagggtggaagccacgaagacagcgaccagtgcacagggtgtgtcacatggtacaaccaagagacttggcgtgcaaagaaccaaagaaacactcaggacacacacgacatctgcagggaacctgggggtggtgaggaaatcctcccccggtgcttcgatgccactgtcaaccccctctgccccacagaccctgctgccccgctacccccgtgttctccaggttccccgtactggcttcggccaccactcctctccttgtctccggactcctgcggcgagtaaccgaacggcctcgtgcctcccctcgggagtccccctcaggccgccggctggcgcccgggctcaggccaacaccgcgcgccccgcggcccctccannnnnnnnnntgcgaaatcctatttttcactccgtctctcgtctctcgtcgcgcgctcagacacccgccgcggattctttcgctcgtcggctcacgacgctttctcctacccctctgcctccgtggtgcagactcgcttgttgctcgcctccccgcctctcacccatacccgcgatgtcccctcgctatctacactaccgtgcgcaactacatcccataggatgattgtactatctctccgcatcttcgcccccgcttgtcgagggccttagtcgtcctccccttcgacccaccgctctcgtacgggtgtcccggacgctgccatcaaccgctacgtctgccctattactcaggccgcatcagcgttg

SEQ ID NO: 170014 - DNA, 975 bp, Homo Sapiens
cgtcccctgtggcagtgtctttcgggacctgggcgagtgagaggcagaccctggtgccagggaaggggtgctgggccccggcctgctggcctccccccctgcccgcaggcggtgaaggctggtggcagtgcccaggagggaaaagtggctgggaagacagggcctcaggtggccttgctgcccactgaagagtcccactggaaagtgcttgacatgggtgggccactgggctgccagctggaagaacttgatgtcactccactcgaccccatcgatggacactctcagcatagtctgctgctgcttggctgagcagatgaggcggctgatgccttcaatgacctggctcttagaatccacctccttttctcggggtttcttgctcaggaagatggtgggaactttcttgttcttttctttggtgaccacagtcatggccatggtgccagaaagctgggcctccccactatggggcaggcgggacacctgcactgagcggaagacactcttgagggtgttcttcgaagctggcgtccctcttgtcgcctttccctcctccgctcaccggggtggcccagccagtagtccacctggaggccaatcacgtccccatatgggctattagggctccccacgatggccagggcgctgctcatagatggggaggagggaggggtggccgtggcgtctcggctcaggcccgagctggagggtggtgatgtggagggcacagtaaggctgaccacaggagaatcgtccccatcgcctgctgtggagggagagtcttcaaccagacccaccttcaccacgccaatgaagggaataaacttctgataggagtcttcatcagggaacttatgccggcaagtcagcatggcttcggccacgggaagctggtgtgtcgtggctgccccgttgacgtactgcatcacccgccctgccacgtccagttgctctgacactggtggctccccc

SEQ ID NO: 170015 - DNA, 438 bp, Homo Sapiens
  misc_feature (16)..(16): n is a, c, g, or t
  misc_feature (28)..(28): n is a, c, g, or t
  misc_feature (34)..(34): n is a, c, g, or t
  misc_feature (48)..(48): n is a, c, g, or t
  misc_feature (73)..(73): n is a, c, g, or t
  misc_feature (94)..(94): n is a, c, g, or t
  misc_feature (100)..(100): n is a, c, g, or t
  misc_feature (110)..(110): n is a, c, g, or t
  misc_feature (318)..(318): n is a, c, g, or t
accctgggcccaaganccaatcctcccnaagccnaggtttcccctccnagaaggctccttcccctcccctgtnacctcccctctcacccaaccnggggtntgagcccctnattcctgaccgtccgtgttctcaggagtggttgaggacaacaggccccagcccagccctctgcaccccccagcccggccatctgcgccccaaagcccctttggagcttttctcttgtcctctcactccttcccagaagtttttgcacagaacttcattttgaaagtgtttttctcattctccatacctcccccaagctctcctcccanccttccccaggctcagccctgctgtcctgagcgtctcctgggccagagagaggagatgggggtgggagggactgagttgatgttgggtttttcattcaataaattggtgatttctttccg

SEQ ID NO: 170016 - DNA, 333 bp, Homo Sapiens
  misc_feature (261)..(261): n is a, c, g, or t
cccctcttccagagcttccacggtgctggcaaagtcctgcagcttcttcttcgagtcggagagctacaaggacagcgtccagggtagggtgagagggggaccatgaatggcccctgtccctggccccacagactctgagaagcgaagaccatgtctcctcgttggagaaacccaatagcaggggaagctggggggtcaagcaccatcgcaccaacactccaccgcgatctgcctgcgggggatcttagcgcagagaagttnagaggacccatgaaggaagcaaggacacgggggcaggcactgggatgttttagaattggagattttggcctt

SEQ ID NO: 170017 - DNA, 103 bp, Homo Sapiens
accgtctgtggtggagcacgttgttggggttctggggtatcacaccggctggtgtggtttcctggatgtgcgaacgccggggctgcatgcgttggtgtgtggt

SEQ ID NO: 170018 - DNA, 622 bp, Homo Sapiens
cccagggtaagcccgacctcggacacacggaaggttccgcgccaagtcactctgcgaggaggacaacggccgggaggagcggcggccgaacctcatcagctcggagcccgtcagctgagggtgtcgacccaatcgttcatcgaagtgctcacgacgttgccagtgtggaccgtcccgaggccgttcacatatcgagaagacaacagtgccttgttgtggtcgttgagattctgctcgaagacgccgcctacgaagatcggatcggcccaccctctgcctgcttcgtgtgccaggtgagcggcgcggttgacgacgtcgcccatgtagacgacatcgttgattccgctgccgctgaatcccgccttgatcatgagcactcggccgtagtcgacgccgatgccgatcttcagggggtcgatccccttcttcgcgtagtggtggttgaggagcttgatgagtgtgttcgcctgataggcaatgccaaacacatcgtcgatgtgcgtcttctgcgtggtcttgtacacagcccagacgcagtccccaacgatattcacttcccgaacgtacagatcggagttcagcaccgccaccatctcagagatgaacgcgcgatatatcttcg

SEQ ID NO: 170019 - DNA, 432 bp, Homo Sapiens
agaggtgggtacccatggcgttgatgacgccgacagtgcccgtcaggcacgcctgctgatgcaggccaactcagacaccctgacccgtcggatccgatcggagctggtgcccgccggcatcatcgagtgatctctgcgtagcgccgacacatgatcccaattccgtggtgtcggcgctacactattctcaagcgagcggagcgggactcccacccctctctcaatctccgcgcagttatctgttggactgcacatcgacacccaagcgatggcgagacatggagaggtggcccgatgaagggtcagaacatcaacgactggttcatcatggtatcgatgttcctggtcatcgcggcagcattcgtgatgcacgtcatccccacgatcctctatgccagccagggtttgggtagtctcggcgttgtcaacgta

SEQ ID NO: 170020 - DNA, 772 bp, Homo Sapiens
aggtgttcgatgtcagcccgacggatgatgtcgatggcgctctccgcgtctccggcctggagcgtggtcatcaggtggtaggagtccagcttgccgtcgatgcccatctgagccttgacgtccgcggcggagacggtcctgcctcggaagccgctggccagggtcacgcacagctccaccagcggagtctgatccacgttgccggtgaattcaatcatccggttgaccgtcttccgctggatgccgacgtcgtggcgatccagccatcccaccacccactccacaaggtcatcgtggtccgagatcgccgggatggggcggggatacagctcagcgtccgatccgatggcctggacggatcgcttggtgatggtgtcgttgagggtccgctgcacgaaggcgatgaccagcttggtctccatgtcgtggagatgcgtgatcagctgccggaagttctcggcggacagagagtcgatgcgatccacgatgaaccacttggtgtcctcgaaccagaagccgtcgtcggtcagattgagacccacccaattgaaggactcgatgtccgcggtgatctcggagcagtcgaaccggatgaccgggttcagtccggatcggccatcgatccactctcggacctcatcctcataggtgccgaaatagaatcctgtccagatcgaccattcctcgatcaaggggtcctcttctctcgcgtatcgacgtagtcagtctatcagcgaggtgggacactaaccgattgacttgaccaggtagg

SEQ ID NO: 170021 - DNA, 134 bp, Homo Sapiens
ggcaacatgccgcgcggtctgaccgtggatgatcttcaggtgttcggccccgatttcgccatgcagtccggcgccggcattgaggtgaaggtgaacgacaacggcgcctatggctcattctcctattcgtggaa

SEQ ID NO: 170022 - DNA, 461 bp, Homo Sapiens
tacatgatgaagcagctcgccctccagatggagaaggtggtcctcaactccgtgcccgatggatctgagttctgaggtgagatgatgggacccgaagatttcgacctgttcggtgacataccgctgccaccggagtccaagaaggagcccaccggtcgccggggtcattggcacttcatcgccatgatcagccacggtgacccgatcaaggtcggtgactctctgtacgtcggaatctccggggagaccaagatcggcaagctgaaccgatccggaaccccgacccctcacgagctgatcatcctccccgacattcggttggaggcgctgtccgatcggaaccatctgaccttcgactccctggatgcggccgccgcctacggcctggatgccgccggtcgccggtcatccaagactgatggccgtcgatcctcggtcaatggctggcggaacgtgtactt

SEQ ID NO: 170023 - DNA, 263 bp, Homo Sapiens
ctgatgacaccccggatcagtcaggcatagaggatcgtggggctgatgacaccgctaaaacggaagctcgcctttgctgcaagtgggtctacctcgcccagcaacttgttgatcgccttatgggagttcgatgaaacacccacgcgctttccagcgcgcaacaaagcaacaacggcgtgcgcggcattataggtttacccgtacccggcgggccctgaatgaagagatagctatgatcgaggtccagcacggcgagggtctcg

SEQ ID NO: 170024 - DNA, 303 bp, Homo Sapiens
cagcagatcgaggccttcgacggcgttaattccgtggaacgcaccattcttcggctggctggattccagtatgatgatgcgccaagttcggaacgaaatgaccttgacggcatggatgtcaccgcatttcgccagtggtacacgcaccatcgtcaggcgatcgaggggtgctcgttgacctccagcgatctgcaccgatgatgagcatcgtgactttcttgaaagggcgccatgccgtagcccttgttgccgtgccggttgcggccgttgtcgtggcctttttcctgtggaagacgcgtctgt

SEQ ID NO: 170025 - DNA, 408 bp, Homo Sapiens
acctaccaacttactcatccaaaatgctgggaattcagagatgatcttgatgagctggaatgttcaagtttttctgtttgcttcagctcattagtttaaaattctctgcttcctcttaggtggagggaggtagttcagtatggaagatgctgccagttcattagttaattaggccagaagcatttaccaaagagttggtgtaaaactgaccctctgctaggaattttgatggagacaagagaagaaaaaaggggctctgccctccaggaggtcatactgtctttggagaaggtcagtttgtacacaagaacaaccagagaacagggtggacacattaaattcccaagtgagcagggcacagccagggctctcagagatgagaatggagaagagcacatgagcttcggc

SEQ ID NO: 170026 - DNA, 324 bp, Homo Sapiens
cttggaacccgccgtcgaagccgccatgaaactcggaacctgccatgtcgaaacagcaggctggcacgtcacaagattctaaaagcacaaggcatgccgaggctatggcacacagcccttggggaagccgagtttggtcgatctcaagaccacaaggactacacctaaaccaccccggccggccgcgaatcgcggctgtgagatgagaacaaaagaggtctcataaaacatgccgccatcgactcagcagtactgaggccataacccacactgggccacgatcaaccccccgacaccccattcgggtacgcggtgtcatcagcg

SEQ ID NO: 170027 - DNA, 244 bp, Homo Sapiens
gacgccgagactggcaaaaccactgccgcatcccggtaaccgagcaaccatcactgtgagcactacaaggatcaccatcacgatgccgaagcacaccccgctcagcactccggtggcccagaagtacagtcgaatatctcccacgagctttcgttgcgcgagtaccgtaataattcgcaggctggccgcggccagccccacagacgccacacagaacagggcgagcaggatcccgatagcgcgg

SEQ ID NO: 170028 - DNA, 690 bp, Homo Sapiens
gggcgtatctgagtgactagagcccaacagcccgtcgttcacggctccaactgggagctggctatggacacctccagaatactgcagaagctccacctgaggttacaggtcctgtttgactaccagcctgaggcccagacgagttggcgctgcggaggggggacgtggtaaaagtactcagcaagaccacagaggataagggctggtgggaaggagagtgtcaaggacgaagaggagtttttccagacaactttgtactcccaccacccccaatcaagaagctggacccaaggaaagtggtatctcgggaattagctcctattaaggaaccaaaaaagtggatgcccaaaacatccctccccacagtcaagaagctagcaacagccaccactgggcccagcaaagccaagacatctcggacacccagcagggacaggcagaagctcacctcccgagactcaggccccaatggtggcttccaaagtgggggttcgtatcaccctggccgaaagcgatccaaaacccagactccccagcaacgctctgtgtccagtcaggaggaagagcacagcagcccggtaaaggccccctctgtgaagagaacccccatgccggacaagactgccaccccagagaggcccccagctccagagaacgcccccagttccaagaagatcccgtgagttgcat

SEQ ID NO: 170029 - DNA, 495 bp, Homo Sapiens
gcccatagaagacatgactgaaaataaaattttcccctacttcgaagtgggcattttgttcctctccgtgttcagcagaataggggcttttcagcagtgccgaggatcttggaattggttaagttgtgtgctggcagttggtgggcaggatatctgcagtgaaggacgtcaagtatgcaagggttttattgttaaaatgtttttcatttggctacagaacatccactatgtgataaaactggcaaaagggaaacaagagtgcatggttagctcaggatactttatggagtatttaatagagataaatgtaatcttggacggatataccagtaaatagcttacatgatggaacaaaattctttacaaatcactgtgctaaaattggttttcaattctccatcatttccgactgccagaggttctgtgtatgagtgtggcaggaatatgcttgcaaagcagatccgaatccacgctgcgcgaggtgtgctgcttctg

SEQ ID NO: 170030 - DNA, 369 bp, Homo Sapiens
aagtgaaagtccctgaacaaggggcgggatgcgcccgagtggcattttttgtcttaaggtagatcgcgtagctgttcttcagaataatcttcagagcgttgacgacagccatcgctgtgcattcctcaagaatagaatgtgtcggaagggtggcgtcattggtgttagtcatcgcttaggatttctcaatctggcttacacgggcgcctgtaccgatatccccgcggatggcgacgtatcgatgttgaattcctcgccagacgaagtgcaatgagctgcggctataggcttgcgcagccttagatagccggccgtcgcaggcgcgccggttggccgggatcttcttctgcccatcaggtgtccggtcgg

SEQ ID NO: 170031 - DNA, 494 bp, Homo Sapiens
attacgcgtgcgcgattggccgcccccgacactgaagttgcacagcccagtgccctgccatgacaggccgacgctgaaaaaatcgcgcaagccctccaagcgacctgacggctcaagcgcctgctggaggtcctgataactttggctctgcagcccataggtcaagcccgctccccatccgccggcaaactgctggttcagggtcatctggctttgcatccccctctcctgatgcaacggctgcgagtagcccagcgaccattgcatctgagcctgcgtccacggctgagcaccgagcgcgaacccggtagcctgatagctgtcggtcgcaattagccctccccccacttccaagccatcaagcacactcccgctccacccggcgctaagcacccaaggtgacgcggcgcgactgtggcgaagttgaccaatgccgaactggtatcctcctgacaaccccgccgccatcggcgaggcaggcaaggtcaggcgac

SEQ ID NO: 170032 - DNA, 505 bp, Homo Sapiens
aaaggttcgagcttcgacatcgcctcgatctacgaactggacaaggtgatggaccgtggcgtcagcgccgacagcatcagctacggcaacaccatcaagaagtccaaggacatccgctacttctacgagaagggcgtgcgtctgtacgccaccgactccgaagccgacctgcgcaacattgccaaggccgcaccgggctcgaaagtgtacgtgcgtatcctgaccgaaggccccaccactgccgactggccgctgtcccgcaagttcggctgccagaccgacatggcaatggacctgctgatcctcgcccgcgacctgggcctggtaccttacggcatttccttccatgtgggctcgcagcagcgtgacatcagcgtgtgggactgccgccatcgccaaggtcaaggtgatcttcgagcgcctgaaagaagaagacggcatcgagctgaagctgatcaacatgggtggcggcttcccggccaactacatcatccgcaccaacagg

SEQ ID NO: 170033 - DNA, 488 bp, Homo Sapiens
atgttgcacaggacactatgtatgttgaacgttactgatgaagcaaagggtggcaaaaatatgctgcttcttaagaagccaatgagcacctctgattgagaaacaggcttgcagaacacgcgggggtcaccatagaaacaaatccttcaagatgatcagagcctttgagatagagtacccagtggatgggttttggaggaaagtgagagagagatcctcgctataggtggagtaaagatctaatttacacacccaactggatcatacaagcattccaaggctccttcagctgtgggtgctttgtgtccttccattagcaatacaaatgagaagaaaatatttttgcaaagaagtgggaaagaatcctaggtcatgacagaggaaggtcacagagttcagacctggcaaaacctcccattcctactaagctatttcactgctattgatcctcagaactaagtgcaccgggcacagtggggctctctagc

SEQ ID NO: 170034 - DNA, 129 bp, Homo Sapiens
ggtgtgctgcttctgcgtttctgatgtcaactaaaactcagatggctaatatgataaaccttaattagcttaatacaataagctgttttattatttagtccttcattcttgtcttttgagagtcagtga

SEQ ID NO: 170035 - DNA, 299 bp, Homo Sapiens
tgcccatgctgcaacgttatcgcaacctcggaggggactccattgcgatctacacctacgtcaaccggcgcagacctacaggggtaggaggtaactatcaagatgagtgggtgtgtaactcggttggttgcatccttgaggcgataagatcaacaaatggatgaatacggctttagagctatcaatgattttgggtcagtaacgatatccagtacttacaaagttctagttttttctgaacgtgggacctatcaggtgacctcgcaatacacggatcgcggtggcgagggctcagtctc

SEQ ID NO: 170036 - DNA, 313 bp, Homo Sapiens
tgggcgcattgtgctgtccgacagcaagctggcggcgatggaggtgagcggcgtatttgatctggatgagcctgaggccctgttgcggacgcttgagcagcgatatggcctgaaggttacctacctgccgtggttggccgtggtgtattgatcggcctgcagcgatctcgtcgcagtacagaaataaaaatattttccatttggcactgcaagttcgtgcaagccagaccgtcgtagtgtgactgatcagcaacccattctcatttacgacttgacaggaagctcatacgtgcctctgatgctctagcccttg

SEQ ID NO: 170037 - DNA, 323 bp, Homo Sapiens
ggagcagggctgagcataagccgatagcttctgacaagtcgaaatgagaatgggttgctgatcagtcccactacgacggtctggcttgcacgaacttgcagtgccaaatggaaaatatttttatttctgtactgcgacgagatcgctgcaggccgatcaatacaccacggccaaccacggcaggtaggtaaccttcaggccatatcgctgctcaagcgtccgcaacagggcctcaggctcgtccagatcaaataccccgctcacctccatcgccgccagcttgctgtcggacagcacaatacgcccatggcggtatcgctcaa

SEQ ID NO: 170038 - DNA, 398 bp, Homo Sapiens
cccaaggggcactgaggcagcgcgcaagaagagtcatgggccgggtgtcttcgacgaatcgggatcggtagcttcagtgtagaaataaagcccgacagtgatgcgctggcgttgctcggcactgggctcatcgacgctttccagctcggctgcaaggtggctgaaggcaagcagcgtctgcatgccatccttggcgaccacctcacgcacatgctcgacacttgccaggctcagggcgccgtagtgcacgctacgttcaaaaaatggttggccgtcgtcactgaggttgtgcactgctgcgcaggcatggtcatgcaggttgtggccgaagtaggcggctttttcatcaaagcccttttgcggcacgaatgcctgagcttgcaggtgaacgcaatcct

SEQ ID NO: 170039 - DNA, 560 bp, Homo Sapiens
gagctatctgggtatgattgcagtcgactgatgtcccgcgtccctttagcctgcattagctcaaaatcgtcttgaagcgagtccgcgcggaacgaaaaaactttcattgagaccttcaatttgaaggtcatggaaggatggagccgatgactacatgagccaaggcgcagatcggaaacccagcgcccagacccactaggaaaccggattgaaccagccttggctaggcccaggcgtcacgtcgatatcactacccaaacgcagcctcatagccgaaagtgcccattcggctccagcacaattgctgtgccgtacacctaagaggagcgacagcggctacgtagagaaaccacaatcagaggcccatgaggtgcaatgtgcaaaatttgcacattgcgaacaccccactagaagcaacccagcgcctcagcgctcaaactcatagctgtagtcagtcgttacagacaaatccgctagcagatcgcccagcgatagcgaaagccgtggctcatcaaagaattcaaactcagaaaagctcacagccaccgcgatccgcaggt

SEQ ID NO: 170040 - DNA, 418 bp, Homo Sapiens
  misc_feature (14)..(14): n is a, c, g, or t
gaacagtccgcaanaagtccctagaggagcatggccctggaccctggagcagctgagtttaccttgaagcggcctgaggtcattgccacctgcggtgttgcactctggctgctgcttctgggcaccgccgtgtgtatccaccgccggcgccgagctagggtgcacctgggcccaggtctgtacagatataccagtgaggatgccatcctaaaacacaggatggatcacagtgactcccagtgggtggcagacacttggcggtccacctctggctctcgggacctgagcagcagcagcagcctcagcaagtcggctgggggcggatgcccgggacccactagactgtcggcgctccttgctctcctgggactcccgaagccccggctgcccctgctttcagacaccagcactttttatg

SEQ ID NO: 170041 - DNA, 353 bp, Homo Sapiens
gagaaagtgggctgagctggtttagtgaatcagaggagaaagcccctaaaaaactggagtacgacagtggtagcctgaagatggaacctgggacttctaagtggcggagggagcggcctgagagctgtgatgattcatccaagggtggagaactgaaaaagcccatcagcctgggccaccctggttccctgaagaagggcaagaccccacctgtggctgtaacttcccccatcactcacacagcccagagtgccctcaaagtcgcaggcaaacctgagggcaaagctacagacaagggtaagcttgcagtgaagaatactgggctccaacgctcctcctctgatgctggtcgg

SEQ ID NO: 170042 - DNA, 244 bp, Homo Sapiens
gagctactgcgcccagccaacacatgtattcttaactctgattcatttgtgtaatatctaggcaaccttccaacatatcaccagtgatctcctgaaggacttcttaaacctccttgatgtcacatttcgtaccagctactgaagatctccagaaagattaagaaacaaatatttcattatcacccataggaaactcctcaagggcagaaaacatgtctttcttgtttactgttgaataacagtg

SEQ ID NO: 170043 - DNA, 325 bp, Homo Sapiens
acaagggctagcggagcgaatagggggcttcgcctctggcccagccctcccgctgatcccccagccagcggtccgcaacccttgccgcatccacgaaactttgcccatagcagcgggcgggcactttgcactggaacttacaacacccgagcaaggacgcgactctcccgacgcggggaggctattctgcccatttggggacacttccccgccgctgccaggacccgcttctctgaaaggctctccttgcagctgcttagacgctggatttttttcgggtagtggaaaaccagcagcctcccgcgacgatgctcctctaggcctt

SEQ ID NO: 170044 - DNA, 814 bp, Homo Sapiens
gcgtggggtccttgcagagagaaggtcgtcccgtcgtttatggcgcgagggagccagaagccccaggatcccagattaaaaactccaccccgcccccagggccagagaccagctccggagagcagagggggattccagccatttggtgataccgggggcttccacttctcatttggtgttggtgcttttccctttggctttttcaccaccgtcttcaatgcccatgagcctttccgccggggtacaggtgtggatctgggacagggtcacccagcctccagctggcaggattccctcttcctgtttctcgccatcttcttctttttttggctgctcagtatttgagctatgtctgcttcctgcccacctccagccagagaagaatcagtattgagggtccctgctgacccttccgtactcctggacccccttgacccctctatttctgttggctaaggccagccctggacattgtccaggaaggcctggggaggaggagtgaagtctgtgcatagatgggagagccttctgctcagaggctcactcagtaacgttgtttaattctctgccctggggaaggaggatggattgagagaatgtctttctcctctcctaagtctttgctttccctgatttcttgatttgatcttcaaaggtgggcaaagttccctctgactcttcccccactccccatcttactgatttaatttaatttttcactccccagagtctaatatggattctgactcttaagtgcttccgccccctcactacctcctttaatacaaattcaataaaaaaggtgaaatataaa

SEQ ID NO: 170045 - DNA, 1006 bp, Homo Sapiens
gggaggaaaccttgaagcctgcccaacgatcgtgggcaggaggtggtttctggtttgttggggcgtgtgtatgtgtatttggggggactgaagggtacgtggggcgaaacaaaaccggccatggcagcagcggaggaggaggacgggggccccgaagggccaaatcgcgagcggggcggggcgggcgcgaccttcgaatgtaatatatgtttggagactgctcgggaagctgtggtcagtgtgtgtggccacctgtactgttggccatgtcttcatcagtggctggagacacggccagaacggcaagagtgtccagtatgtaaagctgggatcagcagagagaaggttgtcccgctttatgggcgagggagccagaagccccaggatcccagattaaaaactccaccccgcccccagggccagagaccagctccggagagcagagggggattccagccatttggtgataccgggggcttccacttctcatttggtgttggtgcttttccctttggctttttcaccaccgtcttcaatgcccatgagcctttccgccggggtacaggtgtggatctgggacagggtcacccagcctccagctggcaggattccctcttcctgtttctcgccatcttcttctttttttggctgctcagtatttgagctatgtctgcttcctgcccacctccagccagagaagaatcagtattgagggtccctgctgacccttccgtactcctggacccccttgacccctctatttctgttggctaaggccagccctggacattgtccaggaaggcctgcggaggaggagtgaagtctgtgcatagatgggagagccttctgctcagaggctcactcagtaaccgttgtttaattcctctgccctggggaaggaggatggattgcgagaaatgtctgtctcctctcctaagtctttgctttccctgattcttgattgacctcaaaggtgggcaaggtccctcgactcttccccatccca

SEQ ID NO: 170046 - DNA, 963 bp, Homo Sapiens
tccacctattagaaaaaaccccttgttgtttttatttataaatgcaggctggtacggtccggaattccgggatatcgtcgacccacgctgtcggtgtatttggggggactgaagggtacgtggggcgaaacaaaaccggccatggcagcagcggaggaggaggacgggggccccgaagggccaaatcgcgagcggggcggggcgggcgcgaccttcgaatgtaatatatgtttggagactgctcgggaagctgtggtcagtgtgtgtggccacctgtactgttggccatgtcttcatcagtggctggagacacggccagaacggcaagagtgtccagtatgtaaagctgggatcagcagagagaaggttgtcccgctttatgggcgagggagccagaagccccaggatcccagattaaaaactccaccccgcccccagggccagagaccagctccggaggagcagagggggattccagccatttggtgataccgggggcttccacttctcatttggtgttggtgcttttccctttggctttttcaccaccgtcttcaaatgcccatgagcctttccgccggggtacaggtgtggatctgggacagggtcacccagcctccagctggcaggattccctcttcctgtttctcgccatcttcttctttttttggctgctcagtatttgagctatgtctgcttcctgcccacctccagccagagaagaatcagtatcgagggtccctgcttgacccttccggactcctgggaccccttgacccctctatatctgttggctaaggcccacccctggacattggtcccagaaggcctgggggagggaggagttgacggtctgtgcatagcttgggagcagccttctggctccgagggctcacttcaagtaacgttggttacattctctggccttggggaacgcgagggactggacattgcgcaacacat

SEQ ID NO: 170047 - DNA, 367 bp, Homo Sapiens
ccttcgccttgaagggcaagccgaatgcttcggtcttcggctgcaagctggtagtactcaatcagtctggacactagcccgaccagatcgatatcaacctgctcggggatgatcaagccgttatcagcttttgccaggaacagcatgtcatcgatcatgcgcgacatgcgcttgaggtcttcaagattggagtagaggttgtcttcgtaggcatcgaggtcgcgttttttggtcagaacgacttcggtatgcgtcagaagattacttaccggagtccgcagctcatgtgcgatgtcggctgagaagtttgatagccggacgaacgcgtcttccaggcgtgcaagcattccgttgaaggagaggatca

SEQ ID NO: 170048 - DNA, 595 bp, Homo Sapiens
catgccagccgccatcagctacacttcggttcagtagcgaccgacagaagcacggcaccagtacagaccgccaagaagaaatggtgacgaattggcttgtccgtaatcctgactacacacgttccaatctgaagtacaaagacgttgccaagagtggttacaagggcgagcacatcaaggacggtggaggatttgccaagctgttgcaggctgtagaagctggcgatatccaagctggtgacgttgttctttgcgaagcaatggaccgtgctgggcgtttggaatctttggacatgctcaccaaggttattgccccaattctgtatgctggtgtgtcgatcatcaccctagacgataacacggcgtatacgaaggcaagtgttaacacgcctcaaattcacttgctattggcaaagattcaagctgcacacgggtacagtcaggctctgagtgaccgtatcaaatccaaatacgccacacgcattaagaacgccaaagagacagggtaaagaaaaacccaatacgcctatctggcttaacagcgacggtgagcctaatggaactggcgtgcctttgattaaagcaagcatttgaa

SEQ ID NO: 170049 - DNA, 881 bp, Homo Sapiens
ggatttctgcggccgccagctcccgcgaccgcctctcctgcccctcgccggtacctcagcaaggtgccactagaagcgccaggctggggccgcctctgagcgccccgcgggggccatggatggtgaaacagcagaggagcaggggggccctgtgcccccgccagttgcacccggcggacccggcttgggcggtgctccgggggggcggcgggagcccaagaagtacgcagtgaccgacgactaccagttgtccaagcaggtgctgggcctgggtgtgaacggcaagtgctggagtgcttccatcggcgcactggacagaagtgtgccctgaagctcctgtatgacagccccaaggcccggcaggaggtagaccatcactggcaggcttctggcggcccccatattgtctgcatcctggatgtgtatgagaacatgcaccatggcaagcgctgtctcctcagtcatcatggaatgcatggaaggtggtgagttgttcagcaggattcaggagcgtggcgaccaggctttcactgagagagaagctgcagagataatgcgggatattggcactgccatccagtttctgcacagccataacattgcccaccgagatgtcaagcctgaaaacctactctacacatctaaggagaaagacgcagtgcttaagctcaccgattttggctttgctaaggagaccacccaaaatgccctgcagacaccctgctatactccctattatgtggcccctgaggtcctgggtccagacaagtatgacaagtcatgtgacatgtggtcacctgggtgtcatcatggacatccctccctttggggcttcccacccctttctacctccaaaacggggcccaggcccatcttcccct

SEQ ID NO: 170050 - DNA, 583 bp, Homo Sapiens
  misc_feature (35)..(35): n is a, c, g, or t
  misc_feature (37)..(38): n is a, c, g, or t
ccaaattctcgcagaaaagcctcggagtgaacggngnnctcctccggattcgtctcttctcctgctagatttcgcacagacgaggccggagaaatcccattttcctcgttaaaggcaatttgaacctgcctgcgcctattggtttcatcgatcgcctgtttcatcgccggagtcaccgcgtcggcgtacaagatcgccttcccgttttcattccgagcgactcgacctatcatctgaatgagagcatgggccgaacgcaagaatcctgcacggtctgcatcgagaatagcaaccaatgatgcctctggaatatccagcccttcgcgcaaaagactaatcccaatcaaaacatcgaactctcctgcgcgcaggccattgatgatctcaacacgatcctccgcttttatgtccgaatgcatgtagcgcgctcgaatcccgttgtccggcaagaaatccagtagctcttctgcactgacctttcgtcagcgtagtcacgagcacgcgatttttcttcttcacgcacttcgatatttcggcaagcagggcatctatgtatccggccgctttccgctcctttagccct

SEQ ID NO: 170051 - DNA, 614 bp, Homo Sapiens
  misc_feature (64)..(72): n is a, c, g, or t
ctcctcttcacaaacaagaaggggaaatggcccaaaaaggggcaggtgggtgccagccaggctnnnnnnnnnaggttccagctggggatctgggaaaggagaaggataggaatggagaaaggaaccagccaaagggcccagcagagagttggtgctatgtaaggaaagaaattgtttagggcaggatattctgaaattaccttaaaccctaaaacaaacagttttgacttgctgtcccaggagcaaggaaaaaatccttcctcaacgactcatgcacccctttctctgcagctctgggctaggttcgtgggggtcctgggaaggagagagcgttcctgcccacctggaagtctccttccaacttgttgatctcagaaccctgatgtgctctggggagaagagtgtgtagcgggtgggggcacgctcagggttgcctgcctggatggcatctcggtggtggtggttgagtttttactgtcttacagcacagatggtggaaaatcatagccatgacagttggtgaagcgtcactcaaacatgcagcctatctggtaacagcacaaggcaatgtgtggggaaatgccaaagtgacagagaccaacagatcagtcagg

SEQ ID NO: 170052 - DNA, 965 bp, Homo Sapiens
  misc_feature (499)..(521): n is a, c, g, or t
ggcctgggtggcgaattcggcacgagggagggggacatcttcacctttgaccgtacagaagccgaggacgtgcttggggagctagagtatgacaaggtgccatactcctccctgcggcgcaccctggaccagcgccgggccctggtcatgcagctctttcaggaccatggcttcttcccgtcagcccaggccacagccgccttccaggcccgctatgcagacatctttccctccaaggtttgtctgcagttgaagatccgtgaggtgcgccagaagatcatgcaggctgccactcccacggagcagccccctggagctgaggctcctctccctgtaccgccccccactggcaccgctgctgcccctgcccccactcccagccccgcagggggccctgaccccacctcacccagctcggactctggcacggcccaggctgccccgccactgcctccacccccagagtcggggcctggacagcctggctgggagggggctnnnnnnnnnnnnnnnnnnnnnnnaggtccctccacagctgccacaggcaggtgagggacccctgagaagatgccaggacttatagtaccccctcaggacatggacagtatgtgggggcaggaaggttatctcctcccgggtaaagccatttcgtcctctccagtttggggcggaatgaggcctgctcctcttgtaaatacccccttccctcgaagctccctcccggggctggggggcagctgaggggctgcaggggcaatctccctcctccaagcccctggacataacctggaacgtgcgaaccttcagaagcttttcactttatgcaaaaagggctcctgtggagggctgccaaactggaaagggtggagccaaggccttggggcccaaagggaaaggcgcccggtgggaaaaaagggggggaaactccatagggacaccccctttattatacaccagaatgaggg

SEQ ID NO: 170053 - DNA, 815 bp, Homo Sapiens
  misc_feature (471)..(491): n is a, c, g, or t
ctgttttttggaggtgacatttccatccagaaggataacgatcaggaagactattgctgtagatgagtggattgtatttcagtctccagtcaagaattgcccatcttgttaaggaattaatgaaaggaactagatattcttctgcaagagaagattgaacagtcctcatcctgtagactggaatgacactaaatccagagactgtgcagtactgtcagctattatagacttgatcaaaacacaggaaaaggcaactcccaggaactttccgccacgattccaggatggatattacagctgacagcttttcaggggtggtctgaaaagccagtttgacagccattcttcatcatggtttaaattttggctggatgccaaaccctgggacatgaacaattttcatgtgtaaggtagaagccttcagtaggtagtaaagacttaatgtgcatgacttgatgttatatgtagagnnnnnnnnnnnnnnnnnnnnnccataaaagcaatatgttctctgatcatatactctgctgtggtcatgcccactctttgggagtatattccctttatatatattgagtattgtaccacttgagaaattcctttgttctgttatacaaaattaatctttctgctcataatgattgatgataccaccagtaaaaataggatgtataccccaaaacaagtgtcaattaagaatgtgaacacaaacacattgtttaaaatgaaacttctatcggaagtacattaatgtgaggtaataaagtacagtatttaatacacagtgtacagtgttaatctcaaaaacaaaacaa

SEQ ID NO: 170054 - DNA, 246 bp, Homo Sapiens
ttcaccccatcgatcacacagcgggccaggaacggttccggaccatcacttccagactactaccggggggctcatggcatcatcgtcggtgtatgacgtcactgaccaggtactcctggactagccatcctcagcttggcctccttagccttaggtctttgactcttctttttcctccttccatcctctctttcctgatgcttcctggaaaggacactatttgtctgcttgcaggaactaactagg

SEQ ID NO: 170055 - DNA, 1126 bp, Homo Sapiens
  misc_feature (1086)..(1086): n is a, c, g, or t
tggctgttgctaggaggggcacatggagtgggacaggagggggcaccttctccagatgatgtccctggagggggcaggaggtacctccctctccctctcctggggcatttgagtctgtggctttggggtgtcctgggctccccatctccttctggcccatctgcctgctgccctgagccccggttctgtcagggtccctaaaggaggacactcagggcctgtggccaggcagggcggaggcctgctgtgctgttgcctctaggtgactttccaagatgcccccctacacacctttctttggaacgagggctcttctgtcggtgtccctcccacccccatgtatgctgcactgggttctctccttcttcttcctgctgtcctgcccaagaactgagggtctccccggcctctactgccctggctgcagtcagtgcccagggcgaggaatgtggccaggggatccaggacctgggatccagggccctgggctggacctcaggacaggcatggaggccacaggggcccagcagcccaccctttcctctccccactgcctcctctcccttcctacactcccagctcgagccgtccagctgcggtgggatctgagtatatctagggcgggtgggcgggtagcagtgctgggcctgtgtcttgagcctggagggagtctgctcctgccgccctctgccctgccagagacagacccatgcgctgcctgcccaccgtgcccctttgtccccatgtcaggccggaggcggaaaggcccaccgtgccagaagctgggcaccagccttaaccctcactctgctagcacctcctcccctttccccaaggtagcacatctggctcactccccactccggtctctggagcccaccagggaaggccctcatcccctgccgctacttctctgggggatgtgggttccatccagggattggggggcctctctgctcacccactctgcacccaggattctagtcccctgccctctggcacagctggcttcctgcaagaaaagcaggcctttggtctccctgaaaaaccatggtccctcctggctgtctccttgcctggtcccanctggtgccctggccttccgacttggtatttaagtccccgg

SEQ ID NO: 170056 - DNA, 930 bp, Homo Sapiens
  misc_feature (11)..(11): n is a, c, g, or t
gatcacttccngctactatcggggggctcatggcatcatcgtggtgtatgacgtcactgaccaggaatcctacgccaacgtgaagcagtggctgcaggagattgaccgctatgccagcgagaacgtcaataagctcctggtgggcaacaagagcgacctcaccaccaagaaggtggtggacaacaccacagccaaggagtttgcagactctctgggcatccccttcttggagacgagcgccaagaatgccaccaatgtcgagcaggcgttcatgaccatggctgctgaaatcaaaaagcggatggggcctggagcagcctctgggggcgagcggcccaatctcaagatcgacagcacccctgtaaagccggctggcggtggctgttgctaggaggggcacatggagtgggacaggagggggcaccttctccagatgatgtccctggagggggcaggaggtacctccctctccctctcctggggcatttgagtctgtggctttggggtgtcctgggctccccatctccttctggcccatctgcctgctgccctgagccccggttctgtcagggtccctaaaggaggacactcagggcctgtggccaggcagggcggaggcctgctgtgctgttgcctctaggtgactttccaagatgcccccctacacacctttctttggaacgagggctcttctgtcggtgtccctcccacccccatgtatgctgcactgggttctctccctcttcttcctgctggcccgccccagaactgagggtctcccccggcctctactgccctggctgcaatcagtggccaagggcgaggaatgaggggccgggggaatccaggaaactggggatccaggggcccctgtgcgtggaccttcaggaacaggcagggaaggccaccgggggccccagcaaaccccac

SEQ ID NO: 170057 - DNA, 1261 bp, Homo Sapiens
cgggccgccgccgccgccatgaaccccgaatatgactacctgtttaagctgcttttgattggcgactcaggcgtgggcaagtcatgcctgctcctgcggtttgctgatgacacgtacacagagagctacatcagcaccatcggggtggacttcaagatccgaaccatcgagctggatggcaaaactatcaaacttcagatctgggacacagcgggccaggaacggttccggaccatcacttccagctactaccggggggctcatggcatcatcgtggtgtatgacgtcactgaccaggaatcctacgccaacgtgaagcagtggctgcaggagattgaccgctatgccagcgagaacgtcaataagctcctggtgggcaacaagagcgacctcaccaccaagaaggtggtggacaacaccacagccaaggagtttgcagactctctgggcatccccttcttggagacgagcgccaagaatgccaccaatgtcgagcacgcgctcatgaccatggctgctgaaatcaaaaagcggatgcggtctgcagcagcctctgggggcgagcggcccaatctcaagatcgacagcacccctgtaaagccggctggcggtggctgttgctacgacgggcacatgcgagtgcgacaggagggggtaccttctccacatgaagtccctgcagggcgcaggacgtaccctccccctctccctcctcctggggcatttgaacctgtgccctttggggtgtcctgggcctcccccatctcccttctggccccatctgcctggccgccctgagacccccgggtcttggccagggtcccctaaaggaaggacactcacgggccccgtggccacaggcaaggcaccgaagaccgtcctggactggtttgccttttgcgggacctttccacggatgcccctccgtaccgcatcttttctttgggaaacaacggccccctacgggcggtggcgtcccttcccccctccaacggtaagagtgccatccgaggttcctctaccctcccgttttttcccgtgtgttcctcgccccctagaaattggggggggccacaccgggcccccatccactgggccatgtaagtgtccgtaacacgttgccacaagatgcgtaaagatactcgccgcacccgccgctgaacctccccggaattattcgggccattaaaccggccccttttgcgcccgcgtgtacccccctgcccactcaggccatcctcggaggcgcccccgaggaggc

SEQ ID NO: 170058 - DNA, 1268 bp, Homo Sapiens
  misc_feature (822)..(912): n is a, c, g, or t
acgcgtcgggccagggatccaggacctgggatccaggccctgggctggacctcaggacaggcatggaggccacaggggcccagcagcccaccctttcctctccccactgcctcctctcccttcctacactcccagctcgagccgtccagctgcggtgggatctgagtatatctagggcgggtgggcgggtagcagtgctgggcctgtgtcttgagcctggagggagtctgctcctgccgccctctgccctgccagagacagacccatgcgctgcctgcccaccgtgcccctttgtccacatgtcaggcggaggcggaaggcccaccgtgccagaggctgggcaccagccttaaccctcactctgctagcacctcctccctttccccaaggtagcacatctggctcactccccactccgtctctggagcccaccagggaaggccctcatcccctgccgctacttctctggggaatgtgggttccatccaggattgggggcctctctgctcacccactctgcacccaggatcctagtcccctgccctctggcacagctgcttcctgcaagaaagcaagtctttggtctccctgagaagccatgtccctcgtgctgtctcttgcctgtcccacctgtgccctgccctccagcttgtatttaagtccctgggctgcccccttggggtgccccccgctcccaggttcccctctggtgtcatgtcaggcattttgcaaggaaaagccacttggggaaagatggaaaaggacaaaaaaaattaataaatttccattggccctcgggtgagctgagggtttttgcaaggnnnnnnnnnnnnnnnnnnnnnnnnnnnnnnnnnnnnnnnnnnnnnnnnnnnnnnnnnnnnnnnnnnnnnnnnnnnnnnnnnnnnnnnnnnnccccaattagcggttacccccacttttttgtgccacaagggggcccccaaaaggggaggcgctaatataaaacaagggcagcgggcgccagtttcaacaaagctccggatccgggtgcgaaaaccgcgtctacacgcgcaggcaacccttggggaaagaggaaccccataaaaccgccgggggcgagggcacacacaatagttggacaacaacactacccacgaaacagagcaaaatatagagagcgccctaagaggggacaacaattataacaaccttcgtcgacgaggcgttcataatagggtgcgctttaacccacatccgcgtgccataattcgcctacggcggcgtgcttg

SEQ ID NO: 170059 - DNA, 399 bp, Homo Sapiens
cagtgactggggcgcccccgctggtgactgttttcaaagcaaattcacgaggcacatgttcgtccctgccccaaagtgaacagtctgggcttcccagaacagaaaagtgctttccttcctgggggaatccaattcctgagctgacaagacagatttcagtaagaatgagcacaaaggatagggcaaaatagtgaagggagccaggtgcatatttgaattctttccagtgcagactggaacgtagacatgcaggtatccctcctaaaggcaacgcgcaaatcccagccattcccactagaggccaaaccgcctgcccacagagattgacagccaatgttcatctcataactctcctcccagcagtgcaccagtaaactcagatgcctgagtgcttgtggc

SEQ ID NO: 170060 - DNA, 768 bp, Homo Sapiens
tgcactggaagaatcgtaagtcaactgtttcttgaccatggcagtgttctggctccaaatggtagtgattccaaataatggttctgttaacactttggcagaaaatgccagctcagatattttgagatactaaggattatctttggacatgtactgcagcttcttgtctctgttttggattactggaatacccatgggccctctcaagagtgctggacttctaggacattaagatgattgtcagtacattaaacttttcaatcccattatgcaatcttgtttgtaaatgtaaacttctaaaaatatggttaataacattcaacctgtttattacaacttaaaaggaacttcagtgaatttgtttttatttgttaacaagatttgtgaactgaatatcatgaaccatgttttgaatacccctttttcacgttgtgccaacggaattagggtgtttgatatttcttcatatgttaaggagatgcttcaaaatgtcaattgctttaaacttaaattacctctcaagagaccaaggtacatttacctcattgtgtatataatgtttaatatttgtccagagaattctccaggtttgcagttttatttctataaagtacgggtattatgttgctcagttactcaaatggtactgtattgtttaatatttgtaccccaaataacatcgtctgtactttctgttttctgtattgtattggtgcaggattctttaggctttatcagtgtaatctctgccttttaagatatgtacag

SEQ ID NO: 170061 - DNA, 969 bp, Homo Sapiens
  misc_feature (883)..(883): n is a, c, g, or t
gggagtgccggtcggtcttgtgggctgaggggcagcggcttaggctccggcgtctgcaggggtcgccgagctaacccgtggctaggcgagtggggcggggcggccggcaccatgtcgaggcaggcgaaccgtggcaccgagagcaagaaaatgagctctgagctcttcaccctgacctatggtgccctggtcacccagctatgtaaggactatgaaaatgatgaagatgtgaataaacagctggacaaaatgggctttaacattggagtccggctgattgaagatttcttggctcggtcaaatgttgggaggtgccatgactttcgggaaactgcggatgtcattgccaaggtggcgttcaagatgtacttgggcatcactccaagcattactaattggagcccagctggtgatgaattctccctcattttggaaaataaccccttggtggactttgtggaacttcctgataaccactcatcccttatttattccaatctcttgtgtggggtgttgcggggagctttggagatggtccagatggctgtggaggccaagtttgtccaggacaccctgaaaggagacggtgtgacagaaatccggatgagattcatcaggcggattgaggacaatcttccagctggagaggaataaccatccctacaactcgaggatagccatcaggagcactgttggaatcagcaggcctctgtgctccctctgccctccagaactcagtgactcttgaacatggatgttatatattcttattacctgtttccattctccattcaaataaagagcagactgcgatatagtccattttaccccatgggtgcacaatccagggaagcgacagtctctgcccccctttccccttganaaaggggctgggatgtaaatccaccttttggttgggactaaaaaagagactcaaaaccattttttacatttccctgggtttggaaa

SEQ ID NO: 170062 - DNA, 1002 bp, Homo Sapiens
ccccacttgtcctgacttattccgccttccagccaatcctgcactgatggaacaaagcaggcctggctaccccggcctggctgtctgctggctctcacgccaggcattttctcgggcctggctgtcgcagctagtgggatccactaacgcggcatgtccatggcatcttggcctaaacaaacaggtgaggcctggctctgtctacacagcagcaacaaaggtgactgatcagcaggagatctgtagtgcacaaataatgggagagggtgtgcttgtcagcattagacaatgactcccaaatgtagtgtaaacccacaaggagggggcaactcaaggagggacacatgactaagcaagaaaaatgtgactctgtgagctgacccggcttctgaacaaacctaatacagtctatgctcacagtgtgtttcagcccccttgactctaaaccgtcacagaagcagaaggaagaggaagtggtggattgcccagctggagcctggggactgttacgactgtctagatctctgcggtcatagggcgtcacagcctcctcagaccctgagcctggaatgcgggggaacacaatgtagattcccaggagggctgtccccaagaccctctccctgcccgcccagctcctcaggcctcctcttctaccgcttcttcttagtctctttcttgggcctcttgttcacagaaggaacagcagccttgggcttcctcgtcacctcagcacttctgggctcagacggttcagcctccgcctcgtgggacttgggaatgggtacgatgatggccagcacacagatgagctggaagatggctcccaggaagagtccgtaccgtagcaggttctccaggaaagtgggctcgggcacctccggaggtgagaagtctaggtcagaggccatggcccaagtcgcttgctgcctgacgtctcttctgactcaccactctttagaaccaactcccgcgccgccgcgccgctcccccggaagtccc

SEQ ID NO: 170063 - DNA, 902 bp, Homo Sapiens
gaaggtggcaagatggtgttggaaagcactatggtgtgtgtggacaacagtgagtatatgcggaatggagacttcttacccaccaggctgcaggcccagcaggatgctgtcaacatagtttgtcattcaaagacccgcagcaaccctgagaacaacgtgggccttatcacactggctaatgactgtgaagtgctgaccacactcaccccagacactggccgtatcctgtccaagctacatactgtccaacccaagggcaagatcaccttctgcacgggcatccgcgtggcccatctggctctgaagcaccgacaaggcaagaatcacaagatgcgcatcattgcctttgtgggaagcccagtggaggacaatgagaaggatctggtgaaactggctaaacgcctcaagaaggagaaagtaaatgttgacattatcaattttggggaagaggaggtgaacacagaaaagctgacagcctttgtaaacacgttgaatggcaaagatggaaccggttctcatctggtgacagtgcctcctgggcccagtttggctgatgctctcatcagttctccgattttggctggtgaaggtggtgccatgctgggtcttggtgccagtgactttgaatttggagtagatcccagtgctgatcctgagctggccttggccccttcgtgtatctatggaaaagcagcggcagcggcaggaaggaggaaggcccgccggccagctgcagctttctgctgcttgaggcccgggaattgctaccaactggggactggaagaattcaaacaatgccccttgctgaaaaattacccttcggcccagcaaagaagattgggccccaacctggggtcttccctggaccctaagcccatatttgacttggagggaaaaaacc

SEQ ID NO: 170064 - DNA, 957 bp, Homo Sapiens
acaatgttctgggtgatttccgccctggcccaaaactttggtcccttgcaggggccattttgcatggcataaagcaatctgcttctcctccagtcatactgcttaggtcaggaaggcccagtgcggccaaactcttgctgggtgatggtcatcttcagcagggcatcgtctgagtcttcagtcccagtcgtagcaatcccggcctcagcagcagaagctgcagctgcccgccgggcctcctcctcctgccgctgccgctgctcttccatagatacacgaagggccaaggccagctcaggatcagcactgggatctactccaaattcaaagtcactggcaccaagacccagcatggcaccaccttcaccagccaaaatcggagaactgatgagagcatcagccaaactgggcccaggaggcactgtcaccagatgagaaccggttccatctttgccattcaacgtgtttacaaaggctgtcagcttttctgtgttcacctcctcttccccaaaattgataatgtcaacatttactttctccttcttgaggcgtttagccagtttcaccagatccttctcattgtcctccactgggcttcccacaaaggcaatgatgcgcatcttgtgattcttgccttgtcggtgcttcagagccagatgggccacgcggatgcccgtgcagaaggtgatcttgcccttgggttggacagtatgtagcttggacaggatacggccagtgtctggggtgagtgtggtcagcacttcacagtcattagccagtgtgataaggcccacgttgttctcagggttgctgcgggtctttgaatgacaaactatgttgacagcatcctgctgggcctgcagcctggtgggtaagaagtctccattccgcatatactcactgttgtccacacacaccatagtgctttccaacaccatcttgccaccttcctccctc

SEQ ID NO: 170065 - DNA, 1451 bp, Homo Sapiens
  misc_feature (435)..(435): n is a, c, g, or t
gcctggaccaggcggcagccatattgtgcgattgggaaaatagaggcaatgtcgaggttgtttttcctggcaagttcataaggggcgttaaaaaatcagggaaaggcgcgagttgccggcccaaaaatctttggtggggaggaatgggtcagttttcaagccaagggcatcggtttgaaatgtttacaatccccaggtgggtagcaaatccccgtcttcagcaggcagaaggttgcagggtggggcgaagggcctcactcctcggggcgcgtgacgctgctcttcccatagatccacgaagggccaagggccagctcagggatcaggcactgggatgtactccaaattcaaagtcactggcaccaagagccagcatggcaccacgttcaccagccaagatcggagagctgatgagagcatcagccaaactgggcncaggaggcactgtcaccagatgagaaccggttccatctttgccattcaaggtgtttacaaaggctgtcagcttttctgtgttcacgtcgtgttccccaaaattgatagtgtcaacatttgctttctccttcttgaggcgtttagccagtttcaccagatccttgtcattgtcctccactgggcttcccacaaaggcaatgatgctccacccccacacccaccccagagaggggtgaggaagccacaccatcacgcagcatgtcggggggacaaggcggggtttaaggctgagggggcccggggcaggcggggcctcgggcctcagtcaaagccgtaccagtcgctgtgctctgagtcgtattccagatcggcgcccacacacttgacaccatccagcagcatgggcgtgccgtggtgccggtccatgacgagggcctgcaccgtcacgcgcacacaggtgccagtgccaccttcgcaggatagcagtatctcctctttgaggacgccctctttgtgcgcacgagtactcacacttgacactataaccttcagggacgggcaccacgctgaggagcttgaggtgcaggctggggacaggtgcctcgcggacatccttgctcagcctgtgcactgggggcagagtgaaggtaatctcatacctgtgcaggatcttcaggaagccaaccttgaccagaaagctgctgtcactctcctgggtgaccatgaccaccgagtcatgcagcttctcatcaaagtggacgtggctgtgggatccttctgcatcgtggcctgccgcaaagcggatactccggactctgggcttgttgcccttgttggctgcagccatggacgccctccctgccacgcagctcctgccagacaccgccactcacgctcagcagcctcccatgctccagggacaccagcgggagccttgcggggtgcaccccggggccggggagggcagggacgaccactgcagcggcggcggctgcaggagctcaacgccctcgtcg

SEQ ID NO: 170066 - DNA, 897 bp, Homo Sapiens
  misc_feature (823)..(823): n is a, c, g, or t
gggaacacagaaaagctgacagcctcctgtaaacacgttgaatggcaaagatggaaccggttctcatctggtgacagtgcctcctgggcccagtttggctgatgctctcatcagttctccgattttggctggtgaaggtggtgccatgctgggtcttggtgccagtgactttgaatttggagtagatcccagtgctgatcctgagctggccttggcccttcgtgtatctatggaagagcagcggcagcggcaggaggaggaggcccggcgggcagctgcagcttctgctgctgaggccgggattgctacgactgggactgaagactcagacgatgccctgctgaagatgaccatcagccagcaagagtttggccgcactgggcttcctgacctaagcagtatgactgaggaagagcagattgcttatgccatgcagatgtccctgcagggagcagagtttggccaggcggaatcagcagacattgatgccagctcagctatggacacatccgagccagccaaggaggaggatgattacgacgtgatgcaggaccccgagttccttcagagtgtcctagagaacctcccaggtgtggatcccaacaatgaagccattcgaaatgctatgggctccctggcctcccaggccaccaaggacggcaagaaggacaagaaggaggaagacaagaagtgagactggagggaaagggtagctgagtctgcttaggggactgcatgggaagcacggaatatagggttagatgtgtgttatctgtaaccattacagcctaaataaagcttggcaaacttttaaccccaaccnttcccactccctaacccccggaaacaacaaaggtatcaactctcgaaggattctattgttccgcgggggccggg

SEQ ID NO: 170067 - DNA, 952 bp, Homo Sapiens
ggggaggccggcgcggagaatctgctgtcgcctgcagctgctcgcctgtctccgtcggaagggagcccaagctttgcagagaacatgaacgattggatgcccatcgccaaggagtatgatccactcaaagcgggcagcattgatggcaccgatgaagacccacacgaccgcgcggtctggagggcaatgctggcacgatatgtccccaacaaaggtgtcataggagatcccctcctcaccctgtttgtggccagactaaacttgcagaccaaggaggacaaattaaaggaagtcttttcccgctatggtgacatccggcggcttcggctggtcagggacttggtcacaggtttttcaaagggctacgccttcatcgaatacaaggaggagcgtgccgtgatcaaagcttaccgagatgctgatggcctggttattgaccagcatgagatatttgtggactacgagctggaaaggactctcaaagggtggatccctcggcgacttggaggcggtcttgggggaaaaaaggagtctgggcaactgagatttgggggacgggaccggccttttcgaaaacctattaacttgccagttgttaaaaacgacctctatagagagggaaaacgggaaaaggcgggagcgatctcgatcccgagaaagacactggggactcgaggacaaagggatcgagaacatgacaggggcccgggagaaaagatggcaaagaaagagagccgaccaggggtgtgggcccgacaatgactgggaaagagaaaaggaacttcagaaatgacaggattcaagggcaggggagaagaagggaaagaaggcaagtagaaggcccaaacagccaaaaaccccccaaggggaagttatccaggggaaaattgaaggggaaggggggaattgttccttttccaacagccaaaccgtgggaaatccttaaaggggt

SEQ ID NO: 170068 - DNA, 804 bp, Homo Sapiens
tgaggagtgatatccaccctgaggagtgatatccacccaggagaatcaggacacatcttccaggagatttactgccttcccctgtgtcttgggtgtgaaggcttcacctcaggaagacgttactttgaagtggatgttggcgaaggaaccggatgggatttaggagtttgtatggaaaatgtgcagaggggcactggcatgaagcaagagcctcagtctggattctggaccctcaggctgtgcaaaaagaaaggctatgtagcacttacttctcccccaacttcccttcatctgcatgagcagcccctgcttgtgggaatttttctggactatgaggccggagttgtacccttttataacgggaatactggctgccacatctttactttcccgaaggcttccttctctgatactctccgcccctatttccaggtttatcaatattctcctttgtttctgactcccccaggtgactaaggaaaagagcagaagctccttggtttaaccagcacagagaaaataatataaatcccataagggcagacgtttggtctgttttcttcgctgtcatttccttagtagttagactagtgctgagattttagtggatatataattgatttatgttgaatatatggacttagcaactaaaaataccacagatggttaacctgacttggggcaaagcaagataatattgatgatcgtatgttcctgtctccatccgtctttaatgggtcagggctttgatttccaaggttttcgggataagtaggggacccacaagtcagggacaagtgggta

SEQ ID NO: 170069 - DNA, 930 bp, Homo Sapiens
  misc_feature (21)..(21): n is a, c, g, or t
  misc_feature (557)..(569): n is a, c, g, or t
aagaataatgtggtagtattntatttagggagagacagatgtgttgccatgttacttagtcatactagagagccagccaagtttgaataatgaaggtgcagacgtggtgtctttcttcactgacaagctgtctgaacaaggagccaggaactgtcgggtcaccagctgtggagcgtgccggggggacaacctgccattggatgtagagaaaagtgccttagagttggcctgagccctcctgcccactcgccctccgcgcgacgccactcggagtccacacggcacacacaaacggagctgagaagcacgatggctctagtcagaggactttgctgtcggtccagatttgaagaggacacggaacagcatgagcctttgtgacaaaactagaatttggaaatgaggactgtcttgggaaaagggtagacacaggcacttctctccacagcctgctaacctaatgtgggcagaactgaaagatcactgcagtggaaactgttctggaagaggctgcaacatagcccatgcttagggactggatggtttttccaagagcnnnnnnnnnnnnnaaactaccatctcccaacttttaaagccagatacttgacaaggattttagatcttaatgggttcgatggtagggaatacggaaaggatacactgctaatattgtgtctaacaataaagcaaacaactcgatgctgtaagaagacaagctgtttgagctttcaaacacacatgcacacagcacaattcagaaatacccaggaggattcctgcaggcttaacagttggcatcgtactgaaatgaaacgtgtattaacaagaaaatgtcaaacttttggggaaaacaaattttccggttacctcccacccaacttaaaagggaagataaaaacctcatcccccgaaccaaaaccgattttttcc

SEQ ID NO: 170070 - DNA, 1178 bp, Homo Sapiens
tgtattggtggcggtttcaatcatggcgaccattccagatctctctcaaggaagacaaattcctcctgctgtatgccctgctcaagctgtcattgattcggggcaagtctctgctctttgtcaacactctagaacggagttaccggctacgcctgttcttggaacagttcagcatccccacctgtgtgctcaatggagagcttccactgcgctccaggtgccacatcatctcacagttcaaccaaggcttctacgactgtgtcatagcaactgatgctgaagtcctgggggccccagtcaagggcaagcgtcggggccgagggcccaaaggggacaaggcctctgatccggaagcaggtgtggcccggggcatagacttccaccatgtgtctgctgtgctcaactttgatctccccccaacccctgaggcctacatccatcgagctggcaggacagcacgcgctaacaacccaggcatagtcttaacctttgtgcttcccacggagcagttccacttaggcaagattgaggagcttctcagtggagagaaccaggggccccattctgctcccctaccagttccggatggaggagatcgagggcttccgctatcgctgcagggatgccatgcgctcagtgactaagcaggccattcgggaggcaagattgaaggagatcaaggaagagcttctgcattctgagaagcttaagacatactttgaagacaaccctagggacctccagctgctgcggcatgacctacctttgcaccccgcagtggtgaagccccacctgggccatgttcctgactacctggttcctcctgctctccgtggcctggtacgccctcacaagaagcggaagaagctgtcttcctcttgtaggaaggccaagagagcaaagtcccagaacccactgcgcagcttcaagcacaaaggaaagaaattcagacccacagccaagccctcctgaggttgttgggcctctctggagctgagcacattgtggagcacaggcttacacccttcgtggacaggcgaggctctggtgcttactgcacagcctgaacagacagttctggggccggcagtgctgggccctttagctccttggcacttccaagctggcatcttgccccttgacaacagaataaaaattttagctgccccgaaaaaaaa

SEQ ID NO: 170071 - DNA, 690 bp, Homo Sapiens
  misc_feature (575)..(575): n is a, c, g, or t
  misc_feature (591)..(591): n is a, c, g, or t
  misc_feature (624)..(624): n is a, c, g, or t
  misc_feature (662)..(662): n is a, c, g, or t
attttgcttgtaacagtgtttattgatgatgagtccagggctcctgctgaagccctggtggggaggggcacagagcgagatggggcgtaatggaatgcttgaaggctgctccgtgatgtcggtcggagcttccagactaggcgagggcagggtgaggcctcgggcacacagccggcgcccagtcacccggcccagatggagggcggccgggccctgcgcaggcacttgccaaggtggctcacactcacgcacactcgtactgagactcaaggccgtctccacaactccaaccagtgcaaatgacttagtgcaaattaaattcagaagggacgggggaaacagagtcgtggaggctttgaatctctcagaaaaaaggaaagacaggaaagctcagaaacaaagagacagaaggatgaaaaagaagaagagggaggtggtggggacggcgtcatcccgctggaggagctcagctctgggatgatgtggtggctggtggtcaaccgtaccaccgacagggggtggaccatgaagatggagtcgaccggtgacggggtgggtgactgacgggcgactgnctgttccgatggtgtnctttgatgttgggctgatgaggtctggttcctnctagcttcaccttcccagagtccgattgcctgagtacnggtagtgtcagtggttgtaaagctgcac

SEQ ID NO: 170072 - DNA, 429 bp, Homo Sapiens
gacttacggacgagatcgtcagataggttaaataggattgcgaatcaggttgccattcagcggaagaaccagtttttggagcgagcccacagctactggctgctcaagcgctggtccaggaacgggccccccatgctgcgggggctgcagtccagcctgcagtctcagcgaagctcacagcagagagaaaatgatgaggagatgaaggctggcaaagagtagctgaagtactggcagcggctgcggcacgacctggagcgcgctcccctgctgatcgagctgctgcgcaagcgggagaagctcaagcgtgagcgggtgaaggtggagcaggtcgccatggagctgcggctgaccccgctgacggtgctgctgcgctcagtgctggaccagctgcaggacaaggaccccgcccaggatatttgcgcagcc

SEQ ID NO: 170073 - DNA, 531 bp, Homo Sapiens
tatgtggaaccgtactttgatacctacgagctcaaggaccgggtgacctactttgaccgcaactatgggcttcgcacattcctgttctgcacgccgttcacgccggatgggcgcgcacacggggagctgcccgagcaacacaagcgtaagacgctgctcagcaccgaccacgccttcccctacatcaagactcgcatccgtgtgtgccaccgggaggagacggtgctgacgccagtggaggtggccatcgaggacatgcagaagaagacacgggagctggcctttgccaccgagcaggacccaccagatgctaagatgctacagatggtgcttcagggctctgtagggcccaccgtgaaccagggtcccctggaggtggcccaggtgtttttagcagagatcccggaagaccccaagctcttccggcatcacaacaaattgcggctctgcttcaaggacttctgcaagaaatgtgaggatgcgctgcggaaaaataaggccctgattgggccggaccagaaggagtaccac

SEQ ID NO: 170074 - DNA, 229 bp, Homo Sapiens
ctcacgaggtggcagagagtcaggctgtggcaggggccccggtgtatcgaggagaggaggaagagtctgcagaggtttctagggaaggagatagtgtggaagtgactgtggctctggtcctgcctgggaggagatctacaggggaggggcctggccttgagcaggccctgccctgcgtgggatctgcgccctgcgtgggatccctgccctgtgtggggtgcgtgagtct

SEQ ID NO: 170075 - DNA, 336 bp, Homo Sapiens
ggagattcacggcacagacaccagaccctcactgacatccacccactctttttttccgggcaggttctccttcctctgtgccgaggcctgttccactcaggctactgagccaggaggcaggcttggtgggctagacacagtcagcatttaataacaaaggtgtaataataatacaaacaaatatactattaagatgaacctaacggttggagtttgccaagccatcctgtgactgcaaatcccttttcaattaatcttcatcagttaccaaatgagggtagactagaatgatctctagatatagagatatagagatcctgggcatctctatgcttc

SEQ ID NO: 170076 - DNA, 524 bp, Homo Sapiens
  misc_feature (402)..(402): n is a, c, g, or t
  misc_feature (425)..(425): n is a, c, g, or t
  misc_feature (428)..(428): n is a, c, g, or t
  misc_feature (449)..(449): n is a, c, g, or t
  misc_feature (459)..(459): n is a, c, g, or t
  misc_feature (462)..(463): n is a, c, g, or t
  misc_feature (473)..(473): n is a, c, g, or t
  misc_feature (493)..(493): n is a, c, g, or t
agcgcatgcccagagccctccgaaggccgggccgcgccgcttgggagcctgtccgacatgaatccgtccgttccgaagttcgccgtcgtcgtgcagccaagtcccatcgacgggatgggcgtgttcgcagcggagccgatccccgcgtacaagaagatcggagagttgcgtggcgagtcgatcagcgtgcgggaggcgcgtcggcgagccaagcggcagcagcgcatcatgatcgtcgaggtgtccgacaagcgggcgatcgatgcgtcgcaatcccaagacgccatgcgctacaacaaccactcatgctcgcccaacaccgtgctgcgcatccgccaggggccggttcgagttctacgccttgcgcccgatcgctgcggaaggaactgacggcaactacgntagaccacacgaaagcactttgnctngccgtgcggtcgccaatgcangaccttaggntgnntgatttggantggtaaccttacgggtacanttgaatctatatggatagtgttctggtaaat

SEQ ID NO: 170077 - DNA, 854 bp, Homo Sapiens
aacacacataacacccgtgagcctgatgcttccaaacctcaccagcgagcttgcagccctgatcccaccctggagcggcttccatggtaactgtgccacagggaagtacagcaaatgactgaaagggacagaagaggctgcgctgtggcaagctaagccactcaaatcagcacacacgacagaggcagacgcaggctgcacctcccgggccgggggaaggtcgagaatctgggagcatggagactgtgcttggaaggcacccgggaccagtccaaggggctgcctgggggtcctagaatcctgggggcccaggccgggagtctgccatgactactgccccagcaccccggtggggcatggtcaccttgaagatttcaatatgacctatgaagattccagttacggcagagtccccgtgttggaggctggcgggaactgcagaaatcagatggggctatgcagcagctcagggcctttctgctggttttcatgtcctgtgtgcagataaagcctcacacctatgcagaatgaacactttccgctggcgggctgcactccattctgaacaggggaccaacaggccctcctggagctccaggggctggcaggggagctccacagccggacccctgtgtcccgccactggggactgcctgggggaccctatctagcaaagggatttcttctctattgaaggcggcaaggctaggagtggcgctcgggacctcaacccctctcattctgccaggcttggggacgaggtccctgccaggctgtgccgccgggtcaggcctgcctgagctcacggaaccgccaggtgggttcctgagaggcgtggctgtttgggaaactct

SEQ ID NO: 170078 - DNA, 695 bp, Homo Sapiens
acaacatctccttggtagctcagctccgccagctgcagacgctaatgctcaaacttccaacaaagctgcccagaccagcactgtgtttgattcttcttttttccctggctctcatcatcctgcccagcttcagtccattccagagtcgaccagaagctgggtctgaggattaccagcctcacggagtgacttccagaaatatcctgacccacaaggacgtaacagaaaatctggagacccaagtggtagagtccagactgagggagccacctggagccaaggatgcaaatggctcaacaaggacactgcttgagaagatgggagggaagccaagacccagtgggcgcatccggtccgtgctgcatgcagatgagatgtgagctggaacagaccttcctggcccacttcctgatcacaaggaatcctgggcttccttatggctttgcttcccactgggattcctacttaggtgtctgccctcaggggtccaaatcacttcaggacaccccaagagatgtcctttagtctctgcctgaggcctagtctgcattggtttgcatatatgagagggtacctcaaatacttctgttatgtatctgtgattttatttcttcttggggtatagggttgaggggaaataagtttgagtgagaaactacacgttttagctgaaatggtaaccacaacacaaacac

SEQ ID NO: 170079 - DNA, 498 bp, Homo Sapiens
  misc_feature (27)..(27): n is a, c, g, or t
  misc_feature (53)..(53): n is a, c, g, or t
  misc_feature (58)..(58): n is a, c, g, or t
  misc_feature (66)..(66): n is a, c, g, or t
  misc_feature (71)..(71): n is a, c, g, or t
ttccctcatctgctgagatcaattagnaggaaaaacgttctcctctgcccgtnaggancttcccgnagccnccctgcccaccctgggcacgttctccgaggcatgtgtctccctgctcaccctcgtctgggcacctcagcatctgtggacttgagcgtccaaaaaccctgagtgtgattctgggcagccggccctggcttgaagtcccgccatgacccctgggcacaggggaagccccaccgtgggcttaggagagagggaccagcgcccagcgttagggctggaagacggcagtgttcagaattccagccgctcatctgaacacagaaggtgtgaactgacctctaaagcagcgtgagatgggaatgatctagaaaactttggatttttgaagtaaattttaatgtttcatattaatttcttgaaaatgtattaaatgtcattgaaagccttattacgcttttcagaacctttcaataaacaagacttgtagaaaat

SEQ ID NO: 170080 - DNA, 1070 bp, Homo Sapiens
  misc_feature (948)..(948): n is a, c, g, or t
  misc_feature (975)..(975): n is a, c, g, or t
  misc_feature (1049)..(1049): n is a, c, g, or t
tgcaatcatcggcatagtagtcgcgtgttcaatactttatgcggattggattgatttatactaagtcgctagctgggtgtagatcgttgagtacggcacgaaggggaggggcggggggttttcgggaatgagtaggtagctgcagataggcgtcgtcgtgcggggtaccgctgcgctgtttattgtgcgaggattgtgcggatcgtttcgagaggccttgacgtttatttggttttgtgcgtggagagtagcagggctggaagcgtgaggtacgtctaggggatgggtgtataacgaattgacgtgtgctggaaatgttggggtaggacgtgataaggcgtttcaagaggcattgtaattcattttcgaggaagttagtatgaatcctttaaaatttagtttcaaaaatccaaaggtttgtagatcattccccatctcacgctgttttagaggtcagttcacactttctgtgttcagatgagcggctggaattctgaacactgccgtcttccagccctaacgctgggcgctggtccctctctcctaagcccacggctgggcttcccctgtgcccagggtcatggcggacttcaagccaggccggctgcccagaatcacactcagggtttttggacgctcaagtccacagatgctaaggtgcccagacgagggtgagcaggaagacacatgcctcggagaacgtgcccaggctgggccaggcggctgcgggaagctcctcacgggcagaggagaacgtcttgtgccttccttatcgatctccagcagatgagggcaacttcgtgtgcaaaactcagagagcagttactcaaaaaaaagacacccgggcagcagtaaccaggacaccagggtccgaccacggcctccacacacctgtgcccgtggaagacgcgggcgccggggtaggcagcatccacgtgctcccacagnctgctggtgctgggacaggctggaganctcacgggaagaggcaggaggagaatcagccgtgttgagtccctcgctgtgttagtgtgaaaaattctcattanctgttgcaaataaaagggatc

SEQ ID NO: 170081 - DNA, 957 bp, Homo Sapiens
gtcgacccaaaaaaaatgccagcgggaccggtcaccgtcggggcgcccaacggtggccccaggccgaggagaccccgaagccggcgctgcggacctcggagggaattgcccctgatccccgagggaactgggccaaccgaggcccttgctcaaagaccccggcgcgtaccggacccagccggccggcctccacacacggccgcgggaaacgcggccgggtagtcagcaccactgctccacagcggctgctgctgggcaggctggagactcacgggagaggcaggaggagaatcagcgtgttgagtccctcgctgtgttagtgtgaaaaattctcattactgttgcaaataaaagggatcacgatcactagccccggaaaccctcatctcccggaccatcaggatcgcactgaacagaatggtcccctaatggtccctgaggacagcgtcttgcagaacataaatgtaaacattgaatggcagacgactcccttccccttgaaatcttcacaaaagtgtgtacgagaaagtatgtacatcagcacttcagaaagtttaaaagagtctctaaaaagtatatacaggatttaaactaccttcctgggagcagaagctacgtgaggaatgtgtgggtcgctggcgatgccagcccccttcccgctgagtgtcccagactcagtgctggcctcaagcggggagggctggatggcaggggacgcatccaaccctctccagaaactgagcagaacaaaaccgccttgccagccactggcaagaccatagctttcaatggcgcctccgccaggggcttccctgcagaaattttaggggaagaggtgcaggtccaggggaaaagcatggcagcttcaaggaaggtttttggctgagacatttattatcaaccggacgcgtgggtcgacgatatcccggaattccggagccggaccagcctgctttt

SEQ ID NO: 170082 - DNA, 986 bp, Homo Sapiens
aaggagaaagctacgcgctggggggcgcccggggcccccaaccgtccacccgcgaagcccaggcgggggctagggcgggcggacccccagagagcgtggagggcgaggctccccccgcacccccagaggcgcagaggtgagccgctgtgctgtcccgttccggaggggccgctttgccggccgtgaatcccagacgaggcattgggcctttccacgcccctgggtggcggcttcctgtggtgtttgtggacgtcctctgcctgtgccctgaatccgctcctgaggctaagcgctcccaacgagaagggtccacgggaagccctcacctctgtaaacacaccctgggccagcgctcgcatccgaggggagccgccggatgtggaagaagactcggctttcctgcagccatttagtgccgccccatgctaggttatttgacattgtgcagtgtagagttgccttaaagtgcgtgatctgccagtgctttcttcaagtcacccttgccccgattcctcctgtttgcgctccccagggttgctcaagttggaaattttgtcagctgtttagccttttcgtacttgggcgtgatgtcaaattcaattctaatcttgcaaaagcagaagctgtttcctagtttacctcgcgtgtgtttacctatatggagtagctcgcagagatcacagaaatgcttgcagcctaaggcagggttttcagaccgtgggtcccagcccatttagtaaaatgggaaatcaattagcaagtggtcaccagcattacacagcaatgaagcagaataaagtaggccagaatgcatcatgtagtaaaggcaaatactgttttgtgaaacttttcacccatacatctaaatgtgagaactggttgcaatgtaagacatttcttgctgggaagttgtgagcaaaataagttgaaaacactaataaagatctgtctgtctgagcaaaggagactaaactccttgggctaca

SEQ ID NO: 170083 - DNA, 405 bp, Homo Sapiens
gcactcccgccgcccgcttctgcgcctgtggcttctggggctgttgcttctccttgctgggcatctccacctcctcctgccccttctggttcttcttctagttccttttctgattcttcttttcccctttttggtctctctcctcagcctctgttctcctctcctcttgctttgtaagttgcccttccaaggaagcagaaagcacgtctggcttcccagtgtctccggggaggaaagacagctctaccaggttctcctggtggttaaggcgtaggaccctggctgtgagcagcttcccttcagggaggtgtttgttataaagggctttcttggacgggctgtgctgggagacatgggagtaccgagccaaacccacaacggaggggccaaggcgaaagaacacac

SEQ ID NO: 170084 - DNA, 887 bp, Homo Sapiens
taacactcactctgttagccccatgggagaagattaaacagtaccaggccggccagactgttacttgcttcttaaagaaatacaatgtggtgaagaaatggcttgaggtggagattgccccagacatccgggggagaattcccttattgctcacttctctgagcttcaaggttctgaagcatccagataagaagttccgggttggccaggccctgagggccaccgttgttggcccagattcctccaagaccttcttatgtctgtccctcacaggtcctcacaagcttgaggaaggggaagtggccatgggccgagtggtgaaggtgactcccaacgaggggctgaccgtctccttcccctttgggaagataggaacagtcagtatatttcacatgagtgactcctactccgagacgcccctggaagacttcgtcccccagaaggttgtcagatgttacatcctgtccactgcagacaacgtattgactttgtcgctgcgatcatccagaacaaacccggagacgaaaagcaaagtagaagatccagagattaactccatccaggacattaaggaagggcagcttctgaggggctatgtagggtccatccagccacacggtgtgttctttccccttggcccctccgttgtgggtttggctcgggactcccatgtctcccagcacagcccgtccaagaaagcccttttataacaaacaccctcccttgaaggagaagctggctcacagccaggggtcctaccgcccttaaccacccagaagaaccctgggaagagcctggcctttccttcccccgggaagaccctggggaaaagcccagcaaggggcctttccctggctttcctttgggaaagggcgcaacctttaccc

SEQ ID NO: 170085 - DNA, 377 bp, Homo Sapiens
tagcttgaagggagatctcccctcatattgtcttatgcccaatttctgcctccaaagaaagaagaagtaaaatctaaaaggcagaaatgaaatccacaggcagacagccccgcgccacaccctgggcctggtagttaaagatcgacccctgacctactcggttatgttatctatagattacagacattacgtatagaaaagcactgtgaaaatccctgtcctgttttgttctgatctaattacctgtgcatgcagcccccagtcacgtaccctctgcttcctcaatccatcaagaccctctcacgcggacccccttagagttgtaagcccttaagagggacaggaattgctcactcggagagcttgtttttggagac

SEQ ID NO: 170086 - DNA, 1338 bp, Homo Sapiens
atgcgcgcgtgttacttgcagagctcaggtctcgcggccggctgggcgccggcgcctgacagcccccacctcgcaagagcagccgcggcgccactatgccgacaaaaggatcaaggtggcgaagcccgtggtggagatggatggtgatgagatgacccgtattatctggcagttcatcaaggagaagctcatcctgccccacgtggacatccagctaaagtattttgacctcgggctcccaaaccgtgaccagactgatgaccaggtcaccattgactctgcactggccacccagaagtacagtgtggctgtcaagtgtgccaccatcacccctgatgaggcccgtgtggaagagttcaagctgaagaagatgtggaaaagtcccaatggaactatccggaacatcctgggggggactgtcttccgggagcccatcatctgcaaaaacatcccacgcctagtccctggctggaccaagcccatcaccattggcaggcacgcccatggcgaccagtacaaggccacagactttgtggcagaccgggccggcactttcaaaatggtcttcaccccaaaagatggcagtggtgtcaaggagtgggaagtgtacaacttccccgcaggcggcgtgggcatgggcatgtacaacaccaacgagtccatctcaggttttgcgcacagctgcttccagtatgccatccagaagaaatggccgctgtacatgagcaccaagaacaccatactgaaagcctacgatgggcgtttcaaggacatcttccaggagatctttgacaagcactataagaccgacttcgacaagaataagatctggtatgagcaccggctcattgatgacatggtggctcaggtcctcaagtcttcgggtggctttgtgtgggcctgcaagaactatgacggagatgtgcagtcagacatcctggcccagggctttggctcccttggcctgatgacgtccgtcctgttctgccctgatgggaagacgattgaggctgaggccgctcatgggaccgtcaccccgcactatcgggagcaccagaaggcccgggcccaccagaaccaaccccatcgccaggcatctttggctgggacacgtgggccctggaacacccggggggaagcttggatggggaaacccaaaccctccttcagggtttggcccaaaaggcttggaaaaaaggtggtgcgcctggaaaaaccgtgggaaaaagagggaaaccctttgacacaaggggaccctggcggggggctttgccatttccaccgggcccctcatacaaaagtggggaaaatcttgaaaaccaaaaccaccttttcccg

SEQ ID NO: 170087 - DNA, 685 bp, Homo Sapiens
  misc_feature (588)..(592): n is a, c, g, or t
  misc_feature (598)..(598): n is a, c, g, or t
  misc_feature (618)..(618): n is a, c, g, or t
cgccactacggggagcacagaaggggccggcccaccagcaccaccccatcgccaagcatttttgcctggacacgtggcctggagcaccgggggaagctggatgggaaccaagacctcatcaggtttgcccagatgctggagaaggtgtgcgtggagacggtggagagtggagccatgaccaaggacctggcgggctgcattcacggcctcagcaatgtgaagctgaacgagcacttcctgaacaccacggacttcctcgacaccatcaagagcaacctggacagagccctgggcaggcagtagggggaggcgccacccatggctgcagtggaggggccagggctgagccggcgggtcctcctgagcgcggcagagggtgagcctcacagcccctctctggaggcctttctaggggatgtttttttataagccagatgtttttaaaagcatatgtgtgtttcccctcatggtgacgtgaggcaggagcagtgcgttttacctcagccagtcagtatgttttgcatactgtaatttatattgcccttggaacacatggtgccatatttagctactaaaaaggctcttccnnnnncccaanaaaacccctaatacacaaanccctggtggggcgcctcgggcccctcgaaaaagcctttcctaaaccttttcttttgggcgggggggg

SEQ ID NO: 170088 - DNA, 879 bp, Homo Sapiens
gcccatcaccattggcaggcacgcccatggcgaccagtacaaggccacagactttgtggcagaccgggccggcactttcaaaatggtcttcaccccaaaagatggcagtggtgtcaaggagtgggaagtgtacaacttccccgcaggcggcgtgggcatgggcatgtacaacaccgacgagtccatctcaggttttgcgcacagctgcttccagtatgccatccagaagaaatggccgctgtacatgagcaccaagaacaccatactgaaagcctacgatgggcgtttcaaggacatcttccaggagatctttgacaagcactataagaccgacttcgacaagaataagatctggtatgagcaccggctcattgatgacatggtggctcaggtcctcaagtcttcgggtggctttgtgtgggcctgcaagaactatgacggagatgtgcagtcagacatcctggcccagggctttggctcccttggcctgatgacgtccgtcctggtctgccctgatgggaagacgattgaggctgaggccgctcatgggaccgtcacccgccactatcgggagcaccagaagggccggcccaccagcaccaaccccatcgccagcatctttgcctggacacgtggcctggagcaccgggggaagctggatgggaaccaagacctcatcaggtttgcccagatgctggagaaggtgtgcgtggagacggtggagagtggagccatgaacaaggacctggcgggctgcattcacgggctcagcaatgtgaagctgaacgagcacttcctgaacaccacgggacttcctcgacaccattcaagagccaccctggaacaggagcccctggggcaaggcaagtaagggggggt

SEQ ID NO: 170089 - DNA, 267 bp, Homo Sapiens
gtcatcggaatcacccgatcacagacgagcagtcatcggactcacccgatcacagacgagcggtcaccagactcgcccgatcacagacgagcagtcaccggaatcacccgatcacagacgagcagtcatcggactcacccgatcacagacgagcggtcaccagaatcgcccgatcacagacgagcagccaccggaatcacccgatcacagacgagcggccaccggaatcacccgataacagcccatcacaactccaaagcccttggg

SEQ ID NO: 170090 - DNA, 1559 bp, Homo Sapiens
  misc_feature (25)..(25): n is a, c, g, or t
  misc_feature (35)..(35): n is a, c, g, or t
  misc_feature (43)..(43): n is a, c, g, or t
  misc_feature (46)..(46): n is a, c, g, or t
  misc_feature (48)..(48): n is a, c, g, or t
  misc_feature (62)..(62): n is a, c, g, or t
  misc_feature (65)..(65): n is a, c, g, or t
  misc_feature (81)..(81): n is a, c, g, or t
  misc_feature (87)..(87): n is a, c, g, or t
  misc_feature (106)..(106): n is a, c, g, or t
  misc_feature (111)..(111): n is a, c, g, or t
  misc_feature (116)..(116): n is a, c, g, or t
  misc_feature (119)..(120): n is a, c, g, or t
  misc_feature (122)..(124): n is a, c, g, or t
  misc_feature (133)..(133): n is a, c, g, or t
  misc_feature (140)..(140): n is a, c, g, or t
  misc_feature (145)..(145): n is a, c, g, or t
  misc_feature (148)..(148): n is a, c, g, or t
  misc_feature (153)..(153): n is a, c, g, or t
  misc_feature (155)..(155): n is a, c, g, or t
  misc_feature (164)..(165): n is a, c, g, or t
  misc_feature (198)..(198): n is a, c, g, or t
  misc_feature (204)..(204): n is a, c, g, or t
  misc_feature (208)..(208): n is a, c, g, or t
  misc_feature (220)..(221): n is a, c, g, or t
  misc_feature (237)..(238): n is a, c, g, or t
  misc_feature (241)..(241): n is a, c, g, or t
  misc_feature (245)..(245): n is a, c, g, or t
  misc_feature (274)..(275): n is a, c, g, or t
  misc_feature (301)..(301): n is a, c, g, or t
  misc_feature (313)..(313): n is a, c, g, or t
  misc_feature (342)..(342): n is a, c, g, or t
  misc_feature (349)..(349): n is a, c, g, or t
  misc_feature (353)..(353): n is a, c, g, or t
  misc_feature (1023)..(1148): n is a, c, g, or t
  misc_feature (1281)..(1290): n is a, c, g, or t
  misc_feature (1392)..(1402): n is a, c, g, or t
  misc_feature (1461)..(1469): n is a, c, g, or t
caggaggccagaatgaaaagcggancaaacggcangagagganacngntagaggaagtgagngcntacaagcacaaataanggcaanacgccagggacagtacaanagagnggaanagnnannnccaggcatncgatatnttgtnganaaatngntagaagcgnnatgaacaaatttcaacacaggaaaacaagctantgaacnaatngattacgaattnnagaagactacaggtannacncgcncaagacccgcttgtcgcactttctatcgnngatgaggactttaagaacccagtccncatacactgggngcagttaaggtcggagccatccagcgctngctgaancaantctacctaggtatgcctggttgcctgcctgtatacgacgccctggccggggagttcatcagggcctctggtgtggaggcccgccaggccctcttgaagcaggggcaagataacctctcaagtgtgaaggagactcagaagaagtgggccgagcaatacctgaagatcatggggaagatcttagaccaaggggaggacttcccagcatcagagatgacacggatcgccaggctgattgagaagaacaagatgagtgacgggaagaaggaggagctccagaagagcttaaacatcctgactgccttccagaagaagggggccgagaaagaggagctgtaaaaaggctgtctgtgattttccagggtttggtgggggtagggaggggagagttaacctgctggctgtgagtcccttgtggaatataagggggtagtgggaaaagtggtactaacccacgattctgagccctgagtatgcctggacattgatgctaacatgaccatgcttgggatgtctctagctggtctggggatagctggagcacttactcaggtggctggtgaaatgacacctcagaaggaatgagtgctatagagaggagagaggagtgtactgcccaggtctttgacagatgtaattctcattcaattaaagtttcagtgttttggttnnnnnnnnnnnnnnnnnnnnnnnnnnnnnnnnnnnnnnnnnnnnnnnnnnnnnnnnnnnnnnnnnnnnnnnnnnnnnnnnnnnnnnnnnnnnnnnnnnnnnnnnnnnnnnnnnnnnnnnnnnnnnncttggggggccgcttcgccccccgaaaagttttcaaacccttttttttggccccgggcccccttggggacgggaaccgggccataatgtttcccaggaaaacccgggcccgaaaaagggctgggatccccccnnnnnnnnnncccccgggggaaaaagagggttgggaacaatccccaggggggtccgagggccattgggggttcttcccccggggggtcacccgagcttgaaattcaaattgnnnnnnnnnnntggcatttttcccaggaggggggagaattctcaaaaagatttttgccccaatagggaannnnnnnnnaacgggggattgacgaaccccggaatgtcccggggggagatttaaaaacctctggggcgcctttgggcaaaatatatttcccccccgggg

SEQ ID NO: 170091 - DNA, 1171 bp, Homo Sapiens
  misc_feature (862)..(862): n is a, c, g, or t
  misc_feature (867)..(867): n is a, c, g, or t
gggcctctgcaggaacccggcgatatggctgccgctgtgccccgcgccgcatttctctccccgctgcttccccttctcctgggcttcctgctcctctccgctccgcatggcggcagcggcctgcacaccaagggcgcccttcccctggatacggtcactttctacaaggtcattcccaaaagcaagttcgtcttggtgaagttcgacacccagtacccctacggtgagaagcaggatgagttcaagcgtcttgctgaaaactcggcttccagcgatgatctcttggtggcagaggtggggatctcagattatggtgacaagctgaacatggagctgagtgagaaatacaagctggacaaagagagctacccagtcttctacctcttccgggatggggactttgagaacccagtcccatacactggggcagttaaggttggagccatccagcgctggctgaaggggcaaggggtctacctaggtatgcctggttgcctgcctgtatacgacgccctggccggggagttcatcagggcctctggtgtggaggcccgccaggccctcttgaagcaggggcaagataacctctcaagtgtgaaggagactcagaaaaagtgggccgagcaatacctgaagatcatggggaagatcttagacccaaggggaggacttccccagcatcagagatgacacggatcgccaaggctgattggaaaagaacaagatgagtgacgggaagaaggaggagctccagaagagcttaacatcctgactgccttccagaagaaaggggccgagaaagaggagctgtaaaaaggctgtctgtgattttccagggtttggtggggtaagggaagggganaaatnaccctgctgggctgtgaagtcccttgtggaatataaaggggggtaatgggaaaaagtggaactaaaccacgaattctggacccctgggtatgccctggacatttgatggctaacattgaccatgccttggggaatggctcctagcctttgccttgggggtaaagcttggaagccctttaactccaggggggctggggggaaatagaccccctctccaaagggatgtgaaggccttttataaaagggggaaaaaggggttggtaccttgccccccgggcccttttgcacaaaagtgtattttttc

SEQ ID NO: 170092 - DNA, 568 bp, Homo Sapiens
aagtgtgcgggatcctctccaggtctggggacagtccagcctgcagcagctgccatatgctgtggttctaatcaagggtcacctcgagcaggtccccctccatcatgagctacctccaagggggcccgggttgcctcaggcagttccaacacagggccagtcaactgtggcaacagcgaggacagcagctccagatctgagccctcctccggggctaccttctcaggactggtcacactgtctccattctccagtaagccctggaccttaggcatatccttgccactgccctctctgagggggtcagaagcaggggctgcagggtagttaggaggctcctcaggtctaggttcagcctgtagccgttggcggagctcagccagccgtcccaaaagagcagtcacatcttcagaggccagagcctgcctggcgcggccttgccagctgatggccctctctgtgaggcactgcagggcctcgccctcgggcagccgcacaggcagtctctgcagggctaccagcagtgccaggatggtctccaggcgcgggcgccttgagcgcatacaca

SEQ ID NO: 170093 - DNA, 270 bp, Homo Sapiens
ttcctcctattttctccttcctttcacctcatctttctttccttagaccccacttattccatgtggagcaggtaggtgtcgatgaggtccctgggggcgctggggtcaagggtttcacggtgcttctccacactgtggccaatgtaagcattgatttcctgtaggtttttgtaaacttgccggtgtgccccaggaaagtatttcaagaagccagagaagagctcaaacagctggctggaatatagagctgatgagtaagaaactctggca

SEQ ID NO: 170094 - DNA, 668 bp, Homo Sapiens
  misc_feature (621)..(621): n is a, c, g, or t
  misc_feature (623)..(623): n is a, c, g, or t
tggtgaccaagatggcggcggagctggtggaggccaaaaacatggtgatgagttttcgagtctccgaccttcagatgctcctgggtttcgtgggccggagtaagagtggactgaagcacgagctcgtcaccagggccctccagctggtgcagtttgactgtagccctgagctgttcaagaagatcaaggagctgtacgagacccgctacgccaagaagaactcggagcctgccccacagccgcaccggcccctggaccccctgaccatgcactccacctacgaccgggccggcgctgtgcccaggactccgctggcaggccccaatattgactaccccgtgctctacggaaagtacttaaacggactgggacggttgcccgccaagaccctcaagccagaagtccgcctggtgaagctgccgttctttaatatgctggatgagctgctgaagcccaccgaattagtcccacagaacaacgagaagcttcaggagagcccgtgcatcttcgcattgacgccaagacaggtggagttgatccggaactccagggaactgcagcccggagttaaagccgtgcaggtcgtcctgagaatctgttactcagacaccagctgccctnangaggaccagtacccggccaacatcgcttgtgaaggtcaaccacag

SEQ ID NO: 170095 - DNA, 197 bp, Homo Sapiens
gcgcacggagagcaagcgcaggcagcctggacgagaagcagaagcgagaggaggaggagaagaaagccgagtcagagcggcagcgaaaaattcgacagcaagaaatagaagaaaaactcatcgaggaagaaacagcacgaagagtagaagaatgggtagcaaaaagggtggaggaagaactggagaaaaggaaggat

SEQ ID NO: 170096 - DNA, 546 bp, Homo Sapiens
cctccagagtgctatgttcaggaagtttccttaaccccatatggcccaagagtagctcgtaggaggccctttaaagacggaacaagtaatttaccagttctactggggttcctgcccaccgtcccaaggtgggcgaggcctaggaagagggtcattcttaagccacacattagctgcactgcgtggctgcagccaaaacaaagaactgggtgttgagtattcatcaactaagaaccaaaatccagggcactcatatgtgaaggataagaacctcacttccttactcctccaaaaagaagtggggaaagaaccatcaaacctttcctcctgacttaccaaaccaggaaaacagcaggagagggtggctcaggacttagggacagggtatagcttagatggtggaaagcaaaggagagcaggaagttgtaaatcactggctaatgagaaaaggagacagctaactctaggatgaagctgtgactaggctggagttgctcccttgaagatgggactcctgtggtatcaagacctatgccacatcacact

SEQ ID NO: 170097 - DNA, 928 bp, Homo Sapiens
tctcggacgagggctgccaatggcggctctgaagagttggctgtcgcgcagcgtaacttcattcttcaggtacagacagtgtttgtgtgttcctgttgtggctaactttaagaagcggtgtttctcagaattgataagaccatggcacaaaactgtgacgattggctttggagtaaccctgtgtgcggttcctattgcacagaaatcagagcctcattcccttagtagtgaagcattgatgaggagagcagtgtctttggtaacagatagcacctctacctttctctctcagaccacatatgcgttgattgaagctattactgaatatactaaggctgtttataccttaacttctctttaccgacaatatacaagtttacttgggaaaatgaattcagaggaggaagatgaagtgtggcaggtgatcataggagccagagctgagatgacttcaaaacaccaagagtacttgaagctggaaaccacttggatgactgcagttggtctttcagacatggcagcagaagctgcatatcaaacaagcgcagatcaggcctctataaccgccaggaatcacattcagctggtgaaactgcaggtggaagaggtgcaccagctctccccggaaagcagaaaccaagctggcagaagcacagatagaagagctccgtcagaaaacacagggagaaggggaggagcgggctgagtcggagcaggaggcctacctgcgtgaggattgagggcctgagcacactgccctgtctccccactcagtgggggaaagcaggggcagatgccaccctgcccccaggttggccatgacctgtctgtgcacccgaaaagaagcggccagatcctgcccctggccaatcaggcgagacgccctttgttgagcttgtgaaggcctccctgttggtctcagggtttg

SEQ ID NO: 170098 - DNA, 1420 bp, Homo Sapiens
  misc_feature (1149)..(1161): n is a, c, g, or t
ctgccaatggcggctctgaagagttggctgtcgcgcagcgtaacttcattcttcaggtacagacagtgtttgtgtgttcctgttgtggctaactttaagaagcggtgtttctcagaattgataagaccatggcacaaaactgtgacgattggctttggagtaaccctgtgtgcggttcctattgcacagaaatcagagcctcattcccttagtagtgaagcattgatgaggagagcagtgtctttggtaacagatagcacctctacctttctctctcagaccacatatgcgttgattgaagctattactgaatatactaaggctgtttataccttaacttctctttaccgacaatatacaagtttacttgggaaaatgaattcagaggaggaagatgaagtgtggcaggtgatcataggagccagagctgagatgacttcaaaacaccaagagtacttgaagctggaaaccacttggatgactgcagttggtctttcagagatggcagcagaagctgcatatcaaactggcgcagatcaggcctctataaccgccaggaatcacattcagctggtgaaactgcaggtggaagaggtgcaccagctctcccggaaagcagaaaccaagctggcagaagcacagatagaagagctccgtcagaaaacacaggaggaaggggaggagcgggctgagtcggagcaggaggcctacctgcgtgaggattgagggcctgagcacactgccctgtctccccactcagtggggaaagcaggggcagatgccaccctgcccagggttggcatgactgtctgtgcaccgagaagaggcggcaggtcctgccctggccaatcaggcgagacgcctttgttgagctgtgagtgcctccctgtggtctcaggcttgcgctggacctggttcttagcccttgggcactgcaccctgtttaacatttcaccccactctgtacagctgctcttacccattttttttacctcacacccaaagcattttgcctacctgggtcagagagaggagtcctttttgtcatgcccttaagttcagcaactgtttaacctgttttcagtcttatttacgtcgtcaaaaatgatttagtacttgttccctctgttgggatgccagttgtggcannnnnnnnnnnnnaacctgtccagtttgtacgatttctttgtatgtatttctgatgtggtctctgatctgcccccactgtcctgtgaagacagctgagggcaaggagtgaaaaaacctattactacctagaaaaaggggtgccaaagtgtttaacctggtgcctctccaacgggactttaacattcaaccgggaacttaaccccggggccctcttgttccccttcccttttcccttcccggttttcccccaattggggaatcccaaaaaggg

SEQ ID NO: 170099 - DNA, 492 bp, Homo Sapiens
ctccagactcacggggagatgaagtttgaggtggaaaacctcatcctacacaaggactacagcgctgacacgcttgctcaccacaacgacattgccttgctgaagatccgttccaaggagggcaggtgtgcgcagccatcccggactatacagaccatctgcctgccctcgatgtataacgatccccagtttggcacaagctgtgagatcactggctttggaaaagagaattctaccgactatctctatccggagcagctgaaaataactgttgtgaagctgatttcccaccgggagtgtcagcagccccactactacggctctgaagtcaccaccaaaatgctgtgtgctgctgacccacagtggaaaacagattcctgccagggagactcagggggacccctcgtctgttccctccaaggccgcatgactttgactggaattgtgagctggggccgtggatgtgccgtgaaggacaaccaggcgtctaca

SEQ ID NO: 170100 - DNA, 322 bp, Homo Sapiens
cctaggtagcactcagaatagagccgcgtctgttttcagtgttccccctggactccgcagatttgccggcaaccagagtgacttgaactgattccaactctggcattggggttgtcctgctgccggctcctggttatgtcgggctggtggcagcccctcctgccagcaaggtacagagccccagtggctgggccggagcctgaccaacctgatctcctaatctaggttggggaacacaggagcatgacaatcacaagtcaaaattaggtgtggaaccctcagggcggagctggttgtcctgccagagatgcctgggggccgg

SEQ ID NO: 170101 - DNA, 594 bp, Homo Sapiens
gttgttgacctaaccaagcaccagacctatgctgtggtaaagcgatggctgaaggagctctatgaccatgctgaagccacgatcgtcgtcatgctcgtgggtaacaaaagtgacctcagccaggcccgggaagtgcccactgaggaggcccgaatgttcgctgaaaacaatggactgctcttcctgggagacctcagccctggactctaccaatgttgagctagcctttgagactgtcctgaaagaaatctttgcgaaggtgtccaagcagagacagaacagcatccggaccaatgccatcacctctgggcagtgcccaggctggacaggagcctggccctggggagaagagggcctgttgcatcagcctctgaccttggccagcaccacctgcccccactggctttttggtgccccttgtccccacttcagccccaggacctttccttgccctttggttccagatatcagactgttccctgttcacagcaccctcagggtcttaaggtcttcatgccctatcacaaatacctcttttatctgtccacccctcacagactaggaccctcaaataaagctgttttatatcaatgc

SEQ ID NO: 170102 - DNA, 1120 bp, Homo Sapiens
  misc_feature (14)..(14): n is a, c, g, or t
tttggccctacggncccagtaattcggcacgagggcttccttacagcacccccacctgccagagctgatcctccctaggccctgcctaaccttgagttggcccccaatccctctggctgcagaagtccccttacccccaatgagaggaggggcaggaccagatcttttgagagctgagggttgagggcattgagccaacacacagatttgtcgcctctgtccccgaagacacctgcaccctccatgcggagccaagatggggaatggaactgaggaagattataactttgtcttcaaggtggtgctgatcggcgaatcaggtgtggggaagaccaatctactctcccgattcacgcgcaatgagttcagccacgacagccgcaccaccatcggggttgagttctccacccgcactgtgatgttgggcaccgctgctgtcaaggctcagatctgggacacagctggcctggagcggtaccgagccatcacctcggcgtactatcgtggtgcagtgggggccctcctggtgtttgacctaaccaagcaccagacctatgctgtggtggagcgatggctgaaggagctctatgaccatgctgaagccacgatcgtcgtcatgctcgtgggtaacaaaagtgacctcagccaggcccgggaagtgcccactgaggaggcccgaatgttcgctgaaaacaatggactgctcttcctggagacctcagccctggactctaccaatgttgagctagcctttgagactgtcctgaaagaaatctttgcgaaggtgtccaagcagagacagaacagcatccggaccaatgccatcactctgggcagtgcccaggctggacaggagcctggccctggggagaagagggcctgttgcatcagcctctgaccttggccagcaccacctgcccccactggctttttggtgccccttgtccccacttcagccccaggacctttccttgccctttggttccagatatcagactgttccctggtcacagcacccctcaggtcttaaggccttcctgccctatcaccaatacctcttttatctgtccaccccctcaagaattaggacccctcaaataaagcctgttttttaatccac

SEQ ID NO: 170103 - DNA, 436 bp, Homo Sapiens
  misc_feature (217)..(217): n is a, c, g, or t
  misc_feature (383)..(383): n is a, c, g, or t
gcttccttacagcacccccacctgccagagctgatcctccctaggccctgcctaaccttgagttggcccccaatccctctggctgcagaagtccccttacccccaatgagaggaggggcaggaccagatcttttgagagctgagggttgagggcattgagccaacacacagatttgtcgcctctgtccccgaagacacctgcaccctccatgcggancaagatggggaatggaactgaggaagattataactttgtcttcaaggtggtgctgatcggcgaatcaggtgtgggggaagaccaatcttactcttcccgatttcacgcggcaatgagtttcagccacggacagccgcaccaccattcggggtttgagtttttccanccgcattgttgatgtttgggggcaaccgttgttgttcaagggttcaagatttt

SEQ ID NO: 170104 - DNA, 535 bp, Homo Sapiens
  misc_feature (18)..(18): n is a, c, g, or t
  misc_feature (33)..(33): n is a, c, g, or t
  misc_feature (46)..(46): n is a, c, g, or t
  misc_feature (52)..(52): n is a, c, g, or t
  misc_feature (59)..(59): n is a, c, g, or t
  misc_feature (99)..(99): n is a, c, g, or t
  misc_feature (115)..(115): n is a, c, g, or t
  misc_feature (133)..(133): n is a, c, g, or t
  misc_feature (350)..(350): n is a, c, g, or t
aaatcagcaatcgctccnaccaacaacaatagntctggtgacttgnttaagntcaaaanaccaaggagggcccccaactgcaaccacgaataataacgnccgaaggtgaatggcncggtaccgctcccaggcnagctgtgtccccagcatctgaagccttgaacagcagcggtgcccaacatcacaagtgcgggtggagaactcaaccccgatggtggtgcggctgtcgtggctgaactcattgcgcgtgaatcgggagagtagattggtcttccccacacctgattcgccgatcagcaccaccttgaagacaaagttataatcttcctcagttccattccccatcttgntccgcatggagggtgcaggtgtcttcggggacagaggcgacaaatctgtgtgttggctcaatgccctcaaccctcagctctcaaaagatctggtcctgcccctcctctcattgggggtaaggggacttctgcagccagagggattgggggccaactcaaggttaggcagggcctagggaggatcc

SEQ ID NO: 170105 - DNA, 194 bp, Homo Sapiens
cgcccagttaacatcagatcacgccaatctcagcatacagctaagactacacaacccaactgaggcaccagaaacatgaatgaagcatcttggacatcccagtcaaagccaaacccactcctgagtggatctgcatgatgaacccagcaatccgcaccatggagcaaaggatccatccagtcaaaccaaagaat

SEQ ID NO: 170106 - DNA, 1228 bp, Homo Sapiens
ggggggcgggtcctgagtcgcgaccctggtccggacctgacctgaattgcgaccccaacctggactgctcccctgaccgcaacccctacccccgcccaccagtatggcccggcacgtgttcctaacggggcccccaggagttggaaaaacaacattgatccataaagccagtgaggttttaaaatcctctggtgtgcctgttgatggattttataccgaagaagtcagacagggagggagaagaataggattcgatgtcgtcacgttgtccggcacccgggggcctttatcgagagttgggttagagcctccacctggaaaacgtgaatgccgagttgggcagtatgtggtcgacctgacttcttttgagcagttggcactacccgtcttgaggaatgccgactgcagcagtggcccagggcaaagagtgtgcgtcatcgatgagattgggaagatggagctcttcagtcagcttttcattcaagctgttcgtcagacgctgtctaccccagggactataatccttggcacaatcccagttcctaaaggaaagccactggctcttgtagaagaaatcagaaacagaaaggatgtgaaggtgtttaatgtcaccaaggaaaacagaaaccaccttctgccagatatcgtggacgtgcgtgcagagcagcagggaagtgaagacacgtgcattcctgcctttccgtgaaaggagtgcccagttcaagaggagcctgatggagccctgcctgtcgaggctgtatgcctatggggttatggaaccttgtgggcttttctagagaaaactcaacagctgtttcccataaaatgtttaaaagatcaaattagccttaatgctggattgtctgtacaagattaactatccattgtggcttatctatgcttaaagatttcttgtttatttcctcttgcagtcatgcacatgatttgggtaaactgtgagatgagaaatggttttcagagtattagatggaattcacccccgttgaagtttataaatgtgttcaggggaagcgggaggaaagagttcactgcctaatcagttttgcatgtcatgaaaattaaattcctctccaggtgcagcttcagcctcatgcaacttaaagtgataacagttatttgattttttaaaaaatattattccaaaagaaaaccattttaggtcatctcccccaactctgtttgcttactgcttaataaatataaaaat

SEQ ID NO: 170107 - DNA, 846 bp, Homo Sapiens
  misc_feature (672)..(672): n is a, c, g, or t
  misc_feature (762)..(762): n is a, c, g, or t
  misc_feature (768)..(768): n is a, c, g, or t
  misc_feature (780)..(780): n is a, c, g, or t
  misc_feature (793)..(793): n is a, c, g, or t
  misc_feature (800)..(800): n is a, c, g, or t
  misc_feature (836)..(836): n is a, c, g, or t
gggttacgaagcactcatcgggactcgtgagctcaccagcgaggcggcaaagagctggggctccgcaactcagacatggactacatccagaccgacgccatcatcaactatggaaactcgggaggcccgttagtaaacactggacggtgaagtgattggaattaacactttgaaagtgacagctggaatctcctttgcaatcccatctgataagattaaaaagttcctcacggagtcccatgaccgacaggccaaaggaaaagccatcaccaagaagaagtatattggtatccgaatgatgtcactcacgtccagcaaagccaaagagctgaaggaccggcaccgggacttcccagacgtgatctcaggagcgtatatcattgaagtaattcctgatacccccagcagaagctggtggtctcaaggaaaacgacgtcataatcagcatcaatggacagtccgtggtctccgccaatgatgtcagcgacgtcattaaaagggaaagcaccctgaacatggtggtccgcagggtaatgaagatatcatgatcacagtgattcccgaagaaattgacccataggcagaggcatgagctggacttcatgtttccctcaaaggactctcccgtgggatgacggatgaggactctggggctgctggaataggacactnaagacttttgactgccattttgtttgttcagtgggagactccctgggccaacagaatccttcttgatagtttgcaggcaaaacaattgtnatgttncagatccgcagncaggaagctctgnccttctnttttcctattgtatggcagtgttgcttttttcttgnccagctttgg

SEQ ID NO: 170108 - DNA, 716 bp, Homo Sapiens
  misc_feature (14)..(14): n is a, c, g, or t
  misc_feature (115)..(115): n is a, c, g, or t
aaggaaaacgacgnacataatcagcatcaatggaacagtccgtggtctccgccaatgatgtcagcgacgttcattaaaagggaaagtcaccctgaacatggtgggtccgcagggntaatgaagatatcatgatcacagtgattcccgaagaaattgacccataggcagaggcatgagctggacttcatgtttccctcaaagactctcccgtggatgacggatgaggactctgggctgctggaataggacactcaagacttttgactgccattttgtttgttcagtggagactccctggccaacagaatccttcttgatagtttgcaggcaaaacaaatgtaatgttgcagatccgcaggcagaagctctgcccttctgtatcctatgtatgcagtgtgctttttccttgccagcttgggccattcttgcttagacagtcagcatttgtctcctcctttaactgagtcatcatcttagtccaactaatgcagtcgatacaatgcgtagatagaagaagccccacgggagccaggatgggactggtcgtgtttgtgcttttctccaagtcagcacccaaaggtcaatgcacagagaccccgggtgggtgagcgctggcttctcaaacggccgaagttgcctcttttaggaatctctttggaattgggagcacgatgactctgagtttgagctattaaagtacttcttacacattaaaa

SEQ ID NO: 170109 - DNA, 474 bp, Homo Sapiens
  misc_feature (443)..(443): n is a, c, g, or t
aatgtgtaagaagtactttaatagctcaaactcagagtcatcgtgctcccaattccaaagagattcctaaaagaggcaacttcggccgtttgagaagccagcgctcacccacccggggtctctgtgcattgacctttgggtgctgacttggagaaaagcacaaacacgaccagtcccatcctgggctcccgtggggcttcttctatctacgcattgtatcgactgcattagttggactaagatgatgactcagttaaaggaggagacaaatgctgactgtctaaggcaagaatggcccaagctgggcaagaaaaagcacactgcatacatagggatacagaagggcagagctttctgcctgcggattcttgcaacattacatttgttttgcctgcaaactattcaaggaagggttctgttgggccggggggttttccccttgnaccaaacaaaatgggcagtcaaaagtttttg

SEQ ID NO: 170110 - DNA, 507 bp, Homo Sapiens
tgcaaagcgtagtacccaaccctcaaattgtttcgtaatgggatgatgatgaagagagaatacaggtgtcagcgatcagtgaaagcattggcagattacatcaggcaacaaaaaagtgaccccattcaagaaattcgggacttagcagaaatcaccactcttgatcgcagcaaaagaaatatcattggatattttgagcaaaaggactcggacaactatagagtttttgaacgagtagcgaatattttgcatgatgactgtgcctttctttctgcatttggggatgtttcaaaaccggaaagatatagtggcgacaacataatctacaaaccaccagggcattctgctccggatatggtgtacttgggagctatgacaaattttgatgtgacttacaattggattcaagataaatgtgttcctcttgtccgagaaataacatttgaaaatggagaggaattgacagaagaaggactgccttttctcatactctctcacatcaaaacg

SEQ ID NO: 170111 - DNA, 1162 bp, Homo Sapiens
  misc_feature (1020)..(1045): n is a, c, g, or t
gccctaacgctgcgcttgagggctcccgattctcggaatcgctgggaccggcctttattcactttggtgggcctagaggagccgttgcccctggcggggatccgctctgccctgtttgagaaccgggccccaccaccccatcagtctacgcagtcccagcccctcgcctccggcagctttctgcaccagttggaccaggtcacgagtcaagtactggccggattgatggaagcgcagaagagcgctgtccccggggacttgctcacgcttcctggtaccacagagcacttgcggtttacccggcccttgaccatggcagaactgagtcgccttcgtcgccagtttatttcgtacactaaaatgcatcccaacaatgagaacttgccgcaactggccaacatgtttcttcagtatttgagccagagcctgcactgaccagaggaggtaggggggaagccatggcttctgatctccactccactttatttccctgggaaaaataggctgcaggtctccagagcatatcgatgcagtactgtactagagctgttgtgactgattcactcaaactttcctgcatacccctgtgccaggccttgggtttacagcataagttcagactaaagagaatggagaactattgtggtgcaacctggcaaatccctcagaggacagagctaaggtggacagggattacctagattggatcctacttgggctatcacagagcattgaccattggcttccctcatctgaggcgtgggagagcagactggatagatgagaattgttttaaaacaattgtgaacagaaactgaagatggtacagttctacatctgcacctgcccttttttcataccacaaaagtattttttgagtactgtactgactttttgctagtttctattctgggaccgagttcacagataaatccattggtttgtatccttgagaaactttgtttttgtggaagtaagaaagttatctactagattatttcctctaataaaatcttttannnnnnnnnnnnnnnnnnnnnnnnnnaacatggtcggcccgcctcggcccctcgaggaagctttctaagaccaattcgttttgggcgcgcggggccccagaagggtaattggaacatgggtccataagctgtttttcctaagg

SEQ ID NO: 170112 - DNA, 526 bp, Homo Sapiens
ctgaccaaagcgtataccaatatttaattagtgtgaaaggaaacaaagaatgcaggaaaaataatttaatatcaacctcagttgacaaggtgctcagattattcaattcgggatcctccttttgttaggtttttgagacaaccctagacctaaactgtgtcacagacttctgaatgtttaggcagtgctagtaatttcctcgtaatgattctgttattactttcctattctttattcctctttcttctgaagattaatgaagttgaaaattgaggtggataaatacaaaaaggtagtgtgatagtataagtatctaagtgcagatgaaagtgtgttatatacatccattcaaaattatgcaagttagtaattactcagggttaactaaattactttaatatgctgttgaacctactctgttccttggctagaaaaaattataaacaggactttgtagtttgggaagccaaattgataatattctatgttctaaaagttgggtactacgctttgggcaggtaccgag

SEQ ID NO: 170113 - DNA, 1606 bp, Homo Sapiens
tgcaaagcgtagtacccaatgactatttgctgtggaataagctaggcgccaccctggccaatggaaaccagagtgaagaagcagtagctgcgtaccgccgggccctcgagctccagcctggctatacccggtcccgctataacctgggcatcagctgcatcaacctcggggctcaccgggaggctgtggagcactttctggaggccctgaacatgcagaggaaaagccggggcccccggggtgaaggaggtgccatgtcggagaacatctggagcaccctgcgtttggcattgtctatgttaggccagagcgatgcctatggggcagccgacgcgcgggatctgtccaccctcctaactatgtttggcctgccccagtgacagtgggacgggctgccctgtgagtgtccacctggagggatccccgctttggatgtgattccctctccccaaatgggcctaccaagggggcgggctgatgaccataagcggtacggcctttcaggagctgcctcaacgtaggggtgggtagtctgtgttctagttcctacataattgtaggaaaatgagctgtgtcatctctgagtcccttggtaattcaagggctgtacatccagctacagatctctctgctcatcatgccctttcttggtgctgctttttgggtaggaccccacgatttagggtaactgttatcatcagctgccatttctgatagggtctaccacatctgtaatgtctgtcctttcccccacttttactgggaattgatagtccagcttccttgggcagtgtaagtaggaggttcatctgctgtgcgcctctaatgtctgtctggatgggatgtgttaggagtggcctgtgggttgaatgttgattggctgagcagagctgagtttggtaggagtgctcatggttctgtcattcttggacctctcctggctgagctctgattccctgtgagcacgatgctgatgcaatagtcctgtgtcatcactgcagcggtcctcaggagctgccaggccaattgctacagagtgtctgggtgtgtggcataggaggaaggtttgcttgtgaaatgaggctgggtgggagcggggagggactagatcagaagagatcaagggctgtattcaggaacgttggtgggaggacagagcaagtgggaagggggtatggtgagtgcggcaatccctcatcctcttagaagcacctgtgaatgggaattgagccaactgttatagaaaattggttcagaaagtgcaatcttgccagatttctagcaaataggttcagtgttaccataagcctttgctgtacttcttgaaatgtttctaggggagagcatggaaaatccccttcccccatctagatcgaagggaagatgaggggagcagcttggattcttctcagttgtcccctgcatggggagatacactaaccccagaaatgactgctaaggcctcttgcctggtctttagtagcttaatgatcagagagattttttttaaactaacatggtcccaggattccatctgaaattatttccttgtatgaatttgtggtacctgatttaaataaaactgtacaaatattggcgaagaata

SEQ ID NO: 170114 - DNA, 853 bp, Homo Sapiens
tgccaaagcgtagtacccaactgagccaagggaactgttgaaatttccttgtatggcatctttaacaatttgtttggccacctgttctggtttgcacacagatgtggtctctgaaataagtcgagtctccaaaggctttgttctgttttcttcggcaaagccaggtgtgtctgtgtctggtgggtaagcaactgtgatgtagacattatatggcttcacctccatctgcaaagcttctgccaatccccttatggcaaacttggatgcagagtaggctgtgaaaccgaataatcccaactgtcctgcctgggaggacacaaacacgatcctgcccacccggcgctccttcatggtggtgatcacggcccggctggggtacacgctgcccaggtaattgatgctcattaacctttcaaaggtactaacttcaagatcttcaaattttcctgacactgccattcctgcacaatttaccagcatgtccactggacccagtttctcctgtgcttgttttatgacattctctacttggttatagtcttgagatacatcaactgatatgcaaagcaccacctgtttgtcattaatagagtgcatttcaatttctttctttgcctgcagcagcttatcctcatttcgtgcaaccagagttataaaagctccttgtttatagcactcgatagcaatgcacttcccgatgccactggaacctcctgtaaccaccacatgcgccccgggcagggcgaggggcttggggctgatgagcggagacaccatgtacagcagcagcacgaaggccacgaggaaggcggcagccagcagcagcatcgctccgcggggccaggggcccgga

SEQ ID NO: 170115 - DNA, 945 bp, Homo Sapiens
tgtacacaaagctatacccaaacaggcaccagatctagtcgggaggggacccaggatggttagggtggatcaggacctagagagcagcaagtctcccaactccagtgcctcacctcagcatctggccggcacagcttggccccaagtgcaaatcctgcaccaactcccagagtcccaaaggcccctaagaggaccaagagcaggtgggtgtgaaggcgtcctgatggatggtgcccactgccccaggcgggggcccttccttaccaggatcgagccagcgcagggggccgcggggctgtaccagatgggcagcagtgcccacgaagtccccaccatccaccaccagaattgagttgtcaggtagcgtttcctccaccagctgcagcacctgcactgggttcaggtgctgggccacaggcatcgctgccttctcccgaaaggtctgctccttctgccggtcggcttcccgcagctcctccacccagtctggggcccaggtctggccctgaaggccctccactaacttcagcacgaaggaacccacatctccctgcacagcctcctggggcttccagaagatgtctgagttgagcaacatctcttcccgattacgattgacgatgatgatcttgctgctgtggctgaggacacggccataggataggcggaagtcacacacagttcctgctaggacaatgacgtccgccttcttcagggccgcactgcggttctcccggatgtggagggggtggttgcggcctaacagcccccgtgccatccctccaaggaagcagggaacacccaaggtctccacggcagcccgaagcttgtcggcagacgttggggtgagcagggcctgactccccagcaccatcagaggcctcttggcccggctcaggatctccacacagcgctgaaccctcgtgccgaattcgccacccaggc

SEQ ID NO: 170116 - DNA, 713 bp, Homo Sapiens
  misc_feature (672)..(672): n is a, c, g, or t
atgcaagcgtagtaccaagaacctcggaagacactccatcccccaccatcatgaatactgagcttgcacacttggggacctgccccagcgtgaggtcaggggagtgggttaatgcattctggaaaaggggattacttgattactgtcccccaagtccccacagccctggggtccatgcagagaccacagtgcaagagacgtggctccccgctgagatccagctgatctgaccgggcagtcactttgtcactcagaaacagagatgcgattgaagatggggagatcgccggggggctgccacgggctggggtggtgcaaaaactcccgcctcgaagacgggagagtcagagccccaccaggctgctgccgctgctggcatattcatcagggtcggatcccagggactgtacagagggggtccgaaccaggccacccaagggcccccagacgctgataggagtggcccttcggcaggaggggcaacagactggggtggggtctcttcgagccaggtgggtgccaggggcagcagagaaggcagagggtgacagtggaaggtccccaggtggtggtggggaactggagggcgagaaggagctggaggacagggaagggccggcccaggcctggtggtggtggtgaggtccggcggccagagggcaggccggagangctgatgctctggcgaagcacaggaggggtgcccggggccg

SEQ ID NO: 170117 - DNA, 313 bp, Homo Sapiens
atgccaaagcgtagtacccaagtagtgctgagagaacaggggatggattggtcagactgaacatgctcacaaatagccccaaggaagcccaaaccttctcagtgaggagacttttaaggccaaatttcactctatattctggaaaaacaaatgaaatatgtactagattagaatgctatttcaggaaattaattatgtacacagacagcaaattaaatatatggtcccatttggtaactacagaggtaagaaagtcttaagggattaaaccaagagaaaagctgctgcatttgggtactacgctttggcagga

SEQ ID NO: 170118 - DNA, 435 bp, Homo Sapiens
gcttataacaccccttggcatacctcttcactaccccagaggtagagttaacacagagtaatctcagagagtaacagaaacctaaggcaatctgggcatgtttcctctgtgcaaccaaaaagaaactaagtagcactgctatcatttattaactacttactattctttcattaatcaaatatttactgagagccaactatgtgctagccattgtaaatggtgaagatggaacaactaaacaaaaagacaagtcccttctttcacaagcttgagtctagttacaatgaagaaaattaaagtgcaactacacatttcatgcatagataggtagaatatacatatcttctaatcaaattgctttcacacaacatatataacttaaaatcctctattttcatttaatatgacattgtaaactctcatctccttccttcc

SEQ ID NO: 170119 - DNA, 245 bp, Homo Sapiens
ggcatgtgggtgctgacttagcagccctgtgctcagaggctgctctgcaagccatccgcaagaagatggatctcattgacctagaggatgagaccattgatgccgaggtcatgaactctctagcagttactatggatgacttccggtgggccttgagccagagtaacccatcagcactgcgggaaaccgtggtagaggtgccacaggtacctgggaagacatcagggggcctagaggatgtcaaa

SEQ ID NO: 170120 - DNA, 465 bp, Homo Sapiens
tggaatgtgggacgatcactctgattggggcaaccactgaaaacccttccttccaggtcaacgctgctcttctgagccgctgtcgagtgattgttcttgagaagcttccagtagaggcaatggtgactattttaatgcgagcgatcaactccctgggaatccacgtcctagactctagccgtcccactgaccctctgagccacagcagcaacagcagctcagagcccgccatgttcatagaggataaagcagtagacaccctggcttacctcagtgacggtgacgcccgagctgggttgaacggactgcagctggcggtgctggctaggttaagctctaggaagatgttctgtaagaagagtgggcaatcctattctcccagtagagttctgatcacagagaatgacgtgaaggagggcctacagcgatcccgatgagttgcattggggaaactctgggacagcc

SEQ ID NO: 170121 - DNA, 425 bp, Homo Sapiens
  misc_feature (206)..(206): n is a, c, g, or t
  misc_feature (211)..(211): n is a, c, g, or t
  misc_feature (298)..(298): n is a, c, g, or t
  misc_feature (303)..(303): n is a, c, g, or t
  misc_feature (383)..(383): n is a, c, g, or t
  misc_feature (393)..(393): n is a, c, g, or t
  misc_feature (405)..(405): n is a, c, g, or t
acctactatgagacgtgcgcgacctacgggctcaatgtggagcgtgtcttccaggacgtggcccagaaggtagtggccttgcgaaagaagcagcaactggccatcgggccctgcaagtcactgcccaactcgcccagccactcggccgtgtccgccgcctccatcccggccgtgcacatcaaccaggccacgaatggcggcggcangcttncagcgactactcgtcctcagtcccctccacccccagcatcagccagtgggagctgcgcatcgagaccatcgctgccttctccacccncacanccattcgaaagcagttcaagcggcgtttcaaacatttttaaggttaatgaaaccggcggccggaagttgttttttgcccnaaggggacanagaggggtttangttggcccagttagaattca

SEQ ID NO: 170122 - DNA, 458 bp, Homo Sapiens
  misc_feature (360)..(360): n is a, c, g, or t
  misc_feature (391)..(391): n is a, c, g, or t
  misc_feature (411)..(411): n is a, c, g, or t
  misc_feature (433)..(433): n is a, c, g, or t
ttcggcacaggccaggacgtggccagaaggtagtggccttgcgaaagaagcagcaactggccatcgggccttgcaagtcactgcccaactcgcccagccactcggccgtgtccgccgcctccatcccggccgtgcacatcaaccaggccacgaatggcggcggcaggctttcagcgactactcgtcctcagtcccctccacccccagcatcagccagcgggagtgcgcatcgagaccatcgctgcctcctccacccccacacccatccgaaagcagtccaagcggcgctccaacatcttcacgctaatgaaccggcggccggaaggtgtttttgcccaaggcgacacagagggttagctnggcccagctaggagttagagcccagggtttncccgttcggctttccgggtnttttttccgtttaacccattgnccgagggggaaaatttattggtttt

SEQ ID NO: 170123 - DNA, 430 bp, Homo Sapiens
  misc_feature (37)..(38): n is a, c, g, or t
  misc_feature (63)..(63): n is a, c, g, or t
  misc_feature (294)..(294): n is a, c, g, or t
  misc_feature (296)..(296): n is a, c, g, or t
  misc_feature (301)..(301): n is a, c, g, or t
attctcatctgagagcagatcccagggcccggtcaannaatcggccccgcacaggggcattgntccagaggtgctgtgtgtcaccaactggtcttctaatttggaaggagttggaaaggcctttttgttgatgaaaagttggaaacagtggcacatatctgagagggaggaacgaggcagcgtggtgaagcccaggaaaagatggctaagcctttgttaaaccaatcacagcggtgggtggaaagcatgaattttcccctcggcagtggggtaacggaaaaagagccggaacgncngaggngaggcctgggctctgactctagctgggccagctaaccctctgtgtcgccttggggcaaacagccttccggccgccggtttcattagcgtgaagatgttgggagcgccgcttggactgcttttcggatgg

SEQ ID NO: 170124 - DNA, 234 bp, Homo Sapiens
gtactgatcgctaggaggcccctgtatcagttgctgctgggtggagcagtggtgttgtgttcagctggaggatgaatcagtgtcagaggtgtacactacttctgcgtctctgcagcttccgcaacgccagcgaggtgcccatggtgcttgtaggcacgcaggatgccatcagcgctgcgaatccccgggttatcgacgacagcagagcccgcaagctctccacagatcttaagc

SEQ ID NO: 170125 - DNA, 221 bp, Homo Sapiens
cttattggggtctctgggtccctaagtccactcgcctgcatgctaggcctcagcattcggagctcccaggaggaggagccggtggacccacagctgatgcgcttggacaacatgcttctggcagagggtgtggctgggcccgagaaagggggcggctcagcagcagcagctgcagccgctgcagcctctggtggtggtgtgactccttgtcaacagaataa

SEQ ID NO: 170126 - DNA, 184 bp, Homo Sapiens
acttattctgttgacaagtagcgtgggctgcagaagccctatttgaagtaacttaaaaggcaaatttgactcacatgaaaggcccagagctagaatcgtagctttaaacgaaggtgaatacagatgttcacacagaactgcattatttctggatggtccagcttataaacaaattatttcttag

SEQ ID NO: 170127 - DNA, 231 bp, Homo Sapiens
tgaaaggagcggtattatacctatgatgtatttgcaggcaaatgagatggagccctctctgtaaagaagagtcattagagcaagtagacggggtctgtgggtgcaggccctggaggggcacacaattgcctggaggcttctgtgagatcgggagagggaggagaggcagtctcttgacaaaataaagtatttttattcatttgtatttattaaatgaaaaaacaatctccc

SEQ ID NO: 170128 - DNA, 513 bp, Homo Sapiens
agtgtgctacatggctcgtgagcacaatgcacgcgaccccactacaacccaagggccccagaaaccctccctccctaaaggcctgggcggctgctgctccaagagagggaatgagggaaaggtgggtggatggagagaggcccccagcctaaggacccaggctcctgccttcccaccacccgtccaggaagcagtcataaagtgaaagggctccagaggtgatgctcacagccctgggttcggctccattctgacctccctgaagcgctgggttagacgggcaccatcagcccacctcacaggctcggcgtcgggtgagctcgtggacgctaatgctttctgtccactctgaggtgctgctccagatgtggggccctcccagagggcctcggagacaccataggggaacagggagaggggctcggtccctgggcctgacacagcactgctgctcaataaataaatgcaggtgaccttgcctgacgcaacagctgtgcctccagagggggtggg

SEQ ID NO: 170129 - DNA, 967 bp, Homo Sapiens
  misc_feature (501)..(501): n is a, c, g, or t
  misc_feature (717)..(717): n is a, c, g, or t
  misc_feature (888)..(888): n is a, c, g, or t
cttctagtgcagttgagacctggccttcctgttgtgcttttcatgactgttgttttcagaatgcttttatctcgagtgtgcccttcggccctcacaagagcccctggggagtaggtggtggcctgtgccgtcatccccatttcaaagcagggagctgaggtcctgggaggggaaagtgcttgcctgaggtcccactgtgttagtgggtgggcaggactggaactcggttctccaacagcccagagctcactcttttacacccagaggtggagcaggtggcttagggggtggttatgtacttcacaagccaattcccttcagccaggagctcctgggtgcatttccgtgtcagaaacagtaccgagtcccaccccctctggaggcacagctgttgcgtcaggcaaagtcacctgcatttatttattgagcagcagtgctgtgtcaggcccagggaccgagcccctctccctgttcccctatggtgtctccgaggccctctgngagggccccacatctggagcagcaccttagagtggacagaaagcattaacgtccacgagctcacccgacgccgagcctgtgaggtgggctgatggtgcccgtctaacccaccgcttcagggagggcagaatggagccgaaacccaggctgcgaccatcacctctggagccctttcactttatgactggctcctgggacgggtggtggggaaggcanggaacctgcgatccttaagtctggggggacttttctacattccaacccaacatttcccttctttcccttctcttaggaactaaccaaccaccccccatgccctttaggggaagggtagtgtattatctacaccaccccagcctccgtataaccgcacgccgccacatatgncatccacctgccacctgcacgaacccgcgccatccatgccaccacactattaatatacgcatgtgtcagcacacactgc

SEQ ID NO: 170130 - DNA, 714 bp, Homo Sapiens
tttccttgcagtactgagcacagtctcatcgcactcttccggtcggagccccagcgaatgcgggcgaaaccagtgatcttgttctcgatggcccaccagccttgccagaggtacacctcgtggtgattgtcaacaaggaaaagtgctgtgagggcagggacagggccagaccatcaggagctccttcacggacacttctagctcactcctcccccaacctagtggatgttgtccctcttgactgcagtgtcacagggggaaacccccttggccatcaaaccaggggcaaaggggcaaacagagaaacccaggataccccagccctttgacagttcaacggggagaagcctgtaggcagagagaagtggtgtcaaggagttggtctttttcattcctcgtcctccaggtcctcctccctttgccccagctcaaggccctggcccttctggatactggcagggctgtgctaagagtggaagggataatgcatgtgccactcaaggggctgttagcaccgcatatctccaaagagcacaatcaacactggagcgcacatctcactgcagacaggtcagtggcgctcctgccctgcacgcgattgcttagcagtgaggtgagctcatggctctcttacagagaaatgggccttaaaaagcaaactgccaccgggagtggtggctcatgcctgtatcccaggcttcagatcctgctacc

SEQ ID NO: 170131 - DNA, 146 bp, Homo Sapiens
aaggcacactttcagatgtagctgggtcaacttgagcaaatgacttagctattccagacttgagttcatctataaagaggtcacagtatctgccttgcctgtttgttgccatgatcatgaaatcagtggtagcggctaccgagctc

SEQ ID NO: 170132 - DNA, 953 bp, Homo Sapiens
  misc_feature (793)..(793): n is a, c, g, or t
ggggctactgagcagcgccatggaggactctgaagcactgggcttcgaacacatgggcctcgatccccggctccttcaggctgtcaccgatctgggctggtcgcgacctacgctgatccaggagaaggccatcccactggccctagaagggaaggacctcctggctcgggcccgcacgggctccgggaagacggccgcttatgctattccgatgctgcagctgttgctccataggaaggcgacaggtccggtggtagaacaggcagcgagaggccttgttcttgttcctaccaaggagctggcacggcaagcacagtccatgattcagcagctggctacctactgcgctcgggatgtccgagtggccaatgcctcaactgctgaacactcagtctctcagagagctgtgctgatggagaagccatatgtggtagtagggaccccatctcccatattaagccacttgcagcaagacagcctgaaacctcccggactcccctggagcttttggtcggtggacccaagcctgaccttccttttttcccttggggctctccaagaaaaagcttcaagaggcctccctcctggaactttggccccgggattttacccaggggcttttctctcaatgcgccgcccatacttttttaacccaaggaacccccaccaaggcccactccaaagaagcttgaatatttcaccctaacaccccggttttaccccctctatagtttaatatggcacctcccacacctgtctcttggcggcccaggacccccctttacacaccaantttcctccgggcgggcccctggggagacacaccggaagggaaacaacacacattccccacccccgccccgggaatggccccccgcgcttcacaccttgcgccaatttgggactcccgggggccaaggccccccccggcaccctctttcggcccaacgcta

SEQ ID NO: 170133 - DNA, 920 bp, Homo Sapiens
  misc_feature (809)..(868): n is a, c, g, or t
aaaggggaatgggggtaaaaacaaccagggacccagggtgaggtgggcctcccagggtggactaaaccggtgacctttttcccacaggcggaaatattcttataatccaacccaacccaggagggccctggaggacacagggctgttgcgtctcccaggcagagggtcggtaggggaggggctgaaaagattggctgctcggttcaaatccttctgacttgctggcaagccttgctcctcgacagaagtttggggtggggggcagaaaactccaagcagatcccccagcctcggagcctggcctgagttccatgctgcacagctgctgctggtggcctgctccattgccctagcctcccttgtgggtgacactacacagtcaccctcccaagctgcctccaaggacgcctggttcccctccattctccaccctttccatgacgatttgggggaggtggagcagtggctgcggaaaccagcagccctgtttgggaggcggtgccggtggtgctcagggagggggcatggggagagctggaaatccaggacaaggaggccccagccctccctcaagctcccctaggctcgaccctatagatgcggagtgatcgcccatgaggaatgagctgtccttcctttgttccagcggcctgaggacaggcaaaagggcagagggcaggggccagcaacaggaagttgggctgggtggcaaacagcaggcccctcgtggcagatttcacacctctcctgccctggctggccccagcttttcctccagaaagatccctgccaagaattagccaagaagnnnnnnnnnnnnnnnnnnnnnnnnnnnnnnnnnnnnnnnnnnnnnnnnnnnnnnnnnnnngattacacattctgtacacagctaacaacaacaaaaaagggacaaaacccca

SEQ ID NO: 170134 - DNA, 404 bp, Homo Sapiens
ccccagttggtccgggcctggtcccccagaactcccgaccccctgatcccgccctgccctggccctcccccaaagtgatgggatttaccagatgtgaagcccacccgtgccctagcccaaggatgagatttttaaagtatgtttcagttctgtgtcatggttggaagacagagtaggaaggatatggaaaaggtcatggggaagcagaggtgattcatggctctgtgaatttgaggtgaatggttccttattgtctaggccacttgtgaagaatatgagtcagttattgccagccttggaatttacttctctagcttacaatggaccttttgaactggaaaacaccttgtctgcattcactttaaaatgtcaaaactaatttttataataaatgtttattttca

SEQ ID NO: 170135 - DNA, 671 bp, Homo Sapiens
acgcgcacgcggtcaaaatgcaaaacaaaaaatacagagaaaagattcatttctacccgttcctcatcttcctagaggcattcattgtgaaatgcccttttagaaaacacttttaattagtatatagtaattcagatactcaagaacctaccggtctacacaagagtttcccatctttgtatgctaccaagccattttctggaaacacataatcgtatttttcaaccactacaatcaaaaccaaaaaaacacttagaatgcaaagaatcaaaacctgtgtttttactccttgattaacaatgaccaccaataaaaccgctaaactccagcaaggactgtgaaagactatctcatcttacagactaagagaagagtatggaaaaaagttccttgtttttttaatggctcttttgggttacacatttaaacgatgacgactgggcaggagattagggacttggtgacaggttatcttatgtccctgacttcagcctgactgtctgtagaggaagatactcgtccatgatgctgatggttcaccagcagcaaccagggcagtgtgaaaatgcagattttccaagactttgctctctcgcttcctgaatcagaatcgctgagggacaggctaaatatatttttaaaaaaactctttgaccgcgcggtgcggcgtg

SEQ ID NO: 170136 - DNA, 624 bp, Homo Sapiens
  misc_feature (581)..(581): n is a, c, g, or t
ggtaccgactactacgtgtccgcttactcagtgtgcttcccatgaggattcttctatagctgtctcggtcgatgccccacaatttcacatttgtctttgctttgacagtggctgctctcggtgttccataaatcaaagcaagttctccaaagctccctccttccccaacactggttgcccattcattgttaacatagacatccgtctctccttgatcaatcacatagaagttatccccttcatcaccttgctgaatcacagtctctcctgcgataaaggagaccgaaaacatggcatcaaaaatatcacttctctcattatcatcaagatgtgaaaacagcacattcttttcaatggctttggctaaagcggccattgtcttgtaatcttttggtataacctttctaacataggatgccgcatcttcctccgtgtagacctcagcgctgatagcacctcgtcgcctcctacctttaaccactgggttgggtggaggaggagaaatctcatcctcccttgagtctgtacgagtgcctgctttctgcagattctgaatctgttttgcctcctccttctccaanctctcaaagtattccctgaggaatgtcatgggtcaccagtcgt

SEQ ID NO: 170137 - DNA, 329 bp, Homo Sapiens
  misc_feature (174)..(174): n is a, c, g, or t
cacgctgcaccgccggttcaaagcagtcttccaaacagaagaaggcccattcaaactgctatcccgcaaaaataaagaggcaaacgcagtgctggctcggctgaacagtgagctcccagcagcaactcaaggaggttcatcaagaacgaattgcattggaaaaccaattggaancaacttcgtccggtcactgtgttgtgacccccccatggttcaagtgacagtgggtgaccttgtctgccaagatctttcctttgaatgttttgaacccaactacttgtcatagatgtttgactgtgtcaaaagctgtgagcagcaaaatataatcc

SEQ ID NO: 170138 - DNA, 382 bp, Homo Sapiens
tctagaggacccccacgccgcaccgcgcggtcaaaatatatagaaaagtcttctacgaactttcagagtctgtccaacttatgaaacatgaaacctaagataattctaaaataaatcctctgtcatctccatgtctctatctggacttggtgcttctatctccagccttccacctcgctaaggtcccacttcacctgaagttcagttcaaatcaatccagcttgtcttcatttaatcatctagtgcccagctagtactcggggaaaaaaggatttaaaatcattccatatacttttttttggctaatacttagaaagtacacaggaacgttgtccgatgctgagaatttatagagggcattctcttttaaaatcagtccctg

SEQ ID NO: 170139 - DNA, 471 bp, Homo Sapiens
  misc_feature (100)..(182): n is a, c, g, or t
atcaaacagttctcctgccgtcagcttcccaagtagctgggattacaggtgcacaccaccacgcccagttaatttttgtattttttaagtagagaaggtnnnnnnnnnnnnnnnnnnnnnnnnnnnnnnnnnnnnnnnnnnnnnnnnnnnnnnnnnnnnnnnnnnnnnnnnnnnnnnnnnnnaacatgggtgagccaccgtgcccggcctcctaaatgctttttatctgacttaaggtctgtattgattgtgctggagggtgtaatgaggcaaaagcccaaccactacttcccgtccagggtcaaggcctgaaccagtctttcaggttaaattttagagtgtcctggccaagaaggcagtccattcagatggttggggggccttagaattttatttttggtttacaaatgaaacgtggagagaaaaaccctcaaacatttgaaccggcggtgcgacgtggggtaccgagct

SEQ ID NO: 170140 - DNA, 433 bp, Homo Sapiens
  misc_feature (165)..(196): n is a, c, g, or t
cacgagcgagcaaactgtgtgagtaagtgtgtagagagcagagagaaggaaagagagactgacagacacagttggggaaatggtagtgtaagatttaagagagagatcaactatattccatgtatggactttacttggatactgattcaaactgtgcatgtatannnnnnnnnnnnnnnnnnnnnnnnnnnnnnnncatgcatgcgcgagagagagagaaggaaagagactgacagagttggggaaatggtggtgttatgtatttttttcaaaagtccttaacacttagaggtatataaggaaatatttctgggtgatctgatatctggggtttgtttcagaataattcagtaagggtggaagagacatggatgaagtataattgaaacaggattagctatgagttgatcattttgacacgcgcgtgcggcgt

SEQ ID NO: 170141 - DNA, 414 bp, Homo Sapiens
  misc_feature (141)..(149): n is a, c, g, or t
  misc_feature (199)..(254): n is a, c, g, or t
tcacgccgcaccgccggttccaaaggtgagaaggtggaatggaagtattatttgtgtgagatcccagcaaaatatacgatagggtataatatgtaaaactagacattgaaagctaaaaatgaatgttgaaagcctctaggnnnnnnnnngcactcaaaattctaaaaagtgccgtaatatttagccagtagtagaagtnnnnnnnnnnnnnnnnnnnnnnnnnnnnnnnnnnnnnnnnnnnnnnnnnnnnnnnnaaggatagataagagaaacagaataaagagcaagatgattgctacaaacccaaatatatcaataattacaacaatgttaatggcctaaatacttcagtaaaaacacagaagaaaccaggcgtggtggcgtgatgcctgtgatgccagcactttgaacgtc

SEQ ID NO: 170142 - DNA, 425 bp, Homo Sapiens
tctagaggtcccccacgccgcacgagcggttcaaaggggggttgttctctggcgggcagagtcggggtcataaggtgctcagtaggggagcttttgagccaggatgagccaggagaaggaatttcacaagacaatgtcatcagttaaggcaggaacaggccattttcgcttcttttgtggtggaatgtcatcagttaaggcacgaaccggccatctggatgtgtacgtgcaggtcacaggggatatgatggcttagcttgggctcagaggcctgacattcctgtcttcttatattaataagaaaaataaaatgaaataggggtaaagtgttgggacagcaaaaatttttgggggtggtatggagagataatgggtgatgtttctcaaggctgctttgaaccggcggtgcggcgtggggtaccgag

SEQ ID NO: 170143 - DNA, 405 bp, Homo Sapiens; identical to SEQ ID NO: 5023

SEQ ID NO: 170144 - DNA, 295 bp, Homo Sapiens
  misc_feature (19)..(19): n is a, c, g, or t
  misc_feature (41)..(41): n is a, c, g, or t
  misc_feature (49)..(49): n is a, c, g, or t
aaacggcccaatttcaacntcctttgcggtggaatgtccancaattaangccaaggaccaacccaatgaacacttcccttgtggtggaaatgtccatccagttaaaggcggggccaggaacattttccacttccttttgtgaatccttcaagtttacttcaaggcccatctgggcatatacctcgcgtcaggtgctcccctagaattcctggctgcagggagtcctgtgggaagacggagaacaccaccgcaggctttccacacaggggtctggatttgtctgtgaaattcagga

SEQ ID NO: 170145 - DNA, 391 bp, Homo Sapiens
  misc_feature (23)..(23): n is a, c, g, or t
ggcgtgtgccactgtcgggcctntgagcccaagccaagccatcggatccccctggccttgcacatatacacccagatggcctgaagtaactgaagaatcacaaaagaagtgaaaaggccctgccccgccttaactgatgaaattccaccattgtgatttgttcctgccccaccttaactgagtgattaaccctgcaaattttcttctcctggctcagaagcacccccactgagcaccttgcgaccccccactcctgcccgccctttgactgtaattttccattaccttcccaaatactataaaacagccccacccctatctcccttcgctgactcttttcggactcagcccacctgcacccaggtgaaataaacagctttattgctcacac

SEQ ID NO: 170146 - DNA, 533 bp, Homo Sapiens
cctgcggtggtgttctccgtcttcccacaggactccctgcagccaggaattctaggggagcacctgacgcgaggtatatgcccagatggcctgaagtaactgaagaatcacaaaagaagtgaaaatgtcctgccccgccttaactgatgacattccaccacaaaggaagtgtcaatggctggtccttgccttaactgatgacattccaccgcaaaagaagtgaaaatggccggtccttgccttaactgatgacattccaccgcaaaagaagtgaaaatggccggtccttgccttaagtgatgacattaccttgtgaaagtccttttcctggctcattctggctcaaaatcacccccactgagcaccttgtgacccccactcctgcccgccagggaacaatccccctttgactgtaattttcctttacctacccaaatcttataaaatggccccacccctatctccctttgctgactctctttttgggctcagcctgcctgcatccaggtgattaaaagcttaaataagctcac

SEQ ID NO: 170147 - DNA, 423 bp, Homo Sapiens
  misc_feature (98)..(192): n is a, c, g, or t
acgcgcacgagcggtcaatgattctcctgctcatcctcccgagtagctgggattacaggcatgtcccacacgcctggtaattttgtaattttagtagnnnnnnnnnnnnnnnnnnnnnnnnnnnnnnnnnnnnnnnnnnnnnnnnnnnnnnnnnnnnnnnnnnnnnnnnnnnnnnnnnnnnnnnnnnnnnnngtgtgagccaccacacctggctgtgtaaatttttaatcatttaaaattgtacatgctttaaaagaatgaataaggaataaataattaagagtagtttatgcaactgttaataatttcaggataatggaactaggacttctcagtgcatgaggtggggtggagacggcacgttaatcgtggaatcacaactctgccacatacttgtgtacaccttgaccgccgtgcagcgtg

SEQ ID NO: 170148 - DNA, 295 bp, Homo Sapiens
tcacgcccggaccgccggttcaaaccagtgattaccccacttatattgattgatgtctcatgtctccctaaaacataaaaccaagctgtaatccaactgccttgggcctgttctcaggacctcctgaggctgcgtcactggtcatgattcttaaccgtggcaaaattaactcctaaattgattgagacccgtctcaaggtactttctggtttacattctgtattctcatattagtgttaagaatctgagtgcgccagggagatcctcaggaatatatttgaccgtcgtgcagcgt

SEQ ID NO: 170149 - DNA, 346 bp, Homo Sapiens
ggttcaaagaaaccttgatttaaccaaatcaaaccactgtgccaaggtcaaaacaaatcaagatcattcaaaaggagctgaataaaaagagataattaaactaatgcaggtttgagatcaggtatttgcctctttgaagagtgaccctgattttgtctgacctcagaaaggttgtttctctctgagctctatttcctcttcaaaacattgagaggcttgtgtctgtgcaattttaaagtgtttttggatctataacttgggatttggttatagtggctccaaactgtaaacaatttgaccaaaagtatcatcttcatcttaagatttgaaccggcggtgcggcgtg

SEQ ID NO: 170150 - DNA, 417 bp, Homo Sapiens
ttgtagttagttctattgtataaagaatgtcaatttaggaatgccatttatatttaaggcttataaatcagattgaacacatggaaatgtttaaaaatgaaattgtatgatatccaggatttgctacaaaataattcggtggcaggaaaataaaccagaatggggatacagatgaaataagattggctaaaagttgaccactgttgaagctacatgatgggcatctgggcatctaagttcattgcgaccattcttttgacttatgtggaaaaaatccagatcatgttacatataaaaacaaaataagcaagaaatagagactaaactctttttctcactctcctaacccgtttcaggctgcctggttggtgggggggctctttcaaatacaagggttcaatagaacaactacaaccg

SEQ ID NO: 170151 - DNA, 438 bp, Homo Sapiens
  misc_feature (54)..(163): n is a, c, g, or t
acgcgaccgcggtcaaagttctgggattacaggcgtgagcactgagcctggccnnnnnnnnnnnnnnnnnnnnnnnnnnnnnnnnnnnnnnnnnnnnnnnnnnnnnnnnnnnnnnnnnnnnnnnnnnnnnnnnnnnnnnnnnnnnnnnnnnnnnnnnnnnnnnataagccactgcacctggcctggtacttttagaaataagaacactttacagacctggatttcgggtagtttcgtcaataattgtccttattggcatcatattgtttattcttaggctgattatgctttgtacttttagataactaaggtcaacaacagaaaatgaattatgatagttagatgcttagaaagaatccaatattctgcagcttccttgtaagcggatggcctgaccaaggtcccattgctctgtctcttttttgggttatcaattca

SEQ ID NO: 170152 - DNA, 428 bp, Homo Sapiens
  misc_feature (48)..(208): n is a, c, g, or t
tcatagctgttctagagtatcacctcatgctgcaacaacggtcaacannnnnnnnnnnnnnnnnnnnnnnnnnnnnnnnnnnnnnnnnnnnnnnnnnnnnnnnnnnnnnnnnnnnnnnnnnnnnnnnnnnnnnnnnnnnnnnnnnnnnnnnnnnnnnnnnnnnnnnnnnnnnnnnnnnnnnnnnnnnnnnnnnnnnnnnnnnnnnnnntgagccatgtgcccggctatggtagtatgtttgtgggtaggtctccaattatttgggtagagatggggtcttgctatgttgcccaggcttgtctcaaactcctggcctcaagcgatcctcccgcctcagacttccaaagtgttgggattataggcgtgagccattgcatccagccgggggtaaaaacctagcccaaactagatagatacatagaaagttc

SEQ ID NO: 170153 - DNA, 418 bp, Homo Sapiens
acgccgcacgacggatcaatctagagagatattcctttcccctgattattctcatctatttttcccccacttttctgaaccttaggagaaaaatatactttccccctaaactttcccactccttccccctatctttatttctttttttaaagacctataagactagttaataatcaccaatatctcctgaccctgcagactcaggcactggtgagaggccacaaatgaagctcctcagaggatctgggcttccttgaaataggggtcatcaaccccaaagttggccaggaagaatcaaacttacattcatctgtaaacacgagtcagcctagtgggcaaaaccacaggccaggaacccaggagcctgggttcttttttttcagatctgttactatttgcaccaagcctctagatacct

SEQ ID NO: 170154 - DNA, 365 bp, Homo Sapiens
cgaatagccaacgatggcgccgtcctggggagatcccggatcaactttccgcagcgtcctcattcgatcccgcgcgtcctcaatgcggttggcctcgatgaagtcgttgtatttgtcatcagtgaaaagaggctcggccagctttcggaagaaggactggagcaggctgctgaccacattgaggtcttgccagcgctcatcctgcaggttgatgtcaccaggcccgcggttgagctgctcctgtaggctggacaccactgcattgttgccgggcactcggtaaatgcctgtggactccagccctcgtgcctccacaaatgcgacagaatgcagccacgattaaggggacgcgccatcgtgcgctt

SEQ ID NO: 170155 - DNA, 807 bp, Homo Sapiens
tgccagcctcctttcaagggctcctgattcctgaggccaactcctgctgctaaccctaggaggctccccatcccctccctagagaaaggggccaggtggagagctgatgtccagtgctgagcaaggagaatgttgctagggtatgtatactcaggcagcacagccacacaagccagacagcgtgcactaggctacagccagccaccaccaggattaggggactagactcttcctagaacactctttctcctcctactccggtcctgatgcctgcactggcttgcactctctgggaccagcagctacagcccgacaccctcgagccatgacccaggtctgagccacttgctctgggcacactcctcgtgggctctggggtgctgctgcccagtgccagcagccccttggcacaggggttcccagaggcctctcagcctcatgtccgactccctctccctgctggcagctccacaggcttctttccacttccacccgctgcccccctcccccgggatgctgccagggcttaagggtcttgggagtgtgtcctgtagtttaggccccctctcagctgtagggggagtgccagctgtagggatggccttgtcgtgcctcgtccctccagctggccttggagagaagaggtggattgtgccatcgggctgctcagcgtctgctgggccaggaggccggctgtcaagccattaacccacccgtggccttgggagcccaggaggacgcgagcagcaggcccagacccagcagagcgctgataagatgggccagggacgcgccttcctggagtac

SEQ ID NO: 170156 - DNA, 515 bp, Homo Sapiens
tttctacccttggaactggggagaaaaaagaatctctaccccaagaccaaaaatagtaagtcctgtttctggtcctgaacatcgcagaattatggaggcttactgtggcctcacaccacattagaattgggtctggaaatcaaacttaagaaacaagagattgtaagccattttatactatcgacctaaattccagtctaacagttcctttacaaagttgcgtaaagcccccttatatgctagttgtaggaaatatagttattaaaccagactcccagactataacctgtgaaaattgtagattgcttagttgcattgattcaacttttaattggcaacaccgtattctgctggtgagagcaagagagggcgtgtggatccctgtgtccatggaccgaccatgggaggcctcaccatccgtccatattttgactgaagtattaaaaggtgttttaaatagatcccaaagattcatttttactttaattgcagcgattatgggacttattgcagtc

SEQ ID NO: 170157 - DNA, 499 bp, Homo Sapiens
  misc_feature (148)..(162): n is a, c, g, or t
gaaggcgcacgaggcgcgtccattattaattgaacataggttgaaaaaacttagcagcatgatccacattttatgtgtatcaatgatatacatgggtatgtgtgtctatacagtctatgtatagacatacacacacgagcacgtgacnnnnnnnnnnnnnnncagcgcaagcataatagcctgaacaatgaagcaatttggacaagtatcgccaaggtgttaacggtaattctcttccggtggtgaaatcattggtgcttttccttaatgaaatttatatctactttctagttctatgctgaacacatactactttggtaagtaaaataaattagaaaccatatgtaagaagttattttaagtgccagggaacaacttccatatataactcagtgaaagctttcagagatggagacaatcagaaagcaactgtcttctccccacttctgtactcatattttccactgggagggacgcgccatcgtgcgctacggggacc

SEQ ID NO: 170158 - DNA, 456 bp, Homo Sapiens
cgggcccggaaggagctcgccaggaagcacctggctgagcacgcagacactgtgcagctggtgtccggcttcgaggccaccatcaacaagtttgacaagaacttctcagcccacctgctggacctcctggcccggctgagcatctatagcaccagtgactgtgagcacggcatggccagcgtcatctccaggcttgacttcaatggtttctacacggagcgcctggagcgcctgtctgcagagaggagccagaaggccaccccccaagtgcctgtcctgcgggggcccccggctcctgcacccagggtcgcagtcaccgcacagtgagccctggctgtgacaggaaggaagggtgtggggtcagcagggactggtgcaaatgggtccagaattttcaaatcgaatgctctgtgttctgtctttgcagtttaaatataaagcaggaatgattgactc

SEQ ID NO: 170159 - DNA, 1366 bp, Homo Sapiens
  misc_feature (499)..(499): n is a, c, g, or t
  misc_feature (1353)..(1353): n is a, c, g, or t
gagagtgtggccatgacgtcacctgcccggtggctaaagagatcatctacacgttaaaagagcgggcgtatgtggagcagatcgagaaggcgtttaactacgccagcaaggtgctgctggacttcctgatggaggagaaggagctggtggctcacctcaggtccatcaagcgctacttcctcatggaccagggcgacttcttcgtgcacttcatggacctcgcggaggaggagctccggaagccggtggaggacatcacgccccctctgcctggaagcgctcctggagctggcgctgcgcatgagcacggccaacactgaccccttcaaggacgacctcaagatcgacctgatgccccatgacctcatcactcagctcttgcgcgtcctggccatcgagaccaagcagcagaaggcgatggcgcatcgccgtaccccacggagctggcgctgagcggcctggaggccttctctttcgactacatcgtcaagtggccccntttcgctcatcatcaagcaggaaagccctcactcgctaccagatgctcttcaggcacatgttctattgcaagcacgtggagcggcagctctgcagcgtctggatcagcaacaaaaccgccaagcagcactcgctgcactccgcccagtggtttgctggggctttcactctgcggcagcgaatgctcaacttcgtccagaatattcaatactacatgatgttcgaagtgatggaaccgacctggcacatcctggagaaaaacctgaaatccgcctccaacattgacgacgtccttggccaccacacaggcttcctggacacctgcctgaaggactgcatgctcaccaaccccgagctgctgaaggtcttctccaagctcatgtctgtgtgcgtcatgttcaccaactgcatgcagaaatttacacagagcatgaaattagatggcgagctgggcgggcagacgctggagcacagcaccgtcctggggctgcccgcaggggccgaggagcgggcccggaaggagctcgccaggaagcacctggctgagcacgcagacactgtgcagctggtgtccggcttcgaggccaccatcaacaagtttgacaagaacttctcagcccacctgctggacctcctggcccggctgagcatctatagcaccagtgactgggagcacggcatggccagcgtcatctccaggcttgacttcaatggtttctacacgggacgcctgggagcgcctgtctgcagagaggagccagaaagccacccccccaagtgcctgttcctgcggggggcccccgggctccctgcaaccaggggtcgcaaggccaccggcacagtgaagcccctggnctgtgaaaaggaa

SEQ ID NO: 170160 - DNA, 938 bp, Homo Sapiens
  misc_feature (553)..(562): n is a, c, g, or t
taagcaaacagatctatagatatctttgaactcggaatctcatagcaccaatatattcgcacagaactcttacttacatgtctcatcgaaactccagaacaaacatcaaaaggaaagacatttaaagttgatgatatgttatcaaaagtagagaaaatgaaaggagagcaagaatctcatagcttgtcagctcattggcagcttacatttttggtttcttccacaaaaatgataagccatcaccaaactcagaaaatgaacaaaattctgttaccctggaagtcctgcttgtgaaagtttgccacaaaaaaagaaaggatgtatgttgtccaataaggcaagttcccacaggtaaaaagcaggtgcctttgaatcctgacctcaatcaaacaaaacctggaaatttcccgtcccttgcagtttccagtaatgaatttgaacctagtaacagccacatggtgaagtcttactcgttgctatttagagtgactcgtccaagaagaagagagtttaatggaatgattaatggagaaaccatgaaaatattggtaannnnnnnnnnactagattttatcactggagattaagatggtcattgaaaatgattgtaccagtgttccttcatgatagtcatggtgctgagtcttaaagcaaacagtgaattcacctccacctcaacattttgttgtgcaaattttcaaacataaaggacaatgagaagtattttatagtgaacacttatctacttacctcttagattcaacaatgaatattttattatacttgttgcatatttatccccctacccatccctctcttcttccaacaattgtgaattcatctttgaggtattcattcaacaaacacataggtgctggggatgatttaatttaatcgaagatgattaaagcattcagtcctgtcctccaaagtctcac

SEQ ID NO: 170161 - DNA, 988 bp, Homo Sapiens
gagggctgttagtccggcaactctcccttcctccctggcttcagccagtccctgacgctgagcactggcttccgagtcatcaagaagaagctgtacagctcggaacagctgctcattgaggagtgttgaacttcaacctgagggggccgacagtgccctccaagacagagacgactgaacttttggggtggagactagaggcaggagctgagggactgattcctgtggttggaaaactgaggcagccacctaaggtggaggtgggggaatagtgtttcccaggaagctcattgagttgtgtgcgggtggctgtgcattggggacacatacccctcagtactgtagcatgaaacaaaggcttaggggccaacaaggcttccagctggatgtgtgtgtagcatgtaccttattatttttgttactgacagttaacagtggtgtgacatccagagagcagctgggctgctcccgccccagcccggcccagggtgaaggaagaggcacgtgctcctcagagcagccggagggaggggggaggtcggaggtcgtggaggtggtttgtgtatcttactggtctgaagggaccaagtgtgtttgtggtttggtttgtatcttgtttttctgatcggagcatcactactgacctgttgtaggcagctatcttacagacgcatgaatgtaagagtacggaaggggtgggtgtcacgggatcacttgggatctttgacactttgaaaaatttacacctggcaggctgcgtttaagccttcccccatcgtgtactgcagaagttgagctggcaggggaggggctgagagggtggggcctggaacccctccccgggaggagtgccatctgggtcttccaatctagaaactggttaccttgaacgataaagattactcactggtcatgaaattacacttgatgttccaagtatttagacctatgtgcatattttgtaccttttcttataaactggttggtt

SEQ ID NO: 170162 - DNA, 800 bp, Homo Sapiens
  misc_feature (720)..(720): n is a, c, g, or t
  misc_feature (731)..(731): n is a, c, g, or t
  misc_feature (752)..(752): n is a, c, g, or t
tgttgaatcacattagtatgatgagtgagtcatccctgcccatctgctgagcttctcgcatctctcagtcacacgtggacccagtggtcaatcctgcagagaattcggcggaggttaggtttgggagtggagctagcgtgctaaagccagagccttcacgtgaaggtggcaggcactggggcggaagccaacactcaacagatgcaagcagtgtgggtgtgcagcagaacagtgatcttgggggaggaagaggatgttactagagtcagatgatttgctgtattctcctgaaaggtcgtaggctgacaggcgctcacattccttggctgcctcggttctgagggcagctaaggagctgtttattcctcaagtcatgctccccgatctccttcctctaccactctgtcaccaggagtttaattacaggcttgaggagaagaaaggaagaaaagatatcttgatgctttgaaaactgtgttggcagtgtggcatgactgtttaaagtagataaaaccttgtcattttaccccatccctgcatgactgtgaagctggcgaggaaggaggaagaagggcaagttcagatgcaggctgggtggctgggacaggttggctaagggactactctggagggctcttctgcctgcattgcccacttcggcccagccacgtgtttgcagcgaccagagtccctgcaaaggtgtggcttggctgtggtcanggtgctactancaccatcagcgcacttcccgncattttgcttaacttcctctttggcagtccaacttaagaatgcctttg

SEQ ID NO: 170163 - DNA, 662 bp, Homo Sapiens
gtcagttgtagttgtaactgggaggggcggaaaataacatgaagtggaggcaataggatgaagaaatgaagaatcgcctgtagtgagagacaggactcttggactgactccgtggtgcacacacaccctgtttcatctcgggcagcatcctgtcagccagtaggagagtggccggcccgaatagcgcaacctccattctacccgcttgccatggtttagttgtgggtggaggatacttgcttgccccggcttcagacttgcacatgtggcttgcttaggccatggaatggaagcagaaatgaaagcctgccagttccaagcccacacctgaagatatcttaggcggttctgcgggcccgcgtgtgcttccaccttcatccagatgcacttctctggtgcagcagccgcttcttcagcttaggcccagaaggaacggagccccctggtggatccgcaggcctgcagggagccacagagcacgtccagcgttcactgaggggatgactgcgtgtcacccgttgaccagctagaatgacacctctccaggactcttcagcaagttactccaccatagactccctgcctgcttctgctgcacaggcttggaccccaaaagctaccacaaggggtaggtgcaggaactccagtataagtgggtccaa

SEQ ID NO: 170164 - DNA, 848 bp, Homo Sapiens
tcatcttgggcctgtgttatccagtaatccttgaagggttttcatccaagtggcctgatgggatttgcattttactctggaagatgacttggggattggcaggaagtaaggacactttttttcaagagaatatagccctaaactaaggtagtagcagtggggatataagtggataagttctagatatacttgggaaatataattggaaggacttgtggactgataaagatatatttaagatgtgcagtcagtaggacttgttgattgaggacttgttgattgaaggtggggtgaaaagataacacaggtttctggcttggttggaaaaagcatagcatcatttaccaagaagaaacgagatggaattgtttggggttgggaaggtggacgatgaaatgttgagtatcacgcatcttacatttgaggtatcaatcattattggatagaaagtcttatttagtgagatggtaatggttgtagatgtcagtgatttgttccaggggacaatgagtaaactgagaagagcaaaaatctacaaatggagcaatgaaggtcagcattccatgaagaagcagaaattgatgagagaggaagacaagagtagtcagagaagttaagacctggaagctaagtaaggagagggagtgggcaactatgatggaaaggccataaagcaaagattgagaagtatgcactggaggccattgtttctggatgtcagggtaggaaagagtaaacggtgacagtagaggtctccttgcagtgaattggggaatgaatatcaagtgaaatagtgcacagagtctgtatacaaccctttggaaaagcctgattgaaaagagaaagat

SEQ ID NO: 170165 - DNA, 731 bp, Homo Sapiens
  misc_feature (40)..(40): n is a, c, g, or t
  misc_feature (48)..(48): n is a, c, g, or t
  misc_feature (52)..(52): n is a, c, g, or t
  misc_feature (54)..(54): n is a, c, g, or t
  misc_feature (59)..(59): n is a, c, g, or t
gggaatctccaggatcccccattggataagcggatgaggngagaggtngggngntgagnggtgaacggaggccaaagtgggtgagggaagtagcaaaccaaaacaatactgactgaggtagcaagactctgctcagtgcagaaaaattggcttatgaataaaaattagactgtgatatcaaattaaatccggatcatcatgcaaaagacacaatacatgctatttagttttagaaaaaaaaccacacacattcatttcctaaaatctgctgccaattaatttgctgacaatgtctgctggctcaactattttttttatacaaggatgagtattaaacagaacactgtacatgctttttcatctacaaaaaaatatttgcataaaatagtgttagttctctgtacatgtcaatggacactttaattatgtgtataaaaaaggaaaatcttgccccactggagtcagaaaaagcaaaacaaaatctagagtatgaaacctccatcaccagccagtatgttcatgtgaaaattcagcagaaatagacagttgctttaaacaataaaaaaattaattgattaagttaaacatcttctttatggaaaagtggtcagtcaagaccagcacatatcgctaaagttagtgtctgtgctatagacccagatcaccaggggcattatgagcaagcaaaacggccaggaaatcccatcggtgcatgccgagaacgagcagga

SEQ ID NO: 170166 - DNA, 634 bp, Homo Sapiens
acccttgccactcatcttccagatcacaccgctgaacgtgacccagtggctgatggtgctgaaaatctccttgcccgtgattctcatggatgagacgctcaagtttgtggcccgcaactacctggaacctggtaaagagtgtgtgcagcctgccaccaaatcctgctcgttctcggcatgcaccgatgggatttcctggccgtttgtgctgctcataatgcccctggtgatctgggtctatagcacagacactaactttagcgatatgttctggtcttgactgacagttttccataaagaagatgtttaacttaatcaattaatttttttattgtttaaagcaactgtctatttctgctgaattttcacatgaacatactggctggtgatggaggtttcatactctagattttgttttgctttttctgactccagtggggcaagattttccttttttatacacataattaaagcgtccattgacatgtacagagaactaacactattttatgcaaatatttttttgtagatgaaaaagcatgtacagatgttctgtttaatactcatccttgtataaaaaaaatatttgagccagcagacatactccgcaggttaagtgacagccatttagtca

SEQ ID NO: 170167 - DNA, 971 bp, Homo Sapiens
atgtatatacagtgcctataagcaggctggttacggtccggaatccgggatatcgtcgaccacgcgtcgcccacgcgtccgcttagtcaataagaaaatatattctttcaaaggaacatgtgtctaggatttggatgttgagaggttctaaaatcatgaaacttgtctcactgaaaattggacagattgcctgtttctgatttgctgctcttcatcccattccaggcagcctctgtcaggccttcagggttcagcagtacagccgagactcgactctgtgcctccctccccagtgcaaatgcatgcttcttctcaaagcactgttgagaaggagataattactgccttgaaaatttatggttttggtatttctttaaatcatagttaaatgttacctctgaatttacttccttgcatgtggtttgaaaaactgagtattaatatctgaggatgaccagaaatggtgagatgtatgtttggctctgcttataactttataaatccagtgacctctctctctgggacttggtttccccaactaaaatttgaagtagttgaatggggtctcaaagtttgacaggaaccttaagtaatcatctaagtcagtacccaccaccttcttctcctacatatcccttccagatggtcatccagactcagagctctctctacagagaggaaattctccactgtgcacacccacctttggaaagctctgaccacttgaggcctgatctgcccatcgtgaagaagcctgtaacactcctctgcgtctatcctgtgtagcatactggcttcaccatcaatcctgattcctctctaagtgggcattgccatgtggaaggcaagccaggctcactcacagagtcaaggcctgctccctgtagggtccaaccagacctggaagaacaggcctctccatttgctcttcagatgccacttctaagaaaagcctaatcacagtttttcct

SEQ ID NO: 170168 - DNA, 511 bp, Homo Sapiens
ggtgctcagagattgtgaaatgcagtgttagctccctgggattcaatgttcattaaaaatatccaagatttaaatgccatagaaatgtaggtcctcagaaagtgtataataagaaacttatttctcatatcaacttagtcaataagaaaatatattctttcaaaggaacattgtgtctaggattttggatgttgagaggttctaaaatcatgaaacttgtttcactgaaaattggacagattgcctgtttctgatttgctgctcttcatcccattccaggcagcctctgtcaggccttcagggttcagcagtacagccgagactcgactctgtgcctccctccccagtgcaaatgcatgcttcttctcaaagcactgttgagaaggagataattactgccttgaaaatttatggtttggtatttttttaaatcatagttaaatgttacctctgaatttacttccttgcatgtggtttgaaaaactgagtattaatatctgaggatgaccag

SEQ ID NO: 170169 - DNA, 454 bp, Homo Sapiens
  misc_feature (79)..(122): n is a, c, g, or t
  misc_feature (252)..(341): n is a, c, g, or t
  misc_feature (380)..(413): n is a, c, g, or t
acacactcaaccccaaaatagatgagtttacgtattatgtactcaaacctgataaagtgccagaaagaatgctatagcnnnnnnnnnnnnnnnnnnnnnnnnnnnnnnnnnnnnnnnnnnnncaagttgcaatgcacactctcgattacataaggtttattttagcaatgcaaggctcagtgtcaggaaatttattaatttattacatcaagaacttaaatgttatttaaatgtctagagagtgctagtgtnnnnnnnnnnnnnnnnnnnnnnnnnnnnnnnnnnnnnnnnnnnnnnnnnnnnnnnnnnnnnnnnnnnnnnnnnnnnnnnnnnnnnnnnnntaaacctctaatttggtttgccagtatttcagataactnnnnnnnnnnnnnnnnnnnnnnnnnnnnnnnnnnggaatgataaagcaaagagtagggtgtgggcggggatcctc

SEQ ID NO: 170170 - DNA, 411 bp, Homo Sapiens
gacagagtgagactctgtctccaaaaaagaaaataaaaccataatgcaagatcattgcacatagtgagtgttccataagtgttaactgttaagatgcatatgatgatgtttaaattaggggcagtcttgcctaaggataggtttactaaatcttttatctcctctcctttccattcactaatctccagacgatatcatttatactaaacatggtaaagtgtgcacattgtttatttattgatattcccctataaattattaagcctcctttattaagttcttggcacaactaaagcagtaattggagaagctgttagttatcataaagacctttctcactgtactttttctgtaagtttcaagatcatgtctaatataaaaggtctgatgtcaaatcaggcaggaagcaga

SEQ ID NO: 170171 - DNA, 152 bp, Homo Sapiens
gggtgagcagtctttggaagaaaactcaccgcccatatatgacttatcattgctgtcccctactgcttctacaagggggagaagaagggcatatgctaactaaaaggcagggaagaggctgggcgtgctggctcacacctgtaatcccagca

SEQ ID NO: 170172 - DNA, 254 bp, Homo Sapiens
agaaaagaatctggaaggactaattaagctacctggtcttgaaatatattacttatctctgtgttgcgtaacaaattaccccaaagtatagaggcctaaaacatttattatctcactgtttcttagggtcaggaatctgggtgtggcttagctgaaccctatgcgcagggctgcaattgagggttggatgtgctcatatgaagaggttagggctgggcagacatcccaaatggcttggatcacagccacaaacc

SEQ ID NO: 170173 - DNA, 529 bp, Homo Sapiens
aactctgagtaacctatcatcctacaaatatcttgtgtgacataataaaccacgagacaagtagtgtgactagaatttcagcatggaattacctcattaataggcttacaatttgggaatattttagtacataagttaaaaacaaatcttaagcagaaaagattttttagttttttactcttctttctaccaatgttcaaaaaatttccaattaaggatgctttatcaaaatacacattccaaacattggttcctcattacctgcttccctgatgtttatcacttattttccatcataataatgggtaagagcttatcttagagtatcataaattttgttttaaagttgatggtagtacagaagagagatgcctgtttttctctcccctttgcactccaccttttacaggcatcttctactttggctccaattttttgacattcagaagatctcataagacaatgacattaaatactattagtagtttctgaccatggggattagttatctgcagttgccagcaccaca

SEQ ID NO: 170174 - DNA, 620 bp, Homo Sapiens
  misc_feature (231)..(241): n is a, c, g, or t
atttgtaacttccctgacagtgagagcccagctcccattcccgttcctgagtgtccttgtgtgtgcagaaccctgcgtgcagccgtctgtggacccttctgcccaccacctggcttggatccccctcacccccctgcatggcagctgcatcttcctcagcaggtgtgagctccgtgcctcaaccaccaggggtttaaacagaaagaagagactagccgaaatgacactttnnnnnnnnnnnttactgctagtgctaagactgtgggattctgggtgacttttggtttttgttcagcccttttctgtatttcccgggtttgtgtgttataaaacaatggatgtgggaaaagtggaaaatggaagcatgctcttgggaacacgcctacgagacatccacccggagtcagcggttccgtttcatctcttcccattgagcctattttgcccttgcaagggaagagtgctctggtgccatctgactgatggaacttacaagctcataaattcagattaaccgggggaaggggaataatgagtgtggattaattgttcagtgtttttatgctaacattagttgtctttatgaccacagagcaattaaataagcttacaagtttgcg

SEQ ID NO: 170175 - DNA, 648 bp, Homo Sapiens
tatgtttcataagggtaggaattcttgtctatttttggtaattcctgttgttccagttcctggaatagtaccttgtacataataggcactcagtaaatgtgtactgactgacatactaatgacactcagtgctgtcaggcattctcgacacaaatcatgcaagaccaatcgcagatttatgtctttgccgtgttgtgctcactgtgggacatacatttattgagttaaatggtgggcataagttctcatagtatttaaaatgcttccctgtgtttacttatttttttgactgagtgactaattcacttaagttgaaacacacgatgaccatgttaactctactttgtatgtggctgtgtgtatagatacatataaatcaattatgaaatgttagtatgaattgtttacatgtaaatgggcattaggagttgtttattgaaaaaacaaaagatctgagttcagtgttcactattagcactgtgttagacttctgattttaatattgaatctcctagatttgcggttttctgttatcccttgcttatatttagtttggatgatcctatggatttgagagagtgaaaaatagtaattcacaccattctgtaagtacatgttgatatctttaatagagatgtcataaagatt

SEQ ID NO: 170176 - DNA, 554 bp, Homo Sapiens
acgactatggcatacaattccactgtatagctgtgctaatctagagaggaaaacaaaacaaaacaaaactcagccattcacattccttgaatagaatcagaggagcagagaagtaagtataaagtttgaaagaatcccgagaagaaatgttgatataaacagctcttggcatcaaggtggatagtgtcaaggaagttactattttcgtggggacagaggcgctgacgtgcagctccatgggacccagagtcctgtgctatgttctctcgtgactgaacaaagcccccaactcatttctccctggggaagacattcctgctttcttattcattacggatcctttgagatttttatttcgtatccttttatttactgatcagagctgccctgaaggcttcttctgggacaccagaaactcccagcagtcccctgcctgcggggaggctcttcatcccaaagctcattattgttagaacaggatgggttcacaaccgggggctccctctccaagcctcctcaatccccatcaattccacctgttcattcagagtcgt

SEQ ID NO: 170177 - DNA, 674 bp, Homo Sapiens
gggatgaggtaaggaaagatgactcgtgaagttaataggatgtctctaatttctagatgtgcctgagcttctgttcttttcctctttctttgtgtctctcttgaatatatttactttgtgtctcttaactctgtttaaggttctgtgtctatgcatctctctctttcttttttcaaccttctcattctcctatccagggatttaatcagcagaattactttttgataggggaggtataaggtttggcctgtaaggttctaactgccttcttttttctcacagaggtggcttatggcagatttttcctccttcaaactccaaacataatttttaagactatgtgccagtggactcttcccttatatctctgcaccacaagttgttggatgtttcctcttcctcccttatgtctacctcaccaacctcgctcatcatttggcccttatccttccttgtacacctaccttcagatttctgcttacactttgatttcagagctttattccccagtctgttcttactcctttgtcgcttatccagaatgatgctatgtgtagcatcttgctgtaaatcctgtacaatgattctgtgtaaatagctgtggcctatgcccaataatgaagagcaagccctttcaggtaagcaaattaaagttcagtttgctcatcgaaaac

SEQ ID NO: 170178 - DNA, 431 bp, Homo Sapiens
tcttatggaatggaggctgtgagcaatgtgaggattctatttatttatttacgtttgataaaacttactggaactagtactaccatgcgtattccctgtccaaagcatcactgctttggtatagtataagttcatgaaattctggtgggtagaaagaaatttttatttctatcagcagtactaaaatgtatcagccaaccagagaacatcagtgactttaacttctgcagagtttgccccagaattcagagttctatttagaggaagttaaaacaacaacaaaaaacaaccatttgaaaaatttttgtcaccagcaaaacttttcactaattagtgatatgaaatgtgatttttgtgttgttaaacttcagctttggaaactcagtctctttcattatcatccattccaatttgtaggatttggctatttt

SEQ ID NO: 170179 - DNA, 598 bp, Homo Sapiens
caggaaccaagtaatccctttccaagatgcattaccccatccccggacctaacgctggccaggtccccaagtgtgaagctcagtatcatgatggtggtgatggagtgtcttccgaggttcctgggggaaaaaaaattgtagcatatttaagggaggcaatgaaccctctcccccacctcttccctgcccaaatctgtctcctagaatcttatgtgctgtgaataataggccttcactgcccctcaagtttttatagacctgaggttccagtgtcccctggtaactggaacctctcctgagggggaaccctggtgctcaaattaccctccaaaagcaagtagccaaagccgttgccaaaccccacccataaatcaatgggccctttatttatgacgactttatttattctaatatgattttatagtatttatatatattgggtcgtctgcttcccttgtatttttcttcctttttttgtaatattgaaaacgacgatataattattataagtagactataatatatttagtaatatatattattaccttaaaagtctatttttgtgttttgggcatttttaaataaacaatctgagtgt

SEQ ID NO: 170180 - DNA, 669 bp, Homo Sapiens
cccaccatactccaatatcactttaattatatctgtaatgacccctatcttcaaataaggtcaaatcctgagtactgggagtaaaacttgaacatatgaattcaaggggacaacatttgtttcaaaggaaattgctcaccctcctctttcctattctccctttcctaagggccgcacacatacaaagctgaacttgtatcgccgtgtagatgaagacaaacacctttaggagatggccgagaaacaaaatgggaaaccctcaggtctccaaatgactacaccaagcagaattgccccaccagcctgcaccattcatttctagactatgagcaagaagtacacttccatcttatttaaacaaccatatttggggtttttgttgttgttattgttgttgttataggagcttagcttttactctaagaaatacagctactcaactcacttcattaggatcttaactataatatcaaaacctcctaagcacagaataaaaaatacagtagagcaatatcatttatgatcatagatgcagagcttccaaatgaaatactagcatattcaaggaaagatatatataccatgacctagttgtgtttaatttctggaattcaaaaatggaatgtttgacataagaaaatctattaggccgggagcggtggagcagga

SEQ ID NO: 170181 - DNA, 1191 bp, Homo Sapiens
gggagggtgctgctggttagtgtgctctgagggagggtccgagccagccgctgttttgccggaggagcccctcaggccgtagtaagcattaataatgtctttcatctttgagtggatctacaatggcttcagcagtgtgctccagttcctaggactgtacaagaaatctggaaaacttgtattcttaggtttggataatgcaggcaaaaccactcttcttcacatgctcaaagatgacagattgggccaacatgttccaacactacatccgacatcagaagagctaacaattgctggaatgacctttacaacttttgatcttggtgggcacgagcaagcacgtcgcgtttggaaaaattatctcccagcaattaatgggattgtctttctggtggactgtgcagatcattctcgcctcgtggaatccaaagttgagcttaatgctttaatgactgatgaaacaatatccaatgtgccaatccttatcttgggtaacaaaattgacagaacagatgcaatcagtgaagaaaaactccgtgagatatttgggctttatggacagaccacaggaaaggggaatgtgaccctgaaggagctgaatgctcgccccatggaagtgttcatgtgcagtgtgctcaagaggcaaggttacggcgagggtttccgctggctctcccagtatattgactgatgtttggacggtgaaaataaaagagttttacttctctggactgatcctattcacagcttcctcatgaacttttctaatagaacaaggaaagctctccaaccatgtctggcgttgagaagccaagagtccctgtcaactctctcattgcccagtggtgacatgtgctcttctccacactgttgggaggtaatgctgccccacgtgctggtgcaggtcagtatcctgggacttggaagctggcaggatttgccgggtaaagctgtatgccatcatggggcacctgaaaagaaaaacacgtctcaccactgtggttgattcaaaagaaagtgattctatttttcaaagaaagcgttgttaatgtaattggtatccctcctaactaaatgagttcacaatttacttggtccagagttatctattcttttatttatttaaaactattgaatgacatttagatacttcataaaattacgaccagctttggaggccagagctcattg

SEQ ID NO: 170182 - DNA, 560 bp, Homo Sapiens
ttggcatgtcatacaacagactccagcagtaaatttgagcaaacttcagtggcatgcaacaatatggatgaatcttacaattacaatgttgagtgacagaagccagacaaaggttcatagtgtgtgattccatttacataaagctgaagaacagacaaaactaatctacagagtcagaagtcaggatggctgtaacccttgtcagggcagagggtcctagcattggaagggtacacgaggggggtttctgggatgccggcatccttctgtttcttgattgtggtgctgattttatgaatgtgttcattttgtgacaattcattgagctctgctcttatgatttatgtgcttttctatatatgtacaagacttcaacaaaaagttaagcatatatgctgaaagtgagtaattttttgtctaccactggctactaaagatggaagcttgtttagatggaaaattattcattaaatagtttgagtttagaaaaagaagatgttataaggtatatttaccagagaattgtacttatttgcataaaaattgtttttcctagaaga

SEQ ID NO: 170183 - DNA, 416 bp, Homo Sapiens
taacggaaatcaaaagcagcatacagtaattcaatgtcccagcactggagtacagcccactgttttccggtgtggggttccactttagttcttgtctgtgtgcatgcatacatttttacagagttgtgaccactgcctttttctgtgaccctggttattgacatctagttttccaagtaacattgacacacatctgttcaaatcagttgaggttcccatcatgactgactcatttggcggggaaaccaaatttacatgccaattggaacaaagaagtgtgggtttgggggaacagcggggggaaagaaatggtgggagaggattccttggacttacagatcataaaacatttcccaataacatttttaaaggatgtataatattacactgattgattgattatatattaaccttct

SEQ ID NO: 170184 - DNA, 760 bp, Homo Sapiens
  misc_feature (52)..(271): n is a, c, g, or t
tcaacataactaaagccaaacccatctcacccctctaggccatcaaatattnnnnnnnnnnnnnnnnnnnnnnnnnnnnnnnnnnnnnnnnnnnnnnnnnnnnnnnnnnnnnnnnnnnnnnnnnnnnnnnnnnnnnnnnnnnnnnnnnnnnnnnnnnnnnnnnnnnnnnnnnnnnnnnnnnnnnnnnnnnnnnnnnnnnnnnnnnnnnnnnnnnnnnnnnnnnnnnnnnnnnnnnnnnnnnnnnnnnnnnnnnnnnnnnnnnnnnnnnnnntgacctgtgatttcaccaacaggagaccctgtcttaaaaatgtatatataaaaataaaagaacatcagacatcaccatcacctcgcttagaatccatggggccttctcctcaaattcaatcttcccaggcatttcatgaacttgcgttctagtttctgttccctctcaaattgcccaggctgtcctgtgagtgacagcagctatttcgtgggcctcctctggaatcatgagaagtcacccaaacaatctcagttttctagctcactccgtcttgacatttctacactgtcatccttggttttcttggaaattaatttgcttttcttcattgtctttctttggatctgctttccttttgttggttactattttatttttagcttctcacaccataccgacatatgttggttattcttttagacatgttttttgttgttgttgtcacctggaacttttgtatcttgaataaatttggggatcaaatacaaa

SEQ ID NO: 170185 - DNA, 488 bp, Homo Sapiens
acatataaggagttgtccaattcaccaagatcagcccgatacacacccttagttaaggtggccattaaggggccagagaggtggcaatcagtaagctgcctcctgcctaactctctttctccaaccattctctataggctccagcgtagttgcgagccctgtggagacaaagaagcgtgagagactgacaggaatgacaggcagtccccatcacctcccagctagcagccacacctccccgtacccagtgtatccaagactccgggccagctgcgtggcctggaggccccgcttgcccatctgacagaagaaaacgagatgctcatcttccagctttggcttctcagcagaatataaagcctggaaggcagctggctccatctgcagagcactctccaactcggacaccgggatgttgagcgcccctgggatggtcccagctgccgcctcctcgcgagagcgcacatcgcaacggggatgctctagat

SEQ ID NO: 170186 - DNA, 1027 bp, Homo Sapiens
  misc_feature (449)..(618): n is a, c, g, or t
  misc_feature (626)..(642): n is a, c, g, or t
  misc_feature (680)..(761): n is a, c, g, or t
  misc_feature (940)..(948): n is a, c, g, or t
gctgtggtcgatctctgaggatccccgattcgatgtgcgctctcgcgaggaggcggcagctgggaccatcccaggggcgctcaacatcccggtgtccgagttggagagtgctctgcagatggagccagctgccttccaggctttatattctgctgagaagccaaagctggaagatgagcatctcgttttcttctgtcagatgggcaagcggggcctccaggccacgcagctggcccggagtcttggatacactggggctcgcaactacgctggagcctatagagaatggttggagaaagagagttaggcaggaggcagcttactgattgccaccccctggccccttaatggccaccttaactaagggtgtgaacgggctgacttggtgaattgggcaactccttatagtgttgtgcgcacaaaagcatcaaataaagaacatttaatcnnnnnnnnnnnnnnnnnnnnnnnnnnnnnnnnnnnnnnnnnnnnnnnnnnnnnnnnnnnnnnnnnnnnnnnnnnnnnnnnnnnnnnnnnnnnnnnnnnnnnnnnnnnnnnnnnnnnnnnnnnnnnnnnnnnnnnnnnnnnnnnnnnnnnnnnnnnnnnnnnnnnnnnnnncctggcgnnnnnnnnnnnnnnnnnaaaaattttttaaaacttttttggggggcggggccccnnnnnnnnnnnnnnnnnnnnnnnnnnnnnnnnnnnnnnnnnnnnnnnnnnnnnnnnnnnnnnnnnnnnnnnnnnnnnnnnnncccccgggtgaaaaaggggggtgtataaaacaacaaaggggtgcgtccggtgcttttttgtgttttcacaaaagagggtccccccggatccttttttttatttatgccccccccgcggtgagatattaggagagagtgggggggaatattaaaaaaacccctctcccgccgaggggcannnnnnnnnacacagtggtggtgtaaataatttttcacccccgcggggaacaaacacccccgggtgcgcggggggcaaaaaataatat

SEQ ID NO: 170187 - DNA, 586 bp, Homo Sapiens
ggcaaatgcagagaatgaggagggagtttgtaaaggacagagtgatttgtaggcctcttatctcacactcttgaaactgattttgggggtctaccctcagtgcagtgttcagaaataagcattttttaaaagttacctgtcttatctgcacaatgaattttcagaattatcctgctaggtgatggaaggtttagacattttcctgtgtcaaatctgcccaactgtcattgttgttgctgaactcctaaatgtctttattggtgatgggtatgggaaggatgggcgtgaagtcccctaatctgagattgtgttattttagtccctgatgcttcctgcgttgatgaagttgtataggaatttttccaccatacatgatacatgatcatatctaagatgtcagcatgttcataaagaggattatttgtgtaaaactattaaaagttatgcttttcccgagcattgtctcatctttgaattcaaattattctcttttaaagcatcattctttgttttatactaaaaattaccagatacttgctgttaaaacctacttggtatttcatacaacatcaagttattgctacat

SEQ ID NO: 170188 - DNA, 987 bp, Homo Sapiens
  misc_feature (19)..(19): n is a, c, g, or t
  misc_feature (36)..(36): n is a, c, g, or t
  misc_feature (67)..(67): n is a, c, g, or t
  misc_feature (132)..(180): n is a, c, g, or t
  misc_feature (573)..(583): n is a, c, g, or t
  misc_feature (906)..(906): n is a, c, g, or t
  misc_feature (943)..(943): n is a, c, g, or t
ttaagcccggttggaatangatttttatccaaatcnatagattaaaatagtttgacattcaaagtgncaatgtttagcaatccaatttaccatggatagatcgtcagggaatagcccaaatgttttaacgcnnnnnnnnnnnnnnnnnnnnnnnnnnnnnnnnnnnnnnnnnnnnnnnnnctttgttgctaggattaaggttattctaattgctttactctcaggaaagtgtaataacgcatgggaattctgtacgtaatcactgtaatggaatatccaatttacagatagtatgatatacatgtcatcatttaagtaagggatcgaaaacatttcaaattgctctatctgggctgatagacatttcgtcatttaagtaagggatcgaagacatttcaaattgctatctccatctgggctgatccaaaattctgagattgttggctacctatattttgttgcagcttttaaatgtactctgaacttccaaaccacattcattccagcctggtagaacaaatattcttggatctttgatcaaagcctggaatgatagctttaataaaagaaggnnnnnnnnnnngcaccctctcttgatctcaactgtaacaaggctgtaattccatcaagcgattctactgacatctagtacagtgttgaagcccaagtggttggctggttccagtattagaactcaagttgaaattatatgattaactgaaatttggggcatgcattatttattatacatggcctacaacggttctgtctgcgctgttacgtattacctacacttctgggtttttttgttcttgttctcagcctctctttaagagttcttgggccttccttttccctctttctattttaacagttttaattttagaaccatttacattccagtangtaattcactatgcgctttatatgccttagggcatcncaataaaaaaacatagggtaaacatccccaaaacccacctttaa

SEQ ID NO: 170189 - DNA, 208 bp, Homo Sapiens
gtcacgttctcaaaatcctttgcacctcaagttaggggttccactggtctcctgattgtgtctattgatattcctctggtcttgtcttgtataagttgtaactgttttcctaacttcattttaaattctcacgcttaaggaccatgtatgaatagtttcttttatcccccggtaggaaatggcagtacttatgctatatcgtgtccac

SEQ ID NO: 170190 - DNA, 433 bp, Homo Sapiens
gcggccgcgtcgacgaaactgaagcagtccctgcccccgcatcatcatctctgtcatcatgtgaatcaaacaggtcagcatcacttgttccattggacaaggaagaattaagtgattctgtggtatctgggcgttttagactatttcccgagctgctgtgtgtcaggactgaggcaaatccagaagaatctattaagcgctttggggatgagccactttgatggaattcatcagcatcataaaattcatcttcactgctggagtaagagaactctgggactgtatttggagacaagttcacgtggcttggagaagtgagactgctactcagtggtgaatggccactgcctgtactatttggtgtaggagtctgatgatgtcccaaggtagccaacacaggtccaactggtagggaagatggacgctgctctga

SEQ ID NO: 170191 - DNA, 246 bp, Homo Sapiens
agaaatatgtaaccatgtacctgttgactgatcctagctctggcctgtgaactatagttttcattatgctgatttaactttctgttaatttcatcagtgtttttactagagggaatgcaacctacagtgtttttagtagagggaatgcaacctattttagttttttttcattcactctacccttacctatcataaatcacaaacttacatcataggtccccaattgcataagcattctaaagataa

SEQ ID NO: 170192 - DNA, 510 bp, Homo Sapiens
gaagaacatataagtgacagagcaaggaaaatagacggcgctcctgcattcgtcttgaggctgattgggttctaattctttccaaagatgcaggtgtgagttgattgatgaactcagctcagtctttagtcatatttgatcaattcctagaaatagtttgatgtaggagggcaaggtgggaattgtcaagagaagagactggagaagagactaagggcctttgcatcatgttaaagagcttagattctatcccatacgtgatggggaggcactgaagggttgagaaagtgcaatcaatttccattgtataaagaccactattggccctcaacctttcatctaaaattgttgggactagatgtgaatgagaaatgagaatttttcagattttagaagaataaaacaatgcatatgttgtttattttactaacgttaagttggtaaagccattttccaaggagtagtactcaaattaattcaggtaagctgctttgtgattctctaaattgg

SEQ ID NO: 170193 - DNA, 507 bp, Homo Sapiens
aaggacacggattggaagctttaaatgccatgttactacttgggtataagggtacacaaggtggtatttcatcttcctaacgcacataatgtgtagcacatggtgattagacagtgtaaaatctattgcagtcaagattttacaatctaatggtagcagttaacagatgagagtattagctaatgtacaaaataattggaaaaatgtatgaacacattttggaatgttaagaatgaattccagcttttgttttttctagtacaagaagctacaggtgcacatgtaatttccaatatatactgaataactttcacaaagcagtgtttgtgaagagttggatttggtaatactaggatttagtttggttgtaggggaatctgtgtctgttacagggtaggttttcctcggacttctgtaagcaggagtaccttcaacaagggtgataaattttggcccccagatatgtcattgacatttacatgctttgtaattctatttgggcaactt

SEQ ID NO: 170194 - DNA, 276 bp, Homo Sapiens
gacacatcatttcctgagcacactgtcgcttccattcttctaactttcattgtttacatttttcatgcgtttccagctggtacattatttttctctctccctttacacagtctttacaattgcaaaagcattaagctttgtatctttcacgacccagcaaatctctgtgagtatgaaatctggaactttctctcaaacttgcttctctattacaaaattttaatctatatcatttcccggagcgttggtttaaaaagcaaaacaaaacaatacaaa

SEQ ID NO: 170195 - DNA, 373 bp, Homo Sapiens
gtagaatgtgacattttaaggaaggtacaaaggacatggtgttatgggtcagaaagatcagtctgaatcccaactccatgatttactaattgtttagccttgggcaaggtggcttaatctcccaagcctcaatgtcttcatctgttaaatgaagctggttccctcggatttaagagaatctatcttccacaagtgtctgtcatgttcatgatagcacaaggttagttctcttcttccctttgctgaaaataatacaatcaattattaaatggattggaaaatgaaattgtgcatcttaggggccaaaagagcttaactgcattcaagcagggaagaaatagccaatcagtacagaaactgatatttgattctg

SEQ ID NO: 170196 - DNA, 322 bp, Homo Sapiens
ccagacacaaagaccaatggaacagaacccagaacccaggtgtaaatccacacatttacggccaacccatttttaacaaaggcaccaagaacatccaatgggcaaaggacagtctcttcaataaatggtgctgggaaaaccggataaccatacgcagaagaatgaaactggacctctatctctcactatatacaaaaaaatcaaatcaagatggattacagacttaagtctaagacctgaaattatgaaactactagaataaacattggaaccaggtgtcgtggctcatacctgtaattccagcatttgggcaactttcggg

SEQ ID NO: 170197 - DNA, 211 bp, Homo Sapiens
atttcaggtattatttaataatcgaggaaatcataattatagaggaaataggatatactgtttctgattagtaattagtaactttttataatgattagtaattagtagcatttcagtaatgttagcgaccacagcaggtgagccatcttttgttgtcaccacttgtgcttcattagctgctaatattaaaacatttacatatcatagggat

SEQ ID NO: 170198 - DNA, 296 bp, Homo Sapiens
cgctgcatggacagtgcgggcggcggcgcgggcggcagcctgagacgggaggaccgtctcctgcagtgatttgccggactaggtccagggcatatagagaccatctcattggccctaaggagccgcctctccgtgaggcccaccagcccacctcaggggaagtgccgttttgtgcacttgccagagaggccggtggggacagaggggccaattcgggcaccatcccccaattcccaatactcgagaagtaaatggatggtacttggtggtcagagccgagtaggggacaaatggat

SEQ ID NO: 170199 - DNA, 520 bp, Homo Sapiens
cccttcgcgcacagtgagcccagtcctccgggccgttcctcgcccgccacccctgtctggcgtggaccccagcctcagcctctttctaagggacttcctcagcacatttgtatttttatatccgactctgtgtttactggctctgctcatggttcctgccctcccctcagtctcggccaacgctcttctgcgcctggcagataggatgggtgttgaggctgggatgagacaagcccccgacacggttaccaaccacatggccagtctgcccaggcctgaccccaggaggctttctggcagaccccttctccccaaggtatcatcaccttccaagggcccagatccgattttaccttggacccctgcgtcttgcccctgggaacccaaatggggactgctctgaacctttggatgacatctgtggccccggagatgttctcaacccaggggtgcccttcgtaaatgttcctccatcctcactgtaccaggagtgtgtgaataaacacagaccccctctgtg

SEQ ID NO: 170200 - DNA, 559 bp, Homo Sapiens
tatagtgtccacagtgctgcctagtccttctgccaccttcccagtcccaggacgggccctggagggagaaaggagcctgtgccccctgatgactctggctgtcctgatcctgtcttccctcccctgaaggaaagtttgcactggattttattggagccccatctccccagcgggcaggcgggcggagcctgtatatatgtatatactcagtgcctcagttcagcttcctccacctcgcttccactgcacaggcccaggaaggagaaaggccaagccaaagtgggccccaccctgcccccgtcgtgctccatccttccctgccggggcctgctggcccctgtaaggtcccgcccccaaagaccctggggccagcggggccgaaagcggagttgggtttgccttattttgctcattggattcaagttcttttgcatagttttcttctaacccctgttggagtccaggggctggagaaaaggacaaatttatgcagctattttcaaccattccctgttcagagtggggtaggggttctccaccgttacccgatccactccat

SEQ ID NO: 170201 - DNA, 1075 bp, Homo Sapiens
atggcgctgatgacaccctactcgcgcgttaggaggctcgggtcgttgtggtgcgctgtcttcccgcttgcgtcagggacctgcccgactcagtggccgccatggcatcagatgaaggcaaactttttgttggagggctgagttttgacaccaatgagcagtcgctggagcaggtcttctcaaagtacggacagatctctgaagtggtggttgtgaaagacagggagacccagagatctcggggatttgggtttgtcacctttgagaacattgacgacgctaaggatgccatgatggccatgaatgggaagtctgtagatggacggcagatccgagtagaccaggcaggcaagtcgtcagacaaccgatcccgtgggtaccgtggtggctctgccgggggccggggcttcttccgtgggggccgaggacggggccgtgggttctctagaggaggaggggaccgaggctatggggggaaccggttcgagtccaggagtgggggctacggaggctccagagactactatagcagccggagtcagagtggtggctacagtgaccggagctcgggcgggtcctacagagacagttacgacagttacgctacacacaacgagtaaaaacccttcctgctcaagatcgtccttccaatggctgtgtgtttaaagattgtgggagcttcgctgaacgttaatgtgtagtaaatgcacctccttgtattcccactttcgtagtcatttcggttctgatcttgtcaaacccagcctgaccgctttctgacgccgggatggcctcgttactagacttttccttttaaggaagtgctggttattgagggttctcaaaaccattttgaaagcatttacttttttgaccacgaggcatgagttttcaaaaaaatcgggggtgcgtgggataaggggttcgtacaagttagggttgcgtggctttttttcaagggggtggcccatgaatgtgggtggcccatcacttttctgaattcacacggacgggaaatcggctggcggaacttacaagcgtggtttttaccactccggtaagtactgaagaaggg

SEQ ID NO: 170202 - DNA, 618 bp, Homo Sapiens
ctacgaaagtgggaatacaaggaggtgcatgtactacacattaacgttcagcgaagctcccacaatctttaaacacacagccattggaaggacgatcttgagcaggaagggtttttactcgttgtgtgtagctgaggacaagaagcaggcacagtgtaaaggcaccgaagcaacaagaggcagcttcaccccagaggccagaccagggcgcggcctgcggccggggagcaaccaccccccacagccgagggaggctggcctgcggccacacatgcacctggctgactgcccggcgggccctcgctctcccttgcctttttggtcagtctcatttggcttttgcgtcctgcgatagaaatggctctgagaggacagatgcgcctcttctgggcaagcacagtgacaaggtctgagtgtccagcctaaagtgcttggagagggcaccaaggtgaaccgagctcccaccgcaggccacagcagcgtggcgccctcggagtgtgacttaccgtaactgtcgtaactgtctctgtaggacccgcccgagctccggtcactgtagccaccactctgactccggctgctatagtagtctctggagcctccgtagcccccactcct

SEQ ID NO: 170203 - DNA, 927 bp, Homo Sapiens
  misc_feature (39)..(39): n is a, c, g, or t
  misc_feature (96)..(97): n is a, c, g, or t
  misc_feature (399)..(447): n is a, c, g, or t
  misc_feature (491)..(540): n is a, c, g, or t
ttaggaggaggaagggaccgaggggctatgggggggganccggttcgagttccaggagtgggggctacggaggctcccagagactactatagcaanncggagtcagagtggtggctacagtgaccggagcttcgggcgggtcctacagagaccagttacgaccagttacgctaccacacaacgagtaaaaaacccttcctgcttcaagatcgtccttcccaatggctgtgtgtttaaagattgtgggagcttcgctgaacgttaatgtgtagtaaatgcacctccttgtattcccactttcgtagtcatttcggttctgatcttgtcaaacccagcctgaccgcttctgacgccgggatggcctcgttactagactttttctttttaaggaagtgctgnnnnnnnnnnnnnnnnnnnnnnnnnnnnnnnnnnnnnnnnnnnnnnnnnaccacgagccatgagttttcaaaaaaatcgggggttgtgtgggnnnnnnnnnnnnnnnnnnnnnnnnnnnnnnnnnnnnnnnnnnnnnnnnnngtggggttggccccatgaagtgggtgccccactcacttctctgagatcgaacggactgtgaatccgctctttgtcggaagctgagcaagctgtggcttttttccaactccgtgtgacgtttctgagtgtagtgtggtaggaccccggcgggtgtggcagcaactgccctggagccccagcccctgcgtccatctgtgctgtgcgccccacagtagacgtgcagacgtccctgagaggttcttgaagatgtttatttatattgtccttttttactggaagacgtacgcatactccatcgatgttgtatttgcagtggctgaggaattcttgtacgcagttttctttggctttacgaagccgattaaaagaccgtgtgaaataaaaaaa

SEQ ID NO: 170204 - DNA, 506 bp, Homo Sapiens
gggggggccggggcttcttccgtgggggccgaggacggggccgtgggttctctagaggaggaggggaccgaggctatggggggaaccggttcgagtccaggagtgggggctacggaggctccagagactactatagcagccggagtcagagtggtggctacagtgaccggagctcgggcgggtcctacagagacagttacgacagttacggttgaaggggcccggccaggactcggggaagggtggcctgagagcagcgatgacctctggggtcactgtcccaggagggacttcacctggaacaagagctggaggcagccgcttgcccaggaggcttgtcccctgaggcgcttcgccagtgaggtgcgggctcagggcctcgagtctctcctggagcacgggctgcggtgcgccggcagcttacggggcggccagtccttgcccacaacgatgtggagccctgtgaaagtcggattcgaataaagggccacgtgtgcacccagcaa

SEQ ID NO: 170205 - DNA, 861 bp, Homo Sapiens
tatggacaatgcgctacgcgggcgactggggcgggaggaggggcgcctcgctgctcctgagctgcctggctaagctgggctggtgtgcggtgctgagtgatcttacccatgatacaaacccttataccaaccatacactgaggtgttgtaaggggagcgtaagcatcagctgcaagccagctgcgtggtggagtgcatgtctcgctcgtgttcgtactcgatgaaggcatagccacggggctttcctgaccgcttactgtagaccatgtgtattcttttgataggtccgtacacctcaaactctctccggagcttggattctgttgtgtcataattcactctcgccacgaagagagtcttgaaggcatccccctgagcattgggatcattgtgagggtcccacattttaagctctgtctccacttcttgctgtcgccgctcaatcttttcccgtcttttcctctccatgcgctcctctcgggtttcagcacgagttggaggaggggcatctcgagggtcctcaaactctcgaatgtacggcgcaatgccacaataaggttgattgtggtgtttttcatgtggcagtttctccaggggtggcaggtatggaatagggtcacggggggcaaagagggccagaaggttgggcggcaggaactgggtcatcttgccaagtcgcgtagcgccctcctcgctctggcgtctgtccggaggctcgcggcggctgcggcagcccctcagcaacaacaactcctgcttcggcttccactccgggggcgtccacgtccgtctgattccgtcgcccgctaagcgagcgcaccaggccgctgctcagccacccgcgcggcctccgatagcccc

SEQ ID NO: 170206 - DNA, 954 bp, Homo Sapiens
  misc_feature (733)..(733): n is a, c, g, or t
  misc_feature (768)..(830): n is a, c, g, or t
  misc_feature (844)..(844): n is a, c, g, or t
  misc_feature (885)..(885): n is a, c, g, or t
  misc_feature (915)..(915): n is a, c, g, or t
  misc_feature (922)..(922): n is a, c, g, or t
gaaaagacgggaaaagattgagcggcgacagcaagaagtggagacagagcttaaaatgtgggaccctcacaatgatcccaatgctcagggggatgccttcaagactctcttcgtggcgagagtgaattatgacacaacagaatccaagctccggagagagtttgaggtgtacggacctatcaaaagaatacacatggtctacagtaagcggtcaggaaagccccgtggctatgccttcatcgagtacgaacacgagcgagacatgcactccgcttacaaacacgcagatggcaagaagattgatggcaggagggtccttgtggacgtggagaggggccgaaccgtgaagggctggaggccccggcggctaggaggaggcctcggtggtaccagaagaggaggggctgatgtgaacatccggcattcaggccgcgatgacacctcccgctacgatgagaggcccggcccctccccgcttccgcacagggaccgggaccgggaccgtgagcgggagcgcagagagcggagccgggagcgagacaaggagcgagaacggcgacgctcccgctcccgggaccggcggagcgctcacggagtcgcgacaaggaggagcggaggcgctccagggagcggagcaaggacaaggacccgggaccggaagcggcgaagcaacccggaaccgggaaccggccccggcgggaagcgggaaccccaaggaacgaacccgccgggncggccggggggccacacggcggaagccccccccannnnnnnnnnnnnnnnnnnnnnnnnnnnnnnnnnnnnnnnnnnnnnnnnnnnnnnnnnnnnnngagagggggcaggngacgggagccaaaaggcacaagagggcccagggcaccaggngcacacccacgggagcccacacgcgcgccngaggcgnccccaggcagggcgcagccggaccgcacccgg

SEQ ID NO: 170207 - DNA, 578 bp, Homo Sapiens
cccgctcagagccagtttctcccgctcagagccagtttctcccgcttagggcagacaaagcaggttactgtgtaccggctcatctgtaaaggcaccattgaagaacgcattctgcaaagagccaaggagaagagtgagattcagcggatggtgatttcaggtgggaacttcaaaccagataccttgaaacccaaagaggtggttagtcttcttctagacgacgaagagttggagaagaaactgaggctgcggcaggaagagaaacggcaacaggaggaaaccaaccgagtgaaagagcgcaagcggaagcgggaaaagtatgcagagaagaagaaaaaagaagatgaattggatgggaaaaggagaaaagagggtgtgaacctggtgatcccatttgttccctcggctgataactccaacctctctgctgacggagatgactccttcattagcgtggactcagccattccaagccctttcagtgagatctccatcagcagtgagctgcacactggctccattcctctggacgagagcagcagtgacatgctggtcatttgtggatgacccagcctcct

SEQ ID NO: 170208 - DNA, 798 bp, Homo Sapiens
aggctcttgtgcagcggggggcactcccgagatgccttctcctcaggagcttgaggcctcagcacccaggatggtgcaaacccatagggcagtgcgggctctctgtgatcacactgctgcaagacctgaccagttgagcttccggcgtggggaagtgctgcgtgtcatcaccacagtggatgaggactggctccgctgtgggcgggatggcatggagggtctggtgcctgtggggtatacctcccttgttctgtagccctgggaccctttcctgcgtatgtgtctccttcctggtcacctgggaatggaatggccagtgaacaccatcccagaagcatttcccctctgcaaaatgacgtttcttcccacgtctgtttctgctaatatttaaaataaactttccttcttccctcctatacccacctgtaaggtgaaatctgctcttcttccaaatatataaaaaaggaattgccctccaggtaatccctttcctttttcccgtctatataagggaatgtcttccttcctatctatctgcaaaatggaaatctagacctccttcttcatccataagtggactgtgccagtacaatacatgcctcagcccccaagcctagaaggacctctagtctccttcctgtgtggaatcttccccactccatccctcccaagttgcctgtattgataatgtactcactcatgctgtactaggtgctgaagcctggacacccttggtgggtgggcctgtggtgatggtttgcatccttcctcctttgtcccaataaagtatgggagttg

SEQ ID NO: 170209 - DNA, 421 bp, Homo Sapiens
  misc_feature (29)..(29): n is a, c, g, or t
acttcgagttccccagggtttatagacantcgttccccagtttgcctgaaggccaccccagaggcaagcagagcattcagactccaaacagacccctgttcatgccgacgcttgcacgaaccgccccagttcctgtggctccctcggaatgctaaggggatcggacatgaaaggaccctgtgagccgattgtcctatctccagcggccctgtcatccagctcactcatcaatgggccagtcaggcccaggcactgggctccggaggactcaccactgccccctgctgccatgtggactggtgcaagttgaggacttcttgctggtctagtcacgcatgcagtgttggggatgccttggtttttactgctctgagaattgttgagatactttactaataaactgtgtagttggaaaatctaa

SEQ ID NO: 170210 - DNA, 595 bp, Homo Sapiens
  misc_feature (59)..(59): n is a, c, g, or t
cccacctccccacagctcctttaaccaggagcttccctcccagagtgagctacgtcttnggaggattgaagcagggaggtggcagtggctagagttgctcagatcggctcagatgaaggcccagggatcaaagcatttgctcaccacaacggagtcaggaaggcactgtgcagccaaaccctcttgtccaatcacatgcaggccccaggcccctcagaaacgccctgggtggagggaggagcccaacagatagggtcagggagtcagtggggaaagcagaggggagagcttagagtgaaacttgaaactgctatggacatggaggtcagatgggaacttggaactgggcatgaatcctgaatggtggggaaacttgaagccatcacagccaagaggtggggttccatgacctgccctgaggtcagcagctcccagactcctttgccctcactagggaagccccagtcaccggacttgtccccatggagtgaagagaggccccatttttgagtgttgtgtgtccaaaacagtgttgtgtcactggtggtcatgttgcttagttgaagagaataaagggaataagatttcaaaaaaa

SEQ ID NO: 170211 - DNA, 609 bp, Homo Sapiens
caacaatgcacacgcttcctgccaaacgccctgatcagtgtggactttgctgccaactatctcaccaagatctatgggctcacctttggccagaagccaaacttgaggtctgtgtacctgcacaacaacaagctggcagacgccgggctgccggacaacatgttcaacggctccagcaacgtcgaggtcctcatcctgtccagcaacttcctgcgccacgtgcccaagcacctgccgcctgccctgtacaagctgcacctcaagaacaacaagctggagaagatccccccgggggccttcagcgagctgagcagcctgcgcgagctatacctgcagaacaactacctgactgacgagggcctggacaacgagaccttctggaagctctccagcctggagtacctggatctgtccagcaacaacctgtctcgggtcccagctgggctgccgcgcagcctggtgctgctgcacttggagaagaacgccatccggagcgtggacgcgaatgtgctgacccccatccgcagcctggagtacctgctgctgcacagcaaccagctgcgggagcagggcatccacccctgccgtccaggcctcacggtgtgcatg

SEQ ID NO: 170212 - DNA, 403 bp, Homo Sapiens
  misc_feature (121)..(121): n is a, c, g, or t
  misc_feature (310)..(310): n is a, c, g, or t
tcatctgctgccaattaattggggaaaaaattgagctggatttctttgagagaaaagaaaagctcctgccacacaacgtcgcgccctcggcattttgtctgagaacctccagcactagcgnctgtttctgtgtctcccttctttgctggctttattattgaccataatgcctgcccacttgagcaactctgtccttgagcgctgaggagtcaagggcccttctggcagccccccaaacaggatggcgcccacagaaagaaaggaggctttgtaggggaagagggccccaccgcctgccagtcccgtcctngaagtcagaagaatggcccaggctgacacccttttccttggagagaagtttcacagcgtaagtttttccccagggaaaagggggtttcaaaag

SEQ ID NO: 170213 - DNA, 257 bp, Homo Sapiens
atgagccaccgcttccagcctgctatagataattttttttaaacctgtttatattgtgaatttaaccccattcattccgcaacctgctacatataagacaccattctaggctctagcggatatagcagtgaacaaaaaaggcaaagtttctgctcctgtggaattcatattctggtaggcaagcagatattttattgagcaagcattgatttagtagcatatagaaagccaaagcagaggggagaagatataagagg

SEQ ID NO: 170214 - DNA, 690 bp, Homo Sapiens
  misc_feature (602)..(612): n is a, c, g, or t
ccgaacaagcacacgcttacaaagcctcgcccatcatgatgtggcttcccgccacttgaacactgcgacagaactggatccgccatttgggacaacctaacaaagcacagcccgccatgctgagcaaagccgcaatgtcaaaatcgccattttaagccctgcaccttagtctttcctaaccttccatttttaactagtcccttgtactgataaaagatgattcttactgcctcccgatacaacaatcacgcaaagctcctaacaagccccaaatcaattcattcagataggtttagctcatgcaatgcacatgacttcctctgcctgacctgctatcatccatcttgcctccctagtttaacttagcacaaacgactagccctaagccgagttatgcggcaagtctaaaatggcggccacttttcctccacaatctgaacacgcccttagcttaactgcagagtcattctctgccaaagcggtaggtacactcacacaccaccaaatgatcagcagcaaaaaaaagtgtagatattccagagagtgcaacaacccacaaaaccaacattttttcatccataaaaagcaccgatgggcgatgnnnnnnnnnnntcaaagcaggtatccgcggccccgatgggccagaaaaacaaaaattaaagcaggtatccgaggccccgatgggcaagg

SEQ ID NO: 170215 - DNA, 394 bp, Homo Sapiens
gactacaggattgagctctgagtatcagattgacacaacatatgtgccatggccattaatgttacacaacccaactactatccatcttcctgaagagcaaacagctcctgctccttggaggtggtgggaactgcttttcctttggtacctacttcaaaccccatacagtcacattagaactttcttccttaagtgctgggcagtaaggactggactaataatcaggacccactaaagtagacaataaagttttccacaaataggatgaacctctagctatagatactgacaatcctcctttccccatcctttttttcccttagcactattcagtgcaaaacgtcaaaaaggctggcaaaatacgtaaaatacctagaaacaatcactacagtaa

SEQ ID NO: 170216 - DNA, 465 bp, Homo Sapiens
gttggagggatctggattcattcctcctcatttcctggagtgactgtgatcaatttgactacaggattgagctctgagtatcagattgacacaacatatgtgccatggccattaatgttacacaaccatactagtatccttcttcctgaagagcaacagctcctgctccttggaggtggtgggaactgcttttcctttggtacctacttcaacccccatacagtcacattagacctttcttccttaagtgctgggcagtaaggactggactaatattcaggacccactaaagtagacaataaagttttccacaaataggatgaccctctagctatagatactgccactcctcctttccccatcctttttttcccttagcactattcagtgcaaaaagtgaaaaaggttggtaaaataggtaaaatacctagaaacatcactacgtacgctaccttccggaccgcc

SEQ ID NO: 170217 - DNA, 504 bp, Homo Sapiens
taagcgtactggaagaagctctggttgtcatcaaaggcaaagttctctacacctacatggccagtgaggacaaagtggccttggagagtatgcctctgctaggcttcaccattgctccagaaaaggaagagggcagcagtgaagtaggacctatttttcacctttaccacaagaaaaccctattttatagcttcaaagcagaagataccgattcagctcagaggtggatcgaggccatggaagatgcgagtgtgttatagcagttatcaaggatgtggacttgtaacaaattcttaggtcaatatgtgaatgcttttagaagctaagctgtggctcaactcatccggacacacacctggattcagcaatgaggcctgaccttttttgctataaccgccccaccactcccctgcccttgccaacatcttcatgaatggaatccttaagggatatttatggacctctccttttctgtgttttccacccctaaccccacccgccacc

SEQ ID NO: 170218 - DNA, 1130 bp, Homo Sapiens
  misc_feature (42)..(90): n is a, c, g, or t
cttgaaaaaaattaccaattcactgactgtgctttgcgagtnnnnnnnnnnnnnnnnnnnnnnnnnnnnnnnnnnnnnnnnnnnnnnnnngtgtggttcctggagggggattaaaagccaccatgaaagatgatctggcagattatggtggttatgatggaggatatgtacaagactatgaagacttcatgtgacattttatcttttcttggtgtcatctttatgttgcccacaatcccttgaacatgtagcacaacttcctttcctttcagttctgccaaatgctacaatcagaagtgcagtatcttttgtgctggttatttaaccccttgacacttaggtgctaatgtgcaaatgagggaacttggatcttgctgccaaggggttaaaattgggaacctaagttgctactaaatcatagttcaaaacctaataatgttgtcgttgttgctatctgatttcatagcagcagtcactaaattggaaacaaaaggttgcaacgtgacaaaaaaaatttgtgtagtatttaccagcaccattcagtaatacagccttaaccatacctccttgaactacttcataacttgtcaagaaaagcagtttgcagcaagggcatgtggtgtgcacctagtattaaaattgctttgtcttaaaattgaacatgaggatattaaaaatacattgtgaagaagactgcttatctcagagtgaagatactgcggctgaaaagcactagtttgatataaaattaaaatgaccaaaaccctccaactttgaagctaaagaaggtaaacctttccattattgcattacatgttgtggaatctctcgagtgcaaagactgtctagttatttatcaggctatttctactgatgaactgcttcaggtgggggagggaaacttatttttatttgcctgatttaagtgtctgagaaacaaatcttagttctcttaggctgcaatggaacaactttaccagggttttggcatttcctttcctttcctttataaaacatgctcagaaaactgcaccagttaactacagtttggtaaattgttatgttaacaattatgacatctgcaatgttttataaagcaactaatttaataaaatcactgttgtgaggac

SEQ ID NO: 170219 - DNA, 1415 bp, Homo Sapiens
ggtgtgatgagaagaagaatgcattggagatctttgctaaagttgaacaatcccggtactgtaccatatcagtcctttgtgggtagtaggtagcaagtaagaaacttttcaggaggaaattcctatttaaaatagattgattttagatgattgttcatccacaccattttatatagatactagtattaagatcaaaagcttcctcttcctcaggacagcttctactttagatgatccaataatgattaaagaatacctgtacctgcagattccagtttcaaagaaatttaattattatttacacagttaaggaacaggtgatacattttcatttgttagaaactgatctttctgtaataaaatagattttcaattcagtgtatgtcattattactgctaaggaaatcttagcccttgtctgccttaaaggaatctttatttaatttactgtaattattgctgtgtagtcactacttttgttaatttctcaaatcacttagatgatggtcttgttttccacttagtaggtatacagagctttgacgttcctattatttcctatataagagaaatttaaaacattttttgttctttctgtcttaggggaataaaaaaacactaaccacacatttggttaaactgcttaggagaagacataataaagattccccaatctatacttaacagccataaacctgagttaccaggctcagttactccaaataaatagttcttataggtacttaattaattaggccttggtatctaaataacaaaataatgtccccaaataaataagaggaaggcagccctatacctttgttgctctatggtgacaacataaggacctggcaaatcactcatgttttaaagctgtaactatgtcaagcatttattaagatttagtagagaacgtagagaactgtactcccaagagctgtgttctatactctcaaaaagtatctcttgggaggtaacacaaaatttaagtcctcacaacagtgattttattaaattagttgctttataaaacattgcagatgtcataattgttaacataacaatttaccaaactgtagttaactggtgcagtttgctgagcatgttttataaaggaaaggaaaggaaatgccaaaaccctggtaaagttgttccattgcagcctaagagaacaaagatttgtttctcagacacttaaatcaggcaaataaaaataagtttccctcccccacctgaagcagttcatcagtagaaatagcctgataaataactagacagtctttgcactcgagagattccacaacatgtaatgcactaatggaaaggttaccttctttagcttcaaagtcggagggttaggtcatttaatttatatcaaactagtgtttcagccgagtattcacctgagatagagc

SEQ ID NO: 170220 - DNA, 239 bp, Homo Sapiens
caatgagaagcaaatttacagtaccataactaataaagcagggtacagatataaactactgcatcttttctataaaactgtgattaagaattctacctctcctgtatggctgttactgtactgtactctctgactccttacctaacaatgaatttgttacataatcttctacatgtatgatttgtgccactgatctgaaacctatgatttcagtacagcatacctttccggtccgagcc

SEQ ID NO: 170221 - DNA, 1026 bp, Homo Sapiens
tccccgatatggtatgctgttactgtgtgtgctgggatggaggatgggagctgtgcttctagatgtttccactgtctcctcagtagatagataatgaatgggtgattgtccctagtcactgcagtgtgaggataatctacgaaatgaagtgtcccaatacactttacaggataggtggagaaacccatgaagcaccactgcagtgggttataaataacgtcctttcaagttgaataaaacatcatctggacaccgggatgatacatccggcaacggagcatgacctatgattttggtgacattcctcataatccacagtttgaaaatactatctttaaatacagccactgtactagatatgtatatgccctctgataacaccagacaccgagaaagcaccaacaactttcaatgaaggttcctacctgtctacaagcgtaatcacactggtcacacttaaagcgcttctcattcttgtgtgacttctgatgctggatgagggcatagcgctcatgaaacacagcatcacagtaacggcatttcttgccttgctcaatataggaatgctgctttcgcaagtggacacccaaatcactttttcgggctatgactgtgtcacagtggggacagtgaaatttggccacattttctgtgtgcttctgtaaaatgtgcatcttcatggtaccactttgggtaaaccgagcatgacaaatataacattcataaggcttttcccctgaatgggttctcatgtgccttttcagcttgtataaatccctgctggcataactgcacaaactgcactgaaacggacgctctccagtatgagagcgaatgtgacgttttaatttgctgacttctacactggcgtaatcgcacatggaacacttgaatggcttctcgtgggtgtgtttgtaacgacgatgccgaaccaattctccactgagatcacaaaggccatgtcgcagtctgggcacttgtgaggacgagtactgtgtgtgtgtagatatagaagagtgccttttg

SEQ ID NO: 170222 - DNA, 465 bp, Homo Sapiens
aaggagttacaataaaaatctttatttaggtttggtcagtacaggtaagatatactggagtcacagagcaatatgcattaacaggatacaacagttcataaaaactgagtaactatgcacacaaatttcttaaacagtcacctaaagagaaaatgcacagatgtatggtggaaaaaactgtatctaacactgaaactactacaggactccatcaatgagtccaacttttagtgataaaaaactactgtactgggcaaacttggcagtcataaacccacatctactctaacaagtctgaatggtgcataagtacagtaacagcatgagtacgaatgcccttacacagcacagattctaaacagacagatttatacagacatcattgtgttgtattttaaggaaaaatttccatttacaatttcacattaactcatataaaaataacttgccctacacaaaatggcc

SEQ ID NO: 170223 - DNA, 355 bp, Homo Sapiens
  misc_feature (117)..(117): n is a, c, g, or t
  misc_feature (189)..(189): n is a, c, g, or t
  misc_feature (299)..(299): n is a, c, g, or t
  misc_feature (317)..(317): n is a, c, g, or t
aaatgccgctttggaaattgtaacagttaattactttgaatgttgctaaaaggacattttgtgtagggtcaagttatttttatatgagttaatgtgaaattgtaaatggaaattttnccttaaaatacaacacaatgatgtctgtataaatctgtctgtttagaatctgtgctgtgtaagggcattcgnactcatgctgttactgtacttatgcaccattcagacttgttagagtagatgtgggtttatgactgccaagtttgcccagtacagtagttttttatcactaaaagttgganctcattgatgggagtccngtaggtaggtttcaggtgtttaggatacagttttttcc

SEQ ID NO: 170224 - DNA, 864 bp, Homo Sapiens
  misc_feature (589)..(589): n is a, c, g, or t
ggggcgtcattctgctagtattgtggcaggaacaattcatatacaggtgacatctgatgtgctagaacaaagaatagtacagcaggttacaggaatacttaaagatgcgggagtaaacaatttaacaattcaagtggaaaaggaggcatactttcaacatatgtctggcctaagtactggatttcatgatgttctggctatgacaaaacaaatggaatccatgaaatactgcaaagatggtacttacatcatgtgagataactcaagaattacccctggagaataaacaatgaagattaaatgactcagtatttgtaatattgccagaaggataaaaattacacattaactgtacagaaacagagttccctactactggatcaaggaatctttcttgaaggaaatttaaatacagaatgaaacattaatggtaaaagtggagtaattatttaaattatgtgtataaaaggaatcaaattttgagtaaacatgatgtattacatcatcttcaaaaatagatatggatggattcctagtgaagacccaaaattacttctgtttactttcctatcaggaagcatctccattngtaaatatgtatttacatgtttattacaaagacccaaatgaaaaatttttagtccattttttgcatagcctaaagataaaataggaataaaagttctatatttatggattttctgtatataaaactggtttctaattataacttaagtccattaagtaaaatctgtattgccactttaaatgtaaactaaattatttgggagaaacttcaaccactgatatgagataagcaatgagaatagggaagtgtataacatcacagtttttgatgtatta

SEQ ID NO: 170225 - DNA, 320 bp, Homo Sapiens
ataccaaaagttctggctgaaaatggccacaactcagactgtgcaagttctccagttgttcatgaagacgtggagatgcgagcagccctgcagttcttgatgcgacacatggtgaagcgagcagtcatgcggtcacccataaagagagcattgggattagctgatctggaacgagcgcaagccatgatctataaattagtggttcatgggcttttggaacaccagtttgggggcaaaattaagcaagagattgatcaacaagctgaagaaagtgaacctgcccaacaggcacagacaacagttactaataaaccatcagc

SEQ ID NO: 170226 - DNA, 426 bp, Homo Sapiens
attcatccttaattccaagtgaagcagcacagtgctgagaaacagttcatccatggtgccatgttaaagaagttggaaatatatcttgaaaatcctatcttccttttaggcttgaatatgatgctgaacagtaagtttgttaaatcttggaacttaaaacaatcctgctttctcaagtactattctaaaattgcgctttataagggatgatatttctaccacctcactcatatttttagctgaaatgattttcctggtatgtctgttattttgtggaaaaagaaatattgtgtaaaatgggtgctgccaaaattccaggccattttgcagggactctgaagtgacctttagtagtaatagtcttatgtgcagtaactataatggtaaagaatgttaaataataaaatttaacattttccaaatgct

SEQ ID NO: 170227 - DNA, 296 bp, Homo Sapiens
  misc_feature (209)..(221): n is a, c, g, or t
tttatgttaggctgatttataagtgctgctttgggcagttacacagtttgtttacaatgaggagttatttgactttgaacatactgtacatggcaattagaagttgtcatggcaaaagaaaaccacagctggcctgccacagccaacacaagaaccagaaaatggtagatgaaatgaaggaataaaggtggggtttattccttattatnnnnnnnnnnnnntaattcttcagcagtcttaacaaagacatcaagatacaaaattacaagtgttttgactccagccctgtccccacc

SEQ ID NO: 170228 - DNA, 291 bp, Homo Sapiens
agtgcgtgctggagggatatgaagcctgtataatagtttaatcttctcattcatttctccattatacataatatcgaggcagctcacaaacgctttgaactccatgagctggtccatgttgtcatccaagagcctgaacgtcctttcggcgaggatctccgtgtgggccccgcaagtccagggcgagactagctgaaacaggtgtgcaaactgccgggcgtctatgcggtactgctcagcatagggccggctggggtcgtggcgtgaggccatgggcctgggctgctcccc

SEQ ID NO: 170229 - DNA, 680 bp, Homo Sapiens
tttttgtaattgcaggagctgtcacgggaagtctttttaggattaacgtaggcctgcgtggcctggtggctggtggcataattggacccttgctgggcactcctgtaggaggcctgctgatggcatttcagaagtactctggtgagactgttcaggaaagaaaacagaaggatcgaaagccactccatgagcttaaaactggaagagtggaaaggcagactacaaagttactgagcacctccctgagaaaattgaaagtagtttacaggaagatgaacctgagaatgatgctaagaaaattgaagcactgctaaaccttcctagaaacccttcagtaatagataaacaagacaaggactgaaagtgctctgaacttgaaactcactggagagctgaagggagctgccatgtccgatgaatgccaacagacaggccactctttggtcagcctgctgacaaatttaagtgctggtacctgtggtggcagtggcttgctcttgtctttttcttttctttttaactaagaatggggctgttgtactctcactttacttatccttaaatttaaatacatacttatgtttgtattaatctatcaatatatgcatacatgaatatatccacccacctagattttaagcagtaaataaaacatttcgcaaaagattaaagttgaattt

SEQ ID NO: 170230 - DNA, 483 bp, Homo Sapiens
cctaaatggctgtaaactaaactaaaacaggttacccagaaaaaagtggcaaattccaaaatggcttaatacctgtgacaactatttgactgagccaggtacaacatcgatgaaattcagacatacaatgtaaagttgaaataatcccaaattattttacattatttatgtgtactttacaaataacacaaatatggaaatgttatcttggaaagctgttggaactgtaagcactgcaacgtatgaaagaaacatatttagcaataaaaaatttaataatatcctacaactgaattagttgcatatttataccattcaaaatcttgattttaacctcattcactcctttgaaaaatacattcctcttttgttcttttaaatgcaaattagtggcagttgcagcaaaaacgccgaaattctataagaaaaaaactgatctaccccaaacatatcattcagcacaaactgcggtacctgaaatcc

SEQ ID NO: 170231 - DNA, 575 bp, Homo Sapiens
gggtttaacatgaaagaatttaaataaattcaagccatgagatggattttgatgctgagtggctatttgaaaatcatgatgagaaggattccagagtcaatgctagtaagactgctgacaaaaagctcaaccttgggaaggaagatgacagttcctcagacagttttgaaaatttggaagaagaatcccaatgaaagtggtagcccttttgaccctatttttgaagttgaacctaaaatctctaacgataaacccggaggaacatgtaactgaaggtaatacctgaggatgcttcagaatctgaggagaagctagaccaaaaagaggagggttcaaaatacgaaactattcatgtgactgaggaaccaaccaaactaatgcacaatgcatctgatagtgaggtttgaccaagaccgatgttgttgagtggaaagacggtccttctccatctgagagtgggcctggatcccaacaaagtgtcagactttgaggacaatacctgcgaaatgaaaccaggaacctggtctgacgagtcttcccaaagcgaagatgcaaggagcagtaagccagctgcc

SEQ ID NO: 170232 - DNA, 535 bp, Homo Sapiens
gaagaagatggcctgtctgctctgccggcgccagttcccgaacaaagatgccctagtcaggcaccagcaactctcagaccttcacaagcaaaacatggacatctaccgacgatccaggctgagcgagcaggagctggaagccttggagctaagggagagagagatgaaataccgagaccgagctgcagaaagacgggagaagtacggcattccagaacctccagagcccaagcgcaagaagcagtttgatgccggcactgtgaattacgagcaacccaccaaagatggcattgaccacagtaacattggcaacaagatgctgcaggccatgggctggcgggaaggctctggcttgggacgaaagtgtcaaggcattacggctcccattgaggctcaagttcggctaaagggagctggcctaggagccaaaggcagcgcatatggtttgtcgggcgccgattcctacaaagatgctgtccggaaagccatgtttgcccggttcactgagatggagtgagagagcaccaccaataca

SEQ ID NO: 170233 - DNA, 880 bp, Homo Sapiens
aaattaaaacacaggccaatttcaacatttctacaaatttaaccagcattattttggtcaaatccacctttaggctgaatcaatgagaacaaggacaagggacattgaagtattctcctcaccacaatggaggtttttctcactttccacactgcatagccactacatggaaactcccagaatgatgagcaattcagtcatgctctacacttttctggttcaaatgaaaaatgatgtatcttcttgtattgcttctgacaaaatatgaactaaatacaagtctataataacaagaatccaagagtagctcatacacaagtcaactatgtgtatgtttttattatttaaagcccaccattcagcttatctgtctaaagagatgataacaaacaatttgtttctttttcactaatgatactgatgaccagtcagtgttaagagagggaaagtccaagacagctgtttataatccagtccaatgacacacatataactatttcaacttcaagacttctgacttattgcctctgccctaaacaggtcaaacactgatggcagataaaacggcacaaacccttttggcatatgaaagtttaatacaggaatgatccaggattagtccctgcaccaggtctcctcagcagcccccttggtttcttcatctgtcacgtgtgacctgtttaattcccaaatggtcaactcataactggcacacaccatatactccatttcgagtgcgtgtgaacactcctcagttaaagccacatgactgaggtaaaacagtgcatgactgtgctaggaaagaacagtattcagtgacgaacatccctttaacgttaactttcctaaagaatgtaataaaaatggaaaacttttttcc

SEQ ID NO: 170234 - DNA, 674 bp, Homo Sapiens
  misc_feature (640)..(640): n is a, c, g, or t
gattagaggatcccgcgcaatgtgtggtgttatggacctcgtcctagtttatgtcacagacagcccgagaccgttcttacggaaacaccccaggacaccgtcgaatgaaacgggtggaatttagaatcttccaattcaaagtactccttgaatacagactccccagtgtcttctatcgattcagctgtcctttcacctgatactgtcccactgggaacaggaacttccatattatctaaacaggttcaaaataaaccaaaaactggtcgaagtttattaggaggaccagcagctcttagtccattaaccccaagttttgggattttgccattagaaaccccaagtcctggagatggatcctatttacaaaactacactaatacacctcctgtaattgatgtgccatccaccggagccccttcaaaaaagtctgttgccagaatcggccaaactggaacaaagtctgtcttctcacagagtggaaatagccgagaggtaactccaattcttgcacaaacacaaagttctggtccacaaacaagtacaacacctcaggtattgagccccactattacatctcccccaaacgcactgcctcgaagaagttcacgactctttactagtgacagctccacaaccnggaaacgccacgagcacaaaacaaagtaacatgt

SEQ ID NO: 170235 - DNA, 408 bp, Homo Sapiens
agaccagggctattggtccttaccactgctgagacagagccttgcttacctgaaacacatctccattgactgtggtccccatgtcctcagaaccagctggaaagagaacaaggagatagcattactcgctgtttagcttatagcaagcaggaaatggtcctacattagcccctcaaccccaactctgtgtatacccatgtatatatcgacccacatgcaaacagacataatggatatatatataacttaggctcaatcccacccctgactgtttataaagcctctcacagccattagtacattttatgttcaccacagccctgcaatgaaatttgttgtcaacccattttacagatactcagctgaggctcagagagccatgctcaaaatcacccaaccgtaacgctt

SEQ ID NO: 170236 - DNA, 218 bp, Homo Sapiens
actgtgttcaaattctccaggagaatcttggggaattaatattcctttgtgagaaatgttttgatcataagcctagaatgataagtaaaagaaataaaaataattctactgcgtgttttcacccggttacaaggcatgagtttgaagacaaaaagtcccttgtcaacaatttgcgagagacaacagtaaaatactccaaaatacgttcttttcatggt

SEQ ID NO: 170237 - DNA, 893 bp, Homo Sapiens
  misc_feature (17)..(17): n is a, c, g, or t
atccttagaagattttngttcttctttaaattcattttcaagtgagtgaatccaaacgagatctgtccacctcaacttctagagagggaacaccgcttaacaacagtaattcttcccttttacttatgaatggaccaggtagtttgttgcttcagagaatttcctgggaatttcaagtcagcctagaaatgactttggaaacttttttggaagtgcagttaccaaaccatcttcatcagtgactccaagacatcccctcgaaggaacccatgaattgagacaagcttgccagatctgttttgtaaaatcaggccctaagttaatggatttcacttaccatgctaacatagatcataagtgtaagaaagatattttaatcggtaggataaagaatgttgaagataaatcatggaaaaaaatacgtccaagaccaacaaaaacaaaatatgaaggaccatattatatatgtaaagatgtcgctgctgaggaggaatgtagatattcaggccactgcacgtttgcttactgccaagaggagatagatgtgtggacactggagcggaaaggagcattcagccgggaggctttctttggcggcaatggacaagattaaccttactgtgttcaaacttctccaggagcatcttggggaatttatattcctttgtgagaaatgttttgatcataagcctagaatgataagtaacaagaaataaagatcattctacttctgtgttctcacccggttacaaagcatgagttgaagacataagtatgtgatagtttctaatttctgtaatgacaaaattagattctttttcctagatcttgattagaaactagtagtaatgtctgtccaggccacaaaaaaacggatacacaatactgacaca

SEQ ID NO: 170238 - DNA, 298 bp, Homo Sapiens
tttccgggaagtaagctgttactgggatcaatttgacaaggaatggagtcattggaggaatggacaaaaagactggcccaaggaagaacagagacagggtggaagtttgggagcatgaggcagggcccaaacttgagcaatgcaagtaaggcactaatctccagggcaaaacttaaggggatactaacacccagtcatcaaggtaagttaatactcaatgcaatattgtaaaaaatcaaaattaaagtcagcagtgtcagaatgaacgcattatcaaaaatggaaatggtgacaagat

SEQ ID NO: 170239 - DNA, 203 bp, Homo Sapiens
ctgagggataacagagtagtagatacagacggtacagaaaccattcctgtactcaatgagtgctctcccagtattcccatcatctatcattatgtaacaaattatactaatacgtagtggcttgaaacatccatattattcttccaccatattatgcggaacagcagtttgcaaagtggcatggtggactcagatgatatctg

SEQ ID NO: 170240 - DNA, 240 bp, Homo Sapiens
taatcacaacaacagatgcctacactccttcccaagacttccctctctgatcttagaagcattgtcaaatctgggttcccagcctgccatggcaagctgcttgctacttgggagtgaaaagcccttgtggagctttttcttattcggtgactgctcataaagtgccttcacctcgcttgccttattagccagtcctgcctccaattaccaccacttgctcctttcaggatctcttccccc

SEQ ID NO: 170241 - DNA, 337 bp, Homo Sapiens
tgtctgtttaaatactacccacctttcaaggcccagttaaatgtccatttccaccacttatgtttacctaatgagtccagtcagattttctcttctcagaattctactacttgactaaccatatgctatcttgcattatatgtagaagtgtctcaattaggttacatgttcctctagagcagagatgacctcttacactgtttatctggccaaaaacagcttatttttccaactgcaaagcgagtaattcagcagtcacttgggacttaaaatattccagcccaaccacgggaggtcccactttacctttactagtgaagtcatctgtccttaatca

SEQ ID NO: 170242 - DNA, 342 bp, Homo Sapiens
ttggactgtagaataggaggcagggaatggcagggctgatgatcaagattctatgccaagccatgttccagtgttggaacttggtgctgagagcttcagaggaccacagaagggttctaggtgggaaaaggacagaatcgtgcatatccttaagagagttcatctcactttagtgtggagaatggagaaaagggggcaagacttggctagttaagaggctggtccaagggagagatgctgcaagtagggatagagagaatggggtagattgagacaaaatttaaaaggtacaattgacaagacttgataacagatggcacgtgggggacagatagtctggga

SEQ ID NO: 170243 - DNA, 681 bp, Homo Sapiens
tgctggaaagtccctggacaagtctgagcaaaagcttgttcctcactgtcatgtcagcaggcagcacagcagacggtcacagcagcagcacaagggatggcgctggccagaagtttcaggagatttggtatctaggcctggatctgccaaaaaatccctgggggaccttgagcctgtcactctgctcaaggttgaactacatgatctagatctcttctggctctaaaattctaaatatctaagtctcctgtggacacaggttaagttattaaccttctgccaaaggcacccctctcatcccaaccctggggccttcagaaaatgaggctgtgccagcccttccctcaccacccctgtcctgccaccataatcttcacagctcacaaggcacctcttccccactgccatccccataatcgccaggcctggctgtggactggttctctcctgagtctagagctgcctggctgcctgcagcctcctgtccaggatcagatctgctatgcgactgctgctccatggccttcttgtagaccttgcactttccggcacctcctggcctcaggtccaaagtctccaacagctctgataccactaccttcctaccccctatcttccgggctgcagtgtccatctgcctcccattcctctcctacccgcgccctacacgccagtaacaga

SEQ ID NO: 170244 - DNA, 416 bp, Homo Sapiens
ccaagcgttactgaggacgcctgagcagagggaagcacttcgcgagtgtgtttaccccgtagtccacagaggcagaaacagatatgctgtccaggattcccgaggcagcccaagtcattattacatctttattgaggttttacaaagtggccaggcaccatgctaatggatctgcatatgttatctcatttcctccttgcagcagccgtgggaagtaggtgttatcattatccacattttaaagacgaggaaactaaacctcattacttatgacttacgtatttaatgagttactgaaatcgtaaagtaacttccacaaggtcaggcagctactaagctttagagtttcagctgtaacctggtcttgcaactctgaagtgggtgcaactgcctcccaaacagctttaccttttccc

SEQ ID NO: 170245 - DNA, 393 bp, Homo Sapiens
atgagaattgtaatcttgtgcttgtagttgcggagggtggatttgaattctggaaattaggttccagagacaataagtcacataacactttctccgatagggtacagcatgtcctgaataggctatagtaaatcacctcagactggtcataggtcgggcatgcaaacatttctccattttactccctttggtaatgaatctagtaatagatggaaattttccctagattcactgtgttagtcagttggggaagtttggaggcaaagatacaggagtttatggggaggtagtgtacataaatataatcatatgctatataaggaagtttgggtcagcagcaggaccatatataggatatgattatatttatgtacactacctccccataaactc

SEQ ID NO: 170246 - DNA, 601 bp, Homo Sapiens
aaagaatccactctcgtgcatgactcttctcctcctcccctaaccaggtcaaccaagacagcctggtgttgagatggcacaatcccagtagaaaagcagtctaattagctgagtcaccatgaagagcagctgccccagggaatcactcacacctacaacacactctgtatgaatgagaaacaactgttcttcaaagaaggtactggcttggttaccacagcctggcctgacttgacttaactgctacaggacaggagctaagaggctgacccctctccctccacatctctcatgtaaatgtgacgattcatgaagtggaaggctggccacaggcttactggtagacccccgagtacaaggcatttgaccctggttttgagtactcctcctccaggtggatggctgtggagctcacactggcgagggcttgtgtggagccgaggataaggaggcatcacatggcactccaagccactgggtctaacttcctcccttcttcctgcccacacctaccttagtctttcccagatgtttcattgcatgtggaaatggagaaaaacactcaacacaggctaagtgaacaagggaacggcacggagat

SEQ ID NO: 170247 - DNA, 367 bp, Homo Sapiens
aataaaatgctgagaaatcaaggataaaggtggcagactgggaattcccactgaaaacagttaattagatgcacagcaaagcatcatttctggaaattttaaaaacttacatgtacctacaactctagactaaaaaataatatacacaaaggccatttccaaagagaattttcccccacctacgtaaaaagttcataaaggataattagcatccatattaagaaactgcctcatgaaattttaaaaagtgagaaagaaatacgctcaattaaaaagcttattcacagtgtacccaaactccccttgacttacagagggttaccctaaggttgcgcataggtcaaggcactatttacaaaacttatgc

SEQ ID NO: 170248 - DNA, 327 bp, Homo Sapiens
aggtatcttccttgagacagtcccccagttttgagttcatattagcagacacacttcccacattccctcatgattgtcatttacatctgggtgattccatcacatttcttatggctcactttcactctctttagcattccccattttaatttttggtgatttcaacacttaaatagatgattgttccagcatgttgaccttttagtttctttaacatctccggtgatcttgttctctactgtccttcagccactcatgcctacaatcacattcttgaccttatcattaccaataactgcataatgttaatttcagtctttcatcttt

SEQ ID NO: 170249 - DNA, 245 bp, Homo Sapiens
gcatatagtaacaggagctcagtcagtgtttggtgtctgagtaaatgtcactcctgccttgcatctaacctgcagttttcacagggtgctcatttgtggttttgcctgctgtgccttacagccagtatttgtccatatattttctattaccctagagattgttgacatctcatctgctgcaccttgttaacccccatctctaaaccagtgatctccatcatatttttgacctgaaaatttttgta

SEQ ID NO: 170250 - DNA, 402 bp, Homo Sapiens
cctcttcaccttaaaacataaactggccatcaatcatctctaatggcatctacttaaaactggcattatgattggctcctaagtgtgtaaaatgtcaggtggaaatacataaacacatcttcgaactggatacaggtctcagtgatcctaaaaagtgaaatatagagctatttcagagatgccatttaaaaatttatggagagagatttggtcttataatttctttcatgaatactaaaattctaactacaaagaaaaatcagaaatgagttatttgtgccatttaattactaaatcataaatccacagaacattagagctggaaagggccttctagattacctcctccaatgccaatattttgcagatgagaaagtaggaacagaaaatttattttctcag

SEQ ID NO: 170251 - DNA, 357 bp, Homo Sapiens
gttgtactgatgtataatgtccttctatgctctgtaacagttttgtcttaaagtctattttttctgatactaggatagctactcccactgtcttattaattactatttatatggaatgtacttttctatccttatacgttcaacatattgtgtctttggtactgtagtgattgtcttatagactgtgtatagttggatgctgtttttctcttttatccattctactaatctctgtcttaataggagatttcaaattattttcttagtcattaccctgcagattacaattaacatatttataatagtcatgtcttaattgaaagcaccttagtttcaaaagtgtacaagaaaccgctc

SEQ ID NO: 170252 - DNA, 776 bp, Homo Sapiens
tcttctgtgggcccgcctccaggatttaagctagactttgccaatccccaaggaaaaacaagtcaaacttggcatggagggatagccaccatttttcagagtcctggcgatgaagtgtggggagtagtatggaaaatgaacaaaagcaatttaaattctctggatgagcaagaaggggttaaaagtggaatgtatgttgtaatagaagttaaagttgcaactcaagaaggaaaagaaataacctgtcgaagttatctgatgacaaattacgaaagtgctcccccatccccacagtataaaaagattatttgcatgggtgcaaaagaaaatggtttgccgctggagtatcaagagaagttaaaagcaatagaaccaaatgactatacaggaaaggtctcagaagaaatcgaagacatcatcaaaaagggggaaacacaaactctttagaacataacagaatatatctaagggtattctatgtgctaatataaaatattcttaacacttgagaacagggatctgggggatctccacgtttgatccattttcagcagtgctctgaaggagtatcttacttgggtgattccttgtttttagactataaaaagaaactgggataggagttagacaatttaaaaggggtgtatgagggcctgaaatatgtgacaaatgaatgtgagtaccccttctgtgaacactgaaagctattctcttgaattgatcttaagtgtctccttgctctggtaaaagatagattggagctcacttgatgatgg

SEQ ID NO: 170253 - DNA, 670 bp, Homo Sapiens
  misc_feature (16)..(16): n is a, c, g, or t
acccccttcctagccntcttacctacgaaagtgctcccccatccccacagtataaaaagattatttgcatggggcaaaagaaaatggtttgccgctggagtatcaagagaagttaaaagcaatagaccaaatgactatacaggaaaggtctcagaagaaattgaagacatcatcaaaaagggggaaacacaaactctttagaacataacagaatatatctaagggtattctatgtgctaatataaaatatttttaacacttgagaacagggatctgggggatctccacgtttgatccattttcagcagtgctctgaaggagtatcttacttgggtgattccttgtttttagactataaaaagaaactgggataggagttagacaatttaaaaggggtgtatgagggcctgaaatatgtgacaaatgaatgtgagtaccccttctgtgaacactgaaagctattctcttgaattgatcttaagtgtctccttgctctggtaaaagatagatttgtagctcacttgatgatggtgctggtgaattgctctgctctgtctgagatttttaaaaatcagcttaatgagagtaatctgcagacaattgataataacattttgaaaattggaaagatggtatactgtttttagaggaataaacgtatttgtggttt

SEQ ID NO: 170254 - DNA, 794 bp, Homo Sapiens
gggccctaaccctgaggctgccgcgcggcggtcactgcgccggggtagtgggccccagtgttgcgctctctggccgttccttacactctgcttcaggctccagtgcaggggcgtagtgggatatggccaactcgggctgcaaggacgtcacgggtccagatgaggagagttttctgtactttgcctacggcagcaacctgctgacagagaggatccacctccgaaacccctcggcggcgttcttctgtgtggcccgcctgcaggattttaagcttgactttggcaattcccaaggcaaaacaagtcaaacttggcatggagggatagccaccatttttcagagtcctggcgatgaagtgtggggagtagtatggaaaatgaacaaaagcaatttaaattctctggatgagcaagaaggggttaaaagtggaatgtatgttgtaatagaagttaaagttgcaactcaagaaggaaaagaaataacctgtcgaagttatctgatgacaaattacgaaagtgctcccccatccccacagtataaaaagattatttgcatgggtgcaaaaagaaaatggtttgccgctggagtatcaaagagaagttaaaagcaatagaaccaaatgactatacaggaaaaagtctcagaaagaaattgaagacatcatcaaaaaagggggaaaacacaaactcttttagaacattaacagaattatatctaaaggggtatttctatgtggctaatataaaaatattttttaacacttggaagaacaggggatcttggggggatctcc

SEQ ID NO: 170255 - DNA, 773 bp, Homo Sapiens
ggggccgcgcggcggtcactgcgccggggtagtgggccccagtgttgcgctctctggccgttccttacactttgcttcaggctccagtgcaggggcgtagtgggatatggccaactcgggctgcaaggacgtcacgggtccagatgaggagagttttctgtactttgcctacggcagcaacctgctgacagagaggatccacctccgaaacccctcggcggcgttcttctgtgtggcccgcctgcaggcaagaaggggttaaaagtggaatgtatgttgtaatagaagttaaagttgcaactcaagaaggaaaagaaataacctgtcgaagttatctgatgacaaattacgaaagtgctcccccatccccacagtataaaaagattatttgcatgggtgcaaaagaaaatggtttgccgctggagtatcaagagaagttaaaagcaatagaaccaaatgactatacaggaaaggtctcagaagaaattgaagacatcatcaaaaagggggaaacacaaactctttagaacataacagaatatatctaagggtattctatgtgctaatataaaatatttttaacacttgagaacagggatctgggggatctccacgtttgatccattttcagcagtgctctgaaggagtatcttaacttgggtgattcctttgtttttagactataaaaagaactgggataggagttagacatttacaaggggtgtatgaggcctgaatatgtgaccatgaatgtgagttcccttctgtgaacc

SEQ ID NO: 170256 - DNA, 400 bp, Homo Sapiens
ggaggtatcagaaatatggttccattggaacacatgagtaccctcatctgaatgccagtgcatcttgggggaaagggctccagtgttatctggaccagttccttcattttcaggtgggactcttgatccagagaagacaaagctcctcagtgagctggtgtataatccaggacagaacccaggtctcctgactcctggccttctatgccctctatcctatcatagataacattctccacagcctcacttcattccacctattctctgaaaatattccctgagagagaacagagagatttagataagagaatgaaattccagccttgactttcttctgtgcacctgatgggagggtaatgtctaatgtattatcaataacaataaaaataaagcaaatacc

SEQ ID NO: 170257 - DNA, 1481 bp, Homo Sapiens
gctaaggtcttcacatgagcagaagcagcagcctcccaactcattttctcagcagcattctgagacacagggggcagaaaaacctgatccagagtcttctcattcaccccccaggtatacagaccagggcggcgaggaggaggaggactatgaaagtgaggagcagttgcagcaccgcatcctgacggcagcccttgagtttgtgcccgcccacgggtggacagcagaggcgattgcagaaggagcccagtctctgggtctctccagtgcagcagccagcatgttcgggaaggatggcagtgagctaatactgcattttgtgacccagtgcaatacccggctcacacgtgtgctagaagaggagcagaagctggtacagttgggccaggcggagaagaggaagacagaccagttcctgagggatgcagtggaaaccagactgagaatgctgatcccatacattgagcactggccccgggccctcagcatcctcatgctccctcacaacatcccgtccagcctgagcctgctcaccagcatggtggatgacatgtggcattacgctggggaccagtccactgattttaactggtacacccgccgagccatgctggctgccatctacaacacaacagagctggtgatgatgcaggactcctctccagactttgaggacacttggcgcttcctggaaaaccgggttaatgatgcaatgaacatgggccacactgccaagcaggtaaagtccacaggagaggcactggtgcaaggactcatgggtgcagcagtgacgctcaagaacttgacaggtctaaaccagcgtcggtgagaggaaggggtataagctacaatgcctagaagagaatgagcggacagattgaaagagctttgaaaagtataaggtgccatccacataacctggtgttcacgagaacacactaaaggactcctgagtcactaccacagccacctggaaaccacaaggcatttgatgctaccgttctggtcagggattgggctgcttcttcagttcctaataccagaccaagcctcctgatgcctttctgcactgcaactgtgtgattgaaaaatgagatgttcatccaagcagtcaagccacagaaacccagcatgtccctgtcacaatctcatgggcaccttgatcatgtcttaaccttcccttaaccttggggctcccaagccagagtcaaggtctgacgccacctcaaggtgacagctcatctccagcacagcacaggcgtgtgcacacagaggtgttccttgcagccccctccctctcaggtgtcctgagatgctgctcctgggagccccctcagaaaactgcctcacctgagacaagtgcctgctggacagaggtgtgattccaggcctggtgtcacatgacaccagcatgcattcgcaggattattagtgtattttgagtctgtaaaaataataaatatgtttgaagtagtcaaaaa

SEQ ID NO: 170258 - DNA, 1118 bp, Homo Sapiens
  misc_feature (598)..(710): n is a, c, g, or t
  misc_feature (730)..(747): n is a, c, g, or t
  misc_feature (770)..(780): n is a, c, g, or t
  misc_feature (805)..(892): n is a, c, g, or t
  misc_feature (953)..(962): n is a, c, g, or t
  misc_feature (1052)..(1062): n is a, c, g, or t
ccccggtaggtgcagtgcaggtaatgggattccttgccaccaagctgtcagaactgccactgagctagagatggtggggccacatgctgacccagccccacatccacattctgttagaatgtagctcagtgagcttcgtggacggccttgcttgctgtagcgttgtaggggccctgcctgcactgcggttgtccacggtcacatctgccccagtgcctttgtccttcccttggggcttgccggccagacttctctcccctgcggctcccacctctgcctgaccccagccttaaacatagcccctggccagaggccttgctgggtggagcctctgtgtgactccatactcctcccaccacaacactcatctgtcaaacaccaagcactctcagcctccccgccttcagctgtcagctttctggggctaacttctctgcctttgtggttggaggcctgaggcctcttggaactcttgctaacctgttcagagccaggaaggagactgcacagttttgaaagcacagcccgtcaggtccggctctgcgtctccctctctgcagcctgtgtaagctattataattaaaatggttttccgggnnnnnnnnnnnnnnnnnnnnnnnnnnnnnnnnnnnnnnnnnnnnnnnnnnnnnnnnnnnnnnnnnnnnnnnnnnnnnnnnnnnnnnnnnnnnnnnnnnnnnnnnnnnnnnnnnttgcggccccccccgccccnnnnnnnnnnnnnnnnnncatttttttgggggcggggcccnnnnnnnnnnnggaaccggggcccccccggtccccnnnnnnnnnnnnnnnnnnnnnnnnnnnnnnnnnnnnnnnnnnnnnnnnnnnnnnnnnnnnnnnnnnnnnnnnnnnnnnnnnnnnnnnnagtttgggggttttttcggaccataaaaaaaggaccccgggggaccctcattttaattaannnnnnnnnnggggctttcgtgggggtttggggggaattttataagggattctcgcggagatggaaataaattaaaggccgcctgggggaccctaaatcnnnnnnnnnnntaaaacactttaaccccttggcgaaaaatattttcccccccgggaaaagggggggg

SEQ ID NO: 170259 - DNA, 266 bp, Homo Sapiens
cgtgaaggtgcagtgcatctgcaaacgatgtaggtgcttcttttaggtctagtattttcttcaatgtcctcaatatcatcctcctccttctcagagtcagcgaaaaggtcacagccatcatcatcctcttcctcatcactcatttgtgtggtgtgccggttctgttcattgtcactatgatgggcaaaatcttcatctgactcctcctcttctttctcttcctcagtgtccacaatactgccacgatcactgcctacagagccttc

SEQ ID NO: 170260 - DNA, 862 bp, Homo Sapiens
cgttcctccccgttggaaggggtgcgagcggcggcggcggcggaggctgccatggacgacgaggaggagacgtaccggctctggaaaatccgcaagaccatcatgcagctgtgccacgaccgtggctatctggtgacccaggacgagcttgaccagaccctggaggagttcaaagcccaatttggggacaagccgagtgaggggcggccgcggcgcacggacctcaccgtgctggtggcccacaacgatgaccccaccgaccagatgtttgtgttctttccagaggagcccaaggtgggcatcaagaccatcaaggtgtactgccagcgcatgcaggaggagaacatcacacgggctctcatcgtggtgcagcagggcatgacaccctccgccaagcagtccctggtcgacatggcccccaagtacatcctggagcagtttctgcagcaggagctgctcatcaacatcacggagcacgagctagtccctgagcacgtcgtcatgaccaaggaggaggtgacagagctgctggcccgatataagctccgagagaaccagctgcccaggatccaggcgggggaccctgtggcgcgctactttgggataaagcgtgggcaggtggtgaagatcatccggcccagtgagacggctggcaggtacatcacctaccggctggtgcagtaactaccgcctgacagcccctagaggcggacacacagcgacccccatccctgcaggacaaacgcccctgccctgcccaaaatccgggcccccacagctctcacgggctgctggctccctctggacttcccccaggggaaggttgggccctcccaccccaccgttcctcccccggtcccct

SEQ ID NO: 170261 - DNA, 1025 bp, Homo Sapiens
ggcctgggtggcgaattcggcacgagggaggagacgtaccggctctggaaaatccgcaagaccatcatgcagctgtgccacgaccgtggctatctggtgacccaggacgagcttgaccagaccctggaggagttcaaagcccaatttggggacaagccgagtgaggggcggccgcggcgcacggacctcaccgtgctggtggcccacaacgatgaccccaccgaccagatgtttgtgttctttccagaggagcccaaggtgggcatcaagaccatcaaggtgtactgccagcgcatgcaggaggagaacatcacacgggctctcatcgtggtgcagcagggcatgacaccctccgccaagcagtccctggtcgacatggcccccaagtacatcctggagcagtttctgcagcaggagctgctcatcaacatcacggagcacgagctagtccctgagcacgtcgtcatgaccaaggaggaggtgacagagctgctggcccgatataagctccgagagaaccagctgcccaggatccaggcgggggaccctgtggcgcgctactttgggataaagcgtgggcaggtggtgaagatcatccggcccagtgagacggctggcaggtacatcacctaccggctggtgcagtagctaccgcctgacagcccctagaggcggacacacagcgacccccatccctgcaggacaaacgcccctgccctgccagaatccggcccccacagctctcacggctgctgctcctctggactccccaaggcaggtggcctccacccaacgttctcccgtcctgggggtgaggcttcctgtggcccagcccgccccatttcacctgtggatttgtgcccaaatgcaaccctccgaaaggaacaaggccccccgaagggaagtcaccctggggggcaactggtggccgggtctttaccccaaaacaacccttgggcccctctttttggggggtttgggggcccggggtctcccaccaagcccaggggtttcctccgggggcc

SEQ ID NO: 170262 - DNA, 758 bp, Homo Sapiens
gtagcgaggcctgggtggcgaattcggcacgaggctccgagagaaccagctgcccaggatccaggcgggggaccctgtggcgcgctactttgggataaagcgtgggcaggtggtgaagatcatccggcccagtgagacggctggcaggtacatcacctaccggctggtgcagtagctaccgcctgacagcccctagaggcggacacacagcgacccccatccctgcaggacaaacgcccctgccctgccagaatccggcccccacagctctcacggctgctgctcctctggactccccaaggcaggtggcctccacccacgttctcccgtcctggggtgaggcttcctgtggcccagcccgccccattcacctgtggatttgtgcgagatgcagcctcagaaggaacaaggcccccagagggaggtcacctgggggcagctggtgccgggtcttcacccagaccacgctgggtcccctctgttgggggtttggggtccgggtctcccaccagccactgcttcctcctgggccctcggccttccacccctcgtcttccctccctcgggggccctgatgcgtggcggcccccacccggcctcggctctttactccattcacagccgtgcacgcgctcaagccaccagggtgcgagatgccagctctggagttctcggttgttgtaggaggttgggtgttttcaaatggtaaagatgttttgagcaaataaatttgcttgatacagaacaacacacaacaa

SEQ ID NO: 170263 - DNA, 474 bp, Homo Sapiens
  misc_feature (25)..(25): n is a, c, g, or t
  misc_feature (93)..(93): n is a, c, g, or t
aaaactctgtcacctccctccttgntcaatgaccaacctgctccaggaattagctcgtactccgtgaatgttgaatgaaaaagctcctactanaaaaaactgctcccaggatgtacttgggggccatgtcgaccagggactgcttggcggagggtgtcatgccctgctgcaccacgatgagagcccgtgtgatgttctcctcctgcatgcgctggcagtacaccttgatggtcttgatgcccaccttgggctcctctggaaagaacacaaacatctggtcggtggggtcatcgttgtgggccaccagcacggtgaggtccgtgcgccgcggacgcccctcactcggcttgtccccaaattgggctttgaactcctccagggtctggtcaagctcgtcctgggtcaccagaatacgacggtcgtggcacagctgcatgatggtctgcggattttccagagccggtacgtctcctc

SEQ ID NO: 170264 - DNA, 637 bp, Homo Sapiens
  misc_feature (24)..(24): n is a, c, g, or t
  misc_feature (42)..(42): n is a, c, g, or t
  misc_feature (61)..(61): n is a, c, g, or t
  misc_feature (521)..(521): n is a, c, g, or t
  misc_feature (539)..(539): n is a, c, g, or t
  misc_feature (550)..(550): n is a, c, g, or t
  misc_feature (565)..(565): n is a, c, g, or t
  misc_feature (595)..(595): n is a, c, g, or t
  misc_feature (600)..(600): n is a, c, g, or t
  misc_feature (616)..(616): n is a, c, g, or t
actgctcatcaaacatcaggaagnacaagctaatccctgaanaacgtcgtcatgaccaagnagaagttgacagaactgctggcccgaatataagctccgaagagaaccagctgccccaggatcccaggcgggggaccctgtggcgcgctactttgggataaagcgtgggcaggtggtgaagatcatccggcccagtgagacggctggcaggtacatcacctaccggctggtgcagtaactaccgcctgacagcccctagaggcggacacacagcgacccccatccctgcaggacaaacgcccctgccctgccagaatccggcccccacagctctcacggctgctgctcctctggactccccaaggcaagtggcctccacccacgttctcccgtcctggggtgaggcttcctgtggcccagcccgccccattcacctgtggatttgtgcgagatgcagcctcagaaggaacaaggcccccagaggaggtcacctgggggcagctggtgccgggtcttcaacnagaccacgctgggtcccntctgttggggntttggggtccgggtnttccaacaagccaatgtttcctgctggggnccttnggttttccaagccttngtctttccttgccttcggggg

SEQ ID NO: 170265 - DNA, 444 bp, Homo Sapiens
gggcccctgtaacgttacctaccttaaactccactcatcaaatctgagaaaagtatccactggtccccagggtttcagtcatgcttttgggggtcattgggtattagagaagtaagtatcttttctgagagagggggagtcaccccccctactggggattcctctgggctttattcactcccagccctggccctgacctttgtgggcctccctaatgcccagggcatggatggcttcagaggagtttttgaatcgaagcccagggtccttgttgatgtttcttctcctagccacacttggaggaaagttgcaggtgggttgggcagggagcaggcatggttctgctttgctgtttgtcttcctagttaaggctctttataaagagcttgttcttcatgttttaagcactttatgaagaataaaacattcatgtactgccaaaaa

SEQ ID NO: 170266 - DNA, 691 bp, Homo Sapiens
ggcaggggaaacaaggtaaaatgggggtattcattcccaaatgaaaaagaactagactgcggattgtaccgtaggataaggaggaaggcagtaaagctgcagtaaatccctgaagcgggtcaaaaatggtatggtaaggaaaaggagagttttatctcacaaagccataaaccactaaacaacttaattttccattccagaaaatcagcagtcatcaagacagcactgggtaaaacatgtaagatttgtgataataacaagtactgcagtggcacgccgtgtggttctccactgtgaaaccccccattactgtgaccctgttatatgatttagctacacagcaagtggactctgaggtgacgttcttttggaccaacatcgtcttcttggaccttagtggagtgggatatgctctagagaagcagcagcccatgcactgaagtattggggcacccggctgggagaagaatgggttttcctgtagcgtgcattctgggcaatcctgcacatcaggagcggaatggagaacatgcagaaacaccgacaatgtgaccagaaagatagctgcatattttctgtagtaatccatggcgctcctttctctgggctttttgcaggatgtgttcagggcggttgactgtggatccgaagagggattttagcttcgtcttatgagttctcagtaactccc

SEQ ID NO: 170267 - DNA, 680 bp, Homo Sapiens
  misc_feature (643)..(643): n is a, c, g, or t
  misc_feature (649)..(649): n is a, c, g, or t
ggtccgccacgaggagcttccagtgcatgttgccatgaggcccttccccagtgtggccccagcccgacaggcatgcaccagtgccgtctgtgcccacgtgtgcagactgtggctgcagagaccttgcgaccatgtgtagattgcgtggaccccgacaaagggaaggctgctgtgtagctctgtccactctgaataccaagtgtgttgggaattgcatgccatctccaccctgagcctgacctttctgagtgacatgggtgtgccaggctagactaggaggttccggtgtctggaaaagcactttacagatgagattccctctcctcccccaccttcaagcaccctgttccctctttctttcttttgtgttggatttgtttaaaaaccaaataagcatctgtgtaacctccacagtagcatttcttatttgtttggtcactgctacaccttagcagctcttcccctttcctggggggatgtgcacggcagcttgagcctgtcacgtggtcaaggcccggccccatcagaggctgggggaggcggcacattggcagtgtgtcacactgagctggggcaccacaggcttgcctcatgaccctcctgttccagcaggtagtggggtgaatgttgttgaaggtcttgnctggantccatcagggatttggggaaacagaggaacc

SEQ ID NO: 170268 - DNA, 683 bp, Homo Sapiens
  misc_feature (562)..(562): n is a, c, g, or t
  misc_feature (631)..(631): n is a, c, g, or t
tcaaattcacaaaagaaaggggcttataataagacaagcactgatacactcctaacaggaaatgcacaccccacccaccttccgagtctacccctacaggcaaaccaggaaggagggagaaatgctggagccctaccacgagcccaggttaaacgacatccgatatcagattgttgagacgttaaaaataaaaatatcattttcaagtgcttgtagcagaggcctagctcctaagttgtaggtaacaaaggtacttccctctgaatacatggcgattgcacacactggtaaacctgacggtcctggggtgggggagacaccccaggctccacattgtgcctttctgaacaggcttccaggccaccccaggcaggcagcaaaggataggaaaccaagcaggtggagactggagccctaagactcagtcttgggttacaggaattgaatcttcttttagtctctactggaagaattttagaaaaccaattttggcagcagcagttgaaggacagccccactgcccagtgcactggcaagagaaaatgtcctcctctttgagtcncgctgtgctacattaggtcctatccagggaggaggaagcaatatgaaatctttccaaaaggtaaaggtnatttgccaagattagaggaagaaatataaaatctgttctttgcagcagcaag

SEQ ID NO: 170269 - DNA, 304 bp, Homo Sapiens
tgaggaaacctgtctcacacacacacagaaaaagaatatggtaggttctctagtcccaaagtcagagtggagggtagtacttactttctaagcttgtgtattttttcattagttcctctctttctctgtcaattggtcaagaaagattgctgagcaagttctctgaagtcagattgaagtagggctctgatcagttgatcacatgatacacactcctcttcatctgtttacttttcctctaagattaagcccatttctttagcctaccaactaaaatgataagatctgcactggcacctcccag

SEQ ID NO: 170270 - DNA, 228 bp, Homo Sapiens
  misc_feature (114)..(166): n is a, c, g, or t
ttatggagtgcagtgcaagtggttggattctcaatcaatctaaagttggatccaacaagttttgataacttggatgtgacttgtgacaaacagcagtcaaaaaggagccttgannnnnnnnnnnnnnnnnnnnnnnnnnnnnnnnnnnnnnnnnnnnnnnnnnnnnacaggaggatcgcctagggtcagtgagcttgagaccacgcctggtgcaacactgtggagccc

SEQ ID NO: 170271 - DNA, 1261 bp, Homo Sapiens
agtggtacaatgctcactgcggtctgcatgaaatacaaaagtcaccaccatttgtgacaccaatctctctttatattgtcacccgttttaattcgcattcatagacgtatacgttacctgtggctctccttagtttcatattctcataagcggctacacacggtatagatttcgtcttagcacatcaggcctttcccttaaagaacctgaatttcccgtgcccggcacgactgcccagcccagaactgaacacttatctcaaattaatcttccaaccacacaccaaggaaagaaaatggattactgccacgtagagatttaatttgggtatttcacgaattctgaactacgatttgaaatgtaaccactgtccaaccagaaacagtaaaaacaaagtgcttccctatgaaaagtattcacaggacattttattaaatgccaaagcattccaggtaagacacactgcccgttttataggaagttgttgagattctgctcctaagaatacagtagtcctttctctctccactgctagtgccctgataagctcagccaaccaaggccattcgcttttccatttgcaagcaaacacaccaaactaccctcacacccacgcacaaatccaacgcacccaacgggtcagtgagtagagggaaatggtattggagatgcagatgggaatctgtggctactcagagcaccacatttctgatggcggagagggctaccgcccagggtcgcctgtactccagcaaggtggacggcggagaggccctccctctctaaacatgagaccctgcagcttgtgcggctactggacacaaatggcctggaccattcattgcgcacgaatgcagcaatcacaccgcccattaaacgcatgtctagtcgtatttcacattacgaccgtccctctgtcacacgtcggagaaagggtttgtcggacggtttgtttcaataggggcaatgcagtcctccttgaaaaccctccagtcactgtctcctgctgtgcgatgggagaggaggtggggagggaggtgatgccaaggacacggtgatttctgaacccgcggaacactgatcctagcccaagtgtagtcccgccggctaccaatgcccgcggcatcctcttcctccgctgaaaaaggccaccccacaagtagggaacgagaacaacgccacccccagagtgcacgaccgccattcccacaccgggagatattggacgtacgtggaaaatcacccgcttccttcgtagacc

SEQ ID NO: 170272 - DNA, 454 bp, Homo Sapiens
cgggagtggccaaaaggaaattttccccaaagacacagccagtcttggtgcaattagtgacaacgcaagcactcgtgctatggccggttccataatcagttcctacaacccacaggacagagaatgcaacaatatggaaatccaagtggacattgaagccaaaccaagccactatcagctggtgagtggaagcagcacggaggactcgctccatgttcatgctcagatggcagagaatgaagaagaaggtagtggtggcggaggcagtgaagaggatcccccctgcagacaccaaagctgtgaacagaaagactgcctggccagcaaaccttgggacatcagcctggcccagcctgaaagcatccgcagtgacctagagagttctgatgcacagtcagacgatgtgccagacatcacctcagatgagtgtggctcccccccactcccgtaccag

SEQ ID NO: 170273 - DNA, 1488 bp, Homo Sapiens
gttggggcccctcccccaaagggttatgggtttttcccaggattttgccattcccggttgcccaaccccccccttttgccatgtttggaatgcttttggtttgaaagtaagatgccccccaggtgttggtccatccaggagtgtctttttcctgcctgagcataggcccccaaggatgccccagttctgaaatgccactggacccttcggggcagggtctgccaggcgttaggcagccaattctcaaaaggctcaaggttcgatcttttccatgaggaggtaggaggccctctcctccattgtctttcagctgtttcagggcctgtaccatttcctccccatataggtggttacttccaccctctctttggggctttagcacaacccggctaggggcagcaagggcttcggcgatggcctggtccccttcttcacccacatccagtgagtagaggccagcaaaggtggcgcggaggcgggccacagcctcaggctggccagggagcaacatctccagcatgcccggcctgcttagctcctgctgcaccttcttagtcccagccagctgggtggcaatgtctgggcacttggcagcatgtgacctctccagcagtagacgtgcttcccaattctgtagactgtactgacgaggccatgtagccattcccggaagtaaaccacagcaatttcctggccatccacaaacagccttcggtcttggtccagagaccccttttcagagatatcttcaaatgttcgtcggatcacatggatgttcctggccagtagctcattctctatggcacgctggtcaaatatgtttctttccttctcttgagcaatcagtagcaccagagcattgggtgagccgtagagctcccaggctttggcaattcccagggccagtcccttgctgggattattagagaggatcttgccagcttctttggtcttactcaggacactgagaacatgtcggtgcacagctggggtccgggaggccaggcccccaaagctggcagagatggtgttgatttcgatctgtttcagggctggggagccatctgcgctgcgctggaacatgtagtctgagcgattcaggcccaggaacacagtctgggcaatgccctcttttaggacttgcttgtggatgtcaaagagacgagcggtaaagtcatcctgtttgatggtgctggaaagagtttgctccaggaaggcagcgttctggctgacagcatccactagcaggttgaagtccatctgcacagcataggcttgctccagcagggcactggggaccagtgaggggaagagcgtgaatggggcatagctcaccacctccgaggaagtgggctcctgtgaggtcctcagcaatactccctcagccagggcccggtccacggcctgccgtgccagctcctctagctgctgtttatcctgcaagaggctcccccagttggtggccatcccaacactagttcgcctttc

SEQ ID NO: 170274 - DNA, 967 bp, Homo Sapiens
agggactggccctgggaattgccaagcctgggagctctacggctcacccaatgctctggtgctactgattgctcaagagaaggaaagaaacatatttgaccagcgtgccatagagaatgagctactggccaggaacatccatgtgatccgacgaacatttgaagatatctctgaaaaggggtctctggaccaagaccgaaggctgtttgtggatggccaggaaattgctgtggtttacttccgggatggctacatgcctcgtcagtacagtctacagaattgggaagcacgtctactgctggagaggtcacatgctgccaagtgcccagacattgccacccagctggctgggactaagaaggtgcagcaggagctaagcaggccgggcatgctggagatgttgctccctggccagcctgaggctgtggcccgcctccgcgccacctttgctggcctctactcactggatgtgggtgaagaaggggaccaggccatcgccgaggcccttgctgcccctagccggtttgtgctaaagccccagagagagggtggaggtaacaacctatatggggaggaaatggtacaggccctgaaacagctgaaggacagtgaggagagggcctcctacatcctcatggagaagatcgaacctgagccttttgagaattgcctgctacggcctggcagccctgcccgagtggtccagtgcatttcagagctgggcatctttggggtctatgtcaggcaagaaaagacactcgtgatgaacaagcacgtggggcatctacttcgaaccaaagccatcaaacatgcaaatggtggtgtggcaacgggaatggcagtcctggacaacccataccctgtggtgaggcacaacaggccccggggaccttcaatcctccgggatttggcaatccctcccccaacccctcctgaggggtatccctcctaaagaacctcccaagtc

SEQ ID NO: 170275 - DNA, 626 bp, Homo Sapiens
gggaagatcgaacctgagccttttgagaattgcctgctacggcctggcagccctgcccgaggggtccagtgcatttcagagctgggcatctttggggtctatgtcaggcaggaaaagacactcgtgatgaacaagcacgtggggcatctacttcgaaccaaagccatcgagcatgcagatggtggtgtggcagcgggagtggcagtcctggacaacccataccctgtgtgagggcacaaccaggccacgggaccttctatcctctgtatttgtcattcctctcctagccctcctgaggggtatcctcctaaagacctccaaagtttttatggaagggtaaatactggtaccttcccccagctttccatctgaggaccagaaaagttgtgtctcccttagatgagatctagacgcccccaaatccttgagatgtgggtatagctcagggtaagctgctctgaggtaaaggtccatgaaccctgccccactcctgtcagcccctcatcagccttttcagcaggttccagtgcctgacttgggataggactgagtggtaggaggagggggagtggaggggcatagcctttccctaattctgccttaaataaaactgcattgctgattca

SEQ ID NO: 170276 - DNA, 653 bp, Homo Sapiens
tagagtgaacgggatgagaaaatgaagctcgggctggttaactgacttgctcagcgtcccatggcctagccgcccgtgactctcacactgtctcctgcatgacgggtggcgcctcccgcagcttcccttctctctccagtgctgcccgctgtgtctagcagcctctaggatcttgtcagagctgcacctctctgtgaactggccattcctttcggtgctgctgtcctttttgggggggttcctgatttctgtatacatgtagctttgccagatatgtacttagtaatataaactgtattaataaaatccatttactgtgtaatacacgagtttaaaaattaagagcgattagctgttcactttggtaacaggtagttaagtgtcacacaaggtgttgttgcaatggcatgacggtgacctgttgacgtaactaagccttagagcaaggcatgtgccgcacgtgctccgtggtacttagagccctgggggccccgctcggactccgggtctccctaggatatgccccagtagcatttgctgtgtagtctgtgtgtgaaatttgggcattctgcttttctctactaatcttgaagtgctcagtgatttgtgtatttgtgtctttctaacttctaataaacccatcccagtaccag

SEQ ID NO: 170277 - DNA, 927 bp, Homo Sapiens
  misc_feature (795)..(795): n is a, c, g, or t
  misc_feature (858)..(858): n is a, c, g, or t
aagatgcaaaggaaagcaaaaggtgggacatcttttggagagtatggcggctggtacaaagcctgcaaagttgatagtccaactgttacaaccactctaaaaaaccttggggcactttacagacgtcaaggcaaatttgaagctgcagaaacgttagaagaagctgctatgaggtctcgtaaacagggtcttgacaatgttcacaaacagagggtggcagaagtgctcaatgaccctgagaacatggagaagcgcaggagccgtgagagcctcaacgtggacgtggtcaagtacgagagtggccctgacggaggggaggaaatgaggaaaatgaagctcgggctggttaactgacttgctcagcgtcccatggcctagccgcccgtgactctcacactgtctcctgcatgacgggtggcgcctcccgcagcttcccttctctctccagtgctgcccgctgtgtctagcagcctctaggatcttgtcagagctgcacctctctgtgaactggccattcctttcggtgctgctgtcctgtttgggggggttcctgatttctgtatacatgtagctttgccagatatgtacttagtaatataaactgtattaataaaatccatttactgtgtaatacacgagtttaaaaattaagagcgattagctgttcactttggtaacaggtagttaagtgtcacacaaggtgttgttgcaatggcatgacggtgacctgttgacgtaactaaaccttagagcaaggcatgtgccgcacgtgctccgtggtacttagagccctgngggcccccgctcggactccgggtctccctaggatatgccccagtaaccatttgctgtggaagncctgtgggttgaaaatttggggaattctgcctttttctcctacctaatccctggaaagggcttccaatt

SEQ ID NO: 170278 - DNA, 694 bp, Homo Sapiens
cgagtgggtccctgcaccgccagcggaccaagaacatatccgctatcagttacatcaaccagcggaaccgggagtggaacattgtagagtctgagaaggcccttgtggctgaaagtcacaacatgaaaaaccaacagatggatccctttactcggcggcagtgcaagcctaccatcgtttctaattccagagacccagctgttcaagctgccatcttggcccagctgaatgcaaaatacggttctggagtgttaccagatgctccaaaggaaatgagcaagggtcaaggcaaagataaagatttgaattctaagtcagccagtgacctctcagaagatctgttcaaagtacacgattttgatgtgaagattgacttacaagttcccagctcagagtcaaaggctttagccatcacctccaaggctccgccagccaaggatggggctccaaggagatctctgaacttggaagactacaaaaaacgacgagggcttatttgagcacacccagcctgctgcttctgaccctgcatgccccatcgcagcgtcccacctttcctcctttcctttgatttagcctctttgggctggagcagctgttgaactgggaagagactctaaactgccagtcaatctcgtaatataaaccatttgctgtatagacctcctttgtctgcacaccactcccgtaccag

SEQ ID NO: 170279 - DNA, 795 bp, Homo Sapiens
ggggcctctggtgctcgagaaactggtagggggagcagatttgatgctgcctggactggtgatgccccctgctggtctgcctcaggtacagaagggcgacctctgtgccatttctatgctggggaacagagcacctgtagccattggagttgcagccatgtccacagctgagatgctcacgtcaggcctgaagggaaggggcttctctgtgctccacacttaccaggaccacttgtggcggtctggaaacaagtcctctccaccttccattgctccactggccctggattcagcagatctcagtgaagagaaggggtctgtccagatggactccaccctgcagggagacatgaggcacatgaccctggagggggaagaggagaatggggaggttcaccaggcacgtgaagacaagtctctctcagaagccccagaagacaccagcaccaggggcctgaaccaagactccacagatagcaaaacgcttcaagaacaaatggatgagctgttacagcaatgcttcttacatgccttgaagtgccgagtcaaaaaggctgacctccctttactcaccagcactttccttggcagccacatgttctcctgctgccccgaaggacgacaactggacataaagaagtcaagctacaaaaagctctctaagttcctgcagcaaatgcagcaggagcagattatacaggtgaaggagctgagcaaaggggtggagagcattgtggctgtggactggaaacacccgaggattacatctttcgtatacccgagcccactcccgta

SEQ ID NO: 170280 - DNA, 834 bp, Homo Sapiens
atctttcgtcatacccgagccctccccgacctcccagactatccaggagggtagcagggaacagccctatcaccctccagatataaaacccctctactgtgtcccagccagcatgaccctgctcttccaggagtctggccacaagaaggggagctttctggagggcagtgaggtccgaacgatcgtcattaactacgccaagaaaaatgacctggttgatgcagacaacaaaaatcttgtgagattggatcccatcctatgtgactgcatcttagagaaaaatgaacagcatacagtcatgaagcttccatgggacagtcttctgaccaggtgtttggaaaaattacagcctgcctatcaagtgacccttcccggacaagagcccattgtgaagaaagggagaatctgtccaattgacatcaccctagcacaaagagcgtctaataaaaaggtgaccgtggtccggaacttggaggcctatggtctggacccatactcagtggctgccatccttcagcagcgatgccaggctagcaccaccgtcaatcctgcccctggggccaaggacagccttcaggtgcagatccagggaaaccaggtccaccacctcggctggctattgcttgaagagtatcagctccctcgaaaacacatccaaggtctagaaaaggccctcaaacctggcaagaagaagtgacagactcttttgtctcacgtggtggatccggtggaaatccaagctctgggctggtaatttttatgagcattttcagcttttgcaaatacaaaatataattctttacaaaaataaatttttattctaatctaaaaaca

SEQ ID NO: 170281 - DNA, 572 bp, Homo Sapiens
ttggtacggcgagtggggaggggaagtggatgttggtcaggtcgggcagggacccccctgtgttgtgggtggcggggatcagggctgtagtgttttcctggtcggcagacgggaagatgttgattccggggacctcacaggacttgggcctggaccccgtcttcttggtgtcccatgcttgcttggaaaggtttttgtctgcctctgatgtggtctcttccattcctgggactgttaacagtaagactcttttctggtgcacgtcctgggacccactgctaaaggattctggctgcgtgggcgtcattgtgctctggtgcagggcggagtcagaattggtccttctccagctggtgtccgcgggtggtgagaggtacatggtgccataggggcagctgtcggcctgccgtccgtgtttgtccactgacaggggccggcggtgtggggagccgagccggccacgctcccggtacaccctgtccaccagcccatggtgccgggtggtccggctggtgtcccaggcccgaggattggaagggggtctgcaagggcaggtccatggtgccactccc

SEQ ID NO: 170282 - DNA, 1748 bp, Homo Sapiens
accacgcgtcggggaaaagagctccgggccagggctgccgtcgccgccgtcggggagtcagcccgccagcccgccagctcgtcagcccgccagccagcgcttcgcgggccctgtcggtcccgatcagaccaaacattgtctggcttgcactgtaaaactagttagctgaagacgacttctcaggtttcttcaggatgcctgcagcacttgtggagaatagccaggttatctgtgaagtgtgggccagtaatctagaagaagagatgaggaagatccgagaaatcgtgctcagttacagttatattgccatggacacagaatttccaggtgttgtggtgcgaccaattggtgaatttcgtagttccatagattaccaatatcagcttctgcggtgcaatgttgaccttttaaaaattatccagctgggccttacattcacaaatgagaagggagagtatccttctggaatcaatacttggcagttcaatttcaaatttaaccttactggctatgattttggctatatggtaaagttgcttacagattctcgtttgccagaagaggaacatgaattctttcatattctgaaccttttcttcccatccatttatgatgtgaaatacctgatgaagagctgcaaaaatcttaagggaggtcttcaggaagttgctgatcagttggatttgcagaggatcggaaggcagcaccaggcaggctcagactcactgctgacaggaatggctttctttaggatgaaagagttgttttttgaggacagcattgatgatgccaagtactgtgggcggctctatggcttaggcacaggagtggcccagaagcagaatgaggatgtggactctgcccaggagaagatgagcatcctggcgattatcaacaacatgcagcagtgatggcgccaggctctgcagggtgggcctgatcccagagtggtgcttactgtgctgactgtgtacttatcttccccaagagaaaatgcttcttttgagcacactgtacctaccatctgcattgagcagaaagacttttgttttactgaagacaaaagatgtttttattttagacccagaagagaggagtttgctctgaatttgtaaataagtcttccccattcctcatactcgagcctctcctctctggttgcctcctgccaccagcatccatggctcatttgacacctttttaaatatcaggacaagtctgaaacaaagtagtaaaatgtatataactcttacctgttgtcattctttttcttttaaatttgttgctaatctctgataatgaagattcttactctgattctcagctgagctgtgagggcttccagggaaaatggaacaaaatggtgttcttaggtaatgggttgtagatactgagtcttcctttccttttctgacccttctcgaggaacatttgctttcctcacactttagtagtctctctttacatattactatatggaaatgaattgctctgtgctgatatttgaagaccagataatgcaactgaaaagcaaacaatgttactgaatctgtctacccttcattcatgagaactccagaatgagtgttgaccactgaagcatcttttaagtctgtgttccattgtgccattcaggtttgctgtcacatatgcatcatctgaaatcatttgaaatttttgtatgtttcactagtcacgacggtgacaacgacgtgcctagcgcatagcgatgcatagcggcacgcggt

SEQ ID NO: 170283 - DNA, 624 bp, Homo Sapiens
attcagaggatccccggtacgggagtggtagtcagttggtaaggggtgggggagaagcaattgtgggaagaggtggaggggtctccttttctgatgtttctgtctcctttggagtaacaatctcctctttcagtgctatgggtttagagtctcttgttccctgtgctttcaaatctttaacaagatgcttctcggagttctcatccaactttactttccctgtatctgaagaattttttacctctgtgtttagatgtgttacattcaccagttcagtatctggggcagatttttccaattttacacttctgggtaactttttagactccaaacctgaatccttagcctctactgaactgttctcttttctaggcaaaaatacaggtgaacccttggactcctttccatccatctttgctgcagcagcagcagctgctctttccttctttttcctactgagttcagctcccagactggaattaagtggaagcctgacaggtgagatactggaatgacgactgcgtgaactggatctcttctttttactatgagaagatgaatgtcttgaatatgcaggacttctacttctggactccatggaatttctactggggagtggactcc

SEQ ID NO: 170284 - DNA, 809 bp, Homo Sapiens
agagccagcaaataggatatagaaaccctgggttttataaaaatgcacggcctggtacggtccggaatttcgggatatcgtcgacccacgcgtcgggcaatgagcgggacagcagtgagccccgggatgagggtggagggcgcaagaggcctgtccctgatccagacctgcagcgccgggcagggtcagggacaggcgttggggccatgcttgctcggggctctgcttcgccccacaaatcctctccgcagcccttggtggccacacccagccagcatcaccagcagcagcagcagcagatcaaacgggcagcccgcatgtgtggtgagtgtgaggcatgtcggcgcactgaggaccgtggttcactgtgatttctgtcgggacatgaagaagttcgggggccccaacaagatccggcagaagtgccggctgcgccagtgccagctgcgggcccgggaatcgtacaagtacttcccttcctcgctctcaccagtgacgccctcagagtccctgccaaggccccgccggccactgcccacccaacagcagccacagccatcacagaagttagggcgcatccgtgaagatgagggggcagtggcgtcatcaacagtcaaggagcctcctgaggctacagccacacctgagccactctcagatgaggacctacctctggatcctgacctgtatcaggacttctgtgcaggggcctttgatgaccatggctgccctggatgagcgacaacagaagagtcccattcctggaccccggctggcggaagagggcagtgaaagtgagccatgtgaag

SEQ ID NO: 170285 - DNA, 667 bp, Homo Sapiens
  misc_feature (434)..(443): n is a, c, g, or t
tctggagggagtggcaagccttatcctggcctggcctggcccgtatgggcgcgggtaatgtctcagctgggtccgcatagcccgacgaatagagcggtagctggcccaggaaggactcctgccctgctggccagagtgacggggaaggtgtgagttcacgaaataggaactcattgggaggggaggcgcgcgcggccgctgctgctccgccgggtttatgatttgttgtgttttatagtccgagcgccgcgcctattagtagtatatccgagattgggttttagctgaggggggatggcgaggtgccagtgagggccagaaggaaatacaagcatctgatccaacactgaccaatggcagaggcaggaattgtcaaatagcacccaggaggagcgcagcccgcacgagggacccgcgcacaaacctatcaagcnnnnnnnnnncctccttctccttcgcctttctcctctctctccccaacaacacaacgcgtcctgttccacctacgtaggatctgtgaaacaggctcagtgcctttgagggaggagggaacgtttagattgagaccaccccactcccgggtgattaaataaatatgtctctcccccaccccacgcaggattgaaaaagttaattgtgttttcagaaaagtaccactccgcgtggt

SEQ ID NO: 170286 - DNA, 639 bp, Homo Sapiens
aggtcatccgtcgtctccgggatcttaaatggctcgtttatgctctcatacaaattcctcagcagctcctcagggaggtccccgccctcgttgatgccgcggttcatggcgatgaaccgttctgccgtgggcttgtcacgcacgttgtggttgtggaggctggtgttgagcatgatgatggcgaatgacagcacgtagcacgtgtctgtggactggaagaccccggggttgcacaggcagtagcgagcagcgaaagcctccatcatgcgaccaatcttctgcgcctccccgggcagcctgaagctccataagaactgccttaaggcttgtacaaggttgagatcagcaaactcacggagttcaacaaaggcttgaagaactttaatattaaattcatccctttcacccaggtagtccccaatgacggtcttatttaggccttctcctttataaaggaactgggcgacgtcttctggggaactctgtagcaggtcattttctattagaaactgaattccctttttgggatccatgttgaatttctttcttcccatggctatctgtttgatcctctgagtcgttttgctctcctctacggaagttagattgtcgatctctgtcatcacctctgcaatttca

SEQ ID NO: 170287 - DNA, 725 bp, Homo Sapiens
gagagagtgaaaaaagtaaagctaaagttccaagctgggttggtgaactaacagtagtaccatgaacagacacccacagtgaggcaaggaagatgagagaccttctggatgtaaacaaacacttgacaacaggtcagtataaatatgaaagttctgtagatagacacatgcagatctgacggctgttgagagccctggaggaagaacccagggagactagcctacatttgatacctaaacattctaatttccttcctgtgtattgtgtgcattattatccattatgtcagcaagtgcaccttcagaaaaatccccattaggtgcagagtcagttttggaaacggcttggatgaggcgtgtcgggattcacatctggggtctgtgccacccactggtcatgtggcttcaagtaatttaacttcttagtttcctcatctttcagactttacacagcaccaccatcccttctcccaaataccctattatttcgttttcaatttctccctttctggggatatatttaatggatacatctatctgtgtttctcgtgacatccattattcggcatctggcatacctacatgctttctgtcctataatactactctatttcttacaacaatgtaagatgtaattggaaagaaagaattcttgatctctgagagtgagtctcctctgtcgcccagctggatgccggggcaactcggtcattgacctgccccgg

SEQ ID NO: 170288 - DNA, 675 bp, Homo Sapiens
cagaagaagataggaagatgagagaaagtgtgaacttcctacagactggttaaatggttgtgaccaaaatactgatagtgatatggacagtgaagtccaggctgaggagatctcagatggaaatgaggaacttattgggaattggagcaaagatcacttttgctatgccttagcaaagaacttggctgccttgtgctcctgccctagggatctgtggaactttgaacatgagagtgatgatttagggtatctggcagaagaaatttctaagcagcaaaatgttcaagatgtggcctggctgcttctaacaacctatcacatatacatgaacaaagaaatggcctatagttggaacttgtatttaaaagggaagcaaagcgtaaatgtttggaaccatttgcagcctgctcatgtggtagaaaagaaggcccatttttccagggaaaaattcaagcaggctgaagaagtgtgcataagtaaaaaggagccaagtgctaatagacaagacaatggggagaagcccttgaaggcatttcagagaccttcacagcagcccctcctattataggcccagagtcctagaagggaagaatggttttgtgggacaggcccagggctccactgcctgcacagcctctgaacactgctcctgcatcctggccactcccgtaccag

SEQ ID NO: 170289 - DNA, 413 bp, Homo Sapiens
  misc_feature (40)..(40): n is a, c, g, or t
  misc_feature (352)..(352): n is a, c, g, or t
gatctaaggatccccctggtacgggagtgggaaactgtgnaggtactgcttgcgtgtgtcactgatcctaagctgcccactgtcctctctcatggtgtgttcaggcctccccgaggtgcttctcacgactttcacacccggtttaatccacaccgctgcgtctgtcctccagtccatggggctggtcttctccctcatctctgccggaggcatttaatctcttctgccactcttctggaaagtcaccagcaatgcacgctgctggctctgcaggagggtcaggcggacggccctcggcctgtgcgtggtgccaaccacacctccctgcctccctctgcgtgcgtcaccgtgntcctgcctgggatgtgtgtgtcgtagtgactaacgtctctctcctgccactcccgtaccag

SEQ ID NO: 170290 - DNA, 502 bp, Homo Sapiens
  misc_feature (37)..(37): n is a, c, g, or t
ttgctgagtcgatctaaggatccccctggtacgggangtggcaactacataaaagagtaactgcaagatgtaaggaaacatgtggtgtccttggcctgaatgggagtgcatgaggaaggatggacctggaaggggaccctccgtaagctggggttcagacctcttgagagcaggtgtggttttgcccacaggaatgcagagacgttcactggcttccccgggctgcggttggtttgtgtgtcactgggtaagcaggaggcgaccctcctggagtgcagcaggcccaggctgtgagcaggcagtggcgtggtcctgccgagggaattcggtgccagtgtgggcaggtggcctttgggcactggtttccacattgaggactgtgggaagctgggaaattttcaggaggtcaggctgtggctgtaggtcgcctggggactacgtgtctcggacagagcgtgtccagatgtgcttaacaccacactccgatccactcccgtaccag

SEQ ID NO: 170291 - DNA, 758 bp, Homo Sapiens
ttatataaggtgaaagacaaggccagatccaagttggcaagctggagggcaaactactaaaggagcccctaacttgtgcctaactttgggaccaatggtcaaaagcaggtcaagtaaaagcaaaacatgaagtggagtaggaatgacaggtttcatcagtttaaaacttgagcaaaagagctgaatacagtaagaaagttgtaggatatcttaagacagagtattctcagaacagaacatggtaagtacaaaggccccaaggcagaaacaagcttggtgaatgtgagaaatatgcaagctggtaaatgtgcctgaagcacagtgaccaagggaaagttttacagagatcacggaggtgcgtgagggctggattatgtaggccattaaggagcatcacaggccactgcagagattttgtcttttaaatgagatagagtgctcttggagaatgtgactggagaggccgatggtagcagtggagatgcagagtagtagccaagatattttaaatgaaattgatttagtataggatgactgaaagagaaatcaaggattaattgtaggtttttacactgagacacttgaaaagagctgctatttgctgatatgagtaaggagtagtcttggaggaacaaaaccaagagtactgttttgaacaaaatgaaaaagactcctggtaaatatcgaagtgtaaatatcaaataggaagtcggggcacaagtagaagtaccgagagcaaattcctaatgatattcgat

SEQ ID NO: 170292 - DNA, 672 bp, Homo Sapiens
gatctagagatcccccgagccctcacataccttatatggctctactgagagataaggctaagcctgaaaagttaatttaaagcatggaggtaggggtgagacagaaagacaacagggaaaagttgagtttataaggtaagtatatatcttccttttaacagccacctgcatggcgttcggtaaataacctaattatatgtgggggaaggtagtggtcaacatttggtcctggggactgagaataagagcaggaaagcaataaacagctaactatgagagtgacttaatgtaattatattacctgtcaatcgctacttttcctttcttaccaaaattcacacaggtatgaaagcaatatgacattcaggctccattatgtgtatttgtgcacatcacttcccacgataagggagaagaaaagaaaccactgcacattcggataaaacatgctgggaatacagcagtaaacagaatagaaaaagtctacattttaattagcagataagtaaaaataagtgactaaatgtatattattcagggggccatatggtgcaattgctgttaagtaaagcagaacatggagtggagtacggatgacaggtttcatcagttaatacttgagcgagactgatatcgaagaagctgtggaaacttgggcgagatctcagacag

SEQ ID NO: 170293 - DNA, 720 bp, Homo Sapiens
agctgcagccgcagtcgacttgaggacccccggtacggatggaaggggaaccaaggacaaaccagaaggcctaggccagcctaggcctccacgacccgcccgttgatgacgcggatgtggcggatgacgtcctggatggcttcagatgttgtgacctggcccccgatgtcccggagtgtgcatattctcattgtccatggatgccaggacagccttacggatggaggtggcataggagtgcagcttgaggtggtccagcatcatgcagctggccagcagggtgcccgtgcggttggcgatgttcttattggcgatactcttgccggtgttcctcgtagctgtttcaaacaccgcgtacacatggccatagttggccccagccacaaggcctgggcccccgaccagtcccgcgcagacattgttgacgatgttgccatagagattgggcatcaccatgacatcaaactgctggggccgggacaccagctgcatggtggtgttatccacaatcatgttctcgaaggtgatctgagggtagcgggctgccacctccctgcagcactggaggaaaagcccatcgcccagtttcatgatgttggccttgtgcacggccgtcactttcttgcgcccgctctcctgcgccagcttgaaggcatactcggcaatgcgcagggacttggccttggtgatatcttcaggcttccaccactcccgtaccag

SEQ ID NO: 170294 - DNA, 880 bp, Homo Sapiens
  misc_feature (576)..(576): n is a, c, g, or t
  misc_feature (589)..(589): n is a, c, g, or t
  misc_feature (609)..(609): n is a, c, g, or t
  misc_feature (612)..(612): n is a, c, g, or t
  misc_feature (614)..(615): n is a, c, g, or t
  misc_feature (810)..(818): n is a, c, g, or t
ggacgtgcggaggctctcactttccgtcatggcgctgaaggtagcgaccgtcgccggcagcgccgcgaaggcggtgctcgggccagcccttctctgccgtccctgggaggttctaggcgcccacgaggtcccctcgaggaacatcttttcagaacaaacaattcctccgtccgctaagtatggcgggcggcacacggtgaccatgatcccaggggatggcatcgggccagagctcatgctgcatgtcaagtccgtcttcaggcacgcatgtgtaccagtggactttgaagaggtgcacgtgagttccaatgctgatgaagaggacattcgcaatgccatcatggccatccgccggaaccgcgtggccctgaagggcaacatcgaaaccaaccataacctgccaccgtcgcacaaatctcgaaacaacatccttcgcaccagcctggacctctatgccaacgtcatccactgtaagagccttccaggcgtggtgacccggcacaaggacatagacatcctcattgtccgggagaacacagagggcgagtacagcagcctggagcatgaaagtgtggncggagtggtgganagcctgaaaatcatcaccanggncnnagtcctgcgcattgcccagtatgccttcaagctggcgcaggagagcggccgcaagaaagtgacggccgtgcaccagggcaacatcatggaactggggcgatggggcttttccttccatgcctggaagggaagggggcaaccccccctaaccctccaaatccccctttcgaaaaacctggattggggggattaaannnnnnnnnttggccaacttgggtggtccccggggcccccaggaaaagatttggaagggggacaatggggg

SEQ ID NO: 170295 - DNA, 1272 bp, Homo Sapiens
agcgaccgtcgccggcagcgccgcgaaggcggtgctcgggccagcccttctctgccgtccctgggaggttctaggcgcccacgaggtcccctcgaggaacatcttttcagaacaaacaattcctccgtccgctaagtatggcgggcggcacacggtgaccatgatcccagggatggcatcgggccagagctcatgctgcatgtcaagtccgtcttcaggcacgcatgtgtaccagtggactttgaagaggtgcacgtgagttccaatgctgatgaagaggacattcgcaatgccatcatggccatccgccggaaccgcgtggccctgaagggcaacatcgaaaccaaccataacctgccaccgtcgcacaaatctcgaaacaacatccttcgcaccagcctggacctctatgccaacgtcatccactgtaagagccttccaggcgtggtgacccggcacaaggacatagacatcctcattgtccgggagaacacagagggcgagtacagcagcctggagcatgagagtgtggcgggagtggtggagagcctgaagatcatcaccaaggccaagtccctgcgcattgccgagtatgccttcaagctggcgcaggagagcgggcgcaagaaagtgacggccgtgcacaaggccaacatcatgaaactgggcgatgggcttttcctccagtgctgcagggaggtggcagcccgctaccctcagatcaccttcgagaacatgattgtggataacaccaccatgcagctggtgtcccggccccagcagtttgatgtcatggtgatgcccaatctctatggcaacatcgtcaacaatgtctgcgcgggactggtcgggggcccaggccttgtggctggggccaactatggccatgtgtacgcggtgtttgaaacagctacgaggaacaccggcaagagtatcgccaataagaacatcgccaaccccacggccaccctgctggccagctgcatgatgctggaccacctcaagctgcactcctatgccacctccatccgtaaggctgtcctggcatccatggacaatgagaatatgcacactccggacatcgggggccagggcacaacatctgaagccatccaggacgtcatccgccacatccgcgtcatcaacggccgggccgtggaggcctaggctggccctaggaccttcttggtttgctccttggattccccttcccactccagcaacccagccagccttggtacgcagatcccagaataaaagcaccttctccct

SEQ ID NO: 170296 - DNA, 935 bp, Homo Sapiens
  misc_feature (847)..(847): n is a, c, g, or t
  misc_feature (886)..(886): n is a, c, g, or t
ggcacggacacgtccagatgccacggacaggcttgttgaggtcacagcgcctgcggtggtgctggtccgaatggcacctacagctgcctggtgcgcaaccccgtgctgcagcaggatgcgcacggctctgtcaccatcacagggcagcctatgacattccccccagaggccctgtgggtgaccgtggggctgtctgtctgtctcattgcactgctggtggccctggctttcgtgtgctggagaaagatcaaacagagctgtgaggaggagaatgcaggagctgaggaccaggatggggagggagaaggctccaagacagccctgcagcctctgaaacactctgacagcaaagaagatgatggacaagaaatagcctgaccatgaggaccagggagctgctacccctccctacagctcctaccctctggctgcaatggggctgcactgtgagccctgcccccaacagatgcatcctgctctgacaggtgggctccttctccaaaggatgcgatacacagaccactgtgcagccttatttctccaatggacatgattcccaagtcatcctgctgccttttttcttatagacacaatgaacagaccacccacaaccttagttctctaagtcatcctgcctgctgccttatttcacagtacatacatttcttagggacacagaacactgaccacatcaccaccctcttcttccagtgctgcgtggaccatctggctgccttttttctccaaaagatgcaatattcagactgactgaccccctgccttatttcaccaaagacacgatgcatagtcacccccggccttgtttctcccaatggcccgtgatacnactaatggatccatgttcaggcccctgctttcaccctgncatagaaaatcttttttcctttctcagaacaaggggacaggtgccgggc

SEQ ID NO: 170297 - DNA, 846 bp, Homo Sapiens
ccatgatgtagaacacccttcgacggtgtactggcaggatgggcagggtgtgcccctgactggcaacgtgaccacgtcgcagatggccaacgagcagggcttgtttgatgtgcacagcgtcctgcgggtggtgctgggtgcgaatggcacctacagctgcctggtgcgcaaccccgtgctgcagcaggatgcgcacggctctgtcaccatcacagggcagcctatgacattccccccagaggccctgtgggtgaccgtggggctgtctgtctgtctcattgcactgctggtggccctggctttcgtgtgctggagaaagatcaaacagagctgtgaggaggagaatgcaggagctgaggaccaggatggggagggagaaggctccaagacagccctgcagcctctgaaacactctgacagcaaagaagatgatggacaagaaatagcctgaccatgaggaccagggagctgctacccctccctacagctcctaccctctggctgcaatggggctgcactgtgagccctgcccccaacagatgcatcctgctctgacaggtgggctccttctccaaaggatgcgatacacagaccactgtgcagccttatttctccaatggacatgattcccaagtcatcctgctgccttttttcttatagacacaatgaacagaccacccacaaccttagttctctaagtcatcctgcctgctgccttattttcacagtacatacattttctttaggggacacagttacacctgaaacaaaatttaccaccccttctttcttttcaattccttgccctgggacccatccgggggctggcccttttttttcttcccc

SEQ ID NO: 170298 - DNA, 985 bp, Homo Sapiens
tctatgaggatcccccggtgttctaggcaggatgggcagtgctgtgcccctgactggcaacgtgaccacgtcgcagatggccaacgagcagtgcttgtttgatgcgcacggctctgtcaccatcacagggcagcctatgacattccccccagaggccctgtgggtgaccgtggggctgtctgtctgtctcattgcactgctggtggccctggctttcgtgtgctggagaaagatcaaacagagctgtgaggaggagaatgcaggagctgaggaccaggatggggagggagaaggctccaagacagccctgcagcctctgaaacactctgacagcaaagaagatgatggacaagaaatagcctgaccatgaggaccagggagctgctacccctccctacagctcctaccctctggctgcaatggggctgcactgtgagccctgcccccaacagatgcatcctgctctgacaggtgggctccttctccaaaggatgcgatacacagaccactgtgcagccttatttctccaatggacatgattcccaagtcatcctgctgccttttttcttatagacacaatgaacagaccacccacaaccttagttctctaagtcatcctgcctgctgccttatttcacagtacatacatttcttagggacacagtatactgaccacatcaccaccctcttcttccagtgctgcgtggaccatctggctgccttttttctccaaaagatgcaatattcagactgactgaccccctgccttatttcaccaaagacacgatgcatagtcaccccggccttgtttctccaatggccgtgatacactagtgatcatgttcagccctgcttccacctgcatagaatcttttcttctcagacagggacagtgcggcctcaacatctcctggagtctagaagctgtttcctttcccctccttcctcctcttgctctagccttaatactgcctttgccctccct

SEQ ID NO: 170299 - DNA, 611 bp, Homo Sapiens
  misc_feature (51)..(125): n is a, c, g, or t
  misc_feature (136)..(145): n is a, c, g, or t
  misc_feature (170)..(179): n is a, c, g, or t
gggggggtttggcccctttggggggaaaattaccatgtgttcccccatttnnnnnnnnnnnnnnnnnnnnnnnnnnnnnnnnnnnnnnnnnnnnnnnnnnnnnnnnnnnnnnnnnnnnnnnnnnngaaaggggagnnnnnnnnnntttttaaggaagccagggaatgccnnnnnnnnnnggggggcccgggggttccaccagtggaagccccccattggcaggccaggaggggttaggaacctttaggggagggggtaagcaggtttcctgggtcctcatggtcaggctatttccttgtcccatcatcttctttgctgtcagagtgtttcagaggctgcagggctgtcttggagccttctccctccccatcctggtcctcagctcctgcattctcctcctcacagctctgtttgatctttctccagcacacgaaagccagggccaccagcagtgcaatgagacagacagacagccccacggtcacccacagggcctctggggggaatgtcataggctgccctgtgatggtgacagagccgtgcgcatcctgctgcagcacggggttgcgcaccaggcagctgtaggtgccattcgcacccagcaccacccg

SEQ ID NO: 170300 - DNA, 935 bp, Homo Sapiens
  misc_feature (791)..(791): n is a, c, g, or t
  misc_feature (803)..(803): n is a, c, g, or t
cagctcaacctcatctggcagctgacagataccaaacagctggtgcacagctttgctgagggccaggaccagggcagcgcctatgccaaccgcacggccctcttcccggacctgctggcacagggcaacgcatccctgaggctgcagcgcgtgcgtgtggcggacgagggcagcttcacctgcttcgtgagcatccgggatttcggcagcgctgccgtcagcctgcaggtggccgctccctactcgaagcccagcatgaccctggagcccaacaaggacctgcggccaggggacacggtgaccatcacgtgctccagctaccagggctaccctgaggctgaggtgttctggcaggatgggcagggtgtgcccctgactggcaacgtgaccacgtcgcagatggccaacgagcagggcttgtttgatgtgcacagcatcctgcgggtggtgctgggtgcaaatggcacctacagctgcctggtgcgcaaccccgtgctgcagcaggatgcgcacagctctgtcaccatcacaccccagagaagccccacaggagccgtggaggtccaggtccctgaggacccggtggtggccctagtgggcaccgatgccaccctgcgctgctccttctcccccgagcctggcttcagcctggcacagctcaacctcatctggcagctgacagacaccaaacagctggtgcacagtttcaccgaaggccgggaacaaggcagcgcctatgcccaaccgcacggccctcttccccggactgctggcacaaggcaatgcatccncctgagctgcancgcgtgcgtgtggccgaacaagggcagcttcacctgctttcgtgagccatccgggaatttcggcaagcgctggccgtcagccctgcaaggtgggccgctccctacttcgaggcccagcatgaaccctggaac

SEQ ID NO: 170301 - DNA, 202 bp, Homo Sapiens
aaaacactaacgatcattgaagagtatttatgtaaacatacaacgtataatgggtgggggatccgtatcatggtgatgtacggggtgaattctcttgccgtgttgcaaatgtgtaataataaagattatctggctagtacaccgtcgaagtgttgtctaaatcatggaatagctatgaccattaatacgatgcactgccgtc

SEQ ID NO: 170302 - DNA, 701 bp, Homo Sapiens
ctgggcgtattcagcccaggtgcccatgaacatgaccatcactggctgcatgctcacattctacaggaagaccccaaccgtggtgttctggcagtgggtgaatcagtccttcaatgccattgttaactactccaaccgcagtggtgacactcccatcactgtgaggcagctggggacagcctatgtgagtgccaccactggagctgtggccacggacctgggactcaaatccctcaccaagcacctgccccccttggtcggcagatttgtgccctttgcagcagtggcagccgccaactgcatcaacatccccctgatgaggcagagagagctgcaggtgggcataccggtggctgatgaggcaggtcagaggcttggctactcggtgactgcagccaagcagggaatcttccaggtggtgatttcaagaatctgcatggcgattcctgccatggacatcccaccactgatcatggacactctggagaagaaagacttcctgaagcgccgcccctggctgggggcacccctgcaggtgggactggtgggcttctgcctggtatttgcaacccccctgtgctgtgccctattcccccagaagagctccatcgctaagcaacctggaacagagctgagagccagatcatgagcaaacccgcgtggagtggtctactacacagggcttgaggaggtcgctctgt

SEQ ID NO: 170303 - DNA, 1282 bp, Homo Sapiens
  misc_feature (24)..(24): n is a, c, g, or t
  misc_feature (41)..(41): n is a, c, g, or t
  misc_feature (141)..(141): n is a, c, g, or t
  misc_feature (211)..(211): n is a, c, g, or t
  misc_feature (230)..(230): n is a, c, g, or t
  misc_feature (242)..(242): n is a, c, g, or t
  misc_feature (249)..(249): n is a, c, g, or t
  misc_feature (274)..(274): n is a, c, g, or t
cagttggttcgaacccagaagctncagcaggaactttgagngcttgccaatcagagcttggcagagctgagagatcagcggcagggggagcgcctggaacatgcagcagctttgcgggccctacaagatcaggtatccatncagagtgcagatgcacaggaacaagtggaagggcttttggctgagatcaatgccttgaggactagcctgnctgccctggagcagatccnaacagcaaaganccaaganctgaatatgctccgggaacagaccnctgggctggcagctgagttgcagcagcagcaggctgagtacgaggaccttatgggacagaaagatgacctcaactcccagctccaggagtcattacgggccaatagtcgactgctggaacaacttcaagaaatagggcaggagaaggagcagttgacccaggaattacaggaggctcggaagagtgcggagaagcggaaggccatgctggatgagctagcaatggaaacgctgcaagagaagtcccagcacaaggaagagctgggagcagttcgtctacggcatgagaaggaggtgctgggggtgcgtgcccgctatgagcgtgagctccgagagctgcatgaagacaagaagcgtcaggaggaggagctccgtgggcagatccgggaggagaaggcccggacacgggagctggagactctccagcagacagtggaagaacttcaagctcaggtacattccatggatggagccaagggctggtttgaacggcgcttgaaggaagccgagggcaaggaggaggagctacaggatgtacgggatcagctcgagcaggcccaggaggagcgggactgccacctgaagaccattagcagcctgaagcaggaggtgaaggacacagtggatgggcagaggatcctggagaagaagggcagtgctgcgctcaaggacctcaagcggcagctgcatttggagcggaaacgggcagataagctgcaggagcgactgcaggacatcctcactaacagcaagagccgctcaagccttgaggagctggttctctcagagatgaactcaccaagccggacccagacaggggacagcagtagcatctcctccttcagctaccgggagatcttgcgggaaaaagagagctcggctgttcccgccagggcccttatccaacagccctcaagccccaccccccttcggcagcaaagctgtcaaaatggaggaagtggctgaacctctttcaccgggctggccaaaaacccgcccggaaaatggg

SEQ ID NO: 170304 - DNA, 1266 bp, Homo Sapiens
  misc_feature (786)..(798): n is a, c, g, or t
catatgggctgggcgcgcccgccaccacccaccaccgccccgaccgcggatctgacctgagaaggggaattccacacaagggcgggactgccacctgttgaccattagcagcctgaaccaggaggtgaaggacacagtggatgggcagaggatcctggagaagaagggcagtgctgcgctcaaggacctcaagcggcagctgcatttggagcggaaacgggcagataagctgcaggagcgactgcaggacatcctcactaacagcaagagccgctcaggccttgaggagctggttctctcagagatgaactcaccaagccggacccagacaggggacagcagtagcatctcctccttcagctaccgggagatcttgcgggaaaaggagagctcggctgttccagccaggtcaaaatccagcagccctcaagcacagccccctcggccagcagagctgtcagatgaggaagtggctgagctctttcagcggctggcagagacacagcaggagaaatggatgctggaggagaaggtgaagcacctggaagtgagcagcgcttccatggcagaggacctctgccggaagagcgccatcattgacacctacgtcatggacagccgggataaatgtgtctgtggcaacaggccacaccacaccccaaccggggctgggcccgcgttcctgacaagaaccaagtgcaaagccagccgaccgaaaaacccttcccgcgagcacggacccaaccccattctcgcaaaaaacactgtcctgggaaagggaaaaannnnnnnnnnnnnaggaaattaatcggaaccctttgggccacccgaggggaaacatttggaaacaggtcttctttggtcccccctgggcaaaaaattcggctggcgcgcggctctcaaaccaaaaatgggacactcgccgcctggggcggccgcctctcttgtaaccccctcccacacccttataaacgccccgagggcaaaatacacctgaggttcaccaccaacacctggcgaatgggattgggaaaaccctaacgcgtccatttcacccctttcccccacacccctcattaggggaatagttaactcccccctcttggcgccctggttgggcgcgacacaataattataggtgtttgtgcacgcccccaaaccaataaaaaacgccttggcgcggaaatctgggcaactactagaagggggcctcttcagcgccctgtatgtgagtcccacgcgccacccgggatcccccgcgctcct

SEQ ID NO: 170305 - DNA, 822 bp, Homo Sapiens
gtccccggtgtttctgtctgggttcaagaagttgtgaggcctttttcattcctgagtgttcatggtctccaggtggatgaatatcattcagtgcatcagaagctcagtgctgatatggctgatcattctaatttgatccgaagtttgctggtcggagctgaggatgctcgtctgatgagggacatgaaaacaatgaagagtcgttatatggaactctatgaccttaatagagacttgctaaatggatataaaattcgctgtaacaatcacacagagctgttgggaaacctcaaagcagtaaatcaagcaattcaaagagcaggtcgtctgcgggttggaaaaccaaagaaccaggtgatcactgcttgtcgggatgcaattcgaagcaataacatcaacacactgttcaaaatcatgcgagtggggacagcttcttcctaggtgaggaaaatacaggtcatgaagttcctggcaaagattttctgttaaaaacctatgctggtttgctttggatcacaccctggtgaaccccgggtgctaagaatgaaaataaccttggtgagtcgtacaaattaaagacaaagaactacatgtgaagatagacttgctttctatttttaaatcagtagtagtactgttgctgaataatactaggtttttatggaataggatgaatgcttttgaagtattagggcttcagagtccaattttgcttatttatggtatataaatacatatttttttcttgaaattgcaattgagtttatacttttcaaatagattatctactttttcattaaaatgtaaagatgttaaaaaaaa

SEQ ID NO: 170306 - DNA, 235 bp, Homo Sapiens
cttcgacggtgtactgcacacagagtgggctgtttctgtctagttctccccctgcacccttctcagatgcaatctcaagtcatagggagaacttgtgcaaatgtttctcctggatggtttcctttagagcatgtgtcctataacttgaaatggttgtctgagcagaatgtttttagaagttagatttttttcaggggggaaacaggaaccaaagcaaagccaatagagatcttgg

SEQ ID NO: 170307 - DNA, 540 bp, Homo Sapiens
ccgtctttcaactgcggttggtgtctatcagtgtgagagccagctggttgttcttgtggaagatgtccttccacaaaatcgtgtcctggtagcagagctgggggttccgctggatcaagacccctcctttcaagatctctgtgaggcttcgaagctgcagctcccgcaggcctcctggggaggcccctgcgacaggggtggtattgtccagcgggtctccattgtctagcacggccagggcatagttgtcctcaaagagctgggtgcctcgcacaatccgcagcctctgcagtgggacctgcctcacttggttgtgagcgatgagcacgtagccctgcacctcctggatatcctgcaggaaggacaggctggcattggtgggcaggtaggtgagttccaggtttccctgcatccacctggcagccctggtagaggtggcggagcatgtacaggtgggtctcgggactggcagggagccgcagcttcatgtctgtgccggtgcacacttgggtgctcgcggctccagggagcactaagcga

SEQ ID NO: 170308 - DNA, 883 bp, Homo Sapiens
cctcgcttagtgctccctggatattggcactggtaactgccctcacctctcgcaagtgctccatgcccagaccatagcacactcggcaacagggcttgctgcacttcccacaccgctgtgttccatcctctgctgtcacctcttggttgtgcagggggcagacgagggtgcaggatcccacgtccgtagaaaggtagttgtagggacaggcagtcacacagctggcgccgaatgtataccggccctcgggattgggcatggactcaaacgtgtctgtgttgtaggtgaccagggctgggcagtgcagctcacagatgccactgtggttgaagtggaggcaggccaggcagtcagagtgcttggggcccgtgcagccggcagcacactgctcatggcagcagtcagtgggcagtggccccttgcagcgggcacagccaccggcacagacagtgcgcgtcaggctctgacaatcctcagaactctctccccagcagcgggagcccttacacatcggagaacaggggtggcaggcccgagagcggttggtgtctatcagtgtgagagccagctggttgttcttgtggaagatgtccttccacaaaatcgtgtcctggtagcagagctgggggttccgctggatcaagacccctcctttcaagatctctgtggggtgagcaatgatcagaggaccctttccccttctgtcaccttctgcttcccttggggccctcctgccttctaaaagaggagcaggccttttaaacaacccccagattccccagggaggagagaaagctatctttaccgtctttgagtcccaccaccaccacacccgcaacaagaacaaagcgagagccagggaggagtgagttgtccatgctag

SEQ ID NO: 170309 - DNA, 828 bp, Homo Sapiens
gggggtggtgctgcagcaggtcttccagcttatccagaaggtgctgagcaaatggttgaatgatgcccaggttgtggaggcggtgtgcgctatctttgagaagtctgttaagacgctgctggatgactttgcccccatggtgccacagctgtgtgagatgctgggtcggatgtacagcaccatcccccaggcctctgctcttgacctcactcgacagctggtccacatctttgctcatggactgctttgccgatatcctgttcgccctgaacaagcactgcttcagcctcctgagcatgtggatcaaggaggccctgcagccacctggtttcccctctgcccgcctcagccctgaacagaaggataccttcagccagcagatccttcgcgagcgagtgaacaagaggcgggtgaaggagatggtgaaggagttcacactgctgtgccggggtctccatggcacagattacacagctgactactgaggggtgcccccatcccatccaccccttctcttcatccttccctattcccaaagagtaaacctggaccctcactgctgtctctgcctcctttctgctgtcaccaccacctaactgaaagcctggggtccagaaggcctgggggaaggatgggaggatgctttggacccaggccttgggagggaatggtgggaacatcctctagctccccaggttggaaagagatactactgtagcccaagccacctatgctggagcccttcagaatactgtcattgtccttggggcggggtggttgcagtagtgtcatcaacccccccatccccattaaattaatcccaacatg

SEQ ID NO: 170310 - DNA, 842 bp, Homo Sapiens
  misc_feature (689)..(689): n is a, c, g, or t
  misc_feature (698)..(698): n is a, c, g, or t
  misc_feature (720)..(720): n is a, c, g, or t
gggcatgtcagcatctcaagttcatttttcaacctacagtataacaatttgtaataaagcctccaggagctcatgacgtgaagcactgttctgtcctcaaggactcaaatatttctgatactgctgagtcagactgtcagaaaaagctagcactaactcgtgttaggagctctatccatattttactgatctctttaagtatttgttcctgccactgtgtactgtggagttgactcggtgttctgtcccagtgcggtgcctcctcttgacttccccactgctctctgtggtgagaaatttgccttgttcaataattactgtaccctcgcatgactgttacagctttctgtgcagagatgactgtccaagtgccacatgcctacgattgaaatgaaaactctattgttacctctgagttgtgttccacggaaaatgctatccagcagatcatttaggaaaaataattctatttttagcttttcatttctcagctgtccttttttcttgtttgatttttgacagcaatggagaatgggttatataaagactgcctgctaatatgaacagaaatgcatttgtaattcatgaaaataaatgtacatcttctatcttcacattcatgttaagattcagtgttgctttcctctggatcagcgtgtctgaatggacagtcaggttcaggttgtgcntgaacacangaaatgctcacaaggcctcacntttgccgcccaggcactggcccagcacttggatttacataagatgagttagaaaggtacttctgtagggtccttttacctctgctcggcagagaatcgatgtgtctgttctttatccacatc

SEQ ID NO: 170311 - DNA, 919 bp, Homo Sapiens
tggtgttcaaggcatccggaagcacagggtggccaatgaggccattccagttggtcagggtcttcaagtctcagctcaattagctgaggaagttcttaagcgctatcttgtttaacttttcatggaggaattctctgctggcttgatgatctcgcggtatatgtgaatcgcaccgtttctccctggcttactccctttcgccaggcatgaattgtcaatgcagacagctgtacgatatacgaagactctgagctgtttgcctccgatggtttccagtatttgcccattttaaagctcattaaggccaacttttactttcaatatgtgattctgcagaattaatataaggaggcgctgatccatgctgagagtatcatcagaaaatgcattattcacaggtgccagcaaagtgtattctccatctggcctcagagcagatgccaagcctaattggagccacaagatccgtgaaggtggtttgctgttttccagccagctcaataacttgtttggcagaatcaggaattaggacctgatcaatcaaatggatcacaccattatttgtcacaatatcctttttgttcaccattttgattccatttactgttatactgtcaccgtcacatcctatctcaattgtatttccttccagcgtctcaaagactgctcctcccataatagactcagaacactggagagtatttaagatgtggtacttcataagagcttcggaagccactttgtctcccatgatcctttctaggacacctcgtggaagttactcaaaagcctcattggtggaagcaaagagtgtgaagtgaccgtctcttccaagggcctccaatatgtccgatgtgatggcagctgctctaaaagatgaaaggtcatcttctgcttcaatgaagtcttgaattgagta

SEQ ID NO: 170312 - DNA, 511 bp, Homo Sapiens
tgtttccctttgtctgtcatcccattacttggtcccagccatgaatgccatcattataaaagtggcaaggtagggaaataaaagccgcagcgtttttgccagaggactgaaaaaggtagccccagaaaactggaaagtactggggaaactggagggtgaatcttgggacagcaactccataaagttacttatgaactcctgagctcccccaagttgaaggaatctgtgtaatctgatctaaattgtattgacaataccatttataatagctcctctcaaattgaaagactttagtataaatctactaaaacattagagaatttgcatgctgaaaaactacaaagtgctgatgaaagaaatcaagatcaagtaaatggacagacataccatgttcatggattagaagactcaacgtagtaaatatggcagtgctctctaaattgatttatagatttaacatgattccaacagaggtctcagcagaatcttttgtaaatgtagacaaagaaca

SEQ ID NO: 170313 - DNA, 681 bp, Homo Sapiens
ctctcgtagccctccacctcccccgtgttgcgacattccttagtgtaagtctctcatcatgagtcagtgtcaaaagttcgaacttggaacatttgtgattctaatttgtagattacagacaatcaaccggtatttgtatttcccgataaaagattaaaaagtttgacggttgatagttgagtgtcaacttaattagagtgaaggaatgcaaagtattgttcctggatgtgtctgtgagggtgtcaccaaaggagattaacatttgagtcagtggactgggaaaggcagacccatcctcaatcttggtgggcaccatctaatcagatgccagcatggccagaataaatgcgggaagaagaatgtggaaagactagactggcttagcctcccagcctgcatctttctcccgtgctggatgcttcctgccctccaacatcagactccaggtgcttcagctgtgggactgggactggcttccttgctcctcagcttgcagaccacctattgtgggaccctgtgatcgtgaaattccccttcatatacacatgtatcctattagttctgtccctctagagaaccctaatacaaaaagttaaagaatataaacgaacaacccaatagaaaaatggacatgagccatgagcagttgcctctccagaagaggagacaaagggaaacact

SEQ ID NO: 170314 - DNA, 109 bp, Homo Sapiens
tattttacacaagtaaatatttgctaaatgtataataagaaatctcaaagccaagaattagtttatggaaactgaaataaagtatgtactggaacagacaccgtcgaag

SEQ ID NO: 170315 - DNA, 379 bp, Homo Sapiens
acacacagctcgggttgacacaattctgatccgtgctgagtccattttgtgttgctctgacagaagacctgaggctgggtctttataaaggaagaggttgatttggctcagattctgatggctggaaggttcaagactgggcaggtgcactcacctgaggacctcacctcatccctgaggctgctgctgcttctgggggagggcagaaggatgcagctgtgtgcacagagatcacatggtgctgaaggaagcaagggagagaaaaccaaattcccaaattcccaagggtgagcactcactcaccccttaaggcaggcattaatctatccatgaggactccacctccaagaccacacagctcctatgaggccccacatcc

SEQ ID NO: 170316 - DNA, 748 bp, Homo Sapiens
tgtttccctttgtctcccagctacttggggaggctgaggcaggagaattgcttgagcccaggaagtcgagattgcagtgagccatgattgcactcagcttggacaaaagaatgaggcccactctcgaaaaacaagaatggggaaaaagctaattggttacaatgaaggttgctagaggtggaatacattatattaaaactgataagagcaagaatatttatcccgccttttctatataaatgcagcactaggtaaccaaatagtagaaggggaaatttttctttatagaagcagtacagctgaaaaataagtgagggagaaaaaaccagagtatcaacaatttgcaaccactgatgaaataatgcatccaggcatgaaacattaatgtcagctaagcctacaaaattaaagacaaccagacattatgtgcttcttgataaaagaagtgaacatcaccttataatgtagtcttacccttactcacctaaaaaagaacctgaagctgaaactctagagccaacttgcaatttataggggacagatgaacatgttaaattataccatgggatacaaaagcaaaattcaaactatgggaaaacgtgcaaagacaaataaccttgtttcttaaacaataaattatgaagaataaaataacagatagagtgggaacttataggacccaaaaaaacataaaagatatatcaatcaaccacaatgtgcaggaactttatttggatcccgaagtttt

SEQ ID NO: 170317 - DNA, 412 bp, Homo Sapiens
tgtgttctttgtctcgcatgagtgcaatatttcattcccggtggttgtctggggaggtggttggacgaggtcctgcttgaggctcggggatcagaacgatgtcaagtgaagaaaaatgcacgggggcatgctgagccactggagttccagagagggccgaggagggtgcagccacggaggttggatcctctgctccgccgcctcgtcctcgtcccgcttctgctgggttccgctttgtccctggttttttcctttctttttctgtgtgcgtgcgaatggtgcggcccctcccctctcaccgtggttaacgtgacgaaggcacgattcctgtaaatgtgtaaactaaggggatggttggattttttttcaatgtaaacactaaaaacaaaatagacaaagggaaacaccgggt

SEQ ID NO: 170318 - DNA, 677 bp, Homo Sapiens
cgggcaccccataatagtctccaaaaaagaaaaattttaaatatgagttctgtgaacgagcccatcggctttctcaactagtacaggtgtccagaacgtagctggcaacattacttgatcgccagaaagctctcctcgcaggtagcccggatctgggattctgaaaggagaaagccatatctacctgtatctcgaagttcaaaggtgaaggaatacctgattccttggtcataagcccagtcgtcagagcccccagcagcaggatagattgttgtagctcccgggccatatgtgtacttggtgccgtgcagtgaggcaagttctttcacagtagctttagccagggcattcaactcagcattgttcacaccgagtttgtaagcatatgagtaagggtagatcatcatttgggagtacgagtggattgtcagatatgccttgatggaagagagtttgttgcggatgaaatcaaacagggccttggtctccttttcagacactgcggcaggtccacagtaagtttcatcacaggggtttcgagaggctccaatttcacaccaaccagcatcaaaatttctgttggggtctgtgccaatgcagctagatccagtatgggtggagcgagtctttctccaaaatcggctcctggtccaggtgtagatgtagccatcaatatt

SEQ ID NO: 170319 - DNA, 672 bp, Homo Sapiens
  misc_feature (44)..(44): n is a, c, g, or t
atgctggttggtgtgaattgagccctctcgaacctgtgagatgnaactacttgtggactgccgcagagtctgaaaagggagacaaaggccctggctgatttcatccgcaacaaactctcttccattcaaggcatatctgacaatccactcgtactcccaaatgatgatctacccctaactcatatgcttacaaactcggggagaacaatgctgagttgaatgccctggctaaagctactgtgaaagaacttgcctcactgcacggcaccaagtacacatatggcccgggagctacaacaatctatcctgctgctgggggctctgacgactgggcttatgaccaaggaatcagatattccttcacctttgaacttcgagatacaggcagatatggctttctccttccagaatcccagatccgggctacctgcgaggagaccttcctggcaatcaagtatgttgccagctacgtcctggaacacctgtactagttgagaaagctgatggccttgtttcaaaattctcatttttcatttcttttctttcttgaattcttattttggtttgcctggatgttttgcagatcccaatctttcttttaagcttctgggtctattaaactaggtagatcttttcgtattgatcataataaaagtgaatcattactattgg

SEQ ID NO: 170320 - DNA, 1206 bp, Homo Sapiens
gggggccgtcgggtagaggctgaataccagtttccgagcggcaaggcagcgatggcgatttttagtgtgtatgtggtgaacaaagctggcggcttgatttaccagttggacagctacgcgccacgggctgaggctgagaaaactttcagttatccgctggatctgctgctcaagctacacgatgagcgtgtgttggttgctttcggccagcgggacggcatccgagtgggtcatgcagtgctggccatcaatggcatggacgtgaatggcaggtacacggccgacgggaaagaggtgctggagtatctgggtaaccctgctaattacccggtgtccattcgatttggccggccccgcctcacttctaatgagaagcttatgctggcctccatgttccactcgctctttgccatcggctcccagctgtctcctgaacagggaagctcaggcattgagatgctggagacagacacattcaaattgcactgctaccagacactgacagggatcaagtttgtggttctagcagatcctaggcaagctggaatagattctcttctccgaaagatttatgagatttactcagactttgccctcaagaatccattctattccttagaaatgcctatcaggtgtgagctctttgaccagaacctgaagctagctctggaggtggcagagaaggctggaacttttggacctgggtcataggctgaacctgttatggacccccaaattctgagagttcctgcaacaagaatactgctgttgacactccagtggaaatcccagcagccttgttagtgcacttgaaagtgggagaatgctgaccctgatgacttgtactgattcctgagccttaacactgtgctctttccttctgtatataccatggtccttactttccaactccggacagaatttattttagggaggagcctaggtcccaaaaatgtttgtaaaaaaatattcccttttgatccttggggctctggaaacacaaccccacaaagatcaaccaaacaacctcttgtgcggccccctccggccccccaaaaaacttttctaaccctctgtcttggggcccgcggggccccgctagggatcaggacacccggccccaacccgggttccctcggagaacccggggcctgaccagggcctttggaccccaccacctaaaaaaacgcccccggcggccaaccg

SEQ ID NO: 170321 - DNA, 648 bp, Homo Sapiens
aaaatcagctcgtaccggacatgtgctgtaagccagcgtgatgagcatggtggcaggaggagagcacctcacgtacaaactgcacgagcttcgggcgcatgcatggctggccaagactgagggtcacacagggcagacaagggagacgagtcacacgtggcagcacatcatccagtcctcggggaggtgagggttggcatgtggcgggcaccggtgtgcagggcagccccatcctggggctggagcttccctagacccaggcaccacgcacaggcatcccctgctcagctcctgaacccggcccctcctgcctggccacgtccgctatcgcaccctcctgcatcagggccgagggcccaccctgcgctcctttttcttccagggtgttccaggatggtcaagttccagcactgagaacagctcaggtgtgggtgtggctattgtggaggccgtgtctggtgaacctggtgaacttggtggtgggacggtgctgatgcaggggagccacagagggttacgaccgacgcgggtctgacagcacaggcccaggcaggcgtggactcgggagccgagggtggtcggatggcagcgtgagcgccagtatcatttccagcatttccatctttaccactccagtcactctcttca

SEQ ID NO: 170322 - DNA, 937 bp, Homo Sapiens
atgcaggagggtgcgatagcggacgtggccaggcaggaggggccgggttcaggagctgagcaggggatgcctgtgcgtggtgcctgggtctagggaagctccagccccaggatggggctgccctgcacaccggtgcccgccacatgccaaccctcacctccccgaggactggatgatgtgctgccacgtgtgactcgtctcccttgtctgccctgtgtgaccctcagtcttggccagccatgcatgcgcccgaagctcgtgcagtttgtacgtgaggtgctctcctccctgccaccatgctcatcactctgcccttggccatgctccctggtcaccccacttcccggtcgccgtctgcagcactcctggagcagcctgggcccttcagcccctgtgctcgtcccaccctagggactcagccacttgcagaacaggatgggaccgagatttcagcgagccctcctggcgcccggtcctccctgtgggcaccagccctcttggtagctggtgtggagggccggtgtccttggctgccacggagggatttgatcaccgaagcagccacctgctgtagttggacctgaggtcagaggcggggcatcagaggctcaaggtgctgagaagccaccgggaaagcagccagcacaaagggcccaggaagccagcccccgagagctgagcgtgggggtctttgagtgtctttctccaagctgagacgtgggcggccgcgtggtatcctcccgagggctgcttggaccctggtgggctgagtgctccgaagagggggggactccaccctggacagtgggaatgtggcggtttcacaatgtggcctgtttccaccgccaaccccccttgcaccttggccagcatggaaacccaaagggtatgggtcccccatccccaagaagagggggccctttcctccggggtgggc

SEQ ID NO: 170323 - DNA, 931 bp, Homo Sapiens
  misc_feature (14)..(14): n is a, c, g, or t
  misc_feature (27)..(27): n is a, c, g, or t
  misc_feature (47)..(47): n is a, c, g, or t
  misc_feature (78)..(78): n is a, c, g, or t
ccgaaaactcgtgnaatttgtaagttnaagtgctctcctccctgccnaacaaagctcaatcaactcctgcccttggcnatgctcccctggtcaccccaacttccccggtcgcccgtctgcaagcactccctggaagcaagccctgggcccttcagcccctgtgctcgtcccaccctagggactcagccacttgcagaacaggatgggaccgagatttcagcgagccctccctggcgcccggtcctccctgtggcaccagccctcttggtagctggtgtggagggccggtgtccttggctgccacggagggatttgatcaccgaagcagccacctgctgtagttggacctgaggtcagaggcggggcatcagaggctcaaggtgctgagaagccaccgggaaagcagccagcacaaagggcccaggaagccagcccccgagagctgagcgtgggggtctttgagtgtctttctccaagctgagacgtgggcggccgcgtggtatctcccgagggctgcttggaccctggtgggctgagtgctccgaggaggggtggactccaccttggacagtgggatgtggtgttccacatgtgcctgtttccacgccagcaccttgacttggcagcatggagccaaggtctgtccccgcccaggagggtgccttcctcggggttagggggacggcccactctgccccagggagtcccttttgatgggaagtgcagtcagcagcgtggaggtgtctgggccaccttcagaaggtggatgtggtggccgagaccccgtccacggagggtgatggcctttcccttctgcaggtgcgggcaggtgggcctgggaccggtgctggggcctctccttgctgtgtgtgagggcccaggtggaaggcgcggacctgacagcattccaataaagcatacgggaacatgc

SEQ ID NO: 170324 - DNA, 702 bp, Homo Sapiens
tgctgtagcccagcgtcccccgcaggaggggggtctgtgagcccccagaagctgcagcagccccaggaggggcgcttggtcttcatctggaaggggctgcagctgccgggcctaggagtgggggggcctgcaggagcggcagcacgccttgctgtagtaccagtgcccgcagaggttcactttgatggccagggcacagttggtgcctggctggtcctggcagctgtcatctgggggctccgtggggcagggctgcagatcacaggcctgtctgccaacgggcttcaccaacggatcgcaaccacggacgatgtcggtcccctggtagcacttgacgtctcgcatcctcacgcccaccccgcaggtcttggtgcactctgaccaggggctggtgtaccacttgaagcagggcctctcgaaacacgtgctctcctcgggaggcttcttggcgagcccgcactcggggccactgcgcgtctgcggcttcccgttggccagctccatgcagagcaccagccgcttcttgaccccgcgcccgcaggtggtgttgcaccgctcccagtcctgggccagccagtgggcgggacagtttttgtccccaacaggggtggatggccagaggcttggtctccatctggcactggactcaggtaccacccgtccgtcgctggcctacagcacatgccggtaccgagctgatta

SEQ ID NO: 170325 - DNA, 438 bp, Homo Sapiens
catgtgctgtaggccagcgtgtatctaagtttcccattcacatggcattagcagacgaaatagatttgaaatttccagggtttctaccaatatcttggtggattgcagagtatgttaaaagtatgagaaatatatatatatctcaaaaaaattggacaataatatcttggtgtatttctcaggtcatggtggcaagtcctgcagttatcttgttggagggtattatctgagaagtcagtaaagtacatgtaaagactggtgatatttgtgtgtaaccaaggggatggggtggttgtggtcgttacagttggggacagggcaggaggtcctggtggaaagctggagcatagagtagaagtcactagggagtgtatgaccctctccccagggtccagaggattcgctggcctacagcacatgcgggaccgagctcgattt

SEQ ID NO: 170326 - DNA, 150 bp, Homo Sapiens
gaaatcagctcggtacctgcaatggcaggagaaatcagagtgttgcggcagaagtcggaccatgtgtgcctacagccaaagcccagccataaaaaaacagctggacagacatcttccttccccacctacgctggcctacagcacatgcct

SEQ ID NO: 170327 - DNA, 1003 bp, Homo Sapiens
  misc_feature (497)..(508): n is a, c, g, or t
  misc_feature (736)..(909): n is a, c, g, or t
  misc_feature (920)..(931): n is a, c, g, or t
ggattctaaaatgtctcaagtgcaatgccccctcccctcctttaccgaggacagcctgcctctgccacagcaaggctgtcggggtcaagctggaaaggccagcagccttccagtggcttctcccaacactcttggggaccaaatatatttaatggttaagggacttgtcccaagtctgacagccagagcgttagaggggccagcggccctcccaggcgatcttgtgtctactctaggactgggcccgagggtggtttacctgcaccgttgactcagtatagtttaaaaatctgccacctgcacaggtatttttgaaagcaaaataaggttttcttttttcccctttcttgtaataaatgataaaattccgagtctttctcactgcctttgtttagaagagagtagctcgtcctcactggcctacactgattgccgaatttacttgtattcctaactgttttgtatatgctgcattgagacttacggcaagaaggcannnnnnnnnnnnaaaggaaacaaactctcaaatcatgaagtgatataaaagctgcatatgcctacaaagctctgaattcaggtcccagttgctgtcacaaaggagtgagtgaaactcccaccctacccccttttttatataataaaagtgccttagcatgtgttgcagctgtcaccactacagtaagctggtttacagatgttttccactgagcatcacaataaagagaaccatgtgctnnnnnnnnnnnnnnnnnnnnnnnnnnnnnnnnnnnnnnnnnnnnnnnnnnnnnnnnnnnnnnnnnnnnnnnnnnnnnnnnnnnnnnnnnnnnnnnnnnnnnnnnnnnnnnnnnnnnnnnnnnnnnnnnnnnnnnnnnnnnnnnnnnnnnnnnnnnnnnnnnnnnnnnnnnnnnnttgtgccggcnnnnnnnnnnnnaaaaaatttttttaaaactttttttggggcgcgggcccccaaagggaagggaaagggggcaattttttttcc

SEQ ID NO: 170328 - DNA, 1247 bp, Homo Sapiens
  misc_feature (1064)..(1064): n is a, c, g, or t
aggcagtcagtcaagcatcatcacatccggagaactcggaggaagaggagtgcatgggagcagccgcggctgtgggccctgccatgtgtggggtggaactggactctctcatctcccaagtgaaggacctgctgccagaccttggtgagggcttcatcctggcctgcctggagtactaccactacgacccagagcaggtgatcaacaatatcctggaggagcggctggcccccaccctcagccagctggaccgcaacctagacagagaaatgaaaccagaccctacacccctgctgacgtctcgccacaacgtcttccagaatgacgagtttgatgtgttcagcagggactcagtagacctgagccgggtgcacaagggcaagagcaccaggaaggaggaaaacacgcggagtttgctgaacgacaagcgtgcagtggcggcacagcggcagcgctacgagcagtacagcgtggtggtggaggaggtgccactgcagccaggcgagagcctgccctaccacagtgtctactacgaggatgagtacgatgacacatacgatggcaaccaggtgggcgccaatgatgcagactctgatgacgagctcatcagccgcaggccattcaccatccctcaggtgctgagaaccaaagtgcctagagaagggcaggaggaggatgacgacgatgaggaagacgatgctgacgaggaggctcccaagcccgaccattttgttcaggaccctgcagtgctgagagagaaggcagaagccaggcgcatggcctttctcgccaagaaagggtaccggcatgacagctcaacagcagtggccggcagcccccgaggccatgggcagagccgcgagacaacccaggaacgcaggaagaaggaagccaacaaggcgacaagagccaaccacaaccggagaaccatggccgaccgcaagaggagcaaaggcatgatcccatcctgagacctggtgcagggccagtggggaggcagcggcaccagactcaccaggccgcgctcccatcgcctggggcctcctcactagggggccccaagnttcaactcaaacccctcaacagccctcagctttgcagcccctgaaaaggcccgcctctcatcttaacagccagccatggagcgccttccttgcaagaacacaccggtgccttatgccacaacccaaagaattccgtgggggccggcaaagcaggcacccttcccccagcctggcgctacgggg

SEQ ID NO: 170329 - DNA, 830 bp, Homo Sapiens
cggcgctgttggggaagtacaagcagtgactctataagaagatgacccaggcggcatcctgatccagagcaagttccgaagctactatgaacagaagcgatttcagcagagccgccgagcggctgtgctcatccagcagcactaccgctcctaccgccgcaggcccggccctccccaccggacttcggccaccctgcctgcccgcaacaaaggctcctttctcaccaagaagcaggaccaggcagcccggaagatcatgagattcctgcggcgctgccgacacaggatgagggaactgaagcagaaccaggagctggaagggcttccccagccgggactggccacatgacctggccaccgcctttctcaccaccctgggggcgcctcgtgcagtcttaacagggagagggctttctggggcagggggagcccctgtcggcagctttcctgttcacctttgttggagccctctgtaggcctcctccctcctccccacgccttgctcccacacccctctcctcgtccctcctggtcgtgccccgtctcttttggtcctggctccagaaaacccgcgccccacatacctgcatcttccgctgtgacctccggagccctgcctgcccctgctccccagctcctcctgcctgcacccgactcggccccctcctgacttgccttatttatatgttcgacgcgtctctgaatgtatccgcctcggttcccaccactgccttcgctgcgcacgcccctcgtgtttcaggggctgaccgtgtccccacccgactccgcatgttgggtctgttcctccctctctggcgctgtcttaccca

SEQ ID NO: 170330 - DNA, 259 bp, Homo Sapiens
acattgtgaacatcaattcccatcacagcaagccctggatgaaaacatggacctcttggaaggtataactggctttgaagactctgtccgaaagtgtaagtccctctctgaggctgggctccccaaggggaaggggtagggagtggcagccaggtccggggggacagctgctcaccggttttgtctctgacctccacagttatctgccatgttgtgggtatcacttaccagcacattgaccgctggcctacagcacatg

SEQ ID NO: 170331 - DNA, 182 bp, Homo Sapiens
gcctactactactactatacggctgcgagaagacgacagaaggggcagatcttcatctgtagccaagaagagagcattaaacccaagaacattgtggagaagattgactttgacagtgtgtccagcatcatggcctcctcccagtaacttcaggtgtttaataaagatgtgttgactcaacg

SEQ ID NO: 170332 - DNA, 809 bp, Homo Sapiens
ggggttcccgtccttgaggacgccgtgccgggtcagtgttagcctccagccctggttgtggaaggcgacagaagtcatggcgatgtttgagcagatgagagccaacgtgggcaagttgctcaagggtatcgacaggtacaatcctgagaacctggccaccctggagcgctatgtagagacgcaggccaaggaaaatgcctatgatctggaagccaacctggctgtcctgaagctgtaccagttcaacccagccttctttcagaccacggtcaccgcccagatcctgctgaaggccctcaccaacttgccgcacacagacttcaccctgtgcaagtgcatgatcgaccaggcacatcaagaagaacggccaatccgacagattttgtacctcggggacctgctggagacctgccatttccaggccttctggcaagccctggatgaaaacatggacctcttggaaggtataactggctttgaagactctgtccgaaagtttatctgccatgttgtgggtatcacttaccagcacattgaccgctggctgctggccgagatgctcggcggatctgtcggacagccagctaaaggtgtggatgagcaaatacggctggagtgcccacgagtcggggcagatcttcatctgtaggccaagaagagagcaattaaccccaagaacattgggggaaaaagattgacctttgaacaggggggtcccagcatcaatgggccctccctccccagtaaactttctaaggtgtgtttaaattaaaagcaggtgggtttgaactcacgggaaaacaaacaac

SEQ ID NO: 170333 - DNA, 840 bp, Homo Sapiens
gggctgttcccgtccttgaggacgccgtgccgggtcagtgttagcctccagccctggttgtggaaggcgacagaagtcatggcgatgtttgagcagatgagagccaacgtgggcaagttgctcaagggtatcgacaggtacaatcctgagaacctggccaccctggagcgctatgtagagacgcaggccaaggaaaatgcctatgatctggaagccaacctggctgtcctgaagctgtaccagttcaacccagccttctttcagaccacggtcaccgcccagatcctgctgaaggccctcaccaacttgccgcacacagacttcaccctgtgcaagtgcatgatcgaccaggcacatcaagaagaacggccaatccgacagattttgtacctcggggacctgctggagacctgccatttccaggccttctggcaagccctggatgaaaacatggacctcttggaaggtataactggctttgaagactctgtccgaaagtttatctgccatgttgtgggtatcacttaccagcacattgaccgctggctgctggccgagatgctcggggatctgtcggacagccagctaaaggtgtggatgagcaaatacggctggagtgccgacaagtcggggcagatcttcctctgtagcccaagaagagagcatttaaaccccaagaaccttgtcggagaagattggacttttgaaagtgtggtccagcattcatgggccttcctccccagtaaattccaggggttttaataaaacactgggtttgacctcacccccttggcaaaaacataaccgtcctcaatatactgagttgacaaatgcgcttgc

SEQ ID NO: 170334 - DNA, 571 bp, Homo Sapiens
gggatctggaagccaacctggctgtcctgaagctgtaccagttcaacccagccttctttcagaccacggtcaacgcccagatcctgctgaaggccctcaccaacttgccgcacacagacttcaccctgtgcaagtgcatgatcgaccaggcacatcaagaagaacggccaatccgacagattttgtacctcggggacctgctggagacctgccatttcccaggccttctggcaagccctggatgaaaacatggacctcttggaaggtataactggctttgaagactctgtccgaaagtttatctgccatgttgtgggtatcacttaccagcacattgaccgctggctgctggccgagatgctcggggatctgtcggacagccagctaaaggtgtggatgagcaaatacggctggagtgccgacgagtcggggcagatcttcatctgtagccaagaagagagcattaaacccaagaacattgtggagaagattgactttgacagtgtgtccagcatcatggcctcctcccagtaacttcaggtgtttaataaagatgtgttgactcaggaaa

SEQ ID NO: 170335 - DNA, 907 bp, Homo Sapiens
ggagtcacgtggcagccggaaagcgtggcggctgctgctagagcctttccctttaccgcacccaaggagctggagcgacaacaacgacgtcgtttccgtttccaccacctcttcctgttcccgtccttgaggacgccgtgccgggtcagtgttagcctccagccctggttgtggaaggcgacagaagtcatggcgatgtttgagcagatgagagccaacgtgggcaagttgctcaagggtatcgacaggtacaatcctgagaacctggccaccctggagcgctatgtagagacgcaggccaaggaaaatgcctatgatctggaagccaacctggctgtcctgaagctgtaccagttcaacccagccttctttcagaccacggtcaccgcccagatcctgctgaaggccctcaccaacttgccgcacacagacttcaccctgtgcaagtgcatgatcgaccaggcacatcaagaagaacggccaatccgacagattttgtacctcggggacctgctggagacctgccatttccaggccttctggcaagccctggatgaaaacatggacctcttggaaggtataactggctttgaagactctgtccgaaagtttatctgccatgttgtgggtatcacttaccagcacattgaccgctggctgctggccgagatgctcggggatctgtcggacagccagctaaaggtgtggatgagcaaatacggctggagtgccgacgagtcggggcagatcttcatctgtagcccaagaagagagcattaaaccccaagaacattgtggagaaagattgacttttgacagtgtggccaacatcatgggcctcctcccaataacttcaaggtggtttactaaacgatgtgttgacttcaggcaagaaaacaaaacacgg

SEQ ID NO: 170336 - DNA, 291 bp, Homo Sapiens
aagatgagccggtacggcatgtgctgtaggccagcgcccagtacctcacgcagacataagtgctcagtaaatgttgtccgtggtggggatggttgtcaccaacatctgaagtgcacttctaggtcatcaggtgacatgattggcgccaacacatggtactcttgatttagcacatctcagctgaggcacctcattgatatttgtttaaaaacacaacactaaaaaccttggtgattctgctgtgaagtcctggccagaacctccagagccgctggcctacagcacatgacc

SEQ ID NO: 170337 - DNA, 318 bp, Homo Sapiens
gtacccggcatgtgctgtaggccagcgagtgaacgggctgtgctaaggggaattgccaccttgggaaacctgtgtagttgcggcttttctgattaagtatcaataaaagtctgaccttgtgaaaaaagcaaacgtgagtggccctgcttatgtttcaccttgcgttgctcagtgatagttctgcaaagtcgcaggaaacctggaatcatctaattatcgtgagtgttggtgagtaacacccataggcactggctcccggggaaatacagagtcaggttcctccgagccgctggcctacagcacatgcggtaccggctg

SEQ ID NO: 170338 - DNA, 429 bp, Homo Sapiens
catgtgctgtaggccagcgaagattatggcgacactcttgccgccatccagggcttactgaagaaacatgaagcttttgagacagacttcaccgtccacaaggatcgcgtgaatgatgtctgcaccaatggacaagacctcattaagaagaacaatcaccatgaggagaacatctcttcaaagatgaagggcctgaacgggaaagtgtcagacctggagaaagctgcagcccagagaaaggcgaagctggatgagaactcggccttccttcagttcaactggaaggcggacgtggtggagtcctggatcggtgaaaaggagaacagcttgaagacagatgattatggccgagacctgtcttctgtgcagacgctcctcaccaaacggaaacttttgacgctggcctacagcacatgccggtaccggctc

SEQ ID NO: 170339 - DNA, 1053 bp, Homo Sapiens
  misc_feature (767)..(767): n is a, c, g, or t
agcatttccagcagcggctggcgcagtttgtggagcactggaaagagctgaagcagctggcagctgcccggggtcagcggctggaagagtccttggaatatcagcagtttgtagccaatgtggaagaggaagaagcctggatcaatgagaaaatgaccctggtggccagcgaagattatggcgacactcttgccgccatccagggcttactgaagaaacatgaagcttttgagacagacttcaccgtccacaaggatcgcgtgaatgatgtctgcaccaatggacaagacctcattaagaagaacaatcaccatgaggagaacatctcttcaaagatgaagggcctgaacgggaaagtgtcagacctggagaaagctgcagcccagagaaaggcgaagctggatgagaactcggccttccttcagttcaactggaaggcggacgtggtggagtcctggatcggtgaaaaggagaacagcttgaagacagatgattatggccgagacctgtcttctgtgcagacgctcctcaccaaacaggaaacttttgacgctgggctgcaggccttccagcaggaaggcattgccaacatcactgccctcaaagatcagcttctcgccgccaaacacgttcagtccaaggccatcgaggcccggcacgcctccctcatgaagaggtggagccagcttctggccaactcagccgcccgcaagaagaagcttctggaggctcaaagtcacttccgccagggtggaggacctcttccntgaccttcgcccaaaaggcttctgccttcaacaggctgggttgaaaatggccgaggagactttaccgaccccgttgcgcttgcactccttgggagaaatcaaagcttttggcgcgagggcccacgaagcctttcggttccttccctaaggtctggcccaggctgacttgcaacccaattgggccgaacctgggaaccgccagaaccaaaagctttccgcggaaacctccccacccctaaacccgggtgttaccatgggagggcccctggggggaaaaaccgggaag

SEQ ID NO: 170340 - DNA, 333 bp, Homo Sapiens
catgtgctgtaggccagcggagactcccaagcaggtctcagccaacaactctgttgagcagcaactggaagatagtctccatagaggcacagaggccagacttctgcctcctatggcattgatcctctctcctgggccacctttcgtgcattgaggggcaaggctgaggcctgtaccagcccagattaaaggacttctaagcacaggtcagcctccagttcccagtactcactgcctctgaccagagggatgccctgggtagagtatagacttccaggcagaggtggataacctgcgctgcctacagcacatgccggtaccgagctgattact

SEQ ID NO: 170341 - DNA, 420 bp, Homo Sapiens
gagatgagcggtacccagcggaacagttataccacattaaaggccagttcttgtggggagtaggtttatctttggagatggagctgagtacccctcccctcagttactcatgggaaactcgttccaaggccacatagaaactgttcttgtcatctaggcaatgccagccaattggtccaatttcacagtctgcgcagaccagaaacttgatgttgcccacgtccttggtgaagcccacattctcaaaaatgaacatgtcctcaaccagccagtgttcctggaggagatcgccgtcaggattgctgccgtcagacagagctggcttctttctcatggagggaaggaaaagctgtcggcgagagaagagagcggtccctggctgcagcacccgggagccgcaacgctggcctacagcacatg

SEQ ID NO: 170342 - DNA, 359 bp, Homo Sapiens
cgctggcctacagcacatgcggcatgtgctgtaggccagcggggacagcagtgtgtgtccagtttgtcagccacaccctgtgtacaggttaaagttaaagtttaagcgcggtagccttcccccgaccatgcctctggagtttgtttgctgcatcggcggatgcgacgacaccctgagggagatcctggacctgagattttcagggggcccccccagggctagccagccctctggccgcctgcaggctaaccagtccctgaacaggatggacaacagccagcacccccagcctgctgacagcagacagactgggtcctcaaaggcgctggcctacagcacatgccggtaccgagctgatt

SEQ ID NO: 170343 - DNA, 1366 bp, Homo Sapiens
  misc_feature (78)..(78): n is a, c, g, or t
  misc_feature (90)..(90): n is a, c, g, or t
gaggtatcttcgtgtggagttaattaatagcgcgtacttgcgctgcggtgaggatttttcttatgcgtacgtgtgctnctcagggcgtcncttctgtgatgggctaagtgcgcgtctcgtggcatgttgcccgttgagttcaggacgaccgttcattaccgacaggaaaggtagccttgttttcaagctggttgcacgacttgagcgcccggtcctcatgtggttcacatcgatttcactggaggtgaatcccgccgtagtactcgcaccgtggaacgtttatccccaagcttaggggacggtccatgcgcagtgctcggaatggaggtgaccgtgcgggctatgaatgcgtaatgcggtttcacccatgagaggagatcccttttcggtcgcagttttgggtgggcctccctttcctccagggaaagattctttggcgaaccttatcgtcagttcgcaagcagggagggcgttgcccgttcaggttcgaaacccattgcagccgggggccgctctgtcagtggaggcttgggcgtcagtttgggccccctttgatgctggcggggatgcaggtgaaggatgaggacagctcccaggagggtggccagggcagccaggatggccgggcactgaatcccgtatgcggagaccagggtcccgcccagcagggagccgaggatgactccgacgctgaagcagaggaccagccggcccagggccgcgggccgctcctcgggtgccgacaggtctgtgatgaccatctgggcggctggcagcgtgtgcatgagcgctccgggcaggcgcgaggcgaagagcaggtagaccccgggcagggccgggctggaggcggccgccaggagcaggtagagcgccaaggcagccaggaaggagagcgtgagcgccgcccgcgccccgcgctggtctgcgaacctgccaaacaccggcccgcccagcagctgcagcaccccgaaggtggtttgcaggtagccgaaggcaatggaatccaggcccagtttccgagacaggtatggcacgatggagaactgcatgaagaggcaggtaagttctgtggcggccagcacgtaggtaagcaagatgaccgaggaccggcctagagcgctcatcctgccgggggaccggccctggtccctgggagcccgagctccctgcatcctggacaggcgcagcagggagacccaggagagatccaagcaggaggctggcggagcagggggcaaaagtccagttgatccgggcaggggtgctgagtcactgggtcccaggcagcacccgcctggccttgcctgcctttgcaggggcgggcttgggcacgggtgccggtggggtgagcgctccagggtgacct

SEQ ID NO: 170344 - DNA, 350 bp, Homo Sapiens
  misc_feature (215)..(215): n is a, c, g, or t
  misc_feature (264)..(264): n is a, c, g, or t
  misc_feature (269)..(269): n is a, c, g, or t
  misc_feature (313)..(313): n is a, c, g, or t
cgaacctgccaaacaccggcccgcccagcagctgcagcaccccgaaggtggtttgcaggtagccgacgattgggaatccaggcccagtttccgagacaggtatggcacgatggagaactgcatgaagaggcaggtaagttctgtggcggccagcacgtaggtaagcaagatgaccgaggaccggcctagagcgctcatcctgccgggggaccgcnctgggtccctggggagcccgagctccttgcatcctgggacagggcgcanaaggngagacccagggagagattccaagcaggaggcttggcggacaggnggggcaaaagttccagtttgattcccgggcaagggtt

SEQ ID NO: 170345 - DNA, 834 bp, Homo Sapiens
  misc_feature (713)..(714): n is a, c, g, or t
  misc_feature (721)..(721): n is a, c, g, or t
  misc_feature (735)..(748): n is a, c, g, or t
  misc_feature (750)..(761): n is a, c, g, or t
cgagctcggtacccatgtgctgtagcccagcgatgccgactcccccagattcaagaccagtgtgggcagcgccaagtatgtgccggagagaaacgtcgtgatttggagtattaagtctttcccggggggcaaggagtacttgatgcgagcccactttggcctccccagtgtggaaaaggaagaggtggagggccggccccccatcggggtcaagtttgagatcccctacttcaccgtctctgggatccaggtccgatacatgaagatcattgagaaaagtggttaccaggccctgccctgggttcgctacatcacccagagtggcgattaccaacttcgtaccagctagaagggagaagagatgggggcttgaacacggggcttccttacagccccggatgcagattttagagggagggcaggtgcgggctgtgtgtgtctgtgtgagggcaggtcctggacttggcagtttcttgctcccagcacccgccccttcctcacctcttccttattccataggctgggagagaaactctctctgcttccctcgcccttggagctttccccatccccctgattttatatgaagaaatagaagaggggcttgaagtccccctcgcgagtgccatcttgcaattacctgccttagcgggtggtgcgggtccctccttcacgccgctgaagcccagaggtcccgctggcccctcctctgnnattttangatggtcagtaaannnnnnnnnnnnnnannnnnnnnnnnncctgttcggccggcctccggccctcgaagaagcttttctagaacatttcgttttgggggcgcggggcccaatc

SEQ ID NO: 170346 - DNA, 655 bp, Homo Sapiens
  misc_feature (513)..(513): n is a, c, g, or t
  misc_feature (519)..(519): n is a, c, g, or t
  misc_feature (583)..(583): n is a, c, g, or t
  misc_feature (637)..(637): n is a, c, g, or t
taccccatgtgctgtaggccagcgcccaacagcgtggatgtcgatgacttcatcaacacgtgaatacaggaggcggacaatgaccccacggctcctccttatgactccattcaaatctacggttatgaaggcaggggctcagtggccgggtccctgagctccctagagtcggccaccacagattcggacttggactatgattatctacagaactggggacctcgttttaagaaactagcagatttgtatggttccaaagacacttttgatgacgattcttaacaataacgatacaaatttggccttaagaactgtgtctggcgttctcaagaatctagaagatgtgtaaacaggtatttttttaaatcaaggaaaggctcatttaaaacaggcaaagttttacagagaggatacatttaataaaactgcgaggacatcaaagtggtaaatactgtgaaataccttttctcacaaaaaggcaaatattgaagttgtttatcaacttcgctaganaaaaanaacacttggcatacaaaatatttaagtgaaggagaagtctaacgctgaactgacaatgaagggncattgtttatgtgttatgaacatccaagtctttcttcttttttaagttgtcaangatgcttccacaaaatta

SEQ ID NO: 170347 - DNA, 1528 bp, Homo Sapiens
catgtgctgtaggccagcgatgtggtaatatttcccagctcagacagccaggcgcaccctccggagctgctgttctcagcctcactgcccgccctgggcttcagcacctattcagtagcccaggtgcctcgctggaagccccaggcccgcgcaccacagcccatccccagaagatcctggtcccctgctttaaccatcgaaaatgagcacatccgggcaacgtttgatcctgacacagggctggtgatggagattatgaaaatgaaacagcaactcctgctgcctgttcgccagaccttctgctggtacaacgccagaataggtgacaacgaaagtgaccaggcctcaggtgcctacatcttcagacccaaccaacagaaaccgctgcctgtgagccgctgggctcagatccacctggtgaagacacccttggtgcaggaggtgcaccagaacttctcagcttggtgttcccaggaggttcgcctgtacccaggacagcggcacctggagctagagtggtcggtggggccgatacctgtgggcgacacctgggggaaggaggtcatcagccgttttgacacaccgctggagacaaagggacgcttctacacagacagcaatggccgggagatcctggagaggaggcgggattatcgacccacctggaaactgaaccagacggagcccgtggcaggaaactactatccagtcaacacccggatttacatcacggatggaaacatgcagctgactgtgctgactgaccgctcccagggggcagcagcctgagagatggctcgctggagctcatggtgcaccgaaggctgctgaaggacgatggacgcggagtatcggagccactaatggagaacgggtcgggggcgtgggtgcgagggcgccacctggtgctgctggacacagcccaggctgcagccgccggacaccggctcctggcggagcaggaggtcctggcccctcaggtggtgctggccccgggtggcggcgccgcctacaatctcggggctcctccgcgcacgcagttctcagggctgcgcagggacctgccgccctcggtgcacctgctcacgctggccagctggggcccccgaaatggtgctgctgcgcttggagcaccagtttgccgtaggagaggattccggacgtaacctgagcgccccccgttaccttgaacttgagggacctgttctccaccttcaccatcacccgcctgcaggagaccacgctggtggccaaccagctccgcgaggcagcctccaggctcaagtggacaacaaacacaggccccacaccccaccaaactccgtaccagctggacccggccaacatcacgctggaccccatggaaatccgcactttcctggcctcagttcaatggaaggaggtggatggttaggtctgctgggatgggccctccaagcccaagcctcctgctccgggggcagaccagactctgactctcctcttggggctgctgccattaaaacgctactactaagactcaaaaaaa

SEQ ID NO: 170348 - DNA, 1466 bp, Homo Sapiens
  misc_feature (1235)..(1339): n is a, c, g, or t
  misc_feature (1341)..(1346): n is a, c, g, or t
catgtgctgtaggccagcgctagcatcattgttaaaatgacagactcgttcactgagcaggctgaccaggtgactgctgaggttggaaagctcttgggtgaagagaaggtggatgcaattctttgcgttgctggaggatgggccgggggcaatgccaaatccaggtctctctttaagaactgtgacctgatgtggaagcagagcatatggacatcgaccatctccagccatctggctaccaagcatctcaaggaaggaggcctcctgaccttggctggcgcaaaggctgccctggatgggactcctgggttaccctggataccccgatgaacaggaaatcaatgcctgaggctgacttcggctcctggacacccttagaattcctagttcaaactttccatgactggatcacagggaaaaaccgaccgagctcaggaagcctaatccaggtggtaaccacagaaggaaggacggaactcaccccagcatatttttaggcctcatctcagtgcctatgaggggcctgccagaaaagtcactaacctgtctcagtgtggccttgtccagccttgtgttttctgtaacccctgtttgtggtacgagataatgagtcctatttttctctcacataatatgcatttgctctcctaggacagtgtaatacatttatgtgaagtaaagacatgcgagactggtggcctgcaaatagcatccgtcaatctgtgttaactgcatagggagggctctgcatagcacctgctatagcggtgtcatgttggatcgcttttgtgactgttcatctgtccttgacagtggctgtcatcttgactactttgttgatttgttggtattggggacattttaaaggctgagttatttttgaatgtcatgtttatgtcatagacgtagttttcgcatccttgaattaaactgccttaactccttttgtggtataagcaaaactccatggactctgtcctggtatccttttcctgtgtggttgccctgtgtcctctggcctagggttaagtgtgcaagataactactcgtgagtattcagaatgttgttcctaataaatgcacttgttgtctgtcttctttaatcaaatcacatcttatatacagcagtcagagatgagtatactagaatcatggaattgctggaggtcttttaatctggtgttctccggaaagggggtggatttaaatccctgaaataaatatttcaacacaannnnnnnnnnnnnnnnnnnnnnnnnnnnnnnnnnnnnnnnnnnnnnnnnnnnnnnnnnnnnnnnnnnnnnnnnnnnnnnnnnnnnnnnnnnnnnnnnnnnnnnnnannnnnntttgggcgcccgccctccccccccaaaaaaatttttttaaaccctttcttttgggcgccccgcggccccaaagggaaaggaaaaatgggccaaatttgtttcccaaaagaaaacccgggc

SEQ ID NO: 170349 - DNA, 877 bp, Homo Sapiens
cagggttacagaatacacaagcctggaccaaggccacactgagacaggttaatgaccttttctggcaggcccacacataaggcactgagatgaggccttaaaaatatgcctggggttgaagttccgtcctgtgccttctgtggttaaccaacttgggattaggcttcctgagctcggtcggtttttccctgtgatccagtcatggaaagtttcaactaggaattctaagggtgtccaggagctgaagtcagcctcaggcattgatttcctgttcatcggggtatccagggtaaccgggagcacagcgatggcggctgccccgggcggcatgccgctgttcttcccagccaggctctggcagagctggtgaacagcacccttggccatgccgtacccgatcataccaggagtcccatccagggcagcctttgcgccagccaaggtcaggaggcctccttccttgagatgcttggtagccagatggctggagatggtcgatgtccatatgctctgcttccacatcaggtcacagttcttaaagagagacttggatttggcattgcccccggcccatcctccagcaacgcaaagaattgcatccaccttctcttcacccaagagctttccaacctcagcagtcacctggtcagcctgctcagtgaacgagtctgtcattttaacaatgatgctagcgctggcctcttcattctccaccacatcaacgctggcaacccaccagttgcgggcccgaaaagcctgcacgcatcgagaacccagagcgcccctgccgccgtacaccagcacccggcgcgcctcgcctgcagccgccgccgccgccatcctgctcctgcgacgcgtgggtcgacccacgcgtccg

SEQ ID NO: 170350 - DNA, 511 bp, Homo Sapiens
catgtgctgtaggccagcggtttaacaaatgacagtaggtgacacagaaatcaaatattaagaatggatgatcaaaatcaccaatgcacatgtagtaatcaaatgtttggggctagatattatggtatacaaaaaacattaaaatcatgtggtttgtaagcaaagcaaacatttttggaaatgtttgcaaattggacacaaccacaaattcaagaaattttttaaaaagacaaaagccagcttacaaagatttgaccaataaaacccaaaggcctcctctgattaagaatttattttaaatactagtaagcaaaaatgtatttaggccaaaatgtaattgtacaatctgttgcacaccatacctgtaggtgtttgcctgtttaagggaagtccacatggatttagggaaaacaagtgaaaaaaggatcaaataacgtatcaattgagagagtaacgtaactcgactggcgtacggcacatgccgggcacggactctgaattgtatatgatg

SEQ ID NO: 170351 - DNA, 520 bp, Homo Sapiens
gctggcctacagcacatgccggcatgtgctgtaggccagcggtttaacaaatgacagtaggtgacacagaaatcaaatattaagaatggatgatcaaaatcaccaatgcacatgtagtaatcaaatgtttggggctagatattatggtatacaaaaaacattaaaatcatgtggtttgtaagcaaagcaaacatttttggaaatgtttgcaaattggacacaaccacaaattcaagaaattttttaaaaagacaaaagccagcttacaaagatttgaccaataaaacccaaaggcctcctctgattaagaatttattttaaatactagtaagcaaaaatgtatttaggccaaaatgtaattgtacaatctgttgcacaccatacctgtaggtgtttgcctgtttaagggaagtccacatggagtatgtaccttcagtgattacaggatcaaaaaaacttcatttagagagttacaagtaagtcgctggcctacagcacatgccggtaccgagctcgatga

SEQ ID NO: 170352 - DNA, 531 bp, Homo Sapiens
catcgagctcgccccggttatgctgtaggcagcgtatccacctcgtctgtcttctcgggtctaagttgtattggcctgaacgagtttttcagatcccagagttaataatgatactgtgcaccacagagtgcaggaagcgcacacgttcatttgatcgtcccccgcctgcaggcaaggcagatggggaccccacgttttgctgctcagactctctcccactgttggttccttgtatgtttcgtattctccctggagacagtggtttcttcagagacaaagatgctgtctggttcccggcaccagtttgtccacttccttatatgcagtggttctggaatcaccattgcctccgactgctccaggtcttagggagaggacctcgatagccccaggctcaggtccactcagcaggcttcagctcctccccctgacaggctccttccagggcctcgcttggagtgtcctcccgaggcgcttggtcatgtttagctttatgcaaaaacaggctcccgctggcctacagcacatgcc

SEQ ID NO: 170353 - DNA, 404 bp, Homo Sapiens
catgtgctgtaggccagcgtgtgccaattggtgtggtaagaacggtcagtgcgggccatgcttggaaagtagagaccattggaattgcttgtggatttgatgtagagtgtgagagaatcgctaaggatggcaccaaggtttttggcctaaagaaatggaaggacggagctaccagtaacagagatggggcaggggcacacattgcagaaagaacacatcaggaactcagctagggatatattacctcctgaaattcagtgtggccttaggtagctgatctcgggcagagattggtgactcttgtccccgtgtgtggctcaatgttaactttttaacgatcagatgctgacctctcccaataaaatgtataaccgctggcctacagcacatgccggtccgagcct

SEQ ID NO: 170354 - DNA, 208 bp, Homo Sapiens
catgtgctgtaggccagcgaaaggtgttagcaaaagtagggaatgaccagctttcctcgagaagaacctgaataaattgttggagcctgtcacatggagaattcatgaggtatttgatttaaagagttctcagtttggcttggggggagggaagtgacagtccaagtgaccctggtgatttcttgtatccgctggcctacagcacatg

SEQ ID NO: 170355 - DNA, 564 bp, Homo Sapiens
acacacggcattgctgtaggccagcgtacgtgtgcatcaacggcagaataaatactgaggacaagggtgaagttggccaacaggaagacattccaaacactaatgcaaggcaagtcggctatgacgcccaggatcacttttccaaagatgtgaactattgctataattgacgtcagagggaaaacgtcgttttgctccgataagttatacaaattgacgatttctgggaggtgaatgaaggggatgacaaagctgctgtatgcaaacaaagcccagaaaataaaggctacaaacattcgatttgtaaatagagaggctgtcccaaagtagcccgaataccagtcctcgaagcccttcctgactctcatggtgagccagctgacagtcttcagaatccggagggcacacatgttcttcctgtgcccggcctgatcggggcactcctgggcttgcaggtcgcagagggtctcctcgttcccgagcccaccatccttctcttctgttcttccctgctgtccagttgacttcacagattctgtggagtgcgctggcctacagcacatg

SEQ ID NO: 170356 - DNA, 249 bp, Homo Sapiens
  misc_feature (123)..(154): n is a, c, g, or t
aatacaatcagctcggtaccggcatgtgctgtaggccagcgtgatgggaagtagaagagatgtagaagatagggtaattaattcaacagctcatattcatttgcatgactgtggtggtagttnnnnnnnnnnnnnnnnnnnnnnnnnnnnnnnntggcctgtacccagtacttcagataaatacctgttgaaaattttttaaatcgagtaaaaaaggacaaaagtctgcaaaccgctcattttctaaaa

SEQ ID NO: 170357 - DNA, 496 bp, Homo Sapiens
ctgtaggccagcggatcacctgaggtcgggagttcgagaccggcctgaccaacaaggaaaaaccccagtctctactaaaaatacaaaattagtcaggcatggtagcgcatgtgggaggtaatatatccattactctgacctgtcttttaaaaacagagtggtagaccaggtatccttacgttagtgattctgggtcatgacaccccaagatcattggtgagagtacaatgaacatgcaaggatgcatacaaggttgcttttgtgtttgttttttagaaaatgaggtttgcagaccttttgtccttttttattggagaacaatattttcaacaggtatttatctgaagtactgggtacaggccagtatcctctgtagtcggtcgtcgtggttttttgaactaccaccacagtcatgcaaatgaatatagcctgttgaattaattaccctatcttctacatctcttctacttcccatcacgctggcctacagcacatg

SEQ ID NO: 170358 - DNA, 475 bp, Homo Sapiens
  misc_feature (111)..(137): n is a, c, g, or t
catgtgctgtaggccagcggaggcccatcgctgtcttctgtgctgaacgagctgcccagtgctgccacccttcggtaccgagaccctggggtgctgccttggggggcgctnnnnnnnnnnnnnnnnnnnnnnnnnnncagaaaggccttcacagaagtcacccagacagagctgcaggaccctcacccttcccgggaactgccctggcccatgcaggccagacgggcacacaggcaaagaaatgccagcagggaccaggtggtctatggctctggaactaagacggaccgatgggcgcggctacttcggaggtccaaggagaaaacaaaggaaggcttgcgaagcctgcagccctgggcgtggacactgaagaggatcgggggccagtttggcgccggcacggagtcctacttctccctgctgcgcttcctgctccttcttaacgcgctggcctacagcacatgccggtccggct

SEQ ID NO: 170359 - DNA, 426 bp, Homo Sapiens
gtacaagtcgagcatcggtccttcaggatctcagtatactgaatgataccatagtaatgtccttcttgtgtgtgctattggtcagctaataatgaaatggggtaagagcccaaaagaagtttacacgaatagatgaattttacatcatgttatagtggcacatactgtaaattacaaatagctagatggcaatgaagtaagggaagtttacactaaatatgaagacaaattaccagcaaatacaaccattttccaagggaaggacagaaaatccaacttaaatctaacaaggaaagacactctttgattcattcgatatggtcagaaaagcttgagacagtctataactctcaatgttatctacagttctgaaataaaaaactgtctacagtaaacattatgtgacaacatcaatacaaagtctca

SEQ ID NO: 170360 - DNA, 579 bp, Homo Sapiens
  misc_feature (506)..(538): n is a, c, g, or t
catgtgctgtaggccagcgttagaagggtgcagtttggaattgaaagtgaaaggagcatgcacgtgttcggggcaggttgcggggagagtgaagatcattttaaagaccctggtgctttgatcttagagcaccactcatttgtactcagttcagatctaagtgaattactgtgcaaacgacatgacgagagaggggcattttccaatagtagcttctggtctggcacatgagccagttagagattgacacacgcagtcatgtagctgctataaattgaagcctggtgatggacgtactacaggcatggctgcagcgaatgcctatgacctttcacttctcctccctctgtcactctgtgtattcgctctctccattttcctccctcacctattcaccagccatgaatcaggagtggactgggcaaggatcagcctgtagggaaatgatgtgggccgagggtaaagagtgaggaataattaaggcagcccttgaattagttgtacannnnnnnnnnnnnnnnnnnnnnnnnnnnnnnnntaagcaaacaaacaccacatcgctggcctacagcacatgcc

SEQ ID NO: 170361 - DNA, 346 bp, Homo Sapiens
catgtgctgtaggccagcggccggcagccggatctgtgctgcactatccagatgcacgggggtggggaggtcagattttaagccgagacagcaacctatgaaaaagcagattctaactgccaatgctgtgcggcaggggcctgcaaactacagccccggggccaaacccaggtgccacttcttcctgcaagtacagctcattggacacagccacgttcaccaggcaacacacagaccgacacacctgcggctgcagcaccgtgcggccagcaccgcccagactcctcatgctgccatctacggaaaacgctggcctacagcacatgccggtacgagctcgattgat

SEQ ID NO: 170362 - DNA, 399 bp, Homo Sapiens
cattgtgctgtaggccagcggatccccagtgaggaggagagagcaaccacaggcagcacagagctggccacaaacgataagggcagaggtatgtgaaagagggagccattcccaacccaacactggggagaaaagaatccctcttatttgaaataactgtaagagataaactgcacaagagcctccagttatcttccgtatttgccataggtcatacagtgtcgcttctgctgaaagaggaccacaaaaaggattctgctgcaactgaaaactcaagatgcaaagggacctgccccaacactctgcgtaacagcctgggcaacatgtcaggactcctctctaaaaaagctaaaacaccttcgctgcctacagcacatgccggaccgagctcgatcatcc

SEQ ID NO: 170363 - DNA, 581 bp, Homo Sapiens
gaagaaaatagtggtacggatgtgctgtaggccagcgccgaacatgctcttcgcgcctccgggagcactgtacgcagaggtccccgtcccctcctccctgatgccagacacagaccagtgcttcctgctgggccgggcggtcagcacagccctggtggcccctgtacctgcacccgacaatacggtgttcgaggtgcggctggagaggcgggccagctcagagcaggcgctgtggctgctgcttccggcccgctgctgcttggccctggggctgcagcctgaggcccgcctggtcctggaggtgcagttccagattgacccgatgaccttccgcctctggcaccaggcagtggacacactgcctgaggagcagctggtggtgcccgacttgcccacctgcgccctgcccagaccttggtctgtcccacccttgcggcgtggcaaccgcaagcaggagctggccgtggcgctcatcgcgggctggggccctggggatgggaggcgtgtccccccgctactcatctatggcccctttggcaccggcaagacctacacgctggcctacagcacatgccgggtac

SEQ ID NO: 170364 - DNA, 686 bp, Homo Sapiens
ctgaaaacaaagcatgctgacaggtgctgagggcaagactggagccaaagctccaggtcacttttcatcataagcctgaaattatttaagaaggattaagtctcaaaaggccttggcatatatcataatttatgccagaggaaattcataaattcaaggccaaacataaaatggctcaactttacacagtaactcacataatatagcaattggaagggtccccagagtccagtctctaatttatcaccaccaccctcctcctacctctcaaatctctcatctacagtttgagaaactgtggcccagagaaataagacttgtccaaggccacacagaaggtcagaaatgaaccctggaataagaattcagaacttactccaagagcccttaccctgcacggcatgtgctgtaggccagcgttgtatgcaaaaggccaacacccagagtgtttggttcttttttccctgatttattttaaaacattttattgtaaatcggtaatttatagttgtatatatttatggggtacaaaatgatgttatgattcatgaatataaagtggagcaattaaatcaagctagttaacatatctatcaccttatacttattttttgtggtgagaccacttgaaatttactcacagcgatttttttctgttttgcttttgagacagtctagctctgtca

SEQ ID NO: 170365 - DNA, 299 bp, Homo Sapiens
gtaaaacgagccggtaccggcagtgctgtaggccagcggagacaatccaaagctgatgcagctgctcaaggatttcatccaggaaccagtatcctcctttcttcctagcttaaggtttttgtcttcatggtcagaagatggctgttgtatctctgaacactgcatcagaattttagtaaggaagaaaagggaaggataaaaggaaatgtctttttacaaggttttgcatttttgttctcatagatggtggccccttagaaactgatgtctatatttcgctggcctacagcacatgccgg

SEQ ID NO: 170366 - DNA, 342 bp, Homo Sapiens
aaaatcagccggtaccggcatgtgctgtaggccagcgaatttattttgtatcatgaaagagaagaggctgtatcagagaaaattccacagtgtgctaaatattattttgtgaaagctgttcttcagttacacgtgcacacacacctgtatgtatgcatgtatgtcaactagactgcaatacaaaggccactgctttaaagaatggctcatgatccagccttattcagccttactcaggctctgaccaacaagcagcagagcaccacacgatcacacggtaattatatgagtaacgtgaggaactgaacaaagaacagggtgatcgctggcctacagcacatg

SEQ ID NO: 170367 - DNA, 442 bp, Homo Sapiens
ctagagcggcaccggcatgtgctgtaggccagcgtgaggctgtggcaagttcctaggagcataagagcacaaacagctaggagctggctggcagcaatctgttctctctttagaacatacatctgcccatccctctcataacataataaccaggttattatcctcctaggtttaaaacctgaaactccagaaggtgggaccttttcttccttctttttttaaaactcttatctgcgacaccaaaaaagcaagtttaaattcatgtcacctgttctcaaggtaacagaacttgagaaataatacgttcacaatatccaaacagagctacagttctgcaactcaaggctgtaacatggttaggatgaagactctaaaatcagggtgtgggcagtccttcctctatgaaagcagaaaccgctgcctacagcacatgccggtccgg

SEQ ID NO: 170368 - DNA, 431 bp, Homo Sapiens
tagatcgagccggtacccatgtgctgtaggccagcgtagtaaatgctaatctcataatttcagagccagtttgaggagctctgggtttgacagcttaaagattttcattggcgtgtgtaaaacagcatctgccagcggtctctacctctgctacaggggcctcactgggggctggggctgccccaacttatatgcactgtaagccagccagagctctaagatacgcagaaacattgcttccaagaacggtttcttagaaaacagtactccctctatacctaggcacagaaactaaaaaaataataattctcataccaaaaccttgaaaagctttatgttctcttcaagccctgcggagcacacgggtttgaaccaatcccccatatcagccccgcagaagccaagcctcagccgctggcctacagcacatg

SEQ ID NO: 170369 - DNA, 247 bp, Homo Sapiens
atcgagtcggtccatctgctgtagccagcgtggaggcgctgctgatggtctcacgtgggtggtcactgctgctccgactgtccacctcctcgatgccagaatccgtgccaggcggagggtccgggccaggctgtggggcagcgggagccggtgctgctggggcaggcgggcctggtggatgggggtccccaggagcggcggaggccccctgggtcagggtggccacctcgctggcctacagcacatg

SEQ ID NO: 170370 - DNA, 438 bp, Homo Sapiens
cctagagtatacccggcgatgtgctgtaggccagcgctgtgcagtctaccttagctgttcaatctcatggtcacccccgggactgtgtcaccatcagagggtgaaccatatctggcatgccaggttcacatatcccatttttttcaccaacatctctcttatttctaattcattgcccccaagatgtccgctaccatacatctctgaacttaccgaaattcttctgtccactgaccccgccactttctcgttaaccatcagcctgtttcctagctttcctgctctttttatccaattgagacttctcttattcattattaactctctgatgtaaatacttcccttctcttccagtgtttttctcattatactactctggataaaccgtgctatctgccttcgctggcctacagcacatgccggtaccgagctcgatta

SEQ ID NO: 170371 - DNA, 592 bp, Homo Sapiens
ggtaccggcatgtgctgtacgccagcggcggtgttactttccagcctggggatgactttatggcgtgatgtctaaatctccagtgggcaagtggtgaaggtactctagcatccatccagtggccagtcggccgagggcctgtctgctcatggggaagtgtcctctgatggcagcccagtgtcttgctaaccagcagaccactgcagaaggcaacgctggcctcctagaggtgtggcttgtttgcatctctatgtttgtgaccaagtcgtttccttccttggtctcagaatctgcttggcacttactaatagcatttgttcaacatgcatgatcccggtatgtgaagtacagatatgacatttataagccagacactgcgtttgactaatgttggcaaagtcacactaagagcctcccagtgttcagatggcggaagggaaggcagataggagtccagcccccaggactctgaggccccaccttgtgccttggtagaagtgaagacagatcgtctggggaagttggaagaagtagccgagacatttctcctggctcagagcagagggggatttacgctggcctacagcacatg

SEQ ID NO: 170372 - DNA, 1258 bp, Homo Sapiens
  misc_feature (989)..(1097): n is a, c, g, or t
  misc_feature (1180)..(1201): n is a, c, g, or t
gccagcggaggaggctgcccggtttcctgccagttcctcactgcggggaccagcaaaggccttctcactgggttggtcaaaggtagtcaccttggcctggtgcatccacagaggatgttgttcaaaccagaaatcttttaaacgactgaccttccttaaaaacagaatgactccgattgcttgcttgggctagaatgtacacgtctccttgcctgaataagccatatatatgctcttaaacaaaagtttgaaattatccatatcatctcagtgaacctactggtggactcccaattgacaagattgagcaatagaaaaaaattcctttcctttgaatgatagctgtgattcaccccaccccattttcttgtttctggtccatccgatgagacggatgctctgatgctctgaggcttctgggaggctgggccctggaggcaacgtgctgcaggcgcactctgtcagagtgaacagcaccgcgagacaggccaggctcgtggctcggaagacaaaccccacacacactcaaggggtcgaaaacaaaccccacacgagggctctcacctccttctcctaggtagtatttattttcagcacctgtttgatgcagtttttaatcctctacctattgcactgttgtgactcgttggccattatttgatttttgtacgaaaaaaagctttgttatagaaatcagcatactatttttttaaatctggagagaagatattctggtgactgaaagtatggtcgggtgtcagatataaatgtgcaaatgccttcttgctgtcctgtcggtctcagtacgttcactttatagctgctggcaatatcgaaggttccttttttgtttgtgtaaactctaatttctatcaaggtgtcatggatttttaaaattagtatttcattacaaatgtctcagcattggttaactaatttttgccaggaccattattgatcaagcaaataaattcaacagccatttgggnnnnnnnnnnnnnnnnnnnnnnnnnnnnnnnnnnnnnnnnnnnnnnnnnnnnnnnnnnnnnnnnnnnnnnnnnnnnnnnnnnnnnnnnnnnnnnnnnnnnnnnnnnnnncaaggaaacaaacccaaaaccccaaaaaacaagctatttttaacactatataaagaaggaaaaagaaaagggtgagtgggcgnnnnnnnnnnnnnnnnnnnnnnaaaaaattctttaaaaacacactttttttaggggggcccgcgcgccccccccattgt

SEQ ID NO: 170373 - DNA, 593 bp, Homo Sapiens
  misc_feature (443)..(456): n is a, c, g, or t
atcgaaatgaatagaaaaaaggaaaaaatttaataaaatagaccacaacagaaaaaccccgcgacagtcccccctccagctttctgctcagggctgctgccgaccggatcctctccttctcccttaatgggcagcttctggaatccctgcttctctggctgggtctgttcttcagtttgttcttctgctaagtctggaaggtgcgggggcgggggtctccagaacaagcagcaatggaggcgttcagctggagcgagggctgcctcggccatccctgcatctgtcagtcagtcacgggggcgggccggccgtccctgccaggggctgtggcaccatgagccgaccaccctccagggcacagggccagcgggatgatgcagcgtacaacagggaccccagggtctgcacggtttacttttaactccatcatcatgaggtgattnnnnnnnnnnnnnntctttcaacttatagatcgccatgggaaggcaatcaaagaatgggagcctaagacagggaaaagcaaaaaaatgaaacaccccgctcaggttcagaagccccgcgatggcctatcagcacatcccgggatcttctag

SEQ ID NO: 170374 - DNA, 535 bp, Homo Sapiens
  misc_feature (137)..(137): n is a, c, g, or t
accggcatgtgctgtagcccagcgagggcagagcgcccaagtgtgagtcagaggcaggcccggggctgagaagcagggggagccgggtgtggcgaccctccaccccattcttccatactggagcatagggggacacnacacagatgttcagggaactcccagaaccccaggagagctacaggagagccaggccagggaatgtaggcaggagaagactctgggtagaattgctacccatgtcctttcctctcctcctggctgcagcacccccatgggatgacctgggctctgggatgccccaggctctggcatgcgaggctgggcaggcgtgccccttctggctttccctccctggctcttctaggaagggctgagcatgcccaagaggtggctggtggggcagtgaggagtgggtacacagagatgctcacacaggcaaggagggacagaggctgggctgcccgccaaggggccccagggtctcactggggcagggccttgaggatggcattcacttcctccgccacggctgtca

SEQ ID NO: 170375 - DNA, 709 bp, Homo Sapiens
catgtgctgtaggccagcgtcagagccatggcgacggaggagaagaagcctgagaccgaggccgccagtagcacagccaaccccttcgtcatccgccactcagagcaagcctacacctgtgaaccaaactatgctctaaagttcacccttgctggccacaccaaagcagtgtcctccgtgaaattcagcccgaatggagagtggctggcaagttcatctgctgataaacttattaaaatttggggcgcgtatgatgggaaatttgagaaaaccatatctggtcacaagctgggaatatccgatgtagcctggtcgtcagattctaaccttcttgtttctgcctcagatgacaaaaccttgaagatatgggacgtgagctcgggcaagtgtctgaaaaccctgaagggacacagtaattatgtcttttgctgcaacttcaatccccagtccaaccttattgtctcaggatcctttgacgaatagcgtgaggatatgggatgtgaaaacacgggaagtgcctcaagactttgccagctcactcggatccagtctcggccgcttcattttaatcgtgatggatccttgatagtttcaagtagctatgatggtctctgtcgcatatgggacaccgcctcaggccgtgcctgatagacgatcatcgatgacgacacacccccgtgtcctttctgaattctccccgactgctaac

SEQ ID NO: 170376 - DNA, 639 bp, Homo Sapiens
  misc_feature (394)..(544): n is a, c, g, or t
  misc_feature (553)..(567): n is a, c, g, or t
catggtgatctcaccactaccaacatgctcctgaaaccccccctggaacagctgaacattgtgctcatagactttgggctgagtttcatttcagcacttccagaggataagggagtagacctctatgtcctggagaaggccttcctcagtacccatcccaacactgaaactgtgtttgaagcctttctgaagagctactccacctcctccaaaaaggccaggccagtgctaaaaaaattagatgaagtgcgcctgagaggaagaaagaggtccatggttgggtagaagaatgtgtatgacaaccacacacagtgaagctcttttttcaaagtaaatttgaagaaatgctacaagtatgagatgagatctaagtaaaggtgttaagatatttttnnnnnnnnnnnnnnnnnnnnnnnnnnnnnnnnnnnnnnnnnnnnnnnnnnnnnnnnnnnnnnnnnnnnnnnnnnnnnnnnnnnnnnnnnnnnnnnnnnnnnnnnnnnnnnnnnnnnnnnnnnnnnnnnnnnnnnnnnnnnnnnnnnnnnnnctggggggnnnnnnnnnnnnnnnaaaaaattttttaaacctttttttggggcgcgggcccccaaagggaaaggaaacggggcaattttttttccc

SEQ ID NO: 170377 - DNA, 647 bp, Homo Sapiens
  misc_feature (592)..(592): n is a, c, g, or t
aatcgagctcggtaccgtcatgtgctgtaggccagcggccaggtgggatgatggactgggcctacgtctgtgagtgggagaaatggtccaagagcacccactgcccatcggtgcccctggcctgcgcctggtcctgccgaaatctcatcgccttcaccatggacctgcgcagcgatgaccaggacctgacccgcatgatccacatcctggacacggagcacccctgggacctgcactcgatcccctcagagcaccacgaggccatcacctgcctggagtgggaccagtcaggctcccggctcctgtcagcagatgccgacgggcagatcaagtgctggagcatggcggaccacctggctaatagctgggagagctcagtgggcagcctagtggagggggaccccattgtggccctgtcctggctgcacaatggtgtgaaactggccctgcacgtggagaagtcgggcgcctccagcttcggggagaagttctcccgagtcaagttctcaccgacctcacgctgttcggcgcaagcccatggagggctggatcgcggtgacggtcagcggcctggtcaccgtgtccctgctgnaacgccagcgggcaggtgctgacgtccaccgagagcctgtgcggtgcgcggccgc

SEQ ID NO: 170378 - DNA, 544 bp, Homo Sapiens
agaatcgagctcgtaccgcatgtgctgtaggccagcgtaatttctgtcaaccacggacgtttgccttcatgtgtagaatttagtccttcagtggatgcttctgggtgctggggttctccattcaggacactgcactctcggaggtgggaggagactgggttgcgtctgtgccgacctgggatgcagtttcaggtcagaatcagaagatgtgcaagttacgcatgacacagctttttaaagtgcttttcccctgcactaatcaagagggaggtcagccctcaggtgtgctggacccgggagggactgtgagctgtaagaagtaacgagccccttgaacttcacaagctggccagggagccatatcccgaatgccactgccacttcctcgtggtgcaaggcttgttgggacctgccaccttgctgagggaggtgctgaagtaggtggtttccctgttccaatgcggtatgcgtcttgcaggccgaggcattccccacggggatgacggagcccccgctggcctacagcacatgccggtaccgctga

SEQ ID NO: 170379 - DNA, 496 bp, Homo Sapiens
aaccctggaggggcgttcgggtgccatcgtcgcgctggcaccgaactacgccatctacatgctgggccgcgccctgatcaggcgtggtcgtacggcggcttctggtccatgtcagccgccacggcgatccgcatggtgcccaagcgcgaagtgccgcgagcgctcgccatcgtcaacggcggcaatgcgctcgccacggtggtggccgcgccgatgggcgcgtacctgagcaccgtgatcggctggcgcggcgccttcctgtgcctggtgccggtatcgctgatcgcgctggcctggcagtggaagacgctgccgtccatgcccgccgccgcgcgtgcgccgggcatcggccaggtgttcaaggtgttcaccctgttcaagcacccgggcgtggtcgtcggcatgctcgccagcagcctgctgtccatggggcagttcggcctgttcacctatgtgcgcccgttcctcgaaaccgtcacgaacgtgcatggcgcga

SEQ ID NO: 170380 - DNA, 1073 bp, Homo Sapiens
  misc_feature (30)..(30): n is a, c, g, or t
  misc_feature (772)..(772): n is a, c, g, or t
  misc_feature (988)..(988): n is a, c, g, or t
  misc_feature (998)..(998): n is a, c, g, or t
  misc_feature (1004)..(1004): n is a, c, g, or t
gagttcccagtgccgcgtgtggccagcagntagctgctcagaaggagcccccgggaggggagcccgaaccagagcctcaggagcatcaccctgcaccaccggatccggcaggcccccaacccttactcgtcggaaatcaaggcctttgacacccggctgcagagaggggagctcttctccagggaggacctggtctggtacaagaaggtcttgcgggaggctcggaagttcgagctggaccggcatgaggtcatcctctgcacctgctcctgtgcagcctctgccagcctcaaaatcctggacgtgaggcagatccttgttgacgaggcaggcatggccacggaacctgaaaccctcatccccctggtgcagttcccacaggccgagaaggtggttcttctcggagaccacaagcagctgcggcctgtggtcaagaatgagcggctgcaaaacctgggtctggaccggtctctgttcgagcggtaccacgaggacgcacatatgctggacactcagtaccgcatgcatgagggcatctgtgccttcccctctgtggcgttctacaagagcaagctgaagacgtggcagggcctgaggaggccgcccagtgtcctgggccacgctggcaaggagagctgtcctgtcatctttggccacgtgcagggccacgagcggagcctgctggtgtccacggacgaagggaatgagaactccaaggccaacctggaggaggtggctgaggtggtccgtatcaccaagcagctgaccctgnggaggaccgtagagccccaggacatcgccgtcctcacgccctacaacgcgcaggcctctgagatcagcaaggcccttcggcgagagggcatcgccggggtggccgtgtcctcatcaccaagaccaggggagcgagtggcgctatgtgctggtgagcaccgtcgcactgtgcaagacgacctgacaagcgccacaaactgctcagagttctggctcntggaccacangactgntgaccgcagagttgctatgactcttgtgcctgactatgagcacgcgcgtgattaccagagagccccgct

SEQ ID NO: 170381 - DNA, 1187 bp, Homo Sapiens
  misc_feature (911)..(911): n is a, c, g, or t
  misc_feature (1134)..(1134): n is a, c, g, or t
gcatctgtgccttcccctctgtggcgttctacaagagcaagctgaagacgtggcagggcctgaggaggccgcccagtgtcctgggccacgctggcaaggagagctgccctgtcatctttggccacgtgcagggccacgagcggagcctgctggtgtccacggacgaagggaatgagaactccaaggccaacctggaggaggtggctgaggtggtccgtatcaccaagcagctgaccctggggaggaccgtagagccccaggacatcgccgtcctcacgccctacaacgcgcaggcctctgagatcagcaaggcccttcggcgagagggcatcgccggggtggccgtgtcctccatcaccaagagccaggggagcgagtggcgctatgtgctggtgagcaccgtccgcacctgtgccaagagcgacctggaccagcggcccaccaagagctggctcaagaagtttctgggcttcgttgtggaccccaaccaagtgaatgtggctgtcacgcgggcccaggagggggctctgcctgatcggagaacacctccttctgcgctgctgcccccctctggcgtagcctcctggacttctgcgaggctcagcagaccctcgtgcctgccggccaggtgcgcgtctgcaggaggccaactatgccttcctgaagagccctctccacctgcaaggtgccaggactgggagggaaaagtccagggcccccccacccttcccaccacccttccgccatcagcctgcctgggccagcctgcctcctggcctcaggatctccctgcggcaggaagtgggtggacttggaggcaggaacagcaagggccggtccccacactcttgcttcctctgggcatctggggaacaggaacacctctcagggtggccaagagggggcttccnttgggaccagtgtaagggaagttctgcctgttccctgggaagtctcagaaaccagggaagggaaacccctggtggaggcttgcccttttgaccctttgggacgcccacctggtaaatcacctcctgggatgggttgttctggtggaagttccagggtttaatttttcctatttaaaatgaaacttaaaaaagccaaccaatccctgccccgggggcgttgggntggggcctcaccggcccccaattaattcccagcccaccttttggggggaaaac

SEQ ID NO: 170382 - DNA, 441 bp, Homo Sapiens
  misc_feature (172)..(172): n is a, c, g, or t
ctcatgcacagattcgaatactgtcctatagcacaggaaaactataaacacaatatataattgtatccattcacatccagtatacaggaggccagggacacagtggaatgacatggtcaaagttgctagaagaaataactaccaacccatgatttctatccacaacaagtangtattttccagagaagagcacaatataagattatatctggtcaaaaatgggaaatttagtagaaaagtaaccctaaaagttatccttaaggccaaaggaaagtgattacaggtgaaagttctgcagtggtagaagggaatgagaatccaagagatggatgcatctgcggatcaatacaattacttattatctctatacaagatgaacaatattcttctaattgagcagaataatagatatgctatactccaatagaacaactacaaccg

SEQ ID NO: 170383 - DNA, 216 bp, Homo Sapiens
ttgtagttgtctattgttagtgcacagaaatagacagcagcatttgtactgaaaccctcacataccaaacagcatatgctaggaggtaaaaaccaaacgctaaattctaccctcaaggtgtcaagtgttcaggataagaagcaatgtgacccagaggaggcatcagccaagggaaagacaacatgggggaaatgggcaatagaacaactacaaccg

SEQ ID NO: 170384 - DNA, 519 bp, Homo Sapiens
  misc_feature (80)..(284): n is a, c, g, or t
agatgtcacaggtgtgatgaagggagagtaggagagaccatgagtatgtgtaacaggaggacacagcattattctagtgnnnnnnnnnnnnnnnnnnnnnnnnnnnnnnnnnnnnnnnnnnnnnnnnnnnnnnnnnnnnnnnnnnnnnnnnnnnnnnnnnnnnnnnnnnnnnnnnnnnnnnnnnnnnnnnnnnnnnnnnnnnnnnnnnnnnnnnnnnnnnnnnnnnnnnnnnnnnnnnnnnnnnnnnnnnnnnnnnnnnnnnnnnnnnnnnnnnnnnnnnnnnncttctagatcatcataagactacagagcacttttcaaagctcatgcatgttcatcatgttagtgtcgtattttgagctggggttttgagactgcccttagagatagagaaacagacccaagaaatgtgctcaattgcaatgggccacatacctagatctccagatgtcatttcccctctcttattttaagttatgttaagattactaaaacaattaaagctccttaaaaatcaaa

SEQ ID NO: 170385 - DNA, 513 bp, Homo Sapiens
  misc_feature (43)..(67): n is a, c, g, or t
  misc_feature (349)..(349): n is a, c, g, or t
  misc_feature (428)..(428): n is a, c, g, or t
  misc_feature (459)..(459): n is a, c, g, or t
  misc_feature (473)..(473): n is a, c, g, or t
  misc_feature (494)..(494): n is a, c, g, or t
attcggcacagggcaaacctttgcaaacacattatgcttttgnnnnnnnnnnnnnnnnnnnnnnnnncggcatgtttatacacagggagtgtatggttcctgtaagcactaagttagctgttttcatttaatgacctgtggtttaacccttttgatcactaccaccattatcagcaccagactgagcagctatatccttttattaatcatggtcattcattcattcattcattcacaaaatatttatgatgtatttactctgcaccaggtcccatgccaagcactggggacacagttatgggcaaagtagacaaagcatttgttcatttgggagcttagagtccagggngggaatacattaggtaatgacacaatcaaatattaaattggcaaggtgtcacaggtgtgatgaaggggaggagtagggngaggaccctggagtatgtgtaaccggggggncacagccttatttntgtgctgtactgttccctacnggcgccactacccactttt

SEQ ID NO: 170386 - DNA, 608 bp, Homo Sapiens
cctcactgatagctgatcacattaaacaggtacaggtgctaagaaagtttaagactgatcttttggcaatgacagtttaggttaactctgtttggaattcctaaaaataaaaagaaatcccttaaaaaaggctgacaaactgaccacttggccttgaatcgactgttagggtcacacctgccaatgccaggggacatcacaaaaaaatagagaatgccaagataaaaagttcactgcattcaatttggcctaatttcttgataatagtttcctattagattttccgattaatactgatggctcttacctaggctgtgataattagggttttgatctattgtgacattaatgatcacaatcagttgactttgaaattgtcttaattaatggctctttccttgtcagcttttgcctccagtgcaggattcattcccttccccactgccttgttttaactccttctcttactgacctcagaaacaaatagcattggaggatcactttcttcccataacagactttaactattttaaaacatttctcttgacagaggagcaatatgagatgatgtaatgaaatgaggatcaagaatgaaaaggcaatagaac

SEQ ID NO: 170387 - DNA, 408 bp, Homo Sapiens
  misc_feature (353)..(353): n is a, c, g, or t
  misc_feature (393)..(393): n is a, c, g, or t
tagagttacttcaacttgtcactttaacattgtgcttgactttggttgttttctaagatggaatttttcctgttcattgacagcttgttctcttgccttttcattctgatcctcatttcatctaacatcatctcatattgctcctctgtcaagagaaatgttttaaaatagtttaaagtcttgttttatgggaagaaagtgatcctccaatgctatttgtttctgaggtcagtaagagaaggagttaaaacaagggcagtgggggaagggaatgaatcctgcactgggagggcaaaagctggacaagggaaagggccctttatttaaggacaattttcaaaggtcaactgganttgtggatccattaatggtcacaatagggttccaaaaccncaatttttcacagcc

SEQ ID NO: 170388 - DNA, 911 bp, Homo Sapiens
  misc_feature (726)..(726): n is a, c, g, or t
  misc_feature (756)..(756): n is a, c, g, or t
  misc_feature (806)..(806): n is a, c, g, or t
  misc_feature (872)..(872): n is a, c, g, or t
gttaaggtctctttgttagtggtggtagaaattggagtattccctctcatttgtggttggtggctggatatctgttccttggaaatgtttgatgctactctgaaagatcgagaactgagctttcagtcggctccaggtactaccatgtttctgcattggctagtgggaatggtatatgtcttctactttgcctccttcattctactactgagagaggtacttcgacctggtgtcctgtggtttctaaggaatttgaatgatccagatttcaatccagtacaggaaatgatccatttgccaatatataggcatctccgaagatttattttgtcagtgattgtctttggctccattgtcctcctgatgctttggcttcctatacgtataattaagagtgtgctgcctaattttcttccatacaatgtcatgctctacagtgatgctccagtgagtgaactgtccctcgagctgcttctgcttcaggttgtcttgccagcattactcgaacagggacacacgaggcagtggctgaaggggctggtgcgagcgtggactgtgaccgccggatacttgctggatcttcattcttatttatggggagaccaggaagaaaatgaaaacagtgcaaatcaacaagttaacaataatcagcatgctcgaaataacaacgctattcctgtggtgggagaaggccttcatgcagcccaccaagccatactccagcanggagggcctgttggctttcagccttaccgncgacctttaaattttccactcaggatatttctggtgattggccttcatgnggataacattactggttgccaacctcatctgccttactttaccagtattttgctggcccgtgggtnaaggccttttggaccgggactggccaaatccatgaactc

SEQ ID NO: 170389 - DNA, 239 bp, Homo Sapiens
tattgcacctacacataaaaatgtatagatgcaatagataaaaattttgttaataagataactgagtattttcagttaagggatcatcttacaaaaatcagtagaattcctctgtattcaaaataattaactagaagagatgatgatacaagatgtcattcacaatagcaaaaacaatcatgtctctaggatctgggaattaacctaacataagacaactacaaccggggtcctctaag

SEQ ID NO: 170390 - DNA, 845 bp, Homo Sapiens
atgccccagtggtttattcatggaatacagtagcctgccatgctgattctgtgttctgtgttaatacatttccctggtgctggacgccatactagcaggtgctgcctacatgtttggtaaacaaatcattacacttgttctcagtcacatctgcttgattttcttaaaaggggattgctacattttaaagtatagcaaaattattcacagaatcatagcccattgagactataagggccatcagtaggatgcatccaaacctgtctttttacaaatgagacccacagaagtcgccctgaatgacaccacagctgctcgcaggacctggactttgtccatttgattgaattggtcactgtcaaatggttattaattatatgattcagtatgtatatgtctattgaagatgattaaagaggatggcatgtcctttaaactggactaaatactcactataagagagatatagattcatatataccataccccatttacaaaacagtttctctgagcagctcaatggtgcctctattttgggaacaccataaacaatctaagaacacaacctcctgtgagtcattctgttatctaccaaatcgtatccctcgggaatcccatctttgactgcccgcttccatttcctcacatgcagtcatgggaagtcaggattgaaaaggaacttaaaagtcatatgcaagtgtcaaaatttctcttgaattcgacccccctccctcattttggccttttcatagtccctgcttagtcatcagaacctcatagacttcttaaagggactgcaatttttacttctccaatttatattccacacttcctgcttatctcct

SEQ ID NO: 170391 - DNA, 629 bp, Homo Sapiens
cagcgctcttttcctcaaaatcttccaggctctttccctttctccaataaagagaacgcttctggctgataaatgcaaaaacctgcccagaagatgagaaacagcaaagaaccacattgtaaagattctaaaatttgcaactacttctttggttactaaggaagagaaacaattacaggcaggacaaaaataagtataaactatgggaaagatggaagtgcccactgatgataactattgccagatttacaaagcgcaaaccattttctaaaaaacaaaggtcagaagttaccctggacatttaaaagacaataaaaaaaatcacaatacggaaagcaggaatttctaaggaaaatgctgaatctacccagtgagaccatgttgctgtagttctccaacatcacatctctatataaatccctctgttccaggtccaggcactcccactcctcctgagagaaatctacagccacatccctgaacatcatcaactgttggaaagaataattccaagtattaatggtgaaatttttaaaaataattataatccctatagatgaaaggggaaaggctggaaaggggcactgcagggagtggggcatatattgggcgaaactggagttgctgcc

SEQ ID NO: 170392 - DNA, 401 bp, Homo Sapiens
ttgtagttagtctatgagagcttgaaaaagttctgaatgcggagaaccaccagcatttggggatttgtgacaccatctgaaattgcttgccgggcagatttttccatttggatgtaataaaactcacgaaagttgctgaaccacttgatcatctgggaggtaatgcagcggttgaactgtacaaacaagaggtccatccagtcagacatttgccacgaggtgctcagaaatagaactgtctgcttccagctcagtataggggttcatatacggctttaaccagcattaacaggggcttcctttaaaaaaagaagcgaagccaccgctattttccaagcctatttagttatactcagaaaaatctaaattagctacagtgcccaatagaacaactacaaccg

SEQ ID NO: 170393 - DNA, 521 bp, Homo Sapiens
caagaaccttccagaactgctcggtataagttgtaatcggggcggatagcggtagtccctgctatctgcacagagtcacgtcgtctgagccctcaatcccatcagggtcctggaagtccttggtgtggaagacggacaggctgtggttgacgtagcccttgaggcagtcgacagtagagttgccttctttcaggcatgggctatagcggtacttgtagaccactcgggggatgaactcagatgtgaaggcaatgaccatcccattggcaatgaccgccagcacaccgatagcctccagcacctgcagccaggtcccgatgtccttggccttgccatatgcaattgcatatggcaaggccaagaccacaggagcctcccggtctcatcctgcaaaagctaaaggctgccagaggccccccaagatccgtaactacaacattatggactgacttcctccccccaccccgccccactaaggggtgctcggggcctccgcatggtgcctgtgctttcacctacgt

SEQ ID NO: 170394 - DNA, 524 bp, Homo Sapiens; identical to SEQ ID NO: 77827

SEQ ID NO: 170395 - DNA, 572 bp, Homo Sapiens
tcattccaagattttacgtggaggcatccatcctgaaatgtaacaaattcctctccaaaacgggaatttcagagtgcctgccccggttgacatgcatgatcagagggatcggagacccactagtgtcggtgtatgcccgtgcctacctgtgccgggtgggaatggaagtggccccacatctcaaagaaaccctaaataagaacttttttgacttcctccttacgttcaaacagattcatggggatacggtccagaaccagctggtggtccaaggagtggagctcccatcttacctccccttgtacccgcctgccatggactggatcttccagtgcatctcctaccatgccccgcgaggctctgctgaccgagatgatggaaaggtgtaagaaaactaggaaacaatgccttgctgttgaattctgtgatgtctgccttccgggctgagttcatcgccagcaaggtctatggatttcattggcatgattaaagagtgtgatgaatctggtttccccaagcatcttcttgttagggcattgggattaaagagaaggccttgcgataagaagggg

SEQ ID NO: 170396 - DNA, 266 bp, Homo Sapiens
gttgcatatggcaaggccaagccccactgggtgggaggcccaaagtctctccccacttctgggtggtgagcccatcactgagccgctggcctcgcatccacactacaccagcgagagggtgacgacaggagggggtctgcttcatcatccgctccctgtgggacctgtgtcttcagttgaattaactgagttatggggccccacatcccgctcagctctgctttggaggctctgggcaccctgacccttggccttgccatatgcaa

SEQ ID NO: 170397 - DNA, 726 bp, Homo Sapiens
gccaagatccaaagaaaaaattttatttacaatagagaattttatttgaaacatgcatttcttgtttttttaaaaacaaatcagcaaatgcagatcaagtttacactccttaaggcaagagtccctatgcacgctgtacatgttcatattaaatccaaaagctgctcaccctgggaacttgtgtacaaagggcaaggccaaggtcagcaatgtgtcttttattagagaatcagacaatctccctgatacaggaactctgaggtcaacttgctatgaattatactaggaaaatgcaaaccaatagcaagaaattctgatagtctccttagtactgcatacaatcaaatcaattttatttagaaaggaaatacagtagtgcatacgaaaaagtgaaaacagaacctgtccatggaactggaggaacagcagtgtgccgacggtcatattgcacgcaacagttaagtccaaaacattcggtctcagagttagcttttccccattttggcaatcagttcgtcacaaatcttggtgagttcttctatttctttattcttctgctccagcgtcctttccagggcgtccactcgcagctgctccttccgcaggctggcctggtgggcggcttgctcctgcttggccttgccatatgcttgcatatagcaaggccaaggagttgtgtaaggcagcggacatagtgcaggatatcttgaaggaagataaccacgt

SEQ ID NO: 170398 - DNA, 1206 bp, Homo Sapiens
  misc_feature (485)..(517): n is a, c, g, or t
  misc_feature (519)..(567): n is a, c, g, or t
  misc_feature (623)..(632): n is a, c, g, or t
  misc_feature (672)..(687): n is a, c, g, or t
  misc_feature (729)..(737): n is a, c, g, or t
  misc_feature (778)..(789): n is a, c, g, or t
  misc_feature (980)..(980): n is a, c, g, or t
  misc_feature (1174)..(1174): n is a, c, g, or t
tggagctaggggcctgcctgccccacccaccccacagactccggcctgtaatcagctctcctggctccctcccgtagtctacgtccagcacctgctaaagcaagaccgagagcacctgtggaagttgatcgaaggcggtgcccacatctacgtctgtggggatgcacggaacatggccagggatgtgcagaacaccttctacgacatcgtggctgagctcggggccatggagcacgcgcaggcggtggactacatcaagaaactgatgaccaagggccgctactccctggacgtgtggcagcacagcccagggcctgcatgggggcaccgggctccatgcctctggaggcctctggccctcggtggctgcacagaagggctctttctctctgctgagctgggcccagcccctccacgtgatttccagtgagtgtaaataattttaaataacctctggcccttggaataaagttctgttttctgtnnnnnnnnnnnnnnnnnnnnnnnnnnnnnnnnncnnnnnnnnnnnnnnnnnnnnnnnnnnnnnnnnnnnnnnnnnnnnnnnnnccccatgtgatatccgaaattcgcaaaaaaactaactaaacctaccctttgggcgnnnnnnnnnngccctcaaaaaacgtttctttaaaacatttccgggttggnnnnnnnnnnnnnnnngtgtaggtaaagggaaactggggccccacatcccgtctcccnnnnnnnnncccggggcacaagaacaaaggggcttgtggatccccccccnnnnnnnnnnnncccccccgccgcgggaaacacccgacgccttttctagacacaaaacccccagaagggggagtctcccgagaagggacttcttcacgggaaccccctaccacacgagagggactccccaacaggcgaaatccccgcatatacacacaaaatttaaaagccccccctggcgccgcgggcccatcttttttctnataagtgctcggtggcggcggtaatattcccctttatagcacgctattccttcgccctggaccagcgggtataatgcccctcttccgagaaaagccgcgcggctgcgacgtagacaacccctcaatatattcgccgccctcgtgggaggcaacacccacccaccaccctgttgatccacagcaatcgtcttggnacgaatatataacactatactgtcgcccgccc

SEQ ID NO: 170399 - DNA, 999 bp, Homo Sapiens
ggtctgtgcggtggttgtggagtacgagaccaaggccggccgcatcaacaagggcgtggccaccaactggctgcgggccaaggagcctgtcggggagaacggcggccgtgcgctggtgcccatgttcgtgcgcaagtcccagttccgcctgcccttcaaggccaccacgcctgtcatcatggtgggccccggcaccggggtggcacccttcataggcttcatccaggagcgggcctggctgcgacagcagggcaaggaggtgggggagacgctgctgtactacggctgccgccgctcggatgaggactacctgtaccgggaggagctggcgcagttccacagggacggtgcgctcacccagctcaacgtggccttctcccgggagcagtcccacaaggtctacgtccagcacctgctaaagcaagaccgagagcacctgtggaagttgatcgaaggcggtgcccacatctacgtctgtggggatgcacggaacatggccaaggatgtgcagaacaccttctacgacatcgtggctgagctcggggccatggagcacgcgcaggcggtggactacatcaagaaactgatgaccaagggcccgctactccctggacgtgtggagctaagggacctgcctgccccacccaccccacagactccggcctgtaatcagctctcctggctccctcccgtaatctcctgggtgtgtttggcttggccttggcatgggcgcaggcccagtgacaaagactcctctgggcctggggtgcatcctcctcagcccccaggccaggtgaggtccaccggcccctggcagcacagcccagggcctgcatgggggcaccgggctccatgcctctgtgacgctctggccctcggtggctgcacagaagggctctttctctctgctgagctggcccagcccctccacgtgatttccagtgagtgtaaataattttaaataacctctggcccttggaataaagaaatgttttctgt

SEQ ID NO: 170400 - DNA, 577 bp, Homo Sapiens
ttggttgatgacttattagtcctaaagacattgatcctgtccagcgctatgtcccactaaaggatcaacgtaacgtgaggcatgaggttttccaatcagggcccactggaaaatgacttgggagttcatgtggcacttatagcagaaagccaaagacttcaagtttttcagaacacatatggtattcaaactcaaactcctacaacaagtagaacccattcagatatggcctcagcaggagcttgtgaaagcttatttgcagctgggtatcaatgaaaagttaggactctctggaaggccagacaggcccatgggctgcctcgggacatcaaagatttatcgcattctaggaaagactgtggttcgttacccgattattttcgacctaagtgatttctacatgtctcaggatgtttacctgctgatagatgacataaagaatgcgctgcaggttcattaaacaatattggaaaatgcatggacgtccacttttccttgtgctcatccgggaagacaatataagaggtagccggttcaaccccatattagatatgctgggagacctttaaaaaaggga

SEQ ID NO: 170401 - DNA, 1036 bp, Homo Sapiens
gattctagaggaccccgggaatacctctaatcgattccaaataacagactgtagtgtttttgactacaaaaggtcatcagctaatatgttgaagtaagaattctgtttctctacaactgccttctcatagataggacgggaaattacaaaaacattccagaggaaatagtaaatagttctgcctaagctttcatataggattttgcaatgggggaatgttgtacttagtacgcatttcaaaattaatgtgcttgatctattaaatgtgataactcaggaaccgggaagagcagaatttggtggcttatcctcatgatggaaaaatctttttctgcacctcacaagatatccctcctgaaaatgaactgcttttttattatagccgagattatgctcaacagattggtgttcctgaacacccagatgtgcatctctgtaactgtggcaaggagtgcaattcttacacagagttcaaagcccatctgaccagccacatccataaccatcttcctacccagggacatagcggcagccatgggccaagtcacagcaaagaaaggaagtggaagtgctcaatgtgcccccaagctttaatctctccttccaaacttcatgtccactttatgggtcacatgggtatgaagccccacaagtgtgatttctgtagcaaggcttttagtgatcccagcaacctgcggacccacctcaagatacatacaggtcagaagaactacaggtgtaccttgtgtgacaagtctttcacccagaaggctcacctggagtcccacatggttatccacactggggagaagaatcttaagtgtgattactgtgacaagttgtttatacggaggcaggacctcaagcagcacgtgctcatccacactcaagaacgccagatcaagtgtcccaagtgtgataagctgttcttgagaacaaatcatctgaaagatagcatctcaattctcatgaaggaaatacgggattatgtctgtgaaaaatgtacaaagcttatccaaactccagagtgtcgcgg

SEQ ID NO: 170402 - DNA, 956 bp, Homo Sapiens
aggggaactctcatagcacagggaaggacaattggttggaaagactgttctatagctgccagagactggataagcgtgacccgtcaacaattccacgcaatctcctgaagacagatgctatcctttggcagtgggccatatgggaagctgcacaattcactgttctttctaagctgagaaccccactgggcagagctcaagacaccttccagacaattgaaggtatcattcgaagtctcgcaggtcacacattaaaccctgatcaggatgttagtcagtggacaaccgcagacagtgatgaaggccatggtaacaaccaacttagacttgttcttcttctgcagtatctggaaaatctggagaaattaatgtataatgcatacgagggatgtgctaatgccttaacttcacctcccaaggtcattagaacttttttgtataccaatcgccaaacttgtcaggactggctaacgcggattcgactctccatcatgagggtaggattgttggcaggccagcctgcagtgacagtgagacatggctttgacttgcttacagagatgaaaacaaccagtcctatctcaggggacatgaattggaagtaaccattatgatggtggtacaagcactatgtgaacttcattgtcctgaagctatacagggaattgctgtctggtcatcatctattgttggaaaacatcttctgtggattaactcagtggctcaacaggctgaagggaggtttgaaaaggcctctgtggagtaccaggaacacctgtgtgccatgacaggtgttgattgctgcatctccagctttgacaaatcggtgctcaccttagccagtgctgggtgtaagagtgccagcctgaaacattgtctgaatgggtgaatccgaaaaagtgtgctgtccaaaccgactgactcttcccctggagttataaattatttaagaaaca

SEQ ID NO: 170403 - DNA, 584 bp, Homo Sapiens
cccatgaaatctatatacatgccagagaaaagctcctcattgatcataacagaccccgtgttcacgttggggttgaaaagagcagcgtccttttccagattcacactgggagtcaatcatgaaaacttggtcctctgatctcctccctctgttcaagtaagtacagacaggactgaaagcgccactcccacagacatacaaatgtgtgcgattgaaagtctgaattacacggacaaagttcccacagccgtgtgtgggatctttgccagccattttgcattcttcaactttgattgtagatgctggccagaaaacactcaaagcttcttgacttatattgttaatattcagggaaagaatgtgatctttgcttcccacatatatccggtcctgatcttcatccattaataaaatcctgtagtctaaaggatggtgggaaaggctgaagtattcagaggtcttggtttctcgaagttcatcaaatgttaaataaactcttgcttggggctgggaagatcctttcacacagatagtacaaataaatactccaactcagagtgtcgcgggatcctctagacatcgcc

SEQ ID NO: 170404 - DNA, 650 bp, Homo Sapiens
ctagaggatcccgcgacactcttggttgcaaaggtagagataacttcttcttcatgcccaaaggcacccagagttacctgttgccctgcattaaaacattagtaatggatggggccaggctgtccactactttacttaaaagacttgctgcacggcgtacaaccgaccaaagtttttggctgccagctcttctatagactctctcaatgtgatcagaaacggtaccttcctttgtgatgaagtgggggccttctcttttgagcagtatacccagcaggatggctttggtagccagacaactgcaatcattcagtttttgaagaatttcgtgggtgggtttgtccttccattcactaatgttgacatccggctgctgtcccagttcaggagcactaaggggtgctgctttgccgtttgacttttgaatgtgtgggaggttctagttcctcaaaactcttaaattctggaagctcttctgtgtcactgattcgtaggaaatcaagttgttctaccacagctccagatattagtgtctgtagacgatccacatgaactttgactcctccaattattcctttttttaagggctgccagcatactctaatactggggttgacccggttcctcttatattgggatcctctagacag

SEQ ID NO: 170405 - DNA, 738 bp, Homo Sapiens
cgtgcggttctagaggacccgcgacacctctgagtgagtaaaaacatatacaaatccctgtccgtccagctctacctgtgcgtccagagcgatggatataggactcaacatcctgaggaggagaactttgaatcaccaggtcaacttcaggaatgtccaaaccacgggcagccacattggttgccaccaaaactttaaaactaccttctctgaagccttttagtgtaatttctctttgtgactgtgcaatgtccccatgtaaacactgggcattctgttttatgtgtggattcatggccatttcagttacattcttcttggtctcacagaaaataatagccctcccttcagacccactgtagacttgaaggacatctccaataactgctggcctctgagaccaatgacactggatggccaaatgttccacagtagttgcagccttttgagtcatttttccaacaaggtcaacctgttcatatctggatttcatgtatttttttgcaactttgtatacccactgtgggcaagttgcagaaaaaagtaaagtctgaggattgtcttcagaatcagttttgtaggattcatgaataatatcttcaacttgttcagcgaaacctaaatctaacatctgatccacttcatcaagcacaacatgtcgcagtttagaaagatccaatcggccactctgcagatggtctttgatcgaccaggtgttccactcaagagtgtacgcgg

SEQ ID NO: 170406 - DNA, 500 bp, Homo Sapiens
caggggacggaggatgtgtgagctgttcaacaaggtccgcacaaggcctaaaactcaattgccttattcttttgcttctgctcgtccgtatacaactaacagctcaacccacacctctagacaacagtagtcgtgctttctgctaacggtgacattttcagctcttaaaaagaagcaaggagattttcaaatgctagagtatctctatcagaaggcataggacattgtgtccaaagtctcaagaacaaacaacactttccttctgacctggtccaaaagtcagcaaacagcaagcaggcagaggccctcataaggactttttctgtcctcctttgaccaaactgttttaaccgagcctagggggtgacggggagcgacccaagctggcatctttctctacggagacagattttagaaaatacttttcttgcccatgaatttcttttctggcttgatttttatcattttcccttgacttacaagaaaataagatctcaact

SEQ ID NO: 170407 - DNA, 1555 bp, Homo Sapiens
  misc_feature (658)..(690): n is a, c, g, or t
  misc_feature (705)..(850): n is a, c, g, or t
  misc_feature (934)..(934): n is a, c, g, or t
  misc_feature (1048)..(1050): n is a, c, g, or t
  misc_feature (1064)..(1065): n is a, c, g, or t
  misc_feature (1084)..(1084): n is a, c, g, or t
  misc_feature (1087)..(1087): n is a, c, g, or t
  misc_feature (1151)..(1153): n is a, c, g, or t
  misc_feature (1159)..(1159): n is a, c, g, or t
  misc_feature (1189)..(1189): n is a, c, g, or t
  misc_feature (1195)..(1195): n is a, c, g, or t
  misc_feature (1214)..(1214): n is a, c, g, or t
  misc_feature (1221)..(1221): n is a, c, g, or t
  misc_feature (1229)..(1229): n is a, c, g, or t
  misc_feature (1231)..(1231): n is a, c, g, or t
  misc_feature (1284)..(1284): n is a, c, g, or t
  misc_feature (1297)..(1297): n is a, c, g, or t
  misc_feature (1301)..(1301): n is a, c, g, or t
  misc_feature (1308)..(1331): n is a, c, g, or t
  misc_feature (1348)..(1348): n is a, c, g, or t
  misc_feature (1359)..(1359): n is a, c, g, or t
  misc_feature (1370)..(1370): n is a, c, g, or t
  misc_feature (1384)..(1384): n is a, c, g, or t
  misc_feature (1467)..(1468): n is a, c, g, or t
  misc_feature (1502)..(1510): n is a, c, g, or t
ttcagacaggtttctccccaagggccttaaaaacctaattttccttattccttggcttcgcttggtcctttaacaactaacagttcaacccacacttctgaacaacagtagtcgtgctttctgctaacggtgacattttcagctcttaaaaggaagcaaggagattttcaaatgctagagtatctctatcagaggccataggacatgttgtccaaagtctcaagaacaaacaacactttccttctgacctggtccaaaagtcagcaaacagcaagcaggcagaggccctcataaggacttttctgtcctcctttgaccaaactgtttaaccgagcctaggggtgacggggagcgacccaagctggcatctttctctacggagacagattttagaaaatacttttcttgcccatgaatttcttttctggttgatttttatcattttccctttacttacaagaaaataagattgcaaccactcctgctaatgatttagtagttccttttcatttcagtttttgtaaattaggagataattctaagagttactaaaggatgatttatttaagagaactacgtcaaatagcgaatgagttatgggtaacattagacgaaaataacctttcccgtgggaaaggtttctcgaaggcatggatgnnnnnnnnnnnnnnnnnnnnnnnnnnnnnnnnngcttattttaaaatnnnnnnnnnnnnnnnnnnnnnnnnnnnnnnnnnnnnnnnnnnnnnnnnnnnnnnnnnnnnnnnnnnnnnnnnnnnnnnnnnnnnnnnnnnnnnnnnnnnnnnnnnnnnnnnnnnnnnnnnnnnnnnnnnnnnnnnnnnnnnnnnnncaaggtttgtgggcgcgcgctcccgcccccaaaaaaaatttctttaaacacacttttttttgcgggggccgcgggcccccccanagaggaaacaggaaaaacggggggcgataaatgccgggcgttttccaacaaaaaagaaaacccccgggcgccaaaagaaaaaagagggggtgttgcgggctcccccctcccccnnncacatagaaaaaannccgccgcccccgcgcgggngcngggacaaacaccccccggagtgtttgtttttctctatcaaaacaccaaccacccgcccgcgcgnnnttgggnagcgcccgctccctcgaccttagagcgganctctcntttccgcgcgcgcgggggngagaacnccacccancncgcgagacgggcggagcgaggcgccttcaacacggggcggcgcgacccctccnagaaaactcgccnaccnaaatctnnnnnnnnnnnnnnnnnnnnnnnngggtgcggccaatattnttttatcctanaaacgaagaanggcgcgtgggcaanattaatcctttctattgtaacaagactcttccgcccccgccccgccacaagtagtgagagaccccccctccaccaaacacacnngggggtagtgttgtgtaaaaacttttggtccgannnnnnnnngggcgggggacacaaaaacaaaccccccgtgtggtgggccgtcgc

SEQ ID NO: 170408 - DNA, 678 bp, Homo Sapiens
  misc_feature (354)..(459): n is a, c, g, or t
  misc_feature (464)..(560): n is a, c, g, or t
gtgtatgctggtgtagaatgtatttcattgatgtctcctatttttataatttctgagttaagtactattttaattaatgctttttagtttagggcagattcagatgactaaagcacctcatttcccagatacatgaaataaaatatttggcttcttttccaatttcacactgatgttatttggtgaaaatcagtgctttaagataaatcgttatacgttaagataaacatgagaaacttgatctaatatttaatatttattcagttctacactttattaacttctacaccagcagatttagacattatgtaaccatctcaagaagtttcacttggatgtaatgcttcacgctcnnnnnnnnnnnnnnnnnnnnnnnnnnnnnnnnnnnnnnnnnnnnnnnnnnnnnnnnnnnnnnnnnnnnnnnnnnnnnnnnnnnnnnnnnnnnnnnnnnnnnnnnnngtttnnnnnnnnnnnnnnnnnnnnnnnnnnnnnnnnnnnnnnnnnnnnnnnnnnnnnnnnnnnnnnnnnnnnnnnnnnnnnnnnnnnnnnnnnnnnnnnnngttagctgggtttggtgttgggtgcctgtaatcccagctatctcgagatggctgaggcaggataatcgcctgaacctgggaggaggaggtgcagtgagctgaggtccgccattcactc

SEQ ID NO: 170409 - DNA, 637 bp, Homo Sapiens
atcaggggaatgatcccttgcctagatgctttggacgagacggcaagcttgaaatctcatttgccacttgcggttcagacagaaagagcaggtcaacttcattgtacctactcagagaattgaggaggagtgaactgagaacagagttttcttgaaacaggcgattacggacctggcgcaaggtgcactgaaacgtcttcaaacactgagtttgccttccctaccatatacactctttcctcactgggagccaactgcaaaacaacaggagtttcctcaggaaaataaggagtgaatggagatttgcaacactgtcaagactaaaaggaactgcattctccaaagggtacgaaatgagcactgcctgggggtagagccagtttgttcactcccttcaacatcaccatgacggtagcccgaggacgatgaaagcaggttacccactgcgagtcctggccaagaaaggtcttctttcacagagaagcccatggacaatgcagccacgtatgggatccgctctcctggtataggccaaattccatttcggaaaacaaaagaccctcgtgaattcaatatactaaactcgttcccaaaaaaccggcacaaaggcaggggacgacaatacaacaaaagtttt

SEQ ID NO: 170410 - DNA, 171 bp, Homo Sapiens
aaagaattgaataatggcatgctctactctgggtctctaacgccacattggatacagaagtgtatcttaactacttgattagaaaatcaaaattatatgtatcatgttaaaaaacaaaattatacagttcagaatgctgagacattgtcatttaaaataactatcattatg

SEQ ID NO: 170411 - DNA, 495 bp, Homo Sapiens
tctagaggatcccgcgaactcttggtgctgccatccctttcaaatggatgtattcactttcagagtgaggttcagattttccacaatacagagagggaaaacatgagttgaggagaacctcattttcccctaataaatgctagtgccttttaatgggggaaaacaaacaaaaaccccaaagaactctggctcttaaaggaccagggtactctcatgtactaactgcatagaagggataaaccagtctactcatctttctttacatcagagaggcctccttgctcccaagattttagtttttaaaaactttattctaactgataacctggacagctgaaatgatccagctgattctctgtcacatgatctggaaatccaggcaacaacagagttcacatcaccctgagacatgctccattccaaatcctttgtaaccctctgggcatcactgaaactaagacaaataaactggatcaaccaagaggggtaccgagc

SEQ ID NO: 170412 - DNA, 1298 bp, Homo Sapiens
gggaggtgtcatggctgccccaagagtctaggtaagagtttgttcccgtggtgcggagggtcaaggcccacacccggaaacctagcgaggtaaagttgcgtcttggttgtagagacgacaacttctccgcttcctcggcgatggcggcgtccgggagcggtatggcccagaaaacctgggaactggccaacaacatgcaggaagctcagagtatcgatgaaatctacaaatacgacaagaaacagcagcaagaaatcctggcggcgaagccctggactaaggatcaccattactttaagtactgcaaaatctcagcattggctctgctgaagatggtgatgcatgccagatcgggaggcaacttggaagtgatgggtctgatgctaggaaaggtggatggtgaaaccatgatcattatggacagttttgctttgcctgtggagggcactgaaacccgagtaaatgctcaggctgctgcatatgaatacatggctgcatacatagaaaatgcaaaacaggttggccgccttgaaaatgcaatcgggtggtatcatagccaccctggctatggctgctggctttctgggattgatgttagtactcagatgctcaatcagcagttccaggaaccatttgtagcagtggtgattgatccaacaagaacaatatccgcagggaaagtgaatcttggcgcctttaggacatacccaaagggctacaaacctcctgatgaaggaccttctgagtaccagactattccacttaataaaatagaagattttggtgtacactgcaaacaatattatgccttagaagtctcatatttcaaatcctctttggatcgcaaattgcttgagctgttgtggaataaatactgggtgaatacgttgagttcttctagcttgcttactaatgcagactataccactggtcaggtctttgatttgtctgaaaagttagagcagtcagaagcccagctgggacgagggagtttcatgttgggtttagaaacgcatgaccgaaaatcagaagacaaacttgccaaagctacaagagacagctgtaaaactaccatagaagctatccatggattgatgtctcaggttattaaggataaactgtttaatcaaattaacatctcttaaacagtctctgagaagtactttacctgaaagacagtatgagaaaaatattcaagtaacactttaaaaccagttacccaaaatctgattagaagtataaggtgctctgaagtgtcctaaatattaatatcctgtaataaagctctttaaaacgaa

SEQ ID NO: 170413 - DNA, 790 bp, Homo Sapiens
  misc_feature (647)..(647): n is a, c, g, or t
  misc_feature (675)..(675): n is a, c, g, or t
gggaggtgtcatggctgccccaagagtctaggtaagagtttgttcccgtggtgcggagggtcaaggcccacacccggaaacctagcgaggtaaagttgcgtcttggttgtagagacgacaacttctccgcttcctcggcgatggcggcgtccgggagcggtatggcccagaaaacctgggaactggccaacaacatgcaggaagctcagagtatcgatgaaatctacaaatacgacaagaaacagcagcaagaaatcctggcggcgaagccctggactaaggatcaccattactttaagtactgcaaaatctcagcattggctctgctgaagatggtgatgcatgccagatcgggaggcaacttggaagtgatgggtctgatgctaggaaaggtggatggtgaaaccatgatcattatggacagttttgctttgcctgtggagggcactgaaacccgagtaaatgctcaggctgctgcatatgaatacatggctgcatacatagaaaatgcaaaacaggttggccgccttgaaaatgcaatcgggtggtatcatagccaccctggctatggctgctggctttctgggattgatgttagtactcagatgctcaatcagcagttccaggaaaccatttgtagcaggggntgattgatccaaacaagaacaatatccngcagggaaaagtgaaatcttgggcgccctttaggacatacccaaaaggcgctacaaaccctccctggatgaaaggacctttctggagtaccaagaactattcccacttaattaaa

SEQ ID NO: 170414 - DNA, 519 bp, Homo Sapiens
aactgcagctcataccccaccttctgctccctccctctccccgagccgtgctctcttatcatttcagatgaaatcgttagcaccttaggagaggggaccttcggccgagttgtacaatgtgttgacatcgcagggtggggctcgagttgcctgaagatcattaagaatgtggagaagtacaaggaagcagctcgacttgagatcaacgtgctagagaaaatcaatgagaaagagcctggaaaaaagaaacctctgtgtccagatgtttgactggtttgactaccatggacacatgtgtatctccttagagcttctgggccttagcaccttcgatttcgctcaaagacaacaactaactggcctagccatccagcaagtgggccacatggccttccagctgtgccagggtgtcaaggttcctccatgataacgagctgacacatacagagctcaaggctgaaaatattctgtgaggggaattccgaggtatgagcgcaccgtacaagccagagtgtcgcg

SEQ ID NO: 170415 - DNA, 445 bp, Homo Sapiens
gggacaagagtgagacttcgctcaaaagaaaaagagacaagaaaactccatgaaaccccctaaataatagggtatggaaagcttcatagttggtgaaaaaatgggtgttaggagggtgccacccaggagaaggcatggaaactctatatcttcctccaacttctacccccacccagggcatactttgctcggtgcatctcttccacttagctgttcctgagttgtatcctttacgatgcattgctaaatgtaagtaaagtgttttcctatattctgtgaattattctaacgaattattaaacctgagggagatgggagggtattctcgaatttacaagtgttcggtggcaaacctggcacttaaaatgggagcattttagggcactgaagcaagagaattgattaatggttcgcccccattctgttaagaatgggactggggtgg

SEQ ID NO: 170416 - DNA, 855 bp, Homo Sapiens
  misc_feature (48)..(179): n is a, c, g, or t
gcgacactctgagttgcctcactctctcctgcaccctgagaagaggtnnnnnnnnnnnnnnnnnnnnnnnnnnnnnnnnnnnnnnnnnnnnnnnnnnnnnnnnnnnnnnnnnnnnnnnnnnnnnnnnnnnnnnnnnnnnnnnnnnnnnnnnnnnnnnnnnnnnnnnnnnnnnnnnnnnnaagttacttatctctctgaaccacaattgttcacctataaaatgggagaaatagtaccaaccacaaaaccaacaacagctagcactttatacttaatgtgagccaatcactgtgccatgtcacatggattatactaccaccttctgagttaggttttattaacgcagttttaacagatgaggctactgtgacacagagggcataaactttgtcaaagacatgcagcaaacaggacagacaaatctaaagccaggttgtctaagctcagaatccacacctataaccgctgtaccccactgcttttgccagcaggagctcacgtacttgaggacagacaatcagtacagtgctaggctcacctgaaggctgttgaacaaatgtctgttcactctttttgctctcaaaagtaccaggaaaggccagaagaaataactacaagacttagaaactaccaatggatcagatcactcagtagcacctcactagaaaatattaccagtcttataagtgcaaagtttatgttgtaattgtagcaatcatgagtccagcgtctcttgcgatgacacatggtaagacggcactgtatagcgtcccgtgtcacgtattgagctacactgacttattactactcagtgacttgagtagcggataacaggggtactcaagaacagctcga

SEQ ID NO: 170417 - DNA, 856 bp, Homo Sapiens
ttatctagaggatcccgcgaactcttagtaagtgcaatttgaaggtccctgggagacttacaggacctctccactgcccttttctctggcatctgcagtgcactctccaggtgacctcttgcacagtgccctgccattttgccccatgccatcttaccattgggctcttctatgcgcttcaggaactccttttgagcaggctctatctggatggctcaagcttgggtaactttccatgctttcctcttggtccgtgggaaactcccacattcttagcatgccaggtgctgaaataaagtctacccactagtgccaccattccaggtctgggctccagccaacctcccacatgtcccattcagcagacattggtctctatgttcatttatatctcccaaataccagtaaattcatgtcaggctcttccagaaccctctctcagtgacttgcttgtggtctttgacaacactgggtcaggagttctgccacccaggaaacatccagccaaggactcagatgcccatctgtttcttacaggcactcccagtctcttggtactgtcctaccttggtctgcgtcctcccctcgcccctaaagaacaagaaacagggaataccaaaggactccagacagatcagcaatcaacaacagatctatctccatgagcgtgctctctttcctgtgtcaaatgtgtcatctcatagaggctgcaggtggcagtgggggccatgggagctggaggaattgtgctgtcttttgcgtggctggaaaagtatttttctacaatgtgggggtacctgtgtacacttctgtccttaagactctagctcaaactccgacttactcaagcgtgtct

SEQ ID NO: 170418 - DNA, 601 bp, Homo Sapiens
  misc_feature (256)..(269): n is a, c, g, or t
  misc_feature (292)..(445): n is a, c, g, or t
  misc_feature (491)..(534): n is a, c, g, or t
ctagaggaccccgcgacacgtcttggtttgtagtggctagtgtctcatttctgtgcttaggaaagggtgtcagaataacagagactgatgataaaggaaaaagtgtttcttttttttctatttctcaaatgtataaaaaaggaagtagttgattttcagtaaaaaagttgcccactttacaatctgagaaatatattaacaacaaaaattatttttttaaaaatgatggatatttgggttcaaaattaatttaaannnnnnnnnnnnnnggaaagggagtctcactctgtgnnnnnnnnnnnnnnnnnnnnnnnnnnnnnnnnnnnnnnnnnnnnnnnnnnnnnnnnnnnnnnnnnnnnnnnnnnnnnnnnnnnnnnnnnnnnnnnnnnnnnnnnnnnnnnnnnnnnnnnnnnnnnnnnnnnnnnnnnnnnnnnnnnnnnnnnnnagggtttcaccatgtgggccaggatggtctcgatctctggaccttnnnnnnnnnnnnnnnnnnnnnnnnnnnnnnnnnnnnnnnnnnnnatgacccaccgggaacaggcaattcatttttttataccttgtaatcttacctaaccgggctgatttt

SEQ ID NO: 170419 - DNA, 589 bp, Homo Sapiens
gttgagtgcatgatctctccctaagctgccacctgccatcgcctcccacctttgatcctttgccatcatcagtgtcttcaaacagcactggtgtgttctgcctgcaaaaacaagcgtactcctcagtggaaaaataccacattccagcttggtgaagcaggtggtgtgtttcataggatggagcagaaagtagcatctcttcttctcaaacaagaaggaagactattagcacatcagcacagaaagtcgtgcatgatgaatcttaagtgctgcctcataaatgaaaatgtgggtacagttggaaaaaatcagctttgaaaaatgtattaagtccattattcaaacccaaagtcttaatttttttaaaaaaccaattttcccatctttcaaataagggggatggagcagatgatgttcaagatgctcaaaattcttttggctccgtgagatctaaaacctgaccttggcatcacgtaatgaccatcacagtcaacactgctcacaacatatacaatgggatgcctggtatgtgttacagctattatctggactaaatatcccatttcatttcccgcctaggtagaccgac

SEQ ID NO: 170420 - DNA, 940 bp, Homo Sapiens
agtcatcgtaatggacttgcctgagtgaaagtggagactgtattcaagaatgggggagagagtggatttgggtgcagctggcaatctccagtctgtacttcattaggcggaacattgctgtttgagatcttgttattctgccttcttcctttgcagtgtgatgtggaggagcacagcacagctctgtatgggtggtggtatctgcgtagtaattcatggaaggcgtctccagcaatacagcctggacatctacatgtgggatttagttcagccttccaagaacctcattttgcacgtggggaaactgaggctcagagaggttgaggaatttgtctagggctgcaggccatcagcggcgaggcagggtcccagggagacctgtgctctcccaatattctattgacagtcaagcaaagaagaccgctgtctttgtttccaagtgccacaatgcaacaaggctgaatggtgccggaggtctcctggggaagcctaaagcctgaggagaagggcctgggacactgcccagctggccttgtcatccttgtcctggagatctgaggtatttgagctctggaacaaaccctgtggctgggtcgctgtgagggccccaggctgccatctggccaccctcaggggcacatccctccttccttaggccttgtgtactcactgttccctctgctgtccccatccctccctttgcctgctggtctcattaactcttccgccacctcctcccaggtttgcttgaagagatggtgttagagctccagaacggcgatcttgctgtccttctactgtgccctggactttctcgataccactggtcacagatgtaattgtgtttgtggttttttggcgaggggggtgattatttaacgctcatcctcttcacttgaccgtaagcttctggaaggcaggacatgtctttctcttgttc

SEQ ID NO: 170421 - DNA, 559 bp, Homo Sapiens
tctagaggatcccgcgacactcgttgagtgtgtaaataatgcctcttcaatttataaaagtctcattgttgaggtttaaaatcagttcagcgttgtcccatttagcaaagagccaaattactgagatctctctattccctttcctttctgcttgaaagatgtctgattcattcagaagctcatatttttggtataataccttgccaaatgcagtcggcaatgactaatatacaccattaacactaaaatttccaactgtttctcctagagctgtaggtacattaggtatattattggccttccaagtaattgcaggtattagtttggccaaatatttcaccacttcataatttcacttcataatttcataaattcacttcatgaattgtcatccttctgctttccgtgaatagtttcccagccactcattgcctgactaccaagccagtaccaaaatttcaggtgtctgtgttaggagcatcttcttttgatactaatttcagtataacctgattaggcggggttatgttgcagtaattcaacaaaattactggtggtt

SEQ ID NO: 170422 - DNA, 590 bp, Homo Sapiens
  misc_feature (14)..(14): n is a, c, g, or t
tcgagctggtacgnccgacactcttggttgagaacgtaaaatggcgcagttgctatgaaaaactacagtggttcctcaataaattaaaaatagaaatatcgtaagatttagtaataccacttctggctatatactcaaaagaactgaaggtaggatctcaaaaagatgtgtgtacattacagcattatacttgtaaatacaataaaatagatatttgtacatagcaccattatttacaatagccaaaagcaacccaagtgtccactaatggatgaatggataaaaaaaagatataaaataagaatattatttggatcttttaaaaaggaaggaaattctgacatatgctacaacatagacgcatctcgaggacactgtgctcagagaaataagccagtcacagacagacaaatacttcatgatttaactgatatgaagtgcttggaatagtcaaactcacagaaacagaaagtagaatggggttgctgaggctggagggaatggaatgtttaatgttatttaatgggtacagagtttgttttgcaagatgaaaaagttctggagattgttgtacaactcaagagtgtcgc

SEQ ID NO: 170423 - DNA, 380 bp, Homo Sapiens
  misc_feature (217)..(217): n is a, c, g, or t
  misc_feature (244)..(244): n is a, c, g, or t
  misc_feature (248)..(248): n is a, c, g, or t
  misc_feature (271)..(271): n is a, c, g, or t
  misc_feature (286)..(286): n is a, c, g, or t
  misc_feature (325)..(325): n is a, c, g, or t
gctttaattggacttacagttccatgtggctggaatatcttacgtgaatggtagtaggcaaaaagagcttgtgcaggaaaactcccccctaaaataaccatcagatctcattaaacttactcactatcacaagaacagcacaggaaagacctgcccccataattcaatcacctcccaccagggtccttcccacaacacgtgggatttcaagatgagntttgggtagggacacagccaaaccatntcantgcctctataaacccaccagggnacacttctaggaaantgttggaacacctccgagggccccacaggaaccctcctntacccacatcttcatgggcaagggagctaccatggggtccccctccgagttttgc

SEQ ID NO: 170424 - DNA, 520 bp, Homo Sapiens
gagtggaagatatactctagaagctctacccagtccaatgtactggagaggctttgccactgtttgctttcagtagtttcatagttggaagtcttcaacttaagtctttaatccattttgatttgatttgggtatatcatgagagatatgggtctagtttcattcttctgcatatggatatccaattttcccagcaccacttatttattttgttggcaacaaagaaagagtttaattgtcacagggccaaaccaagtgaggaagacagtagataattctcaaatctgcctccctgagaattcgggggctagggtttttcaaggatagttgggtaggcagtgggctaaggaatggggaatgctgataggttgggtctctggataaaatcgtagaggagttgaaactgttcttcttgccctgactcagctcctaagtagtggtcacagaaccagttgagtcagtttcttcatatggggtcctggggccaagtgggaccacgtgggccatcaaaatgccaggg

SEQ ID NO: 170425 - DNA, 507 bp, Homo Sapiens
caggatggactcaatgtgggtttcagactgagtatggagctgccatcagctgaggtgaggaaaacgatggatggcacggggttgtccaggaagatcacctgttcgcttctggacacgttatgtttgaaatgtcttttaagatacgccagcggagctactgagtgaccagctgcattacaggagcttgaagctccagagagaggtctgcctggagatgtaagtatcagcacagagatgctatttacagacagtgatgagagatcactgaattccacctggggcactctcaggctgaagaggaggacccaggaaaggatgctaaaaaggaatgaccacttaggtagtaagacaccaagatgatgtggtatcctggaagctaagaggagcaaatgtatcaaggaggaggcaaaaccgatcaactctgtctaactccgataccagatgacgttatagatgcagaatgcgacagagaaccccggatctgagcttcacatgccagtcatctga

SEQ ID NO: 170426 - DNA, 542 bp, Homo Sapiens
tgacgtgttagtaaactgtgcaaatattagttaatataccaaccttttattgttacttatttctaatcttattctccttgtggttgcgagaacatactttgtatgttaacaatcctttaaattcattgagactgtgtgtatggcttaacatatggtctagcatcaagaatgttctaaaaaaagaatattgtatatgcacttaagaaaaatgtgtattctgttgttaatgggtggaatattctacaaatatctgttatgtctagttggtttatacggttgtttaattttcttgttgctctcctgtctagttgtctattcatcattgaaagtgggtattgaagactccaactattgtttctaaattctctattattttcttcaattctgcccgctgttacttcatatatttggggggctctcctgttagctgtatacctattcattattgttatgtctggtctatctttattgtcatttttttatggcccaaatttttccagccttgggcttggaaaatctcgaaacctttcaggggggacctt

SEQ ID NO: 170427 - DNA, 411 bp, Homo Sapiens
gcggaaactcttgagtcgtgagtgtggcgctaaaaacaaacggataaagcttccaccgctataagctccaaaagccctgtgtgttgctcaccctacatatccccagttcgctttaggtactagaaactcaaaaactcagtttgctagagatacaaatcagcctttcattatgtggtttaaaatgtgcctgtatcagctttctaatttccacccacataatatgcagaagaaacacagcagaccctttttacaaagcttacaaaagttaggtaagagacacacaagaaatacatttacgtgttctaatggatccatttttacagtgtcaatatttacagcatgaatctgcatgtctctcagatggttataactcacaaggaaatccactgtatcatcttatattttcttttc

SEQ ID NO: 170428 - DNA, 435 bp, Homo Sapiens
cgacactcttggttggaccaagaggcagctccaaagcagttcccaaagccaaacttgccccacaaaaaaaggtcatggtcactgttcggtggtctgctgcccatctgatccactacagttttctgaatcctggtgaaaccattacatctgagaagtatgctcagcaaattggtaagatgcaccgaaaactgcaatacctgctgcctgcattggtcaacagaaagggcccaattcttctccacgacaacacctgactgcgtgtcgcacaaccagtgcttcaaaagttgaaggaattgggctacaaagttttgcctcatccaccatattcacctgacctttcgccaactgactaccacttctgctagcatcttgacaactttttgcagggaaatacacttcagcatggtacagataatcgcgaacaagagtattccc

SEQ ID NO: 170429 - DNA, 848 bp, Homo Sapiens
tgtttcccagatttactgtgcgctgctgggctgcatggacgactacaccacggacagcagaggggacgtgggcacctgggtccgcaaggccgccatgaccagtctgatggatctgacacttctgctggctcggagccagcctgagctgatcgaggcccatacctgtgagcgcatcatgtgctgtgtggcccagcaggccagtgagaagattgaccgtttccgtgctcacgccgccagcgtgttcctgacgctcctgcactttgacagccctcccatcccccacgtgccccaccgaggagaactggaaaagctgtttcccaggtccgatgtggcctccgtgaactggagtgcaccttcccaggccttcccacgcatcacccagctccttgggctagccacctaccgctaccacgtcctgctggggctagtcgtgtccctgggcggcttgacggagtcgacgatccggcactccacccagagcctctttgagtacatgaagggcattcagagcgacccgcaggccctgggcagcttcagcgggacccttctgcagatctttgaggacaaccttctgaatgagagggtgtccgtgccgctgctgaagacgctggaccacgtgctcacccacggctgcttcgacatcttcaccacggaggaggaccaccccttggctgtgaagttgcttgcgctctgtaagaaagaaatcaagaattcaaaagatatccagaaagctcctgtcaggcatcgcagggtactgcgggattggtgcagttccccggcgacgtgaggaggcaggccctctggcagtgtgtctgctcctcttgcacgttcccggtgatcggaagaca

SEQ ID NO: 170430 - DNA, 996 bp, Homo Sapiens
  misc_feature (683)..(918): n is a, c, g, or t
ggaggggaaggaggggagggcgccaaaattccaaggaccaggaggtgtgggggggaaaaggggataaggaaatgggcggttaagaatttgggaaggaaagggaatgtaagtctccataaaatgtttctaagctgggtgacccttaagttagattggggaggaaagtaccccgggggagggatttcaggagggaccatacttggttggccagaggagtggattttatccgaaacctgtccatagagatgtccagttggtaatcccaatacagatttaaagtctgggggaggtggggtttggagctatgtattgggaatcaccaagcatatcaagcagcaaattgaggacatcaggatgaatgactcccattttgggagtacaatagaaaggaaagagaagtgaatcaaagatggaacgatggaagcactgatactgacaggcatgagcaatcgttgagaaattctcaagagagtcggacaagacagagtcagagagagaagtacatgaaacagccctgtagtggtggctagaagccatggactgggttgggaacaattctagagctcccagaaggcaggcaagattgagtcacacttccaacaaagccctctgcacaccaaaaccccaggaagtattgtttttctttgttagtttgcttttgagacagaatctcactctgtcannnnnnnnnnnnnnnnnnnnnnnnnnnnnnnnnnnnnnnnnnnnnnnnnnnnnnnnnnnnnnnnnnnnnnnnnnnnnnnnnnnnnnnnnnnnnnnnnnnnnnnnnnnnnnnnnnnnnnnnnnnnnnnnnnnnnnnnnnnnnnnnnnnnnnnnnnnnnnnnnnnnnnnnnnnnnnnnnnnnnnnnnnnnnnnnnnnnnnnnnnnnnnnnnnnnnnnnnnnnnnnnnnnnnnnnnnnnatgagccaccgcacccgtccaaggaagtattgttattgaaataatgccaaaatgtcctacctgggttaccccaacctg

SEQ ID NO: 170431 - DNA, 819 bp, Homo Sapiens
ctctggctggaagtgtgactacgcgctcgccagtctacagtcatacgtcataactgttcccagtctctaatccgatgggtgctagccaccactacagggctgtaaacatcgtacttctctctctgactctgtcttgtccgactctctatgagaatttcacaacgatagctcatgcctgtcagtatcagtgcttccatcgttccatctttgattcacttctctttcctttctatttactcccaaaatggagtcattcatcctgatgtcctcaattgctgctgatatgctggtgattcccaaatacatagctccaacccccaacttcccccagacttaagatctgtataggtattacctactggacatctctatggacagttccgtatagactcaactcatctggccaagcaagtatgttcctcctgaattcctctcctggttacttcatcacacatctacataggctcaccagctagaaacatttatgagcttacattccttcttcccatatcttatcagcatatcatatccatttcactccaacactctgtcttgaatttggccctccctctcccctctctactttaattcattggagcatgggatttggagttaggtggttttgggtttgaattccagctctactatttttggttgtgtgatagagttatttaacctctctgagcctcagttccctcgtatgtaaaatgatgataataatacctacctcacagggttgttgtgaggatttaaattagatattgtacgaaaagtgcctagcacagtgcctggcacacagtagagtaggtgctcaataaa

SEQ ID NO: 170432 - DNA, 441 bp, Homo Sapiens
  misc_feature (26)..(26): n is a, c, g, or t
  misc_feature (160)..(160): n is a, c, g, or t
  misc_feature (192)..(192): n is a, c, g, or t
  misc_feature (237)..(237): n is a, c, g, or t
gtaggttcccccctggaattccctcnccccggttacttcatcacaatcctacataggctcacccagcctagaaacatttatgagccttacaatcccttccttccccatatcttatcagcatatcatatcccatttcactcccaacactctgtccttgaanttggccctcccctctcccctctctactttaantcattggagcatgggatttggagttaggtggttttgggtttgaantccagctctactatttttggttgtgtgatagagttatttaacctctctgagcctcagttccctcgtatgtaaaatgatgataataatacctacctcacagggttgttgtgaggatttaaattagatattgtacgaaaaagtgcctagcacagtgcctggcacacagtagagtaggtgctcaataaatggtagctattattatta

SEQ ID NO: 170433 - DNA, 1432 bp, Homo Sapiens
  misc_feature (734)..(760): n is a, c, g, or t
tggcaaggtggaaatcaggaggcaatgggcggcttcttctcacagataggagagctttacgtggtgcaccatctctgggcctataaagacctgcagtctcgggaggagactcgttacgctgcctggaggaagagagggctgggatgaaaatgtctactatacagtccccctggtgcgacacatggagtctaggatcatgatccccttgaagatctcgcctctgcagtgatgctgcctacacctccacctccttccccttctccctcaggcaaccccgacagacagtggcactcctggtcctgctgtcttggttttgtcttggctctgggaggactctgaggggcagtgctcagttcagagcaagggggaactgaaggctgagcaagttctgacgattacagctctgcccaggccctttctactttccctgcctgcctccctccccctgctagaagtagtttctgatttccctgaatgaacgatagtgatcttttaggccttcatttatcttctaaaattcctcatctcaaggccaccagtccccagttatcacccttggaaatcctctgtttagcttagttgcacaaaaggtagtatgtccagtggctagaggtggggtgggaagagaggaggccaggccaggccctcaggaattccctggtttccactgggccacccacttgctggacagtctgagccaagtccctcctgctggagaaaagcctggaactgcnnnnnnnnnnnnnnnnnnnnnnnnnnncctcgtcaccacggtcaggaggaggttcagacattctgcccagaggggctggggaaagggatgggagccaggaaagatttaggggcaggagacagacacgtaacaggaactcggaaggtagaacttagaattcagaacttgggtttcaattgtagaatttggaatctggaatacagaattgggaagaagaacagagatgacaaaagaccacttgaagagaggttcctaatactagacagatggagagtggcttggctgtttccccctgcatattggggttgaaaacttaaatgtgtagttccagtccttctatgcagagtctctcctgccctccctccttcctgcaggcaaatatacaagctagaccctgttccctcaccctgtatcctgtctcccctaattgacattctatcagcccaaccctcattctgcagggccacctggtgtgtggaggtggcgggaggggtcagtgactctgggggtctcctcagtgacccccatacctcatcatgaacccttgggtagcttgattctgcctaccatccaggaaaacttgtgctggaattgctgatggaaacaattaaatattttcctatgaaaacaaaaacaccaaattccaggcattctatgtccgggtggcggaaaaaagagggaaatgaaattggcacatgg

SEQ ID NO: 170434 - DNA, 963 bp, Homo Sapiens
  misc_feature (888)..(888): n is a, c, g, or t
tttgcggctccaacatggctccgcggctgtgcagcatctctgtgacggcgcggcggctgctggggggcccggggcctcgcgctggggacgttgcgtctgcagctgcggcgcgtttctattccaaggacaatgaaggcagctggttccgctccctctttgttcacaaagtggatccccggaaggatgcccactccaccctgctgtccaagaaggaaaccagcaacctctataagatccagtttcacaatgtaaagcctgaatacctggatgcctacaacagcctcacggaggctgtgctgcccaagcttcacctggatgaggactacccatgctcactcgtgggcaactggaacacgtggtatggggagcaggaccaggcagtgcacctgtggcgattctcaggtggctacccagccctcatggactgcatgaacaagctcaaaaacaataaggagtacctggagttccgaagggagcggagccagatgctgctgtccaggagaaaccagctgctcctcgagttcagcttctggaatgagccacagcccagaatgggtcccaacatctatgagctgaggacatacaagctcaagccaggaaccatgatcgagtgggggaacaactgggctcgggccatcaagtaccggcaggagaaccaggaagcagtgggcggcttcttctcacagataggagagctctacgtggtgcaccatctctgggcctataaagacctgcagtctcgggaagagactcgaaacgcttgcctggaaggaagaaaggctgggattgaaaatgtctactatacaagtcccccctggtgcgacaccatggaagtctaggatcatgatccccctggaagattctcgcctctgcaattgatggctgccntaaaacttcccaccttcctttcccccttcttcccctcagggcaaacccccggaaaggaacaagtgggcaacttcc

SEQ ID NO: 170435 - DNA, 906 bp, Homo Sapiens
  misc_feature (109)..(109): n is a, c, g, or t
ttccggggttgccctgacggagaaaggggaaaggaggttggagggtgtaggccagcaatcactggcagagggcgagatcttcaaagggggatccatgatccttagactnccaagtgtcgcaccaggggggactggtatagtagacattttcatccccagcctctctttcctccaggcagcgtttcgagtctcctccccgagactgcaggtctttataggcccagagatggtgcaccacgtagagctctcctatctgtgagaagaagccgcccactgcctcctggttctcctgccggtacttgatggcccgagcccagttgttcccccactcgatcatggttcctggcttgagcttgtatgtcctcagctcatagatgttgggacccattctgggctgtggctcattccagaagctgaactcgaggagcagctggtttctcctggacagcagcatctggctccgctcccttcggaactccaggtactccttattgtttttgagcttgttcatgcagtccatgagggctgggtagccacctgagaatcgccacaggtgcactgcctggtcctgctccccataccacgtgttccagttgcccacgagtgagcatgggtagtcctcatccaggtgaagcttgggcagcacagcctccgtgaggctgttgtaggcatccaggtattcaggctttacattgtgaaactggatcttatagaggttgctggtttccttcttggacagcagggtggagtgggcatccttccggggatccactttgtgaacaaagagggagcggaaccagctgccttcattgtccttggaatagaaacgcgccgcagctgcagacgcaacgtccccagcgcgaggccccgggccccccagcagccgccgcgccgtcacagagatgc

SEQ ID NO: 170436 - DNA, 652 bp, Homo Sapiens
cacgatggaaatcaggacttcatcagcacctgacagaaaggttcttgaaatcaaagttgattaacacacattttggagacctatatatgcctagtaccggggctctcatgctgctgacagctttgcatacctgtgaccaggtcagtgcctatggattcatcacaagcaactactggaaattttccgaccactatttcgaacgaaaaatgaagccattgatattttatgcaaaccacgatctgtccctggaagctgccctgtggagggacctgcacaaggccggcatccttcagctgtaccagcgctgaccccaatgcactgagccctttgcttcttcaagagttgcggccctgatcctctcaagtggccaaaagcttttttaacttttcaatcttcaccttcccttgccaacagagggcactggggtgaattcaagattttcatcgaggtctgttcaatataggacaccccagcttgtccttggctcatccaagaactcttctgtatctaaaacaatacatctcaatcttggccaagggaaaacagactgctttgctggattggcactgagcaactttaggaaatgtcggtggagtgttcagcaagatcagacagcagtccaggtcaaaggcaactcgaaatagtatcctct

SEQ ID NO: 170437 - DNA, 960 bp, Homo Sapiens
  misc_feature (844)..(844): n is a, c, g, or t
tacaagcaggctccaagtgcctccctgctggcttcctttaatcactgtgacttccctgagctgctgtcccccagcaacgtggccatctacggtggcctgtgcgccttggctacctttgaccggcaggagctgcagcgcaatgtcatctccagcagctccttcaagttgttcttggagctggagccacaggtccgagacatcatcttcaaattctacgagtccaagtacgcctcatgtctcaagatgctggacgagatgaaggacaacctgctcctggacatgtatctggccccccatgtcaggaccctgtacacccagattcgcaaccgtgccctcatccagtatttcagcccctacgtgtcagccgacatgcataggatggcggcagccttcaataccacggtggccgccctggaggacgagctgacgcagctaatcctggaggggctgatcagtgcccgtgtggactcacacagcaagatcctatacgcccgggacgtggatcagcgcagcaccacctttgagaagtctctgttgatgggcaaggagttccagcgccgcgccaaggccatgatgctgcgggcagctgtgctccgcaaccagatccatgtcaagtccccgcccagagaagggagccagggggagctgactccagccaacagccagtcccggatgagcaccaacatgtgaggggtgaaccttggcctccaggacatctgcaccccctccccacctccacggacctcggacctccaggcggctcagtgctgcctgcggcccagcctaggggctgggggccactgggtgccacccccagcctgtgtggcccctccctgggggctgnagaggcaggcgggctgctagttggtggcccttccctggaaaggagagggcctgcaggggcttcgaaccctgtggggttttctggccccccacggggagcaagaatggtgccgggat

SEQ ID NO: 170438 - DNA, 1574 bp, Homo Sapiens
  misc_feature (1315)..(1315): n is a, c, g, or t
  misc_feature (1400)..(1400): n is a, c, g, or t
  misc_feature (1405)..(1405): n is a, c, g, or t
gggtgggtgcaagatgccgctgccggttcaggtgtttaacttgcagtccccaggacgaggtgccaggtgcctggcccatgttgcagggggccgtggagcccatgcagatcgacgtggacccccaggaagacccgcagaatgcacctgacgtcaactacgtggtggagaaccccagcctggatctggaacagtacgcggccagctacagcggcctgatgcgcatcgaacggctgcagttcattgctgatcactgccccacgctgcgggtggaggccctgaagatggccctctccttcgtgcagagaacctttaacgtggacatgtacgaggagatccaccgcaagctctcagaggccaccagggagctgcagaacgcacccgacgccatccctgagagcggcgtggagcccccagccctggacacggcctgggtggaggccacgcggaagaaggcgctgctgaagctggagaagctggacacagacctgaagaactacaagggcaactccatcaaagagagcatccggcgcggccacgacgacctgggcgaccactacctggactgtggggacctcagcaacgccctcaagtgctattcccgggcccgggactactgcaccagcgccaaacacgtcatcaacatgtgcctcaatgtcatcaaggtcagcgtctacttgcagaattggtctcatgtgctcagctacgtcagcaaggctgagtccaccccagagattgccgagcagcgaggagagcgtgacagccagacccaggccatcctcaccaagctcaagtgtgccgcaggcttggcagagctggccgccaggaagtacaagcaggctgccaagtgcctcctgctggcttcctttgatcactgtgacttccctgagctgctgtcccccagcaacgtggccatctacggtggcctgtgcgccttggctacctttgaccggcaggagctgcagcgcaatgtcatctccagcagctccttcaagtttgttcttggagctggagccacaggtccgagacatcatcttcaaatttctacgaggtccaagtacgcctcatgtctcaagatgctgggacgaaaagaaggggacaacctgctcccgggacatgtattctggccccccatgtcaggaccctgtacacccagattcgcaaccgtgccctcatccagtatttcagcccctacgtgtcagccgacatgcataggatggcggcaaacccttttcaataccacccggggggccccgccccttgggagggaacaaaccttaaccccaacctaatcctggaggggctgatcagtgcccgntgtggactcacacagcaagatcctatacgccccgggacgtggatcagcgcagcaccacctttgagaagtctctgttgatgggcanggagntccaagcgcgcgcccagggcatgatgctgcgggcagctgtgctccgcaaccagatccatgttcagtccccgccccagagaggggagcccagggggagcttgactccagccaacagccaagtcccggatgagcaccaaccattgtgaaagggggggaacccttgggcctc

SEQ ID NO: 170439 - DNA, 914 bp, Homo Sapiens
gcaggagctgcagcgcaatgtcatctccagcagctccttcaagttgttcttggagctggagccacaggtccgagacatcatcttcaaattctacgagtccaagtacgcctcatgtctcaagatgctggacgagatgaaggacaacctgctcctggacatgtatctggccccccatgtcaggaccctgtacacccagattcgcaaccgtgccctcatccagtatttcagcccctacgtgtcagccgacatgcataggatggcggcagccttcaataccacggtggccgccctggaggacgagctgacgcagctaatcctggaggggctgatcagtgcccgtgtggactcacacagcaagatcctatacgcccgggacgtggatcagcgcagcaccacctttgagaagtctctgttgatgggcaaggagttccagcgccgcgccaaggccatgatgctgcgggcagctgtgctccgcaaccagatccatgtcaagtccccgcccagagaagggagccagggggagctgactccagccaacagccagtcccggatgagcaccaacatgtgaggggtgaaccttggcctccaggacatctgcaccccctccccacctccacggacctcggacctccaggcggctcagtgctgcctgcggcccagctaaggggcctggccactgggtgccacccagcctgtgtgccctccctggggctgaggaggcaggcggctgctagttgtggcccttcctggaaggagaggcctgcagggctcgaccctgtgggtttctgtccccagggagcagactgtgcggcacccaggcccagtggcaccatttcccagacccctcctgttcccgcctcagtcaggtgcagacaagtgggcggtgtccattaaagagcagactcagcgttgag

SEQ ID NO: 170440 - DNA, 942 bp, Homo Sapiens
ggggccccggaagtggacggcacgccgcggcggggtgggtgcaagatgccgctgccggttcaggtgtttaacttgcagggggccgtggagcccatgcagatcgacgtggacccccaggaagacccgcagaatgcacctgacgtcaactacgtggtggagaaccccagcctggatctggaacagtacgcggccagctacagcggcctgatgcgcatcgaacggctgcagttcattgctgatcactgccccacgctgcgggtggaggccctgaagatggccctctccttcgtgcagagaacctttaacgtggacatgtacgaggagatccaccgcaagctctcagaggccaccagggagctgcagaacgcacccgacgccatccctgagagcggcgtggagcccccagccctggacacggcctgggtggaggccacgcggaagaaggcgctgctgaagctggagaagctggacacagacctgaagaactacaagggcaactccatcaaagagagcatccggcgcggccacgacgacctgggcgaccactacctggactgtggggacctcagcaacgccctcaagtgctattcccgggcccgggactactgcaccagcgccaaacacgtcatcaacatgtgcctcaatgtcatcaaggtcagcgtctacttgcagaattggtctcatgtgctcagctacgtcagcaaggctgaagtccaccccagagattgccgagcagcgaggagagcgtgacagccagaacccaggccatcctcaccaagctcaagtgtgcccgcagccttggcagagctggcccgccaggaaagtacaagcaggctgccaagtggctcctggtggcttcctttgatcactgtgacttccccgaagctgctgtcccccaagcacgtgggcatctaccgtgggcctgtgccccttgggtacccc

SEQ ID NO: 170441 - DNA, 641 bp, Homo Sapiens
ctggcacgtggaatcagcgatgaagttgaacccaggaagtctgtgtacaccaagtgagaggtaaagcaactgctgaagcctgccccggctgcagcgggggctgccacatttgttagacatggactttctctctgccctcacccaagcctctcaggtcacatgcagcagggacaccaaggtgacggtagaaacatcaggtcccatttggactgtgcctgtttggggctaggggtttggggtcctggatgtctgggtgcagccatgcagcctggactccctttgtgagcccacacatgccccttccccttgccacgcctggcaggctgtctccttcttttctgatgctgccctccacctgcatctgggaccctctcccttgggtgctgtggctctcccttccttcctgcatcctcatcttgactctcctgggtcactgctgtcggcacacagacatgctgcacaatttctccttttctagaaaagttccttccttaaccccataacaacaactaaccaccccgttgttgcttcccttcatagcagaactcagacctgcctcttcttcccctcccaccattctctcaatccacttctcaggctgacgattctgtctcaatcacaaattgtccctgatttccact

SEQ ID NO: 170442 - DNA, 871 bp, Homo Sapiens
ctggcagtgtggaaatcaggacaagaaagaaatggcatcaatgactgcagcaaagcaattcaattaaaccccagctatatcagggcaatattgaggagagcagagttgtatgagaagacggacaagctagatgaagccctggaagactataaatctatattagaaaaagatccatcaatacatcaagcaagagaagcttgtatgagattacctaagcaaattgaagaacgtaatgaaagactaaaagaagagatgttaggtaaattaaaagatcttgggaacttggttctccgaccttttgggctctccacggaaaatttccagatcaaacaggattcctctaccggctcgtactccatcaatttcgttcaaaatccaaataataacagataacaaagataacaaaagctttacaagctgacttggaattgtgtgctgcttgctgttagctaggggaaaggccctgccaatgtttaacttttaaaagcatcttatctaaaagaaaggctatccagtagagcccagtgctcccttgtccctcttttatgatcagggtgaaatgtacttcctgatgtaatgaacctaatttgatttccattttaaggtggtgtctgtgcagctggtgtccccgattctggctgtcctatgtccaggaagaaacccatttgttgaggctgaccttcctgatcatacacacacacagcccagcaaaagcctctcctgaaccaaacaaacctgttggttgggagactgcccagacatgattgatgacgggttcccgcctgctgtcccctcctgatccacagctaacgaggctgcctccagcatttcctgatttcctctgtggtaataaaagctttctgtgcttata

SEQ ID NO: 170443 - DNA, 784 bp, Homo Sapiens
ggggaagtgcacctgactgagcggaagtaggagctctcagaggctaagaaggtggagaccggagaagctgtgaggttctttagcgtcacctccctcactgggcagcatgggggagaagtcagagaactgtggggttccagaggatctgttaaatggtttgaaggttacagatactcaggaagccgagtgtgctggccctccagttcctgatcccaaaaatcagcattcccagagtaagctgctcagggatgatgaggcccatctccaggaggaccagggagaagaggagtgttttcatgactgcagtgcctcatttgaggaggagccaggagcggacaaggttgagaacaaatctaatgaagatgtgaattcctctgaactagatgaagaatacctaatagaactggaaaaaaacatgtcggatgaagagaaacagaaaagaagagaagagagcactagactaaaggaggagggaaatgaacagtttaagaaaggagattatatagaagctgaaagttcttatagtcgagccctcgaaatgtgcccatcctgcttcccaaaggagaggtcgattctattttcaaatagagctgcagcaaggatgaaacaggacaagaaagaaatggccatcaatgactgcagcaaagcaattcaattaaaccccagctatatcagggccaaatattgaggaagagcagagtttgtatgaaaaagaaggacaagcctagatgaagcccctggaaaggactattaaatctattattaaaaaacaaaatcccttcaa

SEQ ID NO: 170444 - DNA, 937 bp, Homo Sapiens
  misc_feature (28)..(28): n is a, c, g, or t
  misc_feature (41)..(41): n is a, c, g, or t
  misc_feature (44)..(44): n is a, c, g, or t
  misc_feature (63)..(63): n is a, c, g, or t
  misc_feature (562)..(696): n is a, c, g, or t
  misc_feature (704)..(718): n is a, c, g, or t
  misc_feature (756)..(838): n is a, c, g, or t
ttccccggataacccaaagggtttgccntctggaagtctgnagncatgagtgatcagcatggncaggttttgcttgaaattttttcccaaaaattaccgggtacgccgaaacatgatccagtctcggttgactcaagagtgtggagaagatctcagtaaacaggaggtggataaagtactaaaggactgctgtgtaagctatggtggcatgtggtaccttaaagggacagtacagtcttgacaatagtagcaaactactaacccagcaaatctaagcccaaggaagaagggcggaaccagaagtagggcctcgacttgcttcagacgacacagagcaagaggaactgaccatctcatgacctgtggcattgcacggtgcagtggacagaagggattatcctcagccagtcacagggtcagcttaagttagttagatcactcccagaagagaccagctgggaccttctttgcagtacaatttgaaattcctgatgtattttgcttattatttggtttcattctcataataaagagagtgtatactgacatgggcaggatgatnnnnnnnnnnnnnnnnnnnnnnnnnnnnnnnnnnnnnnnnnnnnnnnnnnnnnnnnnnnnnnnnnnnnnnnnnnnnnnnnnnnnnnnnnnnnnnnnnnnnnnnnnnnnnnnnnnnnnnnnnnnnnnnnnnnnnnnttttgcgnnnnnnnnnnnnnnnaaaaaatttttaaaaacatttttttgggcccggggccnnnnnnnnnnnnnnnnnnnnnnnnnnnnnnnnnnnnnnnnnnnnnnnnnnnnnnnnnnnnnnnnnnnnnnnnnnnnnnnnnnnccccgggggaaaccaaaggttttaaaaaaatccaaagggggttctgggggcttttcgggaatttaaaaaggggagccaaaggaattcaaaaataaaata

SEQ ID NO: 170445 - DNA, 468 bp, Homo Sapiens
cacagtggaaatcaggactcttgccttcctcaggcatgcaggtctgcatccaggtctcgaaaaagggcacctcagctcctgtgcgcgactcggacagaatcacctctgaaccataggtctgggccacatggcacagcatgaggaaggagatgtcaaacagcagggcccggacggaggccggtttggtgctttcttcgctgccataggttgtgaattcattcaaattgatgaatttccgggcgaaggatttcagctttccagtggcggcggcggcagccagcagcaagtccagactcttcccggacagcatgtggcccaggactcccagcagtccctccggtgacttagagtggtctgcatccatcgtcttgaggatgtttgtgacagtgggctccgcccggaggatcagctggatgttgggctggatgttggcattctttcctgatttccaccttgccaggttaccga

SEQ ID NO: 170446 - DNA, 897 bp, Homo Sapiens
gaagatgggaatgtgatctgcatagttatcagtctatttgtatgtgtaaaaagcttctaatttaggtttaaggtgggctggctacaagagcactaaaactcctcaccttttaaactgctctttttatctgcttgtgggaatgtcgtctctttcgtggaagattgggtggtctcatgttgaggctgttgcccagtcccattaactcccttgtccccccacagaaggaagagacattgcccagctaagcatcaggaagctgtgttaaaagcccttctatgggtttggttttgtgatgtttttccctaatgggaaaaacgttatagttgtttcttactgccctgtctgggaagcagggcaaacctccaggtttttaaatgagctagatgcccctcttcctcttctctggtcactgaacctggaccaaagcactttgatattccaggtgtgattttctctgtcatggggatttgctccactgcagagccccatcattttcacagcgtaggccaacagagtgagaacctagggctaccctagctgatggatgtgaggctgctgtctacaggagctcatcccagccctgttaactggcagtggcaaggatactcgtcatcggccattgcactggggaactccctcaccccatggcttcccaacttgaaacccagatttacctccagggagaggtgagaaaaaaactcgtaaatagacttgctaaaagagcaaactcaggggtggggtgtgtctcaattcctcctgatcactttgaacataatcctgacggctgaggtgcctcatcggggtgccgggagaaacggcgcacctccaggccccttccactccgctcaaccccggcgggtcccatgtcgggcctccggacgcctaggagggccctac

SEQ ID NO: 170447 - DNA, 457 bp, Homo Sapiens
  misc_feature (47)..(47): n is a, c, g, or t
  misc_feature (135)..(135): n is a, c, g, or t
  misc_feature (169)..(169): n is a, c, g, or t
  misc_feature (237)..(237): n is a, c, g, or t
gtgaagtggcctgcaaaagcgaagtgaagcctccacctgtatttaanagccgcctcacctattgccttgccattaccccaccctgagctcccatctccctgtccagatcaacagtggcattagattcctcctaantcctaggattcctaggagtagggattcctaggantcctaggattccccaggagtatgaacccctattgtgagctgtgcaagcaagtgatctaggctgtacantccttatgagaatccaacgcctaatgatctgtcactgtctcccatcacccacagatgggaccatctagttgcaggaaaacaagctcagggctcccactcaccatacattatggtgagtcatataattagttcattatatattacaatgtaataataataaagtgcacaataaagaatgcatgttgaatcatcctgatttccacctgccagagatcctgtg

SEQ ID NO: 170448 - DNA, 397 bp, Homo Sapiens
attagaggcataagccaccatgcctggcccaggatggtgagggggatggtttctaggtgattcaagtgcattacatttattgtgcactttatttctatcattacattgtaatctacaatgaaataattttatacaactcaccataatgtagaatcagtgggagcccagagcttgttttcctgagactagacggtcccatctgggagtgatgggagacagtgacagatcatcaggcattagttagagtttcataaggagcatacatcctatatccctccaatgcagttcacaacagggttcaagctcctatgagaagctaatgccaccgctgatctgataggaggcggagctcaggcagtaatgctagcaatggtgtgcggctgttatactgatgaag

SEQ ID NO: 170449 - DNA, 494 bp, Homo Sapiens
  misc_feature (60)..(60): n is a, c, g, or t
atcctgcctgagttctcagtgggaggtaagtcttggagcaggggtcttcaatcccaggcncatagaccatggcctgctagaaattgggttgcacagcaggaggtgagtggcttgcaagcgagtgaagcttcatctgtatttacagccgctcactattgcttgcattaccacctgagctccatctcctgtcagatcaacagtggcattagattctctaattctaggattctaggagtagggattctaggattctaggattccaggagtatgaaccctattgtgagctgtgcaagcaagtgatctaggctgtacattccttatgagaatctaacgtctgatgatctgtcactgtctcccatcacccccagatgggaccatctagttgcaggaaaacaagctcagggcttccttcaccatacattatggtgagtcatgtaattatttcattatatattacaatgtaataataataggaataaagtgcacaataagtg

SEQ ID NO: 170450 - DNA, 967 bp, Homo Sapiens
  misc_feature (843)..(843): n is a, c, g, or t
agttgacgctctgggccgccacctccgcggaccctgagcgcaagagccaagccgccagcgctgctatgtgggccacgctgccgctgctctgcgccggggcctggctcctgggagtccccgtctgcggtgccgccgaactgtccgtgaactccttagagaagtttcacttcaagtcatggatgtctaagcaccgtaagacctacagtacggaggagtaccaccacaggctgcagacgtttgccagcaactggaggaagataaacgcccacaacaatgggaaccacacatttaaaatggcactgaaccaattttcagacatgagctttgctgaaataaaacacaagtatctctggtcagagcctcagaattgctcagccaccaaaagtaactaccttcgaggtactggtccctacccaccttccgtggactggcggaaaaaaggaaattttgtctcacctgtgaaaaatcagggtgcctgcggcagttgctggactttctccaccactggggccctggagtctgcgatcgccatcgcaaccggaaagatgctgtccttggcggaacagcagctggtggactgcgcccaggacttcaataatcacggctgccaaggggggtctccccagccaggcctttcgagtatatccctgtacaacaaggggggatcatggggggaagacaccctacccccctaacccagggcaagggatgggtttacttggcaaggttccccaacccctgggaaaaggggccattcccggctttttttgtcccaaggggatgtagccaaacaccaaaaactatgacgaggaagcgatggtggaggctgtggccctctacaanccctgtgagctttgcctttgaggtgactcaggacttcatgatgtatagaacgggcatctactccaggtgagtcaggatcccaggagccaggagggacagtggggaggggcttggtccgagcgga

SEQ ID NO: 170451 - DNA, 485 bp, Homo Sapiens
  misc_feature (210)..(210): n is a, c, g, or t
  misc_feature (283)..(283): n is a, c, g, or t
tgatggcgctgatgacaccccaggtacttttcgggcctgctggatgttggcaccgtgagtcccaattgccagtcccatcaggtcctctcgcactgtgaactcctcttggaaggctgctgccaactgcttgcttgtctcctaggtgcttggtagcttcttcattgcgggacataagtaagcagtttggtgcgcaggcttcggaaatgcatnatcacccagcagagatgctcgcttcacaggggcttctgtggttgacagaatgaagagctcactgtttgtgatngttgagaaagatgcagtaggctcccagggctttcttgaactctttatggacgttttcattggagcaggcttctctcagatcctcgggcacagccatggtaaccttgaagaagctgcctttggttgcaaggggattgggattaactggccgaagtcgctccacagggtaacaactttcattgtagggtgtcatcagcgccact

SEQ ID NO: 170452 - DNA, 503 bp, Homo Sapiens
  misc_feature (107)..(107): n is a, c, g, or t
  misc_feature (484)..(484): n is a, c, g, or t
atggcgctgatgacaccgagaagacggccgagctgttctgcggcatcgtcaaccgctggaaggaaatgggcggctggcgtgatttcaacgattgatctgaaatccanggggctcgctttgcggccctttcgcgacacaagccgctcctacaggggaatgcacactcctgtaggagcagcaaagagccaggacaggcactggaagccttgaagtccaggcataaaaaaaccggccacgaaggccggtttttttatgcgagtggcaattacagcttgccagcgttctcgctcaggtaggcagcaacgccttctggcgaagcgttcatgcctttgtcgccttttttccagttggcagggcaaacttcgccgtgctcttcgtggaattgcagagcgtcgaccagacgcagcagctcgtccatgttacggcccacgtcccaggtcgttgatgataatgcgagcggacaacaccgttggctgtcatcagncgccatggggatcctctag

SEQ ID NO: 170453 - DNA, 453 bp, Homo Sapiens
aatggcgctgatgccacccagtacaggaagtgacaccagtactctgtaaagcatcatcatccttggagagactgagcactcagcaccttcagccacgatttcaggatcgcttccttgtgagccgctgcctccgaaatctcctttgaagcccagacatctttctccagcttcagacttgtagatataactcgttcatcttcatttactttccactttgccccctgtcctctctgtgttccccaaatcagagaatagcccgccatcccccaggtcacctgtctggattcctccccattcacccaccttgccaggtgcaggtgaggatggtgcaccagacagggtagctgtcccccaaaatgtgccctgtgcgggcagtgccctgtctccacgtttgtttccccagtgtctggcggggagccaggtgacatcataaatacttgctgaatgaatgca

SEQ ID NO: 170454 - DNA, 560 bp, Homo Sapiens
  misc_feature (46)..(46): n is a, c, g, or t
  misc_feature (145)..(145): n is a, c, g, or t
  misc_feature (271)..(271): n is a, c, g, or t
  misc_feature (280)..(280): n is a, c, g, or t
  misc_feature (293)..(293): n is a, c, g, or t
  misc_feature (303)..(303): n is a, c, g, or t
  misc_feature (313)..(313): n is a, c, g, or t
  misc_feature (323)..(323): n is a, c, g, or t
  misc_feature (433)..(433): n is a, c, g, or t
  misc_feature (439)..(439): n is a, c, g, or t
  misc_feature (453)..(453): n is a, c, g, or t
  misc_feature (459)..(459): n is a, c, g, or t
  misc_feature (473)..(473): n is a, c, g, or t
  misc_feature (510)..(510): n is a, c, g, or t
  misc_feature (517)..(517): n is a, c, g, or t
  misc_feature (538)..(538): n is a, c, g, or t
  misc_feature (550)..(550): n is a, c, g, or t
ctggttcggcatcctgacggtacatttggccttccagcacacaagnctggactactcgatgggctggctacggcagcgtcatcggcgttgcagaaacacaccgctggcatcacaaacgcgacttcgaggatgcgcaggtcaattntggtgagttcttgctggtgtgggatcaactgcttggaaccttctatgacagcgcaagcaagcccagcagcgccgaagtagtactgcgtgaccgggactatccgacaggctatgtgggtcagattgncgagccggncagaagtcagtancttgctcggngtcgctggcnactaactggntaatgaggatcgaccggcatgaagttccatcaagggtttcagatgaactcttgacactggccagccaattgcccaagtccaccagatccttcatcaagctactcggcttncttccnagaatctgccggcnttccgnacagacaccggtanggccggaccatttagcaacggttttcgcctgggattntaccccncaggagggcattccttgaagncgccgacttggncaatttcttt

SEQ ID NO: 170455 - DNA, 199 bp, Homo Sapiens
gtcagacgctgaactatgtgcattacatggatttagtcttcaccataatcctgtgagggtaggtgctcttattaagctttttccagatggagtccctgagaccttgagatgttaaataccttgcctattattttcaagtggtagagctaggatctaaattcagacagttggacagcagctgtaaacacaacattatacg

SEQ ID NO: 170456 - DNA, 308 bp, Homo Sapiens
taacatctccagcccaactggaaccagtaggaggactatacagcagtgttcacaacgttcacaacagcagcagtggcacagggagaagccctgtgtgtctgcaacctaagaggcaaccagcaggagaaagtctttagcaagagacaaaccctggagatgttgaggttcaccaggagcttcaaatttgagctgacctggacttaggaaggaggctagatggaaacttaggtacttacattttctgagaatggaaccctttcaaagacttcaaagacctgcatttctttctttctttctttataaagttc

SEQ ID NO: 170457 - DNA, 564 bp, Homo Sapiens
  misc_feature (72)..(90): n is a, c, g, or t
  misc_feature (474)..(474): n is a, c, g, or t
tgagcctggctacctgttagcccaatcccaggacagtatgctcatattatttgatacagtttgagggggttnnnnnnnnnnnnnnnnnnncccaaggccatttgtggacccagattagaagccctgaggatcctaggtccagaagaaagggccttgtcggaggccacacaggccaccaggagccaggcccctgaagatccttggcccaggagaaagggccttgccagaggccacacaggccaccaggagtgaggcccccagaggggtcagcagggcctaccctacaccaccccacccttcaacacgcccaggcgtgcacgctgcaggccagacaaccctccagctggtgtccccagcacccaacccaagtttttctcctgctcaggcaccagcagtcttcctggttgcactctaagctccagatcacaaagtcgagtccttttgttgtgcactgttcactcccccgtagaccanccctgttcctctggggagcttgtctacgacctggactctctccctgctacgttcatgtctttaacgacggccagcacctatgctcacacg

SEQ ID NO: 170458 - DNA, 1459 bp, Homo Sapiens
cttcactctcgcctatctggtgttcgccgtgtgcttcgtgttcacgcccaagcgagttccacgcggtcggggctcacggtgcagaacctgctgtcgggctggctgggcagcgaggacgccgccttcgtgcccttccacttgcgccgcacggccgccacgctgttgtgccactcgctgctgccgctcggctactatgtgggcatgtgccttgcggcttcagaaaagcggctccacgccctcagccaggcccctgaggcctggcggctcttcctgctgctggccgtgaccctcccctccatcgcctgcatcctgatctactactggtcccgtgaccggtgggcctgccacccactggcgcgcaccctggccctctacgccctcccacagtctggctggcaggctgttgcctcctctgtcaacactgagttccggcggattgacaagtttgccaccggtgcaccaggtgcccgtgtgattgtgacagacacgtgggtgatgaaggtaaccacctaccgagtgcacgtggcccagcagcaggacgtgcacctgactgtgacggagtctcggcagcatgagctctcgccagactcgaacttgcccgtgcaactcctcaccatccgtgtggccagcaccaaccctgctgtgcaggcctttgacatctggctgaactccactgagtacggggagctctgcgagaagctccgggcacccatccgcagggcagcccatgtggtcatccaccagagactgggcgactgttcctggagacatttgcctccctggtagaggtcaacccggcctactcagtgcccagcagccaggagctggaggcctgcataggctgcatgcagacacgtgccagcgtgaagctggtgaagacctgccaggaggcagccacaggcgagtgccagcagtgttactgccgccccatgtggtgcctcacctgcatgggcaagtggttcgccagccgccaggaccccctgcgccctgacacctggctggccagccgcgtgcccctgccccacctgccgcgcacgcttctgcatcctggatgtgtgcaccgtgcgctgagtgggctggggccttgaggtgacactgtgtctccccccaaagccacaggcagggaagggggtggctgggcctcctggctggcaaagggctctacttaaagcacatgatgtagagcaactcgcctctgccctgggtctgcagaaggctgaggacttttggttaaacagcaatcctcatgaaaacaccccaccctgcttggccaggccaggtaacaaggtcctgggcacctcctcttttgcttccctcctgcccttttcctgctggttggggggcagattcctgcacacacagaacccaggtcttggccccgaaaccattccctggagaccctggggtcctaacccaggtggtcgcatctgggccattgccgtaatctctggagatacca

SEQ ID NO: 170459 - DNA, 481 bp, Homo Sapiens
ttgatagcccaacaggaggggtggatttcatcatcccattccacagataagaccatggaggtttcaagctggaagactgagggtcatacctcaactacatggaggggtcaagttaggggccagagtctgccagaccccgggttcccatattgtatgagtagcaggctgggccaaatccctgtcagctgggggagttctctatggaattgagtgacccagagctctcagcatctgtgccaaaaaaaccaaatgacctcacttttggtggcttttccttctttggggaaggaatgtgctggccactgctgggagctacagcctgctgaggcctgtgtgctctcagacctgcaagggccagaatcagactccagacatgggggaggggttacagcaggatcaaactgtaaccccggaggaccggggaggaggctgttctcacactggcctcccggagcgggtgccactctgcttcgaagaccag

SEQ ID NO: 170460 - DNA, 673 bp, Homo Sapiens
gttgtcataatataatagagacattagatctggctggtctgtcataatataatagagacagtagatctagctggtctgtcataatataatagagacagtagatctagctggtctgtcataatataatagagacattagatctagctggtctgtcaacatataatagagacagtatatctagctggtctgtcataatataattgagacagtagatctagctggtctgtcataatataattgagacattagctctagatggtctgtcattatataatagagacattagatcgagctggtctgtcataatataaaatagacagtagatctagctggtctgtcataatataatagagacagtatatctagatggcctgtagtgaaagacaggactattagagaggccatctggcctgtaagtgaaagagaggactattagagaggtcatctggtctgtaaggaaagagaggactattagagaaatcatctggtctgtaaggaaagagaggactattagagaggtcatctggtctcatcgtactgtctgcttagaagtgccaagtcatgtgacactgcctactaaactctagaggtgacctccccccctcatccaacagacacacacacattaccagcatcccatatatttttccccattcctatatttctagggtac

SEQ ID NO: 170461 - DNA, 1002 bp, Homo Sapiens
tccactagtgtaggccaggagcagctgcgcaaactgcaggaacgggtggaacgctgtgccaaggaggccgagaagacaaaagctcagtatgagcagacgctggcagagctgcatcgctacactccacgctacatggaggacatggaacaggcctttgagacctgccaggccgccgagcgccagcggcttcttctcttcaaggatatgctgctcaccttacaccagcacctggacctttccagcagtgagaagttccatgaactccaccgtgacttgcaccagggcattgaggcagccagtgacgaagaggatctgcgctggtggcgcagcacccacgggccaggcatggccacgaactggccacagttcgaggagtggtccttggacacacagaggacaatcagccggaaagagaagggtggccggagccctgatgaggttaccctgaccagcattgtgcctacaagagatggcaccgcacccccaccccagtccccggggtccccagggggaggagctgctgaagatgagtgaggaggacgagcagggctggtgccaaggccagttgcagagtggccgcattggcctgtaccctgccaactacgtggagtgtgtgggcgcctgagtgtcctgacagcccttctgcaacgtttacccaccctggttcagagcccagcttctcctggagagccggaccctcagggccctgaaccgtcgctctctggctgctcctctgtcccttgagggaggaagtcctgggacccagggaggggaggggcctttgtctagggaagggactggtagggaagggacgagtctaggctgagggcaagatgggaggtcagaggtgacagaagcgttcaggggtgcctgggcctccccaggagctgtggactcagttcctgacctctgctttggggttcctggggtgggcttggggtgagtgtagttctggcctagcagcaccctcttgtggcttgttctagcgtgtattaaaacttg

SEQ ID NO: 170462 - DNA, 779 bp, Homo Sapiens
agtaggctccagctataagagatccaacatcaagtaatgatgacagtaaatctaatttgaatacatctggcaagacaacttcaagtacagatggacccaaattccctggagataaaagttcaacaacacaaaataataaccagcagaaaaaagggatccaggtgttacctgatggtcgggttactaacattcctcaagggatggtgacggaccaatttggaatgattggcctgttaacatttatcagggcagcagagacagacccaggaatggtacatcttgcattaggaagtgacttaacaacattaggcctcaatctgaactctcctgaaaatctctaccccaaatttgcgtcaccctgggcatcttcaccttgtcgacctcaagacatagacttccatgttccatctgagtacttaacgaacattcacattagggataagctggctgcaataaaacttggccgatatggtgaagaccttctcttctatctctattacatgaatggaggagacgtattacaacttttagctgcagtggagctttttaaccgtgattggagataccacaaagaagaacgagtatggattaccagggcaccaggcatggagccaacaatgaaaaccaatacctatgagaggggaacatattacttctttgactgtcttaactggaggaaagtagctaaggagttccatctggaatatgacaaattagaagaacggcctcacctgccatccaccttcaactacaaccctgctcagcaagccttctaaaaa

SEQ ID NO: 170463 - DNA, 376 bp, Homo Sapiens
aatcatacctaccagctcacatacacgtaccacagcccctatgcttcaggtggagagggcagtgattgcagaggcctgcggaagggacagcaggcgaagctcagcagaggccctgcggaagggacagcgggtgaagctcagcacacaggagcaaagctgtagggcagaggtaggggtggaacccaggccttggccacacggcctcaggcaggtcccagagccccagtttgcccaggacagtcttgatttataccaggttgagggtcctcgtgcagaatggtgcattctctagttcccaaactggcagagagcttaaatgtaatccttgatgcagtgggaagccgttgaaaaattttaagcctcaagtgacaaaagt

SEQ ID NO: 170464 - DNA, 223 bp, Homo Sapiens
ctagaggacccccgtagctattacaggtgtctgagcagcctgacctccaggaagggacccatgtggaaaagtcccagtcagcatctgtggagtccatccctgaagtgttagaggagtgcacgtccccatgccgaccactctgactctgcctctgtccatgacatggattacgtcaatccccggggcgtgcgctttacacagtcctcccagaaagaaggcacag

SEQ ID NO: 170465 - DNA, 477 bp, Homo Sapiens
aataagtgtgaatgcatgtataacacttagcaaagagctaagtgaccacacatttcattaaatgttcattatgaccatcgtctacacacatgtaactaacacaggctcaactgcttgcccaactaaaaagattgcagtggctactccggcagcgggtgctgcttcactgccgctcatcatggcactgagcagatgtcctggagccagggagaaaggcacaggcgggctgctgccttcatcccgggtctcccccacccgcttgagtgtgattcaggtgttttaaagatgtgtttggtacaacgtggtttcttaacacaaaccagctaattttgtacttaactggggaacagcattgagcaggcagccatctgcgcacttgcagcccgtggtatctcacctctaaacgccgcgtgactgctgtgtcggggttctcagtgagaactccagcaaaagattcggtaggtatgatgaaggacg

SEQ ID NO: 170466 - DNA, 408 bp, Homo Sapiens
cctgtatacctattaccaaatagtgccagggactaagtgaatatatgcccaaatgaatgagttttaagtaggaaacgtttgcatagaatcattttgtttcttttggagttcaaatcttcggatattttacccttcccaatccaaagaaaagtctctgagtgaagagatgggaacaaaatgtaagttaaatatgttgctttaacaactgtttattgaactcgtgctatatactgtagaatgatgagcaaaaccaggcacaggttcggccctggaagaggaaaggcaggcatatatttatcaagtaagtacattaatggcggcacttatcagtcgagagaagtgcgctaaggaaaggaatatgattctatgatagcgtataataaaagttccgttgaagccgtcgggtac

SEQ ID NO: 170467 - DNA, 795 bp, Homo Sapiens
  misc_feature (484)..(484): n is a, c, g, or t
agtacctgttcagattaatcaaagcaataggatttgatttgattaggtatctttttacaccagtatgttatttttaaccaaaatgtaaagttcttattaaactcattacctgccattgtgattgtcccatcatggcccacctggtttcctgatgttgtaaataacatcaatgcatctgctgtgggtcctttgctgagatgtcttcgaaggaattttgttttagccatatccatcaactttgtattttacttgcaatttggaagaaggaaagtcacatgatgaaactccttttgtctataaccaggccctggcaaagtgcaaacaggatgcaactgcagtggcacaaaggtcactcaatcctttgtttccagtttcacattctactacttctgtgctagagaacgatgctctgtgagaggcattcactagtatgaatgtggggatatagtgtataagacttatttgcagtactgtgttcttcagnctagaggcagctttttaaataatgcaagtgtatttattagcattaaaatttaacatctcagtaatcagcattagcatttctgaggaccattattaattctgagaacagaaatcggtgccttgcaaggaagtttactagctctatcaacaagcattcaaggttacatctgctagcagagtagtgttaggaacctggccttactctcctctgacaatcgcaattttttcttatttttataaattcaagaagatacacttggcatcgtgtatccgaggctaagtttttcatgcatttcccagactacttatgga

SEQ ID NO: 170468 - DNA, 133 bp, Homo Sapiens
taagctcacaaagccacttccattcattaaagaccctgagcaggttggagagcatttatagtcacagctgagtctgtgaatataaccaacaactgtgatgacccctctgttaataaataacttggacatcagc

SEQ ID NO: 170469 - DNA, 268 bp, Homo Sapiens
atgtctgatgaaatatcaaatataacagaggaaaaacagttggtgttatctagttgtggacccaattcactatccaagactcttcataaactgagtaaccagaacaactcatatagggacaagatttgaatacaataaagagtctttcagctgaaaacttattgccatgaagcaggactctaacagaaggaatagagtgcaatttctaagactattgaaactcagcggaatcaatcagctagtgtatagggtaccgaaactcgaatat

SEQ ID NO: 170470 - DNA, 557 bp, Homo Sapiens
gggagatcccgaagcagcgctgggagcgtaagtgcgggcagagcactgcgccgtttgggaacgcaactttgaggagacagtgcggtggttctggaggctgggaagtccaagaccagttggctcgcatctgacttcagtgaagttccttatgacttcccctgaaattgcttccttatcatgggggcaaatgaaagtaaaaggctctaatacaacctataaggactgcaaagtatggccagggggtagtcggacttgggattggagagaaacaggaactgagcattctcctggtgtgcagcctgcagatgtgaaggaagttgttgagaagggtgtacagactcttgtgattggccgagggatgagtgaggccttgaaggtgccttcatcaactgtggagtacctcaagaaacatggcattgatgtgcgggtcctccagacagagcaggcagtgaaggagtataatgccttggttgcccaaggggtcagggtgggaggtgtcttccattccacctgctgatggagccttaagaggagaataaatcactaagtgcccaaaa

SEQ ID NO: 170471 - DNA, 527 bp, Homo Sapiens
gggagttggggagcgcagatcccgaagcagcgctgggagcgtaagtgcgggcagagcactgcgccgtttgggaacgcaactttgaggagacagtgcggtggacttcagtgaagttccttatgacttcccctgaaattgcttccttatcatgggggcaaatgaaagtaaaaggctctaatacaacctataaggactgcaaagtatggccagggggcagtcggacttgggattggagagaaacaggaactgagcattctcctggtgtgcagcctgcagatgtgaaggaagttgttgagaagggtgtacagactcttgtgattggccgagggatgagtgaggccttgaaggtgccttcatcaactgtggagtacctcaagaaacatggcattgatatgcgggtcctccagacagagcaggcagtgaaggagtataatgccttggttgcccaaggggtcagggtgggaggtgtcttccattccacctgctgatggagccttaagaggagaataaatcactaagtgccaaaa

SEQ ID NO: 170472 - DNA, 361 bp, Homo Sapiens
taacggaacttccctcccgacgcgagatgtcttatttaccaacaaatccaccagggagcatacttacttgctggctccgcgtctctctcggcagtcaccggagtgccgagggggaagcacgatttacggaagactattgcccagaagaaaagatgtttggttttcacaagccaaagatgtaccgaagtatagagggctgctgtatttgcagaactaagtcctccagttctcgattcactgacagtaaacgctatgaaaaggacttccagagctgttttggattgcatgagactcgttcaggagacatctgcaatgcctgtgtcctgcttgtgaaaagatggaagaagttgccaacaggatc

SEQ ID NO: 170473 - DNA, 906 bp, Homo Sapiens
  misc_feature (404)..(412): n is a, c, g, or t
ggggggaaagcggaatctacaccttcccggccagcggtagcaactgcagaactgcaggagactatctttctagacaaggcagttgaggaggagggagcgcttgagggggactggcctggcgtgcactccgcacctcggggacattattgcgcgtggaacggctgcttttggaagactattgcccagaagaaaagatgtttggttttcacaagccaaagatgtaccgaagtatagagggctgctgtatttgcagagctaagtcctccagttctcgattcactgacagtaaacgctatgaaaaggacttccagagctgttttggattgcatgagactcgttcaggagacatctgcaatgcctgtgtcctgcttgtgaaaagatggaagaagttgccagcaggatcnnnnnnnnnctggaatcatgtggtagatgcaagggctggacccagtctaaagactacattgaaaccaaagaaagtgaaaactctatctgggaacaggataaaaagcaaccagatcagtaaactgcagaaggaatttaaacgtcataattctgatgctcacagtaccacctcaagtgcctccccagctcaatctccttgttacagtaaccagtcagatgacggctcagatacagagatggcttctggttctaacagaacaccagttttttcctttttagatctcacttactggaaaagacagaagatatgttgtgggatcatctataaaggccgtttttggggaagtcctcattgacacacatctcttcaagcctttgctgcagcaataagaaagcagctgctgagaagccagaggagcaggggccagaagcctctgcccatctccactcaggagtggtgactgaggttttatgtagaaaggggaacaaacaaacaaaaaaggg

SEQ ID NO: 170474 - DNA, 521 bp, Homo Sapiens
  misc_feature (18)..(18): n is a, c, g, or t
  misc_feature (36)..(36): n is a, c, g, or t
  misc_feature (89)..(89): n is a, c, g, or t
  misc_feature (101)..(140): n is a, c, g, or t
ataccccagctaaaagtnaaactgttgatgttgganaaccagctttaggaaaatccattttagtgccaaacgaggaactttcgatggtnatgagctctaannnnnnnnnnnnnnnnnnnnnnnnnnnnnnnnnnnnnnnncgttcattgcactcagtatcagaagaacgcacagatgaaatgacacataaagaaacaaatgagcaggaagaaagattgctcgccacagcttccttcactaaatcatcccgcagcagcaggactcggtctagcaaggccatcttgttgccggacctttctgaaccaaacaatgagcctttattttctccagcgtcaaaagttccgttgaagccgtcgacggcttcaacggaactttatggtatgtagaaattccaattactggtttgtcagtaggattcttagctctgtaaaacgccagtgcagtctctcctggcaccacctgttttaaagaatatatatattatcaatactttgagtctcacaaagttccgttgaagccgt

SEQ ID NO: 170475 - DNA, 620 bp, Homo Sapiens
  misc_feature (197)..(197): n is a, c, g, or t
ttcgactctagaggatcctagggacactgtatccagagatgttagaggagtgaaaatctttagggcactaaaactaattatgttttagggtctcccaggataggttgcaaaggcacctacagttgaaatttttctattccatgccatcttcttcctgggcttcctgaagtagtctgtagggctgccgcatcttctgntctcccctttcatcagatgccacatctctttactatagacttaaaacttcagcagaagaaaaattacttagtccttaggccaaccaaattaactgcagtgtaatgtttcacaggccttcctacacttagaaatcgtcacacagcgtgtattttattgaaatactgtccagcttcaaatggaccattattgtatgtagaaattcccaattactggtttgtcagtaggattcttagctctgtaaaacgccagtgcagtctctcctggcaccacatatatttctgtttgctgaggtctaaagttccactggagacttgcatgcacatctgcattaaagctaattttaatgattcgatctttaaccggcaccaagttttcaatcttgtctgaggcatgacctgcaactgctgatcctctaggatcga

SEQ ID NO: 170476 - DNA, 363 bp, Homo Sapiens
gagctcggtacccgacggcttcaacggaactttcacacaaggcttcttttccaagagttctctgaagtaaggcattatacttctttttaaaaaattccatacattcatagtttttcctttgcagtgtaaattcactggtgttcagtaaggaatgagtggtaattaaatgaattttcatattcataggggttgtcaagagtgtgtgtcctctgatgtttagcaaggtttgagctccagctgaaggatttgttgcataccttacatacatagggtttctctccagtatgagttctctgatgtagaatgagggaaaagctccggctgaaggctttatcacattcagcacacgcatagggtttctct

SEQ ID NO: 170477 - DNA, 305 bp, Homo Sapiens
  misc_feature (229)..(229): n is a, c, g, or t
gaggactacaaaagtgcactcttctatatctacatatgtacttagaggtacaaatttggtgacagaaaagacttcagtatatgctggcatcttagaagcagttctcaaagagcttagttttattttcttgaattttaagaatgcctaagatccttcttcatcctcgatcttgggagccaagtagtattttaagtgtcccatatccgcaattttatactctacaacaagngggtacatctgcagacatactgagtgtcaccgttgaagagagtagatatagaagagtgcacttttggggatcctct

SEQ ID NO: 170478 - DNA, 1339 bp, Homo Sapiens
gcgtagcagagtggtcgttgtctttctaggtctcagccggtcgtcgcgacgttcgcccgctcgctctgaggctcctgaagccgaaaccagctagactttcctccttcccgcctgcctgtagcggcgttgttgccactccgccaccatgttcgaggcgcgcctggtccagggctccatcctcaagaaggtgttggaggcactcaaggacctcatcaacgaggcctgctgggatattagctccagcggtgtaaacctgcagagcatggactcgtcccacgtctctttggtgcagctcaccctgcggtctgagggcttcgacacctaccgctgcgaccgcaacctggccatgggcgtgaacctcaccagtatgtccaaaatactaaaatgcgccggcaatgaagatatcattacactaagggccgaagataacgcggataccttggcgctagtatttgaagcaccaaaccaggagaaagtttcagactatgaaatgaagttgatggatttagatgttgaacaacttggaattccagaacaggagtacagctgtgtagtaaagatgccttctggtgaatttgcacgtatatgccgagatctcagccatattggagatgctgttgtaatttcctgtgcaaaagacggagtgaaattttctgcaagtggagaacttggaaatggaaacattaaattgtcacagacaagtaatgtcgataaagaggaggaagctgttaccatagagatgaatgaaccagttcaactaacttttgcactgaggtacctgaacttctttacaaaagccactccactctcttcaacggtgacactcagtatgtctgcagatgtaccccttgttgtagagtataaaattgcggatatgggacacttaaaatactacttggctcccaagatcgaggatgaagaaggatcttaggcattcttaaaattcaagaaaataaaactaagctctttgagaactgcttctaagatgccagcatatactgaagtcttttctgtcaccaaatttgtacctctaagtacatatgtagatattgttttctgtaaataacctatttttttctctattctctgcaatttgtttaaagaataaagtccaaagtcagatctggtctagttaacctagaagtatttttgtctcttagaaatacttgtgatttttataatacaaaagggtcttgactctaaatgcagttttaagaattgtttttgaatttaaataaagttacttgaatttcacaaggggccgcggggggggcgaagggacgtccggggcgcgaacgccggagacgtgtttcgcgccaacaagcggaccaagagggga

SEQ ID NO: 170479 - DNA, 788 bp, Homo Sapiens
  misc_feature (643)..(643): n is a, c, g, or t
ggggcattaaacggttgcaggcgtagcagagtggtcgttgtctttctaggtctcagccggtcgtcgcgacgttcgcccgctcgctctgaggctcctgaagccgaaaccagctagactttcctccttcccgcctgcctgtagcggcgttgttgccactccgccaccatgttcgaggcgcgcctggtccagggctccatcctcaagaaggtgttggaggcactcaaggacctcatcaacgaggcctgctgggatattagctccagcggtgtaaacctgcagagcatggactcgtcccacgtctctttggtgcagctcaccctgcggtctgagggcttcgacacctaccgctgcgaccgcaacctggccatgggcgtgaacctcaccagtatgtccaaaatactaaaatgcgccggcaatgaagatatcattacactaagggccgaagataacgcggataccttggcgctagtatttgaagcaccaaaccaggagaaagtttcagactatgaaatgaagttgatggatttagatgttgaacaacttggaattccagaacaggagtacagctgtgtagtaaagatgcctttctgggtgaatttgcacgttatatggccgagatctcagccatatttggagatgctgnttggaaatttccctgtgcaaaagaacggagtgaaaattttctgcaagtgggaggaacttggaaaatggaaaaccattaaaatttggccccagaaccaagtaaatggtccgattaaaaaaggggagggaagcctggtttacccatt

SEQ ID NO: 170480 - DNA, 508 bp, Homo Sapiens
acggaactttatccaggcaaacatgggatgtcaagagtggcctgtggtactggagacaaggaatatcaagtaattgacatgttacttgtctgtcagattttaagaatactgttatttaggcatattcaaagaaacaactgcctgttttaatagggataagtatataacgaaaacatttaatatccatacccccctcaaaaagccctttattcccaagtagcaactagtgtaaattaattttcaattcctttctacccttcctttgctagaaatacttatgcataactaaaacactcaagtcactgaagggaacaaatccttttactgtcacttgaatctaaaaacactcattttgtaatttgggcgaagtagctctcaaatataatgcatttttttctatcctatatatatacttgggtaaaatcggaaggtgagtgcttaggcagaaataagtaactattaaaccagtgggagcaaagttccgttgaagccgtcgggtaccgagctc

SEQ ID NO: 170481 - DNA, 645 bp, Homo Sapiens
ccgacggcttcaacggaactttgattacagatacttttccacgcaacatttcagaaatgaaagctttgattctcccctgttagtgcataaaggctgggaaggtggtttggccagaccgtacatctttttgtatatacatatctacacctgtgtctcttctttattaataaaaggtgtcttgatcacagtcccaaaccaactctgcattggattccagcatataaaactcagagagtaaaacaatttcaaaggaagacaggctgcaaccacaggaaaatggcaggaaaagttgtagcttgatagtagtttcttctaagtttaactcagaaatataataataattaagagaaaaaaataagaggccctagctttcatccctgctaccaaacacgctcgtccagaactctaggctgtcttaaagtgcaattactgttgtgaagttgctcaggccagggatcaggctggacggagttcaaagcagaaacttcaaacactccttgctgttcatgactcaggggctgggagggagggagaggagaaaaagaaggacagttctctggcattcaagtgcatcaaaagaataaatgtcttttcttttggtaaagcaaatctgtcaatagtaaggaatcctggtttggaaaaatc

SEQ ID NO: 170482 - DNA, 768 bp, Homo Sapiens
  misc_feature (325)..(352): n is a, c, g, or t
  misc_feature (454)..(454): n is a, c, g, or t
  misc_feature (572)..(580): n is a, c, g, or t
  misc_feature (596)..(596): n is a, c, g, or t
  misc_feature (691)..(691): n is a, c, g, or t
  misc_feature (703)..(703): n is a, c, g, or t
  misc_feature (714)..(714): n is a, c, g, or t
  misc_feature (734)..(734): n is a, c, g, or t
  misc_feature (741)..(741): n is a, c, g, or t
  misc_feature (754)..(754): n is a, c, g, or t
ggaagtgagtcagagcccattttcaggaggcattggtgatgttcggctcacatattgtttgcagacacacaagaaatctggcttggccaggattggcactagctatgaagggctgagcgagtcacattaaggaacttcacggaactttatagcactccgacattttctgagcaagaggaagtcaaaatttatttaacacctaagcctttttgtagactcttttctatatattgcttaggctcaccatagcgaattctccagtgttaaaacttttctgttttcacatttgaactttatgggttttggggattttcttgtagttctnnnnnnnnnnnnnnnnnnnnnnnnnnnntgcaaaattttgactgtcagctacatgttggtaagacacaggcaaagtattactgtaactaagttatttttaaagttaaaatatatttttacgtgcctttgntttttattgcagagtctacattttatagattctacatcagatgttgtcacttatttccattgggattccattgtaagctgtgtatgtgcgtgtttggaaaagtgtattcatacttagnnnnnnnnncttcatctgttatcanacttttaacagcaaccaataacggattgtaaagtgtaaaggcacaggttactcatgatgcttctgcagagactgtggggctacaccacatatgtntatttgggaaanataggtatttntagtgccagtaccatgcctngccattncataggggtactncaggcaaccacaat

SEQ ID NO: 170483 - DNA, 762 bp, Homo Sapiens
  misc_feature (347)..(355): n is a, c, g, or t
  misc_feature (576)..(604): n is a, c, g, or t
caaccccataaggaaagtaatcaaaaatgagagtagatggaaattcatctccttacctaaagggctcatgtacatttcagagaaagcaatttctcttagctatacttattctcttatggtccttgtttattactataaacaagcaagttcactttatcatttactttttattgtgtggcttgaagtacctatgtaatgcaagtatgtactgtactaaaatacctatatttccaaataacatatgtggtgtagcccacagtctctgcagaagcatcatgagtaacctgtgcctttacactttacaatccgttattggttgctgttaaaagtatgataacagatgaagnnnnnnnnnctaagtatgaatacacttttccaaacacgcacatacacagcttacaatggaatcccaatggaaataagtgacaacatctgatgtagaatctataaaatgtagactctgcaataaaaagccaaaggcacgtaaaaatatattttaactttaaaaataacttagttacagtaatactttgcctgtgtcttaccaacatgtagctgacagtcaaaattttgcannnnnnnnnnnnnnnnnnnnnnnnnnnnngaactacaagaaaatccccaaaacccataaagttcaaatgtgaaaacagaaaagttttaacactggagaattcgctatggtgagcctaagcaatatatagaaaagagtctacaaaaaggcttaggtgttaaataaattttgacttcctcttgctcacc

SEQ ID NO: 170484 - DNA, 645 bp, Homo Sapiens
cagcgcccgggtcaccggcacgtcgcggacatggtgatttcagaaagtatggatatactcttcagaataagaggaggccttgatttggcttttcagctagctactcctaatgaaatttttctcaagaaggcactgaaacatgtgttgagtgacctgtcaactaagctgtcttcaaacgcccttgtgttcagaatttgccacagttcagtgtatatatggcctagcagtgacataaacaccattcctggagaactgactgatgcttctgcttgtaagaacatactgcgctttattcaatttgagccagaagaagatataaaaagaaaattcatgagaaagaaggacaaaaagttatcagacatgcatcaaatagtaaatatagatcttatgctggaaatgtcaacctccctggcagctgtaacgcccatcattgaaagggaaagcggaggacaccattatgttaatatgactttacctgtcgatgcagttatatctgttgctccagaagaaacatggggaaaagttcgtaaactcctggttgatgcaattcataatcaactaactgacatggaaaaatgtattttgaaatatatgaaaggaacatctattgtggtccctgaaccactgcactttttattaccaggg

SEQ ID NO: 170485 - DNA, 571 bp, Homo Sapiens
  misc_feature (452)..(452): n is a, c, g, or t
  misc_feature (503)..(503): n is a, c, g, or t
caagagttaaaatatctaatcccaaataaacttgtgtagcaaggaagctacaggcatagcagagcagagtatctatactcttccattaactcctctgaaaatacaaaagacaggacacctggaacctcccagaatgaactaggtactgtcttgggggagtttgggggctttccatgcccacgacaaaatgtaacatctggatcaggagacaggaaaccaaataacaggttctcctctcagccccaaatgagttataactgtaagcccgtgcatacaactttagagtttgctcagcagaactgcccctagcagttggcactcatacatagaaattactttatagagattttggctaaggcctgacggtgttcagagctcctgattgaggttgcgtaaacccaccgagtgtccaagaagcacaacagaaccagggccttcacattattcttacngggtacccgaagcttcgaaattccgtaaattcaatgggtcattaagctggntttccttggggtggaaaattgggttattcccgctttaccaaatttccaccaccaaacaattaccgaaa

SEQ ID NO: 170486 - DNA, 704 bp, Homo Sapiens
  misc_feature (672)..(672): n is a, c, g, or t
gtaaatagagtaagtaggtaacatttataggagctgaaatacattgcattttaatttacttcttagccagggtgttaggtgaactgaagaggacaggtcaccattcttgggaggtttggtttgcacgcagtagctgatacgagaatggaaggtgtcaaatgaaataaagcagcagcatgaagtcgttatcagctagctgagaatcctggattccttacagacattctacatacctcctttgcctgtgtctgcagaacattataacaaaatcatctgatttgaatcttttaattagtagtcatcttatatagttgtgttctttgtgggatccagtgatttttaagcagttcttaaaggtatacagctgttttatgcaacaagtgtatatatgtgtgggagtggagaaatgacatttattgttggtttagaacttccttgggcatcgtgttttgtttctgaggattctgctgcaaccctaccaaactccagttcatctccaatatttcctatcttccactgtgggatgaactcaggtcagtgtgtctgtgtctctggtttatgccctcttcccctttctttcaaaagcaaagtggttattgattccatggggctcttcagggtctggtctgtgggcttgatgaactggctgctgttagaagaggcttgagggancctctgtttgtatttccttagggaaaaagttc

SEQ ID NO: 170487 - DNA, 316 bp, Homo Sapiens
  misc_feature (191)..(242): n is a, c, g, or t
ccggcttcaacggaactttaccgaggtcatgtacctaggaagtgatggaaccaattcttaaacctaggctttctgaccctcatccaatgttcaatttggtatattatgtctcactttttgtgagagtgaggtggtcacggagaataagcaaggaggctcacttaaaagttttaagaagtattattcaattnnnnnnnnnnnnnnnnnnnnnnnnnnnnnnnnnnnnnnnnnnnnnnnnnnnncatactttaatattatttctaagcatgttgaagagttgaagaatatcctattgaaaaagttccgttgaagccgt

SEQ ID NO: 170488 - DNA, 485 bp, Homo Sapiens
atctgaggcttctgtgggatggaaactatagcatgaaaatctgattacaaatatgtggggggcagtttactaatccattcaattagggcaactgcaccttctcagcatgccatgagcaattccattagatagctagttaccggaccagatgattacctaattacatgaatatatcagtgtcatttttcccaacacaggacttgaaggccagatttgagaactagtcctggggtagtagtacccagagacctgtttgggagactgggaaggtctgggccatcacgttcttgctgatagcccagagatcaggtcaaggacaggggcaatgagaagaaagaaacagagaccctgggaaggagctatcttggtctttaccggcaagaactaacttcaaagatgggacagaggttctataagttcaagaaagggagaaagttaacacttaaaaacataggctggattggataacgttccgttgaagccgt

SEQ ID NO: 170489 - DNA, 483 bp, Homo Sapiens
ggtacccgacggcttcaacggaactttaacttgcagtagtcagtgactacctgtgactggtaatctcacagtcaccaaattaagaggcaagaaggtaaaagaagagcttaattttcagtaggccagcaccaacctcccttcccttccagaaatcaatcattcctaccagcagtctccacaggcaaaacagagcacgtgagtgccccccaacaagctctgatgggacagcattcccagttctgaatccgtttttccagtcttactttctaagatgatggctactggaaatggtaaacactcctttcatgacatgcacatgtatttgaaattgtagattacagaagagccccctttttacccggtaagaggattcaaaaactggttctgttgcatcactcatgaccttttaaatgtttgggtttctcttgaagaagagaaaagcaatggtaatcatgttatacttatccttaccttaaagaaagt

SEQ ID NO: 170490 - DNA, 329 bp, Homo Sapiens
cggaacttcatgtaagtctgatgacgtcatgtgaacatccggctagtggaggtgtatcgctcaactaaaagattgaaggatgctgaggcccactgccatgaggcagagaggaacatagctttgcgttcaagtttagaatggaattcgtgtgttgtacagacccttaaggaatatctggagtctttacagtgtttggagtctgataaaagtgactggcgagcaaccaatacagacttactgctggcctatgctaatcttatgcttcttacgctttccactagagatgtgcaggaaagtagagaattactgcaaagttccgttgaagccgt

SEQ ID NO: 170491 - DNA, 445 bp, Homo Sapiens
  misc_feature (247)..(247): n is a, c, g, or t
  misc_feature (266)..(266): n is a, c, g, or t
  misc_feature (268)..(268): n is a, c, g, or t
  misc_feature (302)..(302): n is a, c, g, or t
  misc_feature (323)..(323): n is a, c, g, or t
  misc_feature (422)..(422): n is a, c, g, or t
acggcttcaacggaactttccacgattcccctcactctgctctggccatgctaacctgcttcctgcatcttgtatttgccaagaaatggtcatgcttcagggcctttgcacttggcgttgcctccccctggaatgtggttctcccagctctgtccatggttgttgttttctcctccctggggtttaggaaaagaccccttctcagagacggcactctcaaacaccagcccctctatcggcagcctgnctgaagtctttgaagcccngncactctcttgaaaggtctggcttaatcataaagngaatgaagggccctacttcanttggaatataccagaagcctggagagcaggaccttgctggctggtcatggttctctcttccagactgggacatgcaagggcccggtcttaaaataaaanatgctgggaggataactttgttg

SEQ ID NO: 170492 - DNA, 520 bp, Homo Sapiens
  misc_feature (222)..(265): n is a, c, g, or t
  misc_feature (403)..(403): n is a, c, g, or t
  misc_feature (424)..(424): n is a, c, g, or t
  misc_feature (454)..(454): n is a, c, g, or t
  misc_feature (458)..(458): n is a, c, g, or t
  misc_feature (470)..(470): n is a, c, g, or t
  misc_feature (475)..(475): n is a, c, g, or t
  misc_feature (485)..(485): n is a, c, g, or t
  misc_feature (508)..(508): n is a, c, g, or t
cgggcactccaatcagataaagctaagttaagagtgtgactgaaagaggtctggaaaagacggtcaattgatgcaaaaaatccaaaaggcgggggcgttcactggtcttcaatcctgcttaagggattcatctatgagccaggcatgactgggcccaggctgcacctggctgcacgtggggagcgtaatggctgggcctgactttagttccagcttaattgnnnnnnnnnnnnnnnnnnnnnnnnnnnnnnnnnnnnnnnnnnnncagtcacaggaacattccccgggcacatgactttcagtgagctctcaacaagagggatgtggacacgagcggaaggagttacctcgaattacagggctatttcccacatatgagctagccaagggagcagcttgcgtnctcagagggttcctgttgggncgcacaacacttctgtcctccgagggctgncagncttaccataggnctagncagagaatgnctcagaactcgtgaagcaacagncagaactaggct

SEQ ID NO: 170493 - DNA, 593 bp, Homo Sapiens
ggcaggtaagtggacgtgcacctgacgctgacctggactgcctcagtctagaagcaggccagagagcagaggcacgtggcatcccagggcgacctcagacggccagccggttagctagttctgctgttgcttcacgagttctgagcattctctgctagcctatggaagctgcagccctcggaggacagaagtgttgtgcgcccaacagaaccctctgagacgcaagctgctcccttggctagctcatatgtggaaatagccctgtaattcgaggtaactccttccgctcgtgtccacatccctcttgttgagagctcactgaaagtcatgtgcccggggaatgttcctgtgaatgttttttgtctttcctttcatcttaactttgcctgagctatactcatttaagctggaactaaagtcaggcccagacattacgctccccacgtgcagacaggtgcagcctgggcccggtcatgcctggatcatagatgaaatcccttcagcaggattgacgaccagtgaacgcccccgcctattggatttcttgctcaattgaccgtcttatccagacctctataagtcacaatctgaac

SEQ ID NO: 170494 - DNA, 378 bp, Homo Sapiens
aaagaaaaaaggtcaactgaatccttatgcttaaggtatacaaactcaggagagtttcttgtatagtaactctagtttcttgaatgcttatttctttgtcttccccaccacaactaagatgacctccgagaagtacccaggcgcccctggggttctctgctgggcttacagtctgattgtgcaggtaaagatcgtgtcctctcaccggactgcatcctcctgcctttgcgtctccagtgtctgagaagcacggtgtgtgcattcctaggtgttcagggaccgtccagtgaatggcgtcagccagctgcccactgatgggatgggccaacgacgtggcagtttgcacttgagtgtcggtacttctcacccttgaccgcc

SEQ ID NO: 170495 - DNA, 421 bp, Homo Sapiens
ttcgattggcgggcaacttatgttccaacctgcagcacagctgctaggaccttggttcgtttcctgtcttacttagaaatgaaagtagaggaacaacgacttttgaaacaatgaacaggcaattaagaagcaagggcagatttcagttttcaatgggttcactgattccctaaacagaagtggagtgactcatcgttttccatgcctcacgcaagaagcgggggagacgagcacaaagggagttaaaggtggtctggtttctgtttgttgtttaagttacctctgcatcatatctgactgcagcagagaatagcgaaaaggcaattctccacagtaattcctctcttgataatgtgctgacaaagttttttcagtctgttttcacagtaagttgcccgccaatcgaaggtaccgagctcga

SEQ ID NO: 170496 - DNA, 608 bp, Homo Sapiens
caaggaaagaggaagtaacttgtggaatgctgagaaaggtcagaccttcaaataaggaagaggaacgggctatgacctaatgcttgcttggactagtaatagcatgccagggcagatatttaggctatagtgtgggagctaagaacataaagtacattgatttctttattacagctagcagacatctaagaatattagcacaggtctttgaataaattttgctgctaagagaagttactatttattcctaattagatggggaggaaaatctctttgaagaggagcctctacttcactatttgcagtaagaatcatgaaagtttaatttttgtaccaacatccatgttctctatcacctgcataagctaagagaggtggacattccactgcaaactaatagcagaaataaaaactccctctctccacagcttctagttataaggctgtcttctcaagaggggcagtatgtcaacatttctcatccaataagtgagggactctctttttttctctcagaacccactcatagaacagaagaaagcccttcacctctcggcctcatatacacagatcatagtctagcgacagcatgcaagagtaccgagctc

SEQ ID NO: 170497 - DNA, 738 bp, Homo Sapiens
acaagatggcagcagcgtgtcggagcgtgaagggcctggtggcggtaataaccggaggagcctcgggcctgggcctggccacggcggagcgacttgtggggcagggagcctctgctgtgcttctggaccagcccaactcgggtggggaggcccaagccaagaagttaggaaacaactgcgttttcgccccagccgacgtgacctctgagaaggatgtgcaaacagctctggctctagcaaaaggaaagtttggccgtgtggatgtagctgtcaactgtgcaggcatcgcggtggctagcaagacgtacaacttaaagaagggccagacccataccttggaagacttccagcgagttcttgatgtgaatctcatgggcaccttcaatgtgatccgcctggtggctggtgagatgggccagaatgaaccagaccagggaggccaacgtggggtcatcatcaacactgccagcgtggctgccttcgagggtcaggtctgtttggcaccccactgctgaccagcctcccacagacagtgcgcaactttcttggccagcccaactgccccttcccctacccccactgggcgcaccctggctgagctatgctccacctccgtaccaggcccatcgatccgacaaacccaattcccttccaatgaggagaaggtccactccggccctggcattgggcggcccctttccgcaatgcgaaccactttgaaaggggaaacaacggcag

SEQ ID NO: 170498 - DNA, 920 bp, Homo Sapiens
agggagcctcggggcctggggcctggccacggcggagcgactgtgggggcagggagcctctgctgttgcttctggaccctgcccaactgcgggtggggaggcccaagccaagaagttagggaaacaactgcgttttcgccccagccgacgtgacctctgagaaggatgtgcaaacagctctggctctagcaaaaggaaagtttggccgtgtggatgtagctgtcaactgtgcaggcatcgcggtggctagcaagacgtacaacttaaagaagggccagacccataccttggaagacttccagcgagttcttgatgtgaatctcatgggcaccttcaatgtgatccgcctggtggctggtgagatgggccagaatgaaccagaccagggaggccaacgtggggtcatcatcaacactgccagtgtggctgccttcgagggtcaggttggacaagctgcatactctgcttccaaggggggaatagtgggcatgacactgcccattgctcgggatctggctcccataggtatccgggtgatgaccattgccccaggtctgtttggcaccccactgctgaccagcctcccagagaaagtgtgcaacttcttggccagccaagtgcccttccctagccgactgggtgaccctgctgagtatgctcacctcgtacaggccatcatcgagaacccattcctcaatggagaggtcatccggctggatggggccattcgtatgcagccttgaagggagaaggcagagaaaacacacgctcctctgcccttcctttccctggggtactactctccagcttgggaggaagcccagtagccattttgtaactgcctaccagtcgccctctgtgcctaataaagtctctttttctcacaaaaacaccacagagccacaacagcaccacaaaag

SEQ ID NO: 170499 - DNA, 1033 bp, Homo Sapiens
gggatcccgtggagtggccggcgacaagatggcagcagcgtgtcggagcgtgaagggcctggtggcggtaataaccggaggagcctcgggcctgggcctggccacggcggagcgacttgtggggcagggagcctctgctgtgcttctggacctgcccaactcgggtggggaggcccaagccaagaagttaggaaacaactgcgttttcgccccagccgacgtgacctctgagaaggatgtgcaaacagctctggctctagcaaaaggaaagtttggccgtgtggatgtagctgtcaactgtgcaggcatcgcggtggctagcaagacgtacaacttaaagaagggccagacccataccttggaagacttccagcgagttcttgatgtgaatctcatgggcaccttcaatgtgatccgcctggtggctggtgagatgggccagaatgaaccagaccagggaggccaacgtggggtcatcatcaacactgccagtgtggctgccttcgagggtcaggttggacaagctgcatactctgcttccaaggggggaatagtgggcatgacactgcccattgctcgggatctggctcccataggtatccgggtgatgaccattgccccaggtctgtttggcaccccactgctgaccagcctcccagagaaagtgtgcaacttctttggccagccaagtgcccttccctagccgactgggtgaccctgctgagtatgctcacctcgtacaggccatcatcgagaaccattcctcaatgggagagggcatcccggctggatggggccattcctatgccagccttgaagggagaaggcgagaaaacacaggtccttctggccctttcctttccctgggggtactaactctccagcttgggcaggaagcccaggaggcaatttgtgaactgggcgtaccaagtagcctctgtggcctaaaaaaggtcgttgcttccaaagagagaacacaaggggggcgccgcataaaaataacacacggagggggacagagagagacgaacac

SEQ ID NO: 170500 - DNA, 1635 bp, Homo Sapiens
  misc_feature (655)..(663): n is a, c, g, or t
  misc_feature (1034)..(1034): n is a, c, g, or t
  misc_feature (1219)..(1219): n is a, c, g, or t
  misc_feature (1299)..(1307): n is a, c, g, or t
gagctcggtaccctgagagaccgtgttgcaaggcaagcgggtcttgctggctaaaatgccaggtaaaggcttggttggacacagcgcttagtgcacgctgtcatcatggacatcataatcagttgtgaaaaacacgcgaacctatgacacttcttattccacactgaatgtgaaattgcatgttcagatgtttactacgaggcctggctcacaggaagtgttcagtaaaagtatgcactgttagattactgataacgcggatagatttttgtttaccataaattgttccagatttatattaatggaaggaagtgtgcatttattagctattactcaactttacaatgcaaacatcttatttctcatcttgaaacatgtcgaccagtttaattgaaaagtattctgagactgcaaaatggggtgttaaaaaatactgcagttacggagctgtgtaaaccagtttctcattgcataagatacagatgtaaattgcatggagaggttgatatgggcctggacaggaattcactcccccatttcacatctttgtcagagaatagttcttgctcataccgagcgttctaaattcgaaggtatatatacgcattagaatatgtccggaggcagagcgtggccgagaacgcaagacgttgcnnnnnnnnnatcggggccgtgtggagaggtcttttaagcaccattgtggtttgggagcgcgggtttccccgtgaggtaacggtgatacgatgggggcaatgcggctggtttttcgcgaaggggatcgtcgccggagggcatttgaaattgaaggtgaggggagggagattgtcctcccgccgcccaggatccgaagaagacgagttctgcggggcggggagaaataagcatgatgagtaagtgcgccgtctcgcggggcaacggcagaggaggtgccgcagatacagcgtgtgtgcagcgtgtgtgttctgtggcgagacgcgggtccatacatcggtccttcaacacgcggcccgatgatcccagggtccccgttttantaaacgcacctggcccgccgacgcgccggggttttgtcgtcactcataacgaccccccgcggcgcgagatgatcatcattggcgccgctgcccgggtttttgtagatggcgcggatatgtccgcccgtgggggggcgagaaggagctggggaggccccatgagggtgctctcgtttactctcagnctgacggcaagggcgttcgagactcatgtcccttggcgtccccgctaacgtgattagggctgatctcggttgttgtagcnnnnnnnnntgatgtgagggatgggtgacgacgcaacccgccttttgggattaacgcgctaggcccgtgctggatgtacgggaaaggtgcgggtgcggtggaggggtggaaagcgacgggcgcccatcggtgtattatcgaactggataccgagaagacgcggactagattcacgagggtgctagcagcatcgtgcgatgcgcggcaggtagcgatgatgcgtacgagtacttcatgaatcttgtcggcgcaaattaagatggtgacgcagacgcggagataggtgtgtgtgatctcgttcgtaactataaccagcgcgcggtgtttctgtgacggg

SEQ ID NO: 170501 - DNA, 1453 bp, Homo Sapiens
cggacgcgtgggcggacgcgtgggtcgacccacgcgtccgggaaaccaagccgggcgcctcttgcaatggagacggtcatttcttcagatagctccccagctgtggaaaatgagcatcctcaagagaccccagaatccaacaatagcgtgtatacttccttcatgaagtctcatcgctgctatgacctgattcccacaagctccaaattggttgtatttgatacgtccctgcaggtgaagaaagctttttttgctttggtgactaacggtgtacgagctgcccctttatgggatagtaagaagcaaagttttgtgggcatgctgaccatcactgatttcatcaatatcctgcaccgctactataaatcagccttggtacagatctatgagctagaagaacacaagatagaaacttggagagaggtgtatctccaggactcctttaaaccgcttgtctgcatttctcctaatgccagcttgtttgatgctgtctcttcattaattcggaacaagatccacaggctgccagttattgacccagaatcaggcaatactttgtacatcctcacccacaagcgcattctgaagttcctcaaattgtttatcactgagttccccaagccagagttcatgtccaagtctctggaagagctacagattggcacctatgccaatattgctatggttcgcactaccacccccgtctatgtggctctggggatttttgtacagcatcgagtctcagccctgccagtggtggatgagaaggggcgtgtggtggacatctactccaagtttgatgttatcaatctggcagcagaaaagacctacaacaacctagatgtatctgtgactaaagccttgcaacatcgatcacattactttgagggtgttctcaagtgctacctgcatgagactctggagaccatcatcaacaggctagtggaagcagagggttcaccgacttgtagtggtggatgaaaatgatgtggtcaagggaattgtatcactgtctgacatcctgcaggccctggtgctcacaggtggagagaagaagccctgagctgggggaaggggtcatgcagcaccaggggatatgcccaactcacttgcctgctggaagctctgtgggaatcagatgaaacttgaggggaattgtgactctgttccctgtttcagggtccccctgccctttctatctgggagctagggaaggtatggggggaggaaagcgcattggatttataagctaccccttaaccgtcacacattacacttggacaagaaagcttttcaaggcctaagccagtttctaaggcccctggtgcctctttaagattattattccccgcttttctggggtgaacctattaggcctctgtggccgtcctcaggaccaagttctggatctcttaggagatccccagaaacttcacttggcctctggcttcca

SEQ ID NO: 170502 - DNA, 697 bp, Homo Sapiens
gcaagacagtaaaaagagtgaagagaatgaaatagaacagtttactcaagctatctttatgtccaggaagaaaaaagattacatgctgctcgcagtaagtacgagctttccctgcaactctggctgcaggcgcgcaagccgttcaccactggagttcctaccacagcaggggattgagaaatgtctccaaacactgaaaagctccatgtcaggactggatgtgtggttgataacctttgttcagtaaaacaaatcatagtaggttttgagaaggaaaaaaagaatgctcacaactgaatcggtagagtgaaggtttatcagacaaagggacatgaggcaaacaaattttaattacagaaaccaccactgcaatgtcatgtagaaaggagaaacaagggactagcttcctggatggaccaaaaatacagtttatagactgtttcaatcctaaaactaagacaatttctagatttacctcagacatgagtagacgtctggaaaatggatggaattcaagttacagaataccatattttcatgagtgcttatgtaagaacagcaaatgataacatgtaaccgtaatttacacgaatacttggcattctggggctactttagttacttttgaatgatcaaagccctgcccaactaaaccacttgtgatttgtcagttattccattgcaacacggtctctca

SEQ ID NO: 170503 - DNA, 455 bp, Homo Sapiens
acctgccaggcttccccaagccagccccaggccctactcctctgttcctgcgggctcagagaagcccccaaaggctccagctataacccacctctgcctcccctgaagatatctacctccaatggcagtccagggtttgaataccaccagcctggggacaagttcgaagccagcaagaacgacctgggaggctgcaatgggacctcgtccatggccgtgatcaaagattactatgcactgaaggagaatgaaatctgtgtgagccaaggtgaggtggtccaggtcctcgccgtcaaccagcagaacatgtgtctggtgttaccagcctgccagcgaccatttcccccgccgccgagggctggggttcccagggcagcatccgggcgcccctcaccaaagccacagcaggcagaaattagttgacggggagcttcaataagtgcttctttggtttt

SEQ ID NO: 170504 - DNA, 818 bp, Homo Sapiens
ggaagtcagttgaaaatgctcgtgctgctaatggaattagagtgcgttcattttacaggctagtattttaaaaatagaaatcaaaatctggcaccgaagcatgctaattgtttactgtaccttgtgaggttttcactcataaatttaaaccagtgtatttttttagaactggtttgtgtatatatatagtgattatggatactaattcaatgtaatttataattttctatgtcaaatacaaaaatacatcacagcctactcaaacagctcaagcaatatattgtatattgccatatcgtctggtgaaagggttaaattacttcacctcttgcactttaagatgcaaatcagtatttcatttctgtaatagaaaattattcacgtatttttacatcatttgtttaacctgaccagtatttaaaaccaaaaggatattctgaaaaatggccaacaatttttttagaagtagcatcccaagcagcgtgcctaaacattacattgcatatggaaataaaagaatcaaacgtctaatgccttattatttctgatttcctttttcattttaagtggtgtggagattccagcactcccagggacagtgggagtcagcagtaagccctggggacaggtgggcaagggtggggtcccttgacctttgcacgcctcctcagggaaacccctttccccggtgaggcccctctctggaagagactgtccctgggggcctcctctgggaagccaggcacccccagagggacagggctccctcctgcctgccctcagggctgccctaacttgaaagggcgttggaacctcgg

SEQ ID NO: 170505 - DNA, 2383 bp, Homo Sapiens
  misc_feature (1771)..(1791): n is a, c, g, or t
  misc_feature (1817)..(1824): n is a, c, g, or t
  misc_feature (1827)..(1927): n is a, c, g, or t
  misc_feature (1929)..(1930): n is a, c, g, or t
  misc_feature (1942)..(1954): n is a, c, g, or t
  misc_feature (2073)..(2096): n is a, c, g, or t
  misc_feature (2223)..(2232): n is a, c, g, or t
gctcggtacccttggaggagttcagggaagggatagaggaagaggatcaagaggaagataagaacattgttgttgatgacatcacagaacagaaaccagagcctcaggatgatgggaaaagtacggagtcagacgtaaaggccgatggagacagcaaaggcagcgaagaggtggattctcattgcaaaaaggccctgagtcataaagagctatatgaaagagcccgagaactgctggtatcatacgaagaggagcagtttacggtgctggagaaatttaggtatttacctaaggccattaaggcgtggaataacccgtccccacgtgtagaatgtgtcctggcagagctcaagggcgttacatgcgagaacagggaggctgtgctggatgcttttctggatgatggcttccttgtccccacatttgaacagttggcagctttgcagatagaatatgaagatggtcagactgaggtccagagaggggaaggtactgacccaaagtcacacaaaaacgtggacttgaatgacgtcctggtgccaaagccgttctctcagttctggcagcccctgctcaggggcctgcactcccagaacttcacgcaggccctatggagaggatgctctctgaactgccagccttggggatcagcgggatccggcctacctacatcctcagatggaccgttgaactgatcgtggccaacaccaagactggacggaatgctcgccgattttctgcaggccagtgggaagcaagaaggggctggaggctgttcaactgctccgcctcccttgactggccccggatggttgagtcctgcttgggctcaccttgctgggccagcccccaactccttcggatcatcttcaaagccatggggcagggcctgccagacgaggagcaggagaagctgctgcgcatctgttccatttatacccagagtggagaaaacagcctggtgcaggagggctctgaggcctcccccattgggaagtctccatatacactagacagcctgtattggagcgtcaagccagccagctccagcttcgggtctgaagcaaaggcccagcaacaggaggagcagggcagtgttaatgatgtcaaggaagaggagaaggaggagaaagacgtcttgccagaccaggtagaggagggaggaagaaaatgatgaccaagaggaggaagaggaggatgaagatgatgaagatgatgaagaggaagacagaatggaggtggggcctttctctacagggcaagagtcccccactgccgagaatgctaggcttctggcccagaaaagaggagctttgcagggctctgcatggcaggttagctcagaagacgtgcgatgggacacatttcccctaggccgaatgccaggtcagaccgaggacccagcagagctcatgctggagaattatgacaccatgtatcttttggaccagcctgtgctagagcagcggctggaaccctcaacatgcaagactgacaccttgggcctgagctgtggtgtcggcagtggcaactgcagcaacagcagcagcagcaacttcgagggccttctctggagccaggggcagctgcatgggctcaaaactggcctgcagctcttctgatggccatccctggtgcaagtgttcatccagccgtgccagggcaacagcccaccccctagtacaactgatgctccctgagacaacctgggagacagcctggatcagccacatcaactcagttgtccaccacaggggaattttgaatgtcnnnnnnnnnnnnnnnnnnnnnaaaaataataaacaggcaactgtaannnnnnnnaannnnnnnnnnnnnnnnnnnnnnnnnnnnnnnnnnnnnnnnnnnnnnnnnnnnnnnnnnnnnnnnnnnnnnnnnnnnnnnnnnnnnnnnnnnnnnnnnnnnnanncccttgcggcgnnnnnnnnnnnnntcaaaaaacttttcaaaaacctttcttttgggggcgcgggcccccaaaaggaaaaggaaacttggcccaaacctttttcccaaagaaaaaccggggacaaaaacaaggggttgggaatnnnnnnnnnnnnnnnnnnnnnnnngggggggaaacccagagggtttctaaaaacaaatcccaaaaggggggtttttggagggcccattatcgggggattttactcaccggggggcccccaggcgaggcctcccaataacaaaaattaacgnnnnnnnnnntgtggcactttaattgggaagaaagggggtggaaaatccaatataaaaccttccccggcccgaaaaggggaaacccctcccccaaacgggggtgtagaggaaccctgaaatcccgccagggggaattcccacccccttggccccctcgggg

SEQ ID NO: 170506 - DNA, 791 bp, Homo Sapiens
aactttgttaagcacctgtcacatcctccatcatttacaactgtcagagtgaatacacatttagcctcagtacaacatgtgaaaaatctgttacttgatgaacttcagaagcagtttaatggattaagtgttcctattcttcaacatccagaccttcaagatgtgttacttattcctgttattggacccagaaagaatattaaaaaacaacagtgtgaagccattgttggagcccagtgtggcaatgcagttttaagaggagcccatgtctatgccccaggaattgtgtcagcatcacaatttatgaaagctggagatgttatttctgtatactctgatattaaaggaaaatgtaagaaaggagccaaagaatttgatggaacaaaagtatttcttggaaatgggatttctgaactaagccgcaaagaaatcttcagtggattacctgaactgaaaggcatgggcataagaatgacagaaccagtatatctcagcccttcatttgacagtgtactgccccgttacttatttttacaaaatttgccatctgccttagtaagtcatgtactaaatcctcaacctggagagaagattctagacttgtgtgcagcacctggagggaaaacaacacacattgcagcactaatgcatgatcaggcggttcagctgctgaagccagagggtgtgcctggtttatagcacgtgcactataacactggccgaaaatgtagaacaggttgtcctgggcctgaccaaaatttccttgtcctttcagcttcagccccaggaac

SEQ ID NO: 170507 - DNA, 224 bp, Homo Sapiens
tgagagaccgtgttgcaatgacaagactgctggggacgattgggtccctggccaggtactcaggtctacagcctaacacacggtgagctgtttcccagccacccaactcttgggcatccctgcaggacctccacggggagtccttggctccctgaaggatggatcatcagaggagctgccaggctgccagagctggaagggacctcagggatcaccactgtgcc

SEQ ID NO: 170508 - DNA, 945 bp, Homo Sapiens
  misc_feature (49)..(49): n is a, c, g, or t
ggttgaggaaccacttggacaaaagaccgatgatggggggcccagcganggtcttgggccagcctgtgctggggtggtgattggtgtcagcgtccaaccactactagctgcagggatttggccagctcaaatatgcgctcgatctcactctgcacttccgcaaatgctggagcgggcagaggagcgctcaatgatggccctcttgcccggattgttgagcacagatcgctttgccagggagaggtcggctgtgactcgggtgatggagatcctgccatcaaatctgtgtttgaggaagtcgaagagagccttctgcatcatgtctgtgacctcataacctttcagagagggtcccaccagcaccacaggccgcatggagggcaccacgtcatatgggggaacatgttccgcctagagatggcggaggggagcgtcggttgccaatgtcactcaggctggaagggttcccagatctcctggccttctgctcctgtttgagccggatgctctccaggcgctgggggctggggatgaaggcgatgtccccgccctctttcactagccgcccgatccaccagtcattgctgtacttctctttaatgtgcagaaaatctttggcctcaaagttgactccagagccctggactgggcactcctcatccagtacgccacagtagctgacattggtcctcaccgcaaatgccacaggtttgtgcttggccctttcgagctgctgctgagcctggctctctacttcacgccgggcactctcccggtcctcctccagggagacgtctgagtccagagatgggcggctggtgtaggagtcggctgaaccctcgttcagcaggaaggttgcactggagtcagaaaaagacatagaccaggctagcggcctctccccctcccccgggccaggggctccgaggcgggagcaaaacccgg

SEQ ID NO: 170509 - DNA, 570 bp, Homo Sapiens
  misc_feature (49)..(49): n is a, c, g, or t
gctgggggctcagatgaggagcaggagaagggcagcagcagtgagaagnaggccagtgaagatgagcactcggcagcgagagtgaacggaggaaggtgacagggacgagcccagtgacaagagtggcagtggtgaggacgagagcagcgaggatgaggcccgggctgcccgtgacaaagaggagatctttggcagtgatgctgattctgaggacgatgccgactctgatgatgaggacagaggacaggcccaaggtggcagtgacaatgattcagacagcggcagcaatgggggtggccagcggagccggagccacagccgcagcgccagtcccttccccagtggcagcgagcactcggcccaggaggatggcagtgaagctgcagcttctgattccagtgaagctgatagtgacagtgactgagtcccagggcattcagggctggttcagacaccattattgtgagcagcaaagcacttttctagtggtctgtttgtgagcctttcacttgtttgttccccacccccaaacctttgctgtttcaaaccagggtaccgagctcgaattct

SEQ ID NO: 170510 - DNA, 591 bp, Homo Sapiens
cattacagcaaaccccgagtcacaccggtggaggtcatgcctgtcttcccagactttaagatgtggatcaatccatgtgctcaggtgatcttttgactcagacccagcccccaaggacacgagtggtgcagctgcgttggagatgatgtctcaggccatgattaggggcatgatggatgaggaagggaaccagtttgtggcctatttcctgcctgtagaagagacgttgaagaaacgaaagcgggaccaggaggaggagatggactatgcaccagatgatgtgtatgactacaaaattgctcgggagtacaactggaacgcgaagaacaaagctagcaagggttatgaggaaaactacttcttcatcttccgagagggtgacggggtttactacaatgagttggaaaccagggtccgccttagtaagcgccgggccaaggctggggttcagtcaggcaccaacgccctgcttgtggtcaaacatcgggacatgaatgagaaggaactggaagctcaggaggcacggaaggcccagctagaaaaccacgaaccggaggagaagaggaagttgctgtgacgggggatcctcta

SEQ ID NO: 170511 - DNA, 927 bp, Homo Sapiens
  misc_feature (742)..(742): n is a, c, g, or t
  misc_feature (792)..(792): n is a, c, g, or t
agacgttgaagaaacgaaagcgggaccaggaggaggagatggactatgcaccagatgatgtgtatgactacaaaattgctcgggagtacaactggaacgtgaagaacaaagctagcaagggctatgaggaaaactacttcttcatcttccgagagggtgacggggtttactacaatgagttggaaaccagggtccgccttagtaagcgccgggccaaggctggggttcaatcaggcaccaacgccctgcttgtggtcaaacatcgggacatgaatgagaaggaactggaagctcaggaggcacggaaggcccagctagaaaaccacgaaccggaggaggaagaggaagaggagatggagacagaagagaaagaagctgggggctcagatgaggagcaggagaagggcagcagcagtgagaaggagggcagtgaagatgagcactcgggcagcgagagtgaacgggaggaaggtgacagggacgaggccagtgacaagagtggcagtggtgaggacgagagcagcgaggatgaggcccgggctgcccgtgacaaagaggagatctttggcagtgatgctgattctgaggacgatgccgactctgatgatgaggacagaggacaggccccaggtggcagtgacaatgattcagacagcggcagcaatgggggtgggcagcggagccggagccacagccgcagcgccagtcccttccccagtggcagcgagcactcgggccaggnaggatggcagtggaagctgcagctttctgattccagttgaaactgaatantgacaagtgactgaattccccagggcattccaggggcctggggtcccacacccattttattgttgaggcaagcaaaggcaccttttcctaagggggccctggtttggggaaaccttttttccctgggtttggttt

SEQ ID NO: 170512 - DNA, 230 bp, Homo Sapiens
catttccacgagtcactctgatggtcagaaatccatcaaacagacgtttactaagtgcctacaaagcagggtgctacacgcagcggagacgggacctggttcaaatcccaattctgtttctttccagctgtgcgaccttgccattgtacttctccaaagctagtgtcttcaccgctctgcaaaatatggcaaagtcaacggtagctctcatcaccactgttgatactgtg

SEQ ID NO: 170513 - DNA, 1084 bp, Homo Sapiens
gggagactcacgccgattctctctcagcgtagggctgtgagggcgcagtccaccgccaggagccttccggtttctgcgcggtgcgcgacctcgtcccgaagcctggggatacaccctctcgagagcccgctgtcgccctccgttaaggtcgaacccctcacagttgctgtgggcaactccagcccaacattccctcgctctggttctcgccccattgggaaactcggccccacgcttcccacttttctggatgaggtgtcccctttctccccactaaaatgtcaaataacctacggagggtcttcctgaaacccgcagaggaaaattcaggcaacgcctcgcgttgatccataatgagatggcatcaacatcagataaaggtgcccaaggaagaaatgacaagaaagattctcaaggaagaagtaataaggcattacatctgaagagtgatgctgaatttaaaaagatatttggccttactaaggatttgagagtgtgccttacccgaattcctgaccatttgaactctggagaaggtttccattcctttagcagtttggtaaagagtggtacttacaaagagacagagtttatggtgaaggaagggagagagaaaacagccagaattttgataaggaaaagaaaagcaaaaactaataagaagatggatcacataaagaagagaaaaacagagaatgcttataacgcaatcataaatggggaagctaatgtcaccggttcccaactcctaagcagtattttaccaacttcagatgtgtcacaacataacattctcacgagtcacagcaaaacccgacaagaaaagagaactgagatggaatactatacccatgagaagcaagagaaaggcactttgaaatgcaaatgcagcttatgaacaaagtcatgtcttcaataaaaatcataccgaagataatccccagcgacaccaccggagttagaagaaaccattcgagatgaaaaaataagaagacttaagcaggtgctgagagcgaaagacgcagctactgaagaactgcgtccttagacgcaccaaaaataacatctcctgcaaacacatcag

SEQ ID NO: 170514 - DNA, 272 bp, Homo Sapiens
aggatccgtggacattccacgagtcactcactgtttccagtataaagccatggcatcaactcatggcctgaataataagcgaggaggaaaagagctaccccaatttttctttttgtttcaaatgttttctaatttacctaatatcccattctcatataatagggctgttgaaaggcttctctttggcttcactgttttcctctacttgaactttacaaaggagataaatgcttcagacatgaccttgattacaccgtgactcgtggaaatgt

SEQ ID NO: 170515 - DNA, 139 bp, Homo Sapiens
catttccacgagtcactgtgccccatagacacttcttatatttaaccaaatcatatggcagaatagaggccttatatccacttaccataccaactagaatacactcagactatacctgcttaggatcacatgcgcaatc

SEQ ID NO: 170516 - DNA, 389 bp, Homo Sapiens
cctctgacacccccaggctgtgtggccctggacacccgagcagactgaactgtctgcttcctggaccagatgcaagactgtctcctggcggaccaccccctctgacagaaggggaatgggctcctgcagcaagctcgggtcttgagccacgtcccagcaccacttcagctcccgagcattgggctgagccgcccctttccaagctcacttctgggactgagtttcctcaaccggaacacacccatgaagatggatgatcatcccctagcccttctcagcaggaacctcatgcgacctgtgaccaagatgtcccatcctcagcacagggcccactctgccaaccagtctcaagcaccagcccctcaacacgcttccgtgaacaggatcct

SEQ ID NO: 170517 - DNA, 834 bp, Homo Sapiens
  misc_feature (629)..(643): n is a, c, g, or t
ggggctcgggagatggacggccgccgtgttttgggccggttctggagtggctggcggccggggcctgggtgtccgccccagtgcccgagaacgcaggctttggcaccgaagcccggcatcagaggcaaccccgcggctcctgcctaacaggtcggggcccctcggggaccagcccttcgcggggctgctgccaaaaaaacctccactcgggaggagctggttgaagccctgcgggcagaccccggtggacccggaaaggacctctgagtgacagttgaacaagccacacgggtctaccagtgacaggaaaaccacgagagctgacgttgttctcagtgctgccagagctgagccagtccctagggttcagggagcaccgagctttcagttgtccgagcctctgggaaacaaagctctgggcttgtactcctctccagctgtccccagacagctagtcgcctccagaagtactttacccatgtatggagagcccataggcccacagccacctcctgtgttgtccctgatgggatcccccctgctttctgccgggaaagattccaggctgcccctgaaacctggaacacactcgatggggctcaaatctccccagtttcccattgtaaggnnnnnnnnnnnnnnnaggtaatttctgggcacaggtgtttttacaaacacctttctagtcccctcttccccgcggaaagccacgggcgctcctggcttgtccccgtgggctccaccttgcaaatcacccggcaacgatgcttccttccagctctatcttcccggtggtcacattgggtaacacccacgcttcctgccccgtggggc

SEQ ID NO: 170518 - DNA, 683 bp, Homo Sapiens
tcagacattatgtggccaattatcgcaaagcgtgcccgagagagatggatcgggctgtggctgagggaaagcgtgtgtgtgtgattgacgccgctgagttgcttgaagccggctggcagaacctggtccatgaggtgtggactgctgtcatcccagagactgaggctgtaagacgcattgtggagagggatggcctcagtgaagccgcggctcaaagccggctgcagagccagatgagcgggcagcagcttgtggaacagagccacgtggtgctcagcaccttgtgggagccgcatatcacccaacgccaggtggagaaagcctgggccctcttgcagaagcgcattcccaagactcatcaggccctcgactgaaaagttctcagtggggccagactggctcctggagctgacaagcgaccccgtggtgaggagaaatgggggccttgatgctcaccctggttcaggcccagaggtccaagctatactgtgcaggcacatggccaggcctggtggacacaggaagcctacccaacacgctggtatttggccaacactggaggatgtggttcatggggggagcagtcccctccccactcttgcccatgggtgactcttacccacagctgactagggccagcgcaaatactggaacctgtaacagaattaaaggtgaatgttcag

SEQ ID NO: 170519 - DNA, 1092 bp, Homo Sapiens
  misc_feature (109)..(136): n is a, c, g, or t
  misc_feature (369)..(369): n is a, c, g, or t
ttggcggtttccgcggcgtttccaccccacgctggtggcccatcctccgtccacccaccatgagttgtggcgcctctgggggccttccccccaccgtgcagccatcaannnnnnnnnnnnnnnnnnnnnnnnnnnngggtcgggtccgtcacgtcccagggcgcccgttttggcccccctcgagaccttttccgtcgagggccctgatgattcttggcaatgcgtttctccaagagggcccacgctttctccccctggcgtggggtgattatccggctcccccaagttgcgagccaccccgtggctctgctcccccaagctgctgcccgctcatctggctccgcagccggctttgacccgcggcttccncgaggccatccctctccacaatgcgtcttacagcctcagtctctgggatgacagcagtccacacctcatggaccaggttctgccagccggcttcaagcaacacagcggcatcaatcacacacacacgctttccctcagccacagcccgatccatctcctctcgggccagctttgcgataattggccacataatgtccgtgagtatcttcagctgcttcttattcccaaacacccggctgcctaagaccttcctggtgatgaagccatctttatggaggaatatctgttccaaaggcctccaccacaggctggtaggcagggccacctggggcataggcccgatgacccaggtggtcactgtcaatgacaaacgcccccaggcccttcagtcgctgagctattgagctcttcccagagccactgatgccagtcagcccaattacatagagacatgtggggagctctggcctttcatatggaggccgaagcaggttccccaacattcgctggcggaagctggaggagctgactttgtcctcttcattctctgtatgtctgaggtccttcagcagctggatctggtacaaagcaagttcctccaggtcattctcaaggcggaagcggttgatggccatccccccacgataggtctcctcgctgaccaccaggaactccagggaggggtcagagccagcgggcccataggggtccagcagggggacc

SEQ ID NO: 170520 - DNA, 843 bp, Homo Sapiens
tagaatcagctcggtaccttccaaagcggagatgctgacagacaaaggtctgagtgaggacgcgcggcccgaggagaggcccgtggaggacagccacggtgacgtgatccggcccctgcggaagcaggtggagctgctcttcaacacacgatacgccaaggccattggcatctcggagcccgtcaaggtgccgtactccaagtttctgatgcacccggaggagctgtttgtggtgggactgcctgaaggcatctccctccgcaggcccaactgcttcgggatcgccaagctccggaagattctggaggccagcaacagcatccagtttgtcatcaagagaaaattatgacgcgaggctctcacggatcgacatcgccaacacactaagggagcaggtccaggaccttttcaataagaaatacggggaagccttgggcatcaagtacccggtccaggtcccctacaagcggatcaagagtaaccccggctccgtgatcatcgaggggctgcccccaggaatcccgttccgaaagccctgtaccttcggctcccagaacctggagaggattcttgctgtggctgacaagatcaagttcacagtcaccaggcctttgccaaggactcatgcccaaagcctgatgaagatgacgccaacagactcggggagaaggtgatcctgcgggagcaggtgaaggaactcttcaacgagaaatacggtgaggccctgggcctgaaccggccggtgctggtcccttataaactaatccgggacagcccagacgccgtggaggtcacgggtctgcctgatgacatccccttccggaaccccaacacgaacacatc

SEQ ID NO: 170521 - DNA, 704 bp, Homo Sapiens
  misc_feature (103)..(134): n is a, c, g, or t
  misc_feature (680)..(680): n is a, c, g, or t
gcaggattgctggctgataagcttctctctgggcagggatggacaaccatttggaggagctgagcctgccggtgcctacatcagacaggaccacatctaggannnnnnnnnnnnnnnnnnnnnnnnnnnnnnnnaacctgcatagcccaaatccaagtgatgatggagcagatacgcccttggcacagtcggatgaagaggaggaaaggggtgatggaggggcagagcctggagcctgcagctagcagtgggcccctgcctacagactgaccacgctggctattccccacatgagaccacaggcccagccagagcctgtcgggagaagaccagactctttacttgcagtaggcaccagaggtgggaaggatggtgggattgtgtaccctttctaagaattaaccctctcctgctttactgcctaattttttcctgctgcaaccctcccaccagttttgggcttactcctgagatatgattggcaaatgaggagagagaagatgaggttggacaagatgccactgcttttcttagcactcttccctcccctaaaccatcccgtagtcttctaatacagtctctcagacaagtgtctctagatggatgtgaactccttaactcatcaagtaaggtggtactcaagccatgctgcctccttacatcctttttggaacagagcncggtataaataataaactaataaa

SEQ ID NO: 170522 - DNA, 480 bp, Homo Sapiens
cgatcttagtcaggaagcgtgtctcggaatgctatgattgggtctatactgtgaacctcagaagtgttcctctgtataattaattttccaccttgggcggaacatgattagaatgggctgcagtggaaggggataattcccttcccctaggttatttagtctccgattatactagagcagattcaggctgaagttaagtagtttctcctgtggacaagccttgtaaagaaatgggtgctctgacatatttcaaaatggttttcctttttccttccgaaaggttgaagcaggaggggagtttggtcaggtgtttgtcacaggcagcctggtgaagctccatgagacaattttacagtattgtgccccctccccgacaataactctatctctttgtagttttaaacacttagagttgtccacgcggatcctccagccgttcaccagttacggtttgagtttttctactccaacagggcttcc

SEQ ID NO: 170523 - DNA, 427 bp, Homo Sapiens
gcgttgacctcgaagcccacacactctgctatagtttgcgtgcttttgtggacacccctcatgaacaggctggcgctctaggacgctctgtgttcactgatgatgaagaaacctagaactccaagcctgtttgtaaacacactaaacacagtggcctagatagaaacctgtatcgtagtttaaaatctgcctcgcgggatgttactaaactcgctaatagtttaaaggttacttacaatagagcaagttggacaattttgtggtgttggggaaatgttagggcaaggcctagaggttcattttgaatcttggtttgtgactttagggtagttagaaactttctacttaatgtacctttaaaatagtccattttctatgttttgtataatctgaaactgtacatggaaaataaagtttaaaaccagaa

SEQ ID NO: 170524 - DNA, 590 bp, Homo Sapiens
  misc_feature (442)..(442): n is a, c, g, or t
  misc_feature (469)..(469): n is a, c, g, or t
ccgcgccctccgtccgcctccaatcccgctttagcgcttctggacagatggacgcaggcactgtccagccccacagtgcgctcgttccggtccccacagactgccccagccaacgagattgctggaaaccaagtcaggccaggtgggcggacaaataggaccaggtgcagcactggggggaacggatgctccgaggactggactgtttcttttcacacatcgtacccgcagcggtgggaaggaaaggcagacgtaaatgatgtgttggtttacagggtatatttttgaaaccttcaatgaattaattcagatgttttacgcaaggaaggacttacccagtattactgctgctgtgcttttgaactctgcttaccgttcaaaaggcgtgtgcaggccgaaagtcggtgaccccatcactcgcaggaccaagggggcggggaantgctggctcaagccccgctgtggcctnccctccctcaactccttgggcagaatgaattcgatgcgtattctgtggccgccatctgcgcagggtggtggtattctgtcatttacacacgtcgttctaattaaaaagcgaattatactcc

SEQ ID NO: 170525 - DNA, 555 bp, Homo Sapiens
ggggcatgcgcagagggccgatccagttcttttcggctggaatggggaatttgtgaggtaggccggaagtggtgttgcggagggaagtgtggggagagcagaggcgcagctctgctggagagacctgaggcttgcagcgctgggcccggccgggtcgctgcggctgggctggaggtcaaggatgcattccaggaaagttctataaaaatataccatcaactccaacctgatatttgacctagccatggaaaacctcattggctcctcactggatcagaccataaaaatgatccaggaatgaaaatctaagataaattcccaccacttcaagatgttcttatacaagtcaacagtctagcagatcagccagtctctttcatcatcaagcagacatactcaaggtaccaacacagcaaaggcaccaaaatgtctctatatcagtatttttcatggtatatgtgagacccattagtgaggcatgaaaatcaattctgggagtcacaatgaacatttgtctagggacccatgaccccgccgcgaaaatatccctggggg

SEQ ID NO: 170526 - DNA, 824 bp, Homo Sapiens
acctcactggatgccaccatgcgcatctgggcctctgaggatgggcgctgcatccgagagatcccggaccccgatagccctgaagctgctctgcggcacctgtccaagccttgtcaacaacaacctcactgtggtggggaacgccaagcacaacgtgcatgtcatgaacatctccacaagcaagaaagtgaaggggggctccagcaagcggacaggccgtgtccttgctctgtcctttgatgcccctggccggctgatatgggcgggtgatgaccgtggcagtgtcttctctttcctctttgatatggccacagggaagctgaccaaagccaagcgtttggtggtgcatgaggggagccctgtgaccagcatctcagcccggtcctgggtcaaccgcgaggcccgggatccctcactgctcatcaatgcttgcctcaacaagttgctgctctacagggtggtagacaacgaggggaccctgcagctgaagagaagcttccccatcgagcagagctcacatcctgtgcgcagcatcttctgtcccctcatgtccttccgccagggggcctgcgtggtgacgggcagtgaggacatgtgcgtgcacttctttgatgtggagcgggcggcaaggctgctgtcaaacaagctgcagggccacagtgcacctgtgcttgatgtcagcttcaactgcgacgagagcctactggcctccagtgacgccagcgggcatggtcatcgtctggaggcgggagcagaaagtagggtcctgtcggccctgctgctgtcttcattccaccctcttactcagctcgtgttgtaattag

SEQ ID NO: 170527 - DNA, 1586 bp, Homo Sapiens
gggctttgatgacagtttttaattgtgcctttagtcaacttagttcattaaaaatgttttaaagatcctataaataaagtgaccactcacatgggatataggtcacccctcagcatgttattttttttcttaaaaagcagtatttcttacaggaatcttactgatcacacggtagttacaataatgtcagatatgatgtatacagtctaaacgagacagtccagttaagaatatacataatgtaaaaatacacatattaaaagttagccaagtggacagacgcatgcgcggggtccggggagcaggtgacagaaactcctttaacaatcagtagagggcccagatgcaaagaatctggttttccccgttacagtaaacagctttcactaacgtatacaggtatttcatacacatctaaacacacaagggtaagttgtgacctgctacacatagggtctaaagtggtgtaattgtgattttcctgtgatactcccaagaaaactataaatagtgaaccccatgcaagtactggaaagcactagtcttttatcaacagggtgaacctgaggaggtttaactcttgacattagtatctgtaaagagcgtacggctctttttgctatgttttctccacaactgacatgcacttggtgtgggagaattctgatggctgtctgacctaagagtgataactactattcaaaatgtgggtaccttttcagtaatactgagttacacatttaacatttaaataaactaatacgtggatcatccacagctttaacccggaaggcagaagggagtgtgtctgaatgttaatgttttcagttatactattttgtgtttctcccgctgtactccagagtgacactggtacactgctgctttccgtaacaacacaggcactagtttgaactcagacaaaacctgaaacagaagaaatgccactctttctccaggtcttttaagaaactcgatcaaaattataaattattcaagtttccttttgagtggtgtctttatgtgtgtaactatctagagaacaaaccaaaccagaaatgtctacccctgcaagagtgaggactttgggtgtggttctcttaggagtcagggaccttcagcagtttacagtcagggccgttttctcacacagcccgtttaccctgcgtttgtgccaactgtgatggcaaatgcgttttgcgggggttgcgcttcacaactcaggcctaaagatcctcttagggagatctctctagctgagtagaaaacttctacccaaaaaggcggcgggttctgtgaacctgaagagaagactcagggtctctctgaaagcctttaaattactgctggaattacaagttcctattagtgagaaaagagcattaaaataacttgaaggtctattttattggcaacttagaatgcaaagtattttatatttaaacttttaaaatttgaaaacaagctagcctacattaaataatatagtttccaaagctgaatgtgctcacttggagctcagtttttctgcttgaaacacaaacacaacttcctaacactcctaggtgggaacactactgtttccc

SEQ ID NO: 170528 - DNA, 447 bp, Homo Sapiens
  misc_feature (314)..(342): n is a, c, g, or t
ggtcttatgggtcacgcccctgatacattacaaattgccataaaaatctgttgagcatctgttcttaaaagactaaagtcagagtattagacaggtaggaaaataattctgaaaatggtatcatctatctagcatggtccccaaagtttagcatgcatggaaatcacctgacagaaggttacacagcacagacggctggcctcccttcccacattttatcgatgcagtaaatccagggaggggactgacaatttccatttctaaataagctcccaggtgatgttgctgctgctggttgtgaaatgctaattgcnnnnnnnnnnnnnnnnnnnnnnnnnnnnnaggaggttggtgtcctctagctttcccggctagaaaatcctggtcccttatcaggaccttatactctggtatctactatttggtataaaatttcagggggcttaa

SEQ ID NO: 170529 - DNA, 315 bp, Homo Sapiens
tgggtttaacgccccttgataaaggatagccacccacatggaggcctaatataaactggattgcagaactgcacttgagctgggagcccaagcgggccaggcttcttgattcctattttatcccctttaacctaggatagctaggtctatagtgcagactcagacctaacttacactttcatttgcagctgaagtttcggaacaaagacaaagatagccagatcatattaattacacggataggcaagaaagcatgagccctgaggaggaaggaagggactgtccaggtgtacttacctcaaagatgagaaatat

SEQ ID NO: 170530 - DNA, 360 bp, Homo Sapiens
gagctcggtacccgtctctgatattggaagccaaggtaggtgacatattatgcatgatatatataactatacggtaatactagatgtatgtgatatatagtaataagtgtgccataaagtgtcacctaccttggcttccaatatcagagacttctactccagtgtccatttttataccatcaagaatgatagcttgatcaccaccgccttcatcatcgtccgtctcagagtcttcaagatcaccccaggagtgttctactccctctccaatttgggcagttccaggatgtccatagcacaggtgtagaaacaatcttctgaaggaggttctgcttcagcaatgatttcttctgctgttac

SEQ ID NO: 170531 - DNA, 397 bp, Homo Sapiens
tatatacctgtacagtttcactctgatcatggtaacagcatccctattgcttctgccagctgtcatggcaatcgtgtttcccatcacctgggcggttcagagccagtcatgggctgctgaatttaatggagcatgtttccaggttcttcatggcaaactgtactcatgacttaggagtgagtgttacttccatgtgcctgtcagcttgtgagggggaatgtggaggaaggtgagaaatacagctcccacagttgtgctcttcctagaggaagctctcagaacgcagccctcacgggatttccttaggtcagaggagagcatcgcatctcacgtttttaggtttatcactgccatcccacttaagggatgggaggtatcaggggcgtaactaggattc

SEQ ID NO: 170532 - DNA, 547 bp, Homo Sapiens
acccttaggtttagcccatgatactcttcctaattatccacagcgagagaggatgatatggactcccaaatatcgcaggtggggtacaaaaccctgtgatattgttcctaatatccagagcgaaagaggatgatatgactctcaatatcgcagagggtgtacacccctcctataatattgttctgaataccctgggagagagaggataaggttacgttgaatatcgcagggaatgtacaccaacccctctgatacccttcctaatgtgcaggggaagagaggaaaatttcactcccaatatcacagaggcagtacaccccacttgtgatgttgttcccaatatgcaagggggagtacaccccacttgtgatgttgttcccaatatgcaagggggagaggatgatactactctcaatatcgcagggctgttcacatccccagtgacattttttcctaatatctaggggagagacaattatatgacagcaaaggtcgcagggtctgaatcccttcctgatagtgttcctatatcaggggcgtactatgg

SEQ ID NO: 170533 - DNA, 443 bp, Homo Sapiens
  misc_feature (150)..(178): n is a, c, g, or t
  misc_feature (238)..(247): n is a, c, g, or t
ataagatgatccatgtattcaccagacccaactaattatcacccaagcatccccctcattgcaaggaagccttttaagtgaagtgaagctttcctttttaaaactgcccaggccgggcgtggtggctcaagtctgtaatcccagcacttnnnnnnnnnnnnnnnnnnnnnnnnnnnnncggccaccttctccttttgaagagtctgagctcatattttatcttgtttctgacatttgnnnnnnnnnnttctaatattaagaagctgcttgctgatttttaaaaaggcttcacgagaggactgaagtttctttttctgggtcaatcagtcattagtaaactaaggaaaaggaggaatcatacattaaaagggaaatttactagcaacatgcagtggagttacctaatgtgctggcagagtatcaggggcgtaaataatgggagt

SEQ ID NO: 170534 - DNA, 252 bp, Homo Sapiens
atagaaatagggagttggtggaaagaacatttgagaaggaagacaaagtttgattttagttatgtttagttggaaaccataattaaaaattcaagaaaagttcttctgtagggagtcaggaaaagttcttctgtagggaggtagagctaagggattagagtgtacatttggggataaagatttgtatgtactcagagtaagatattttcaaggtcctaagtcccaagcaacatctgacttaaaacagcttat

SEQ ID NO: 170535 - DNA, 426 bp, Homo Sapiens
gtccattgggttcgcccctgatagacaaaagcaagccatcagcaaacagcatatagaattacattttttagttcaaataggagcctatgtacttactgaaggaagaggtataagtcattatttaagtgaggatgtttaatttgatttaatctttaatatttttctgcatttcttttctaattaaacaataaagcttatctatgccagagaaaataatgcccacactgaacaaactcaatttattatgtttgctaatatgaaaatactagacaactgtgtaaaacagaatccagtcctcttaggttagaatacaaaaagtaaattccagaggtcctggaaaaatcatcccagaagagttggcataaagtgtatgtatacacaatgtacatctttacacagcctcgccgaaaggtactctatctttat

SEQ ID NO: 170536 - DNA, 327 bp, Homo Sapiens
attaccctaccttactttaaacctcactagatgctatttgctgtagtgtctttactacgtggtggtccttcccctagcagcgtcccaggtccccagtcctggtcagtacctgcacggcctctagccagacacttcaaaataacctgcgaccgtcatccttctggtcagcaacaggggcagcaagtagcaactattaacaccttacatggaagtgcttcatctggattaccccacttaaccctttattatttatccctgttttacagatgagcaactgtgacgtatggtgtttgagtagtttgttgaagtaaataatgcagctattca

SEQ ID NO: 170537 - DNA, 590 bp, Homo Sapiens
tgcaatggcgagagcacaccggaacaagggaggggaatgggttcttatcactgatgcaggtaccccctactgctgtgttgttcccctatgggctagggttggaccgcacaatctaagctaattctgactggctattttaaagagagcaggggtataagccagagtggtggggtgagaagtttagacaggaaagatggttacggaccaggtgactaaaggtgactcaggtcagagcaggtgacagaggctaggaggggattgtttactgaaactaggggcaaggagacataaagaatgaggaaattaaaagttaaaatgaagaacaaagaacaggtgagctgaacatactgatacattggttctttggagaggatctcagaactcaatgtacttaacaaattacaggctaaaacctttgaagaagaatttatgatatcctacattatcatggggtaaacaattcgtccctgacagaataaggctactggagttctcttcttgtaactctgggaaggactagagggaactgtgtctgcagtggggccaggtagttaaaaagtctggactgggccgagcgtggtggctcatgc

SEQ ID NO: 170538 - DNA, 523 bp, Homo Sapiens
cctgaagaacagcagtggtctacggaaacaatagcctgtggctaccatttccctgcactcagatcgtgtatgtggttgcagacctggacaagcttcaggagcagcttccagaactcttggaaataatcaagccaaaacttgaaatgattggcttaaagaattaatcttctatctcagcagccctggaggactcccagagctctttttcagcctgtgtgccctccttgagtagcaagattcatccaggatttaagtgactctggcttcggttacctaaaaagcgccctgaaggttcccaggctttaccgaagaaccaataaggaggtcccaaaccacagcttcctcctatgtggacagtgctctgaagcccttattccagcttcagagcggacacaaggataagctcaaacaagcaataattcagcagtggctagaaggcactctcagtgaaagcactcataagtactatgaaaccgtgtcagatgtattatttcaataaaggatcatttgacaactggtgaaa

SEQ ID NO: 170539 - DNA, 409 bp, Homo Sapiens
tccatcccgtggggtgcagctgcagcggattactctgagcgctgtctatcgcatctgcctgggcaagttcaccttccctgggatgtccctggacaagagacaaggagaaggccttaggatctactgggggagtccggaggaacagtctcttctgtcccgctggaacccatggtccactgaagttccgtatgctactttcactgagcatcctatgaaatacaccagtgagaaattccttgaaattcgcaagttgtctgggttcatgtctaagcttgttccagctatccatgaatgcccacaagaattcaactggatctggatagaggaaagaaactgatggtgtgaactgaacccattttgattgacctacacagggcggatgtcgataatagagaaccaagggatccgc

SEQ ID NO: 170540 - DNA, 1507 bp, Homo Sapiens
tccactagtgtaggccacaccacaatactatggacatgtcaattgtattagaagatgaaaagccagtgagtgttaatgaagtaccagactaccatgaggatattcacacataccttagggaaatggaggttaaatgtaaacctaaagtgggttacatgaagaaacagccagacatcactaacagtatgagagctatcctcgtggactggttagttgaagtaggagaagaatataaactacagaatgagaccctgcatttggctgtgaactacattgataggttcctgtcttccatgtcagtgctgagagaaaaacttcagcttgtgggcactgctgctatgctgttagcctcaaagtttgaagaaatataccccccagaagtagcagagtttgtgtacattacagatgatacctacaccaagaaacaagttctgagaatggagcatctagtgtgaaagtccttacttttgacttagctgctccaacagtaaatcagtttcttacccaatactttctgcatcagcagcctgcaaactgcaaagttgaaagtttagcaatgtttttgggagaattaagtttgatagatgctgacccatacctcaagtatttgccatcagttattgctggagctgcctttcatttagcactctacacagtcacgggacaaagctggcctgaatcattaatacgaaagactggatataccctggaaagtcttaagccttgtctcatggaccttcaccagacctacctcaaagcaccacagcatgcacaacagtcaataagagaaaagtacaaaaattcaaagtatcatggtgtttctctcctcaacccaccagagacactaaatctgtaacaatgaaagactgcctttgttttctaagatgtaaatcactcaaagtatatggtgtacagtttttaacttaggttttaattttacaatcatttctgaatacagaagttgtggccaagtacaaattatggtatctattactttttaaatggttttaatttgtatatcttttgtatatgtatctgtcttagatatttggctaattttaagtggtttcgttaaagtattaatgatgccagctgtcaggataataaattgatttggaaaactttgcaagtcaaatttaacttcttcaggatttgcttagtaaagaagtttacttggtttactatataatgggaagtgaaaagccttcctctaaaattaaagtaggtttaggaaaacagaccctcaaattctgacattcattttcctaagcaactggatcaatttgcttgacttgggcataaatctaatctaagcatatctgaatacagtattcagagatagatacagtagagattccccagacttttccgctcttggtaaaacctggttggtaaggttatgcgaggtaaactcaacagaagttgggagtggaagagggtgggaagcttatatgcaaattaagcagacgagaaatgctccagaaggtttattattttaaagcacatt

SEQ ID NO: 170541 - DNA, 407 bp, Homo Sapiens
tctgaggatcccgtggcttctcgtattatcgacaaagtcagtcaggttattcacagtcctatggtggttatgagaatcaaaagcagagctcatatagccagcaaccatataataaccagggacagcagcaaaacatggaatcatcaggaagccaaggtggaagagcaccttcctatgaccagccagactatggtcaacaagattcatatgaccagcagtcaggctatgatcaacatcaaggctcatatgatgagcagtcaaattatgatcagcagcatgattcctatagtcaaaaccagcagtcctatcattcacaaagggaaaactacagccaccacacacaagatgaccgtcgtgatgtgagtaggtatggagtcgataatagagaaccaagggtcctgcagtca

SEQ ID NO: 170542 - DNA, 322 bp, Homo Sapiens
ttggcttctcgtattatcgacggtgtactcaggtcctggtggtgactcacgggagcctggccacctcgcagctgttcgccccctcgaacctttgaactggaactgctggctcacacaggatattcgacaactgcagctgaatctcatggaaaagctggattcctctgccttacgcagaaacacccgggctccatctgccaggtgcttgccactggtcctggcagaaatggcggctgctgaaagtgaccttccaaatccttggtggcacttcagcgccaacaggctctccaataaaaaccctttacacacaacgggatggacg

SEQ ID NO: 170543 - DNA, 415 bp, Homo Sapiens
cgtattatcgacagcgcagcgaacgctttgagtaaaggaaaagattatcttgtgttagctcaaccacccttactacttcctgcggaatcagtagatgtttcagtattgcaacctctgagtggagaattggaaaatacgaatatagaaagggaagctgaaactgttgttctgggtgatttaagtagtagtatgcaccaggatgacttggtgaatcacactgtagatgcagttgaacttgaaccaagccattctcaaactctttctcagtctcttcttttagatattaccccagaaatcaatcccttgcctaaaatagaagtatctgagtctgttgaatatgaggcaggacatataccatcaccagtgattccccaagagagttctgttgaggtcgataatagagacccgggatcct

SEQ ID NO: 170544 - DNA, 946 bp, Homo Sapiens
  misc_feature (677)..(714): n is a, c, g, or t
ggttcgtctcccatttgccatccaggcctcacacccacactcgagcccacccggccggccagctttagaggaggggaggagcagggcgagttcacattattccttttccatcggaagtggcgctcgtgcattcaacttgttcccgctcatggaacccctctttaaaaagacgcagggcacctgtgagcgcaggagcgagcctaaggccacccagcggcagcgcccgtgtcctgggcactcagcgtgctgggcagagcaggtgcgatggccccagtcctagcagccctcgcccatgtcctgtgcccttacatggctcccggactgtgcagggagccgatacgtttgctgatagcaatactggaaccaccgggtgcgatggcagtgaggagactgcccagtgcctttggggctgtgcttgcaataaagaacagaatttcctggaaaggcagtctgcaaaagagggaaccggtgactcagaaagacagatgttttggtaatttaccccaaatgtgccatccacatagtgctttttcctcttgcccttcggcttgtttgaatctcacaattatgtatttaattctcaaagaaatatgtatctgtagccgtttgttgacactaatacagatgattaaggaaaacagctgatctttggggaagggagctaccaacactttatnnnnnnnnnnnnnnnnnnnnnnnnnnnnnnnnnnnnnntatatatatatatattatttacagggaaatttttcagggtttacaaaagagtatgtgattggtagtaagagacacacagaatgtttatgaagaaattgcattttctttttcctttacatttgaacttctttatagtttaaatataacgtcttgagatggcacattcctacgattgaagaaggggtcttgagatcccctaaacttgcatacccagttttttggatattgtaat

SEQ ID NO: 170545 - DNA, 973 bp, Homo Sapiens
  misc_feature (791)..(809): n is a, c, g, or t
  misc_feature (811)..(816): n is a, c, g, or t
  misc_feature (923)..(923): n is a, c, g, or t
ggggctccgcagccgtctgtgccacccagagccggcgggccgctaggtccccggagaccctgctatggtgcgtgcgggcgccgtgggggctcatctccccgcgtccggcttggatatcttcggggacctgaagaagatgaacaagcgccagttctattaccaggttttaaacttcgccatgatcgtgtcttctgcactcatgatatggaaaggcttgatcgtgctcacaggcagtgagagccccatcgtggtggtgctgagtggcagtatggagccggcctttcacagaggagacctcctgttcctcacaaatttccgggaagacccaatcagagctggtgaaatagttgtttttaaagttgaaggacgagacattccaatagttcacagagtaatcaaagttcatgaaaaagataatggagacatcaaatttctgactaaaggagataataatgaagttgatgatagaggcttgtacaaagaaggccagaactggctggaaaagaaggacgtggtgggaagagcaagagggtttttaccatatgttggtatggtcaccataataatgaatgactatccaaaattcaagtatgctcttttggctgtaatgggtgcatatgtgttactaaaacgtgaatcctaaaatgagaagcagttcctgggaccagattgaaatgaattctgttgaaaaagagaaaaactaatatatttgagatgttccattttctgtataaaagggaacagtgtggagatgtttttgtcttgtccaaataaaagattcaccagcaaannnnnnnnnnnnnnnnnnnannnnnnacatgtcggccggccctcggcccctcgaagaagcttttctagaccattttcctttttgggcgccgccggggcccccaggtaaggggtaaagtggaaaacatggggcnccaataaggcctggttttcccccttaagggaagaattccccctggggacc

SEQ ID NO: 170546 - DNA, 482 bp, Homo Sapiens
tgggccgtgtattatcgaatgggagagagctaggcagctcatgacttgtcctcacagactagaaaaaagctgaacaaactgaaagtcaacccttctagggtggatcagagaattgaggtcacaggaaaaactgccaccttaaaaatgagaaacacaggctaacacacaagaagtcacaggtcacagggaagagaagctactggggacagcaagtgggaggagcactcaaatgatattgacagattactagaagctgagggtagcctggctagaacattaaaaactccttgaagaccagactaaggggggaatcttacacatttccaagttttactacaatgatctcaaccaggttctcatgatgaagttcagaaaaactccctgaggttgggcactaccaacttcaggacttacattaagctacagtaacccaaatagtgtgaagttggtgaaaagagaaaacacacacaacgggatggaag

SEQ ID NO: 170547 - DNA, 629 bp, Homo Sapiens
ttaatgaagatgtgaaatatttgtatactgaaaatttatagccttgttgaaagaaattgaaagtgacataagtagaaaaacatcccatatttatggatttgaaaagttaatattgtcaaaatttcaatgctaacaaaagcaatctgcagattaaatgcaatcactatcaaaatccaatgccattcttcacagaaatagaaaaattagtcctaaaatctggagtggaaccacaaaagacgctgaaaaaccaaagcaatcttgagcaaaaagaacaaagccagaggcatcagactacttgatttcaaacaatattaaaaagttatagtacttaaaacagcatagcactggcataaaaacagacacctagaccagtgtgaaggaatatagaacctataaataaatccatgtgtctgtggtcaattgatttttggtaaaaggacaaagaatacacaatggggaaagaaaattctctttaataaataatgtagagaaaaactgactattcacatacagaagaataaaattggatcattatttcactctttataccaacatcaattagcaatggatgaaagacttaaatataaacctgaactgtaaaccactacaagcagtcgataatagagaac

SEQ ID NO: 170548 - DNA, 465 bp, Homo Sapiens
gccttgcacctgctggccttctgcccggagcactcttcctccagatgtctagctactccttcaagcctcatccttgtccccatcaccttctccatgcggggacaacagctccgtaaggcttcctgtggatgtctgtccccagtgcctcccactgaagacacttcctaagtctgtgctgaatgaacaaatgacagacagacagacagacaggggtgggaggaaagtggggccaggcacagggcagaaggggtccccagggcatagctgataggtaatgatcactcttcagacacagtgtcatgggaccctggattaaaatctgtctctgggagtccaggagggggtagggagggaaagctgagctgagctccaggcggttcagtgtgcgtgtgtgtgacagcatcctattaacaaaggtataaagtccagactcagggaggggaaggtctcttctatgctactctg

SEQ ID NO: 170549 - DNA, 322 bp, Homo Sapiens
cagcgcctcatttggatgtgtctggagtcttggaagcttgactaccctacgttctcctacaaatggaccttgagagcttgtttggaggttctagcaggggagcgcagctactcgtatacccttgaccgaagaccggtcctcctctatcggggatggtcgtcctcttcgaccgagcgcgcagcttcgggagggacgcacatggagcggtgagggaggaaggggacacccgcctagccagccagatcagccgaatcaaccctggggatcaatggggtgacagatgtcgcagccagatcgccctcacattcaccacgacacagtg

SEQ ID NO: 170550 - DNA, 596 bp, Homo Sapiens
  misc_feature (428)..(447): n is a, c, g, or t
  misc_feature (449)..(453): n is a, c, g, or t
  misc_feature (455)..(455): n is a, c, g, or t
ggcagtccaggttccagtaactttggtccgaaatgatggaatcatttattccaccagccttacctttacctacacaccagaaccagggccgcggccacattgcagtgcagcaaggagcaatccttcgagccaattcaagccaggtgccccctaacgaatcaaacacaaacagcgagggaagttacacaaacgccagcacaaattcaaccagtgtcacatcatctacagccacagtggtatcctaactaccgtctttttgctaggacttaaactgacttgagtgtggcaaaaagttaacaaaaaaggagaaaaaatgaacaatcgtttgtggtttcttgggaaaacttttcataccaggtgatactattcaaaaaccccgttgtctccctgcaagtgctgatttgaaatgcagaagccacagtgaaaannnnnnnnnnnnnnnnnnnnannnnncntgttggccgcctcgtccctccacaagatacttactagattcttcttgttgcgccgcggccccaggaaggaagagcatggtggtcatatgttgtcttacgaggaacatgcctgatcgagaacagctgggtagtattcccaac

SEQ ID NO: 170551 - DNA, 740 bp, Homo Sapiens; identical to SEQ ID NO: 81863
  misc_feature (513)..(547): n is a, c, g, or t
  misc_feature (550)..(557): n is a, c, g, or t
  misc_feature (658)..(658): n is a, c, g, or t

SEQ ID NO: 170552 - DNA, 1008 bp, Homo Sapiens; identical to SEQ ID NO: 15279
  misc_feature (986)..(986): n is a, c, g, or t

SEQ ID NO: 170553 - DNA, 805 bp, Homo Sapiens
gggggcgcgagttggactgtgaagaaacatggcggccgcgacgttgacttcgaaattgtactccctgctgttccgcaggacctccaccttcgccctcaccatcatcgtgggcgtcatgttcttcgagcgcgccttcgatcaaggcgcggacgctatctacgaccacatcaacgaggggaagctgtggaaacacatcaagcacaagtatgagaacaagtagttccttggaggcccccatccaggccagaaggaccaggtccacccagcagctgtttgcccagagctggagcctcagcttgaagatgatgctcaaggtactcttcatggaccaccattcgctgttggcaagaaacggctttacttacaaaacagactctttaccttctgctgtgtttgaagtatgtttagtcagcatgctcaggaaataaatgtgaattgcccttgagacctgcttctacattggttgctttgttaactctacctgatcttcacttgtcagtaatttgagaccacttcaaagccctctgcaaacaccccaaaggcagaatctgcctattttgaggtttccattaacttccaaaggaattctggttttccaaaacaggaacccagaattgggaaataattaccgtccaacttttggcctttctaagcccagtaaattccctttcttaaataacctccctggtctttgggccctgggggaaaccccctatgggccccccgcttggggggaaaagacccctggccccaaagggtctttaaaccactttccccacgcctaagggggttataggtccaaggg

SEQ ID NO: 170554 - DNA, 890 bp, Homo Sapiens; identical to SEQ ID NO: 15280
  misc_feature (564)..(581): n is a, c, g, or t
  misc_feature (625)..(641): n is a, c, g, or t

SEQ ID NO: 170555 - DNA, 721 bp, Homo Sapiens
  misc_feature (635)..(635): n is a, c, g, or t
  misc_feature (649)..(649): n is a, c, g, or t
gggatgccgagcccaggccggttccggcgaagttaaaccctcggagctggcctcggactgctggggcgttaccccttcggccacccccgctgaccatggcagtgtttcatgacgaggtggaaatcgaggacttccaatatgacgaggactccggagacgtatttctatccctgcccatgcggagatgacttctccatcaccaaggaagatttggagaatggggaagacgtggcaacgtgtcctagctgctctctcattataaaagtgatttatgacaaagatcagtttgtgtgtggagaaacagtcccagccccttcagccaacaaagaattagttaaatgctgaagaagccttcaggaatccaaatcctgaacatttggaatgagcccagatagaaatatcgaatgcaaagctactggcttcacagagacaaccatttatgatttgctgttctgtaagagtgtggattctttctatcaactgctgatatcatcttcaggaagcaagtccataacatgacatatctggattttgtgcttagaaccttaaattggaagcattcttaattatgcatctaaatttaaaagaaagataatttcaaaacagtgcttttctttcccttgggtttcatcatntttcatatccttanaccaaattaccttcgggtatcttgacaaccagcatcattcctacctcagttcatttagggatttcctttaat

SEQ ID NO: 170556 - DNA, 230 bp, Homo Sapiens
cctttttgggtacagctgtaaaatatttggatataggaaatgttgtgttattcttgcagccttgatattcagggtggattgtaaaatataaatttttgtgagatttcagagattaagattattttgataacattatttacagatctaaaagatgtggttatcacaagtctcgagggggaaactactgcataaaataactaactgggaataaatattttgcatcagtttgg

SEQ ID NO: 170557 - DNA, 328 bp, Homo Sapiens
caccaagcaccgacaacacttctccgattgacggagcttttttgcgtaactcatcaagctgcaaagttatgcgatcgattgttcggcctaacgtttcaatctcgccgaatatttcattctgttgcttccgcactttaatcccatattcgatttgccttttgtgctcgcgtactgtagccagttcggtagaaatcccatcgcgctctactaggtaaggagaaatcacttcagacatctcctcatctaaaagcctccgccatcgatcttgctcatcatttgccatcggatccgggctaaaacgtcttgatatgtatacgctaggatcctg

SEQ ID NO: 170558 - DNA, 137 bp, Homo Sapiens
tggggtccaggaatctgtaggttgatcatgcatccacgggtattctggcctacaagccaggttgagaacttaaggcagtccgctcccacctgccttcccaatatccatatcctacccagccttcagtgcagccggtg

SEQ ID NO: 170559 - DNA, 2510 bp, Homo Sapiens
  misc_feature (1372)..(1390): n is a, c, g, or t
  misc_feature (1567)..(1578): n is a, c, g, or t
  misc_feature (1619)..(1637): n is a, c, g, or t
  misc_feature (1903)..(1903): n is a, c, g, or t
  misc_feature (2118)..(2118): n is a, c, g, or t
  misc_feature (2232)..(2232): n is a, c, g, or t
  misc_feature (2235)..(2235): n is a, c, g, or t
ggggcgccgcctttctccgctggcaacggcgccgctccccgctcctcctccccagccatggcgttcacgttcgcggccttctgctacatgctggcgctgctgctcactgccgcgctcatcttcttcgccatttggcacattatagcatttgatgagctgaagactgattacaagaatcctatagaccagtgtaataccctgaatccccttgtactcccagagtacctcatccacgctttcttctgtgtcatgtttctttgtgcagcagagtggcttacactgggtctcaatatgcccctcttggcatatcatatttggaggtatatgagtagaccagtgatgagtggcccaggactctatgaccctacaaccatcatgaatgcagatattctagcatattgtcagaaggaaggatggtgcaaattagctttttatcttctagcatttttttactacctatatggcatgatctatgttttggtgagctcttagaacaacacacagaagaattggtccagttaagtgcatgcaaaaagccaccaaatgaagggattctatccagcaagatcctgtccaagagtagcctgtggaatctgatcagttactttaaaaaatgactccttattttttaaatgtttccacatttttgcttgtggaaagactgttttcatatgttatactcagataaagattttaaatggtattacgtataaattaatataaaatgattacctctggtgttgacaggtttgaacttgcacttcttaaggaacagccataatcctctgaatgatgcattaattactgactgtcctagtacattggaagcttttgtttataggaacttgtagggctcattttggtttcattgaaacagtatctaattataaattagctgtagatatcaggtgcttctgatgaagtgaaaatgtatatctgactagtgggaaacttcatggggtttcctcatctgtcatgtcgatgattatatatggatacatttacaaaaataaaaagcgggaattttcccttcgcttgaatattatccctgtatattgcatgaatgagagatttcccatatttccatcagagtaataaatatacttgctttaattcttaagcataagtaaacatgatataaaaatatatgctgaattacttgtgaagaatgcatttaaagctattttaaatgtgtttttatttgtaagacattacttattaagaaattggttattatgcttactgttctaatctggtggtaaaggtattcttaagaatttgcaggtactacagattttcaaaactgaatgagagaaaattgtataaccatcctgctgttcctttagtgcaatacaataaaactctgaaattnnnnnnnnnnnnnnnnnnnccgacaagagcaactaaaagaaaagagagaagaaagagaaaacaggtcaaataaaacaacggataagagaaaaacccccgtagaaactatccggccgcccgaccccgccggccccagcgcatggctctaccggtggcacggcgccgtgtgacctctgtggacttggggtcctcctgnnnnnnnnnnnnacagtcgcgctgcgcgcgcacccacccttcccctgcgcggnnnnnnnnnnnnnnnnnnngtcgcgtaaccgcagcgggtacgcgtgctgggctgcatggtgcgtagtggtggtttcgttccatatcgatcacgactgcatcactctttgtcgtccactccaacaacgttcatcgacctgatgatactagatggcgccctttgctgtcgctgcgacctctataatatgactcgggtctcgggtgtggcctctcttgactcgatgctagtcgcacactcatgtccagttactgagcgtgtgctgttgatcgcgcagactcccgaaanaacttccgatgcgcttcagctgcagaacggcgagccgggaggtggttcgtgttcggctgtgtagggcgagcattataaggtggacgcagacggaccggtagtcgcgaaatgagcgtgggcggcgcgggcactactaccgcgttaccatcgatgccacgtcgctgtgctttacttatcaccccggctccgtctcggtatatctggtctcctcaganttggccatctgagactactataactgtccctcgtctatcgttctgctctcgagcaacgtcgcctctaccagccgattacacactcgagacgctcggcgtggcgggcgtcgtgtntcngtgtgacgcacgcgccgcgtgcagatatgcttgacgtcgcgttccaggggcagacgcttactatcttgcgcggcgcgcctcgatcttcgacggggcgaccgcgagcatactagccatgaccgacacatacacgttagcccagacgccgccatagagtatgcgctagatcttgcagcgccaacacgatttgttaggctccttccgcccgtctcactatgtcactccacaccgcatcttgtcgagcgccgagtggtattcgtggagccggtcgcgcg

SEQ ID NO: 170560 - DNA, 1103 bp, Homo Sapiens
  misc_feature (438)..(448): n is a, c, g, or t
  misc_feature (487)..(512): n is a, c, g, or t
  misc_feature (894)..(944): n is a, c, g, or t
gatagtgtgagatggcagaggaggaacacaggataaaaatggaagttctcaataaaaagaagatgtattggggaaagaaaactacaaacttttaccaaggaatggcctgtttcctcatttaaccggccctttcccaattcgccctaagactttgggggtggctctcttgtaattaatctgtgttggcaaagaatgtctggaacatggacttggcggtcagtaacctgtaacagagctacaactaggaaaattagagtggtagtagtcacttatttaagaattcattcaggtaaacagctgcaccctctgtaccccttaagtggcaaagaagctgttatagtcttctgaaaattatcactatgagtgctataattctgaatataatgtctcttaattagaattcatacaagaaccacgtgtgagtgttgttgttgttgnnnnnnnnnnnaatcaaatgcaagtgtgactataaaggagtgtggctgannnnnnnnnnnnnnnnnnnnnnnnnnaaacagacagcagaacttttctatccaaatgaatgccgtcccatggaaagtggctgtcctgggaggctacacgtttctccaatggtgatgctgttgctcagaacttgctagaggtctttagggaacctccgtgagagctgcagcacctgtttaattttctcggtgccatcctctgaggatggattttctgtttttaaacagcccaaagtttagaacggtattttctaatgtggctcataaaccaccttttaaggcctttcctcaaacaggagttctaaataagactccaacaatagtagttttgttggagctaaggatgtaactactttggagggagaaatgttcgtttagatttctacattccggtatgttgggtttattnnnnnnnnnnnnnnnnnnnnnnnnnnnnnnnnnnnnnnnnnnnnnnnnnnnccttgtcggccggcctcggcccctcggagaagctttctaagacccactcgtttcggcggcccggggccccatgtaggaaaacggaacattggcccatagctggttttccttaggaaaatcctgggtcatgaactaggggctggggattcctcaccaaat

SEQ ID NO: 170561 - DNA, 854 bp, Homo Sapiens
  misc_feature (640)..(640): n is a, c, g, or t
  misc_feature (642)..(643): n is a, c, g, or t
  misc_feature (646)..(647): n is a, c, g, or t
  misc_feature (668)..(670): n is a, c, g, or t
ggggatcaggcggcgcccagtggttgtggaacccatctctgatgaagactggtatctgttctgtggggacacggtggagatcctagaaggcaaggatgccgggaagcagggcaaagtggttcaagttatccggcagcgaaactgggtggtcgtgggagggctgaacacacattaccgctacattggcaagaccatggattaccggggaaccatgatccctagtgaagcccccttgctccaccgccaggtcaaacttgtggatcctatggacaggaaacccactgagatcgagtggagatttactgaagcaggagagcgggtacgagtctccacacgatcagggagaattatccctaaacccgaatttcccagagctgatggcatcgtccctgaaacgtggattgatggccccaaagacacatcagtggaagatgctttagaaagaacctatgtgccctgtctaaagacactgcaggaggaggtgatggaggccatggggatcaaggagacccggaaatacaagaaggtctattggtatttgagcctggggcagagcagctccctccccaacttctgtcccagccttggaaagctgaggcactttctttttcagatggccaataaagagcacttttttggncnnggnnatcccacacaaataaaaaaannnccccttgtgcggcccgccctcgggccccttcaagaaaactttttccaaaacccaattccggtttggggcgccccgcgggcccccccaaaggggtaaggtggaaaccatgggggccaataagacttgggttttctcctataaggaaaaacacccctcgggggcccatgtgaacataaaggggggt

SEQ ID NO: 170562 - DNA, 755 bp, Homo Sapiens; identical to SEQ ID NO: 15348
  misc_feature (688)..(688): n is a, c, g, or t

SEQ ID NO: 170563 - DNA, 901 bp, Homo Sapiens
ggggtggcgggggaggggacgctgagggcccatgtgctgaaaatccgaagtgccgcggaaagtggagagctgacaaggaaggtttcgagcgttttgctggcaaagggatttcttacaacctccaggcatgcgtctttctgccctgctggccttggcatccaaggtcactctgcccccccattaccgctatgggatgagccccccaggctctgttgcagacaagaggaagaaccccccatggatcaggcggcgcccagtggttgtggaacccatctctgatgaagactggtatctgttctgtggggacacggtggagatcctagaaggcaaggatgccgggaagcagggcaaagtggttcaagttatccggcagcgaaactgggtggtcgtgggagggctgaacacacattaccgctacattggcaagaccatggattaccggggaaccatgatccctagtgaagcccccttgctccaccgccaggtcaaacttgtggatcctatggacaggaaacccactgagatcgagtggagatttactgaagcaggagagcgggtacgagtctccacacgatcagggagaattatccctaaacccgaatttcccagagctgatggcatcgtccctgaaacgtggattgatggccccaaagacacatcagtggaagatgctttagaaagaacctatgtgtgcctgtctaaagacactgcaaggaggaggtgatggaggccatgggggatcaagggagacccggaaatacccagaaggtctactggtattgagccttggggcagagcagctccctccccaaatttctgtcccagcctttgaaggcttgaggcacttctttttcagatgccaataaaagagcacctttatgagtcacaaaaaaaccaaaaa

SEQ ID NO: 170564 - DNA, 368 bp, Homo Sapiens
agcctccgtggcctccagcagcaaagtctttcaggatacagtactctaacgtggtcatctccaggccttccatcgactcaagacaatctcatccgaaaccacacaggatccctggctgtagcgaacaacaacccaaccattactgttgcagattctttatcctgtcctgttatgcaaaatgttcagcctcccaagtccagcccagtggtatccactgttttatcaggatcctcaggatcctcatcaacaagaacacctcccactgcaaatcacccagttgagcctgtgacctcagttacacagccatcagagctattacaacaaaaaggtgttgacagctcttctaccacaagcagtgcttctccaag

SEQ ID NO: 170565 - DNA, 657 bp, Homo Sapiens
ggtaagtatttgacatcatcatctgctcgcttggctgtgatcgttcccataacccagtctgtcaggtattctaccatcttattcctaaatttcatctcttggcaaaatgagaggtcatctctccttgccatcattacttcaactaattgacacagtttcgttttttatttgaattgcatggaccatattcccaagcacacgaacatacctgaccagatttaacatcattgtttcaatgctagcttgccctagatgttcagagctgccttcagtatgattatctagcaagttcttcattatagctatggtttgttctacaaattgagtattggtatcagtcaataaaacctgtccttgggagtcaaaaaacttgctgatggtattcttcaatttgttaaatagcattggatacagagcaggactcaattctagacccaccagatccttaacattggtccgtatttgaagtcccactttctcatggttacacaccattaaggacaacagccgatccataaatttgctgacaggtgtatctgcgtttccctctgaagacatcactgaaatcatagaacccttacgttcactgactggacccatgggtgggctataggttgccaggccagaattgcttctctgctggaggccacggaggct

SEQ ID NO: 170566 - DNA, 945 bp, Homo Sapiens
atttattacataatttacataaatgcatctcggggaaaaataatcattttcttggcatgttaaatcaagcttaaaaagttttgagaaaattttactgtgctgtgttgctaatggttaaagaagtctgtatctagtgataaatataccagtttttttaaaaagatgctgttgtgcctatatcatgaagaacattaatttctcatgtaaaaaaaatagctctaaaatttgtttcaacctaattggtaacctgagtttatatctggcatgaattcattatggtgatacacatatgtgaattcagtacattttgagacagtattctaccattcagtaattttggttaatgattttaacacttctcagtgtatttaatttcaaattgtttttttaattggttttatgctgctttgttaggacagatgtgttttgaatgtaccattataagaagaattctatgtatcttaaactatgatcttctaaaattttatttccgtaagtacttctgtggccttgagtattttttaaaaggctcaactgtaagcctcttagccagttggataaatatttggggtcacctagccattgaaagcagaaagcagtagtgacacagctttcccttcaaagagccattgagaaacatttctcaaacaggaaatccttcttttactaatgtggacatatagattattcgtattatagtttgtagaactacctagttcagaatcttgactgccagttttcttggtttcttaggcttgaattttcatagacaattgcaacagtttagatgccttttgaaaggaatgtaatgaagattcagcatctgactatatgtgtgtctatcctgaaataataatggagagtatactgtagattacatgtttacccatcaaatctgacttaaaagttaaatggaaggttttatagtaagtaatttagatgtct

SEQ ID NO: 170567 - DNA, 230 bp, Homo Sapiens
tgtcttaagggatgttatgttgctgtattctctgtatggaatcagtcagaacgcgggggatttccttcaggggagcatcatgacagagcctcagattacacaagtaaaccagcgtgtaaaggagttactcactctgattcgctcagatgctgttgctttggttgatgcatttgattttcaggatgtgacacttggctctgtgcttggccgctatgatggtagaaccgact

SEQ ID NO: 170568 - DNA, 393 bp, Homo Sapiens
agacaacctgatgaggccacctggcatgacctccagcagccagtaacttgttagggaagagacctgcttgggccacatgggtctgctgcctgtgccaccacctttcccagaacactggacttctttcctgcccttttctacaactctacgctgtgtcagctgtacagccaccccccaccccttcctttcagcctccatcagggaagagacagtaaaaataatcacagtcaagtgattcaaaacaaaacaaaaagcaactgttaaagccaagtctgccccataactttaaaagccatcattggtcactgccgatgtctatttttgaagggttgagatggacagatttcccaagatgcatatcttttgctttcagttctaacaaatgttctatta

SEQ ID NO: 170569 - DNA, 352 bp, Homo Sapiens
tctattcctcactttacataattgttgctccaaattacgtatttatgtattgtatagcaatgaacacagatttaaagttactttttatatttttcacatttaaattctaagaaccacatctgcaatagtacaggtcacttcatttgtctacatatttacttttactggagaacttgatattttcataaggctttgtgttgctctctaccatccttttatttcaacataaaaagattcactttagcattttgtgtagagtagatctcctagtagtgaactccctcaaatatcctgggacagtcttaatttctccttccttttgaaggacagttttgctggagccacggaggct

SEQ ID NO: 170570 - DNA, 439 bp, Homo Sapiens
agccaaataccagaatctatctataggtaaaatatagacaacgtagtaagtcacattaaagagccaatatggagaaacaaggaagttaatgtttcctggcgaaagggcggaagaaagatgcatgagtgagtgacttctaaagccattacatcatcttcctgatttaataagctattaactgggtaacaaaaaccaaaaacactactttttaaagcaaagtcttttcaactattctgtatgtactaagagaaaattcagtgagagggagagacttactgcccttctaattaaataaccaattttagctgttcaatcagctaataaaattccagtttaaaaaagttcatctcccccacacaatttatttttctgaggtgagagaaactgcaaactgaaatgacatgaccacagctgtttgaggcccacgctccctttaagg

SEQ ID NO: 170571 - DNA, 1360 bp, Homo Sapiens
  misc_feature (215)..(215): n is a, c, g, or t
acaaagggaaatggcccccaaaaggacccaagtttcccagggaacccacccccaataaaccccccataaacgtttcaaaccaaaaatggccaacaaaaacggacgcccccttcttggcctgggcgagggctggcgcttcctttcgtggcagatggcaacctgcagctggctggctgggcaagcgttggccaagctttttgtactggggagctcancagcataaagggctgtaacctctacacggaaaaattcaccatccttcccctgaaactgacttcaggggcaaagaaacgagacttcttgaagaccagcctcttctgggaaaggggcttctgagacgagtgtcgacggcagagcagatggcctggggaaggcaggggtccctgggcagaggctgggagggtggccagagaccagggagggcccctccatctggtgggtttggcaggtgtgtcccctggtgctgccaccaggagccccgaggccggggtgttggctgcgacagcccctcactgggtccggagctggtaatctccattctgcgtgatataacgcacccagggcagggcctggtacccactcttctcaatgatcttcaggtagcgcacctggatgccggaggtagtgaagtaagggatctcgaacttgacactgatcgggggcttgccctccttgtcttcggcctccacactaggcaggccgaagtgggcccgcatcaggtactccttgccgcccgggaaggacttgatggaccacacaatctcgctgttctcggggacccacttaacgctccccaccgtcgtcttgaacttgggtgagtcggcatcattgggcacgggaatgtggatctccacgttgttggctgttgaccgccgcttgaactggcttttggccttgatcatgtactcgatgcggctgtgggagtgcttctcgatcaccgactcgatccatatcaaaggcttgacgtgggtgttgagacggtaggacatgagctcgaactcgccgtcgggtgggatgaaggagatggtgcggtcattctcgaagcgtgatagccgcacacactggtggaacttcacatcctccagctccacggatttgcttttgccgcggcccgtgttgtcaaagagaaccttgtcgttgaggcccaggcgcagctcgggcatgcccgagaggaagactcgcatcttgatggagcccacgatctcgctgcgcaggacattgccgttggcgctgacacaagaggttgacagactcgatgacgtccaagaacacctcattcttccgatacttgatgccttcggaccgccaggacaccgcgttggtgacggtggctggtggccgcggggcccctgtttccagc

SEQ ID NO: 170572 - DNA, 637 bp, Homo Sapiens
  misc_feature (25)..(25): n is a, c, g, or t
  misc_feature (41)..(41): n is a, c, g, or t
  misc_feature (64)..(64): n is a, c, g, or t
  misc_feature (99)..(99): n is a, c, g, or t
  misc_feature (116)..(116): n is a, c, g, or t
  misc_feature (197)..(197): n is a, c, g, or t
  misc_feature (304)..(316): n is a, c, g, or t
ttcccctttagaattaaaagccttncggggctacccatggnccaaaaataatccaccaggattncccattgattacaaaccaaattgttaaaaagcaanggtgactaaaataaacntgtccccggccctttcatttaataagcattttggaataacgggaggcaaataaacaaagttaaaccctcaacgtgggaagncccaggctgccccaacagcattgtagcttgagactcaaagttaaagccagcttctaaaaagcctgttagtcctaccatcaatatgataaatttggataaagatggtnnnnnnnnnnnnntgttttaagcagtaaaaatgcaaatatgccaccttggtaagacaggatgtcaggcaacttgccaaaagaattatttcaagtcagtggctcaaagtaggattccagtctccaaacttttgttaggctaattttcattaagaggatgatttataagagaagaaaaggatcttaaaaatcccagagacagtgagtaaaagtggagactcaaaagagccaaggagtactataaatctgtagaagcagagggagacactcgggtcaatagagggaaaattgaagaggaagataatccaaagctcaactatcaagggggcgtaccca

SEQ ID NO: 170573 - DNA, 408 bp, Homo Sapiens
  misc_feature (357)..(357): n is a, c, g, or t
  misc_feature (369)..(369): n is a, c, g, or t
  misc_feature (388)..(388): n is a, c, g, or t
tagtagaaaaagaatttaatagacacgaggccggccacgccacatgggcgatgaagttcgtactcatcttattcaaagctcataggttagggatttttcaaaggcagtttgggggaaggggtggggatggacaggtaacaggtgcttgctgctgagtggttggggcagagatgaaatcgtaatgggttgaagctgtcctcctgttgggctgaattgcttctgggtggagccataaggtccaggtggagtcatgggtgtcagacatgcaaaaaacctttgacagccccaagctgggtcttcatcctgagtctcaagatgcagtagcctcagtgaactcctcagcctccaagcgttccngggggtgatccncttgggtgggggcttttgnatctggggggcccctttttt

SEQ ID NO: 170574 - DNA, 407 bp, Homo Sapiens
atgggtgttacgccccttgatacatgattcagagaagagctaaagatgtttccagttccagggaactttgataggagagttgtgagtttacatcacagataaatcctcatttgatcaacaagtattcgttagcacttgctatattccactcttcgaaggtactggccatataaccttgaacaaacaagagttttactttcttagagcctgtagtacgtaattccagataatggtgataaatgtcacaagagaggactagcaaagcactcagtaaatttagaaagcaaggagcacatccatccaggaagctttcaaggagaagatgggccttaaagtaaaggcaggggtctgccagctaaagaaagggtctaaggcttccaggtatcaaggggcggtaacccatgggt

SEQ ID NO: 170575 - DNA, 342 bp, Homo Sapiens
ttcgagacacttatgcttctaagcattttgcataagggatagtcacccggcactacctagagttttctttttcctttgttgtgagccacatgtaatgtgcctcccattccctgctcactgattttctcccctctaattttagtttcagaaacacaacagacctttccataatgcagctagatcgtggatggctctccctatatactgtctgcagactacactacgtggaatgtccatggctataatatgtttgttacttgtaacttgtgaatatatcatttttcctttcccccataccaacagatctaccaattccagcatgaaagctatcaaggggcgtaa

SEQ ID NO: 170576 - DNA, 468 bp, Homo Sapiens
  misc_feature (313)..(313): n is a, c, g, or t
atatcctctcaacgtccagccgcttgtgtcttcttctgccggtgtgttcctcttgatgtccagccacttgtgtgttcctgcactgatgtgctcctcttcacatccagccacctgtgtgtctgcctgctagggtgttggggatttttataggcacaggatgggggtgtggcaggccagggtgttcttgggaaatgcaccatttggacaggaaaacaaaaatgcctgttctcacctaggtccatgggcacaagcccagggatggagccctagccagggaccacgcccttcccttccccacttccgtatcatttanatggaccatgccgttccctttccagcacttgtgtatcatttcccccctctgaagaggaacatctaactaccgctagaatatggtttagctgcttcctgctgacagcggatgttgttttggggaaaacggcagtcagattcctctcagaagtctat

SEQ ID NO: 170577 - DNA, 1671 bp, Homo Sapiens
  misc_feature (660)..(660): n is a, c, g, or t
  misc_feature (1570)..(1624): n is a, c, g, or t
tcgcctgtgggaggaggtggcggtgggcggaactcctagcggacacctcgtggagtccggccggaagagcaaccgagatgaaggtgaagatgctgagccggaatccggacaattatgtccgcgaaaccaagttggacttacagagagttccaagaaactatgatcctgctttacatccttttgaggtcccacgagaatatataagagctttaaatgctaccaaactggaacgagtatttgcaaaaccattccttgcttcgctggatggtcaccgtgatggagtcaattgcttggcaaagcatccagagaagctggctactgtcctttctggggcgtgtgatggagaggttagaatttggaatctaactcagcggaattgtatccgtacaatacaagcacatgaaggctttgtacgaggaatatgtactcgcttttgtgggacttcttttttcactgttggtgatgacaaaactgtgaagcagtggaaaatggatgggccaggctatggagacgaggaagagccattacatacaatattaggaaagacagtgtatactgggattgatcatcactggaaagaagctgtttttgccacatgtggacagccagtagacatttgggatgaacaaagaactaatcctatatgttcaatgacctggnggaattgacagtataagtagtgttaaatttaacccaattgagacatttctccttgggaagttgtgcatctgacaggaatatagtactgtacgatatgaggcaagctactcctttgaaaaaggttatcttagatatgagaacaaatacaatctgttggaaccctatggaagctttcatttttacagcagcaaatgaagattataacttatatacttttgatatgcgtgcactggacactcctgtaatggtccatatggatcatgtatctgcagtgcttgatgtggattactctcccactgggaaggagtttgtgtctgctagtttcgataaatctattcgaatctttcctgtagacaaaagtcgaagcagggaggtatatcatacaaagagaatgcaacatgttatctgtgtaaaatggacttctgacagcaagtatattatgtgtggatctgatgaaatgaacattcgcctgtggaaagctaatgcttctgaaaaattgggtgtgcttacatcacgagaaaaagcagccaaggattataaccagaaattgaacggagaaatttcagcattatcctcatataaaacgtatagctcgtcatcgacatctaccaaaatctatctatagccagattcaggaacagcgcatcatgaaagaagctcgtcgacgaaaggaagtgaatcgtattaaacacagcaagcctggatctgtgccactttgtgtcagagaagaagaaacacgtagtggcagttgtaaataatcggtattcctaacaatcctgatgtattcacttcatttggttcacctttcttggagatcttgaggaaaacctcctaaccagaattaagaaggtggcctggggaaccttagaatttaacttcgccacacacaacgaactccatatacaccctnnnnnnnnnnnnnnnnnnnnnnnnnnnnnnnnnnnnnnnnnnnnnnnnnnnnnnntggaacatacactacaaaggggggcgcggtctacaaatattctctcc

SEQ ID NO: 170578 - DNA, 424 bp, Homo Sapiens
cccttccccttggtggcaaaatgctttaggctgtatggcctgatctctttccagctttagaagaggtgcctggattagcctggaaaggttgctcacagagagggaggccgagtttcagatccctggatggtagaacaggaaaaagcccatgagttctgccttccagccagccccgggcctgtgtagccctgtctcccttcatctcctggggcccaggccggatgggagagtggtgagaaggtgtcctccaggtttgagagtgagagatttcagcagtggggagcagagtcccagtgctcactctgggtggggctgtgggagagaactcgtgtgcaccacgctgtttgcccttgatgtattttctcaggttctgacattcttgccttctgaactttcgagtaagacgtgggagaaaccaccaagg

SEQ ID NO: 170579 - DNA, 294 bp, Homo Sapiens
  misc_feature (18)..(18): n is a, c, g, or t
gtcgctctacaggatccncagttctccccttggtggtgcagacacaatcttaaactactagcattatgcgtcagcttctgaaactaaaatatgtttttaaaaagagcttttaaatacattcagcttacttttctctagcactgaaagccataacataaaaaagtgagacaggaatgtttttttaacagcaaagagatgctttgtatccagaaaagctgaacaattacagtgtagctaaaatgttctttgaagtactgtatagcacttaactttaaaagctctctgcttgcttct

SEQ ID NO: 170580 - DNA, 413 bp, Homo Sapiens
agggaatgccccgaggcatgggtaggagatggtgcaggccggaagggcagggaggaaggtcgagaggagatggtcacccagcagggctgggtcctgtcttgagctagctgaaaataatggaaaatgaggaggctgtcggatctgacagctgatgttctctctgagaggctggtctcaagaaaactctccacaaagtgactggggcagaatccaaattgcaagaggttaaggagaggtagaataaggcagtcggggtggaccgtcacccctgagaggtttggcaaggagaagtgagaaggcatggacatctgaagaagcaggttaaagagaaggaatttttagttagggaggaagatagagaggacagtacattgataaggcgaattctggaaaagatggcaggtcctaaggat

SEQ ID NO: 170581 - DNA, 340 bp, Homo Sapiens
cttcagccatgcattactacaataaacagtctttccactgtaggtgttggaattctaaacagtgtaaaatctatttctggaaaactgtgtatgttcatagttacaaaaaatatattatatatatgattgaaacctattgagtacatatgttatttgaatctggctatatcgtagccattagataaattaaaaaaaaccaccctctaaataggatgttatggtagccttaaatataccattacctgtatttagaatagttgatattatatcttaaaagttgaaaaaatgatgttaaagatttgaaaaacactatgcatctgcattaaatatataaatgttt

SEQ ID NO: 170582 - DNA, 526 bp, Homo Sapiens
  misc_feature (47)..(47): n is a, c, g, or t
  misc_feature (52)..(165): n is a, c, g, or t
tttcccttccccttggtgggattacaggaatgagccactgcgcccgntctcnnnnnnnnnnnnnnnnnnnnnnnnnnnnnnnnnnnnnnnnnnnnnnnnnnnnnnnnnnnnnnnnnnnnnnnnnnnnnnnnnnnnnnnnnnnnnnnnnnnnnnnnnnnnnnnnnnaggttatctcagaagccaattttccctttagggaaagttacagaatcagccagggaagaggaatgggaggatgggctggatgatccctgttcaggcctaatccgctggcctccctggggcctccctttctttgtgccaagccctgtgctgggtgctgggaactgggaacacagaatgaatcagacatagcctttgttcccatggggctcagtctcatggggaagacaaatgtgtatcaggcattattgacccaggatcatcagtgctccaataaaaagctcagagggtgggttgggaaggcttcctggaggaggaggtactggagggcttgaaggacaagtaaaagttcaagtaaccaaga

SEQ ID NO: 170583 - DNA, 418 bp, Homo Sapiens
  misc_feature (302)..(302): n is a, c, g, or t
  misc_feature (333)..(333): n is a, c, g, or t
  misc_feature (367)..(367): n is a, c, g, or t
  misc_feature (400)..(400): n is a, c, g, or t
ccacccacgactagagagtgctcatgccagcagcttgagccacttagcgctagcacaccagcaacaacaacagttgctacagcaccagttacctcatcttcttggacaagcccatccttctgcttcatataatcagcttggactttatccaattatttggcagtatccaaatggaacacatgcatactcaagacttggtttgccttcttctaagtgggttcacccagaaaatgcagttaatgctgaagcttcattaaagaggaattcttccaatccttggctacatcaaaccacccctgtgnaactcagcagatggtattggattacctagancacatttctgtcagacctttcagtgcagagcctnattgggctcttaaaattacaggccattccagtncaccaaggggggagaact

SEQ ID NO: 170584 - DNA, 383 bp, Homo Sapiens
tcccccccttggtgggggacaaatcctctaaggcccaggtcatcctaaggactggaatttaagcctacgggaagccactggggaattatgtgttcatttgagttggctgctgcgtggaccgactacgctggggcaccagtggaagcagggaggggagaggctactgaagaagctactgcagctcttcaggtgagaaagggctggaggtacagatgactatgccaggctgtacagtgaaggaagagctagcgggaccaagaataacaagactcaggactcccaggaagctgagagggaaacaggaaagttagggatcatgcctaggtttctagccagaattctgagagcttgccaccaacccccaagggggagaacctagtttt

SEQ ID NO: 170585 - DNA, 604 bp, Homo Sapiens
  misc_feature (223)..(254): n is a, c, g, or t
caggactgagaccacagccttaacaaacaaggaggggcacttatctttttgctttgaaagccagcatcctggagctggtccggccctatgaatgccttggtggcccgggtactgagcacagagagccaccatttccaaaggtttgaatgagttaacacttggcagcaattgcattcccgtgcacttagagtcgagacacatggagaagggttctggggtaggnnnnnnnnnnnnnnnnnnnnnnnnnnnnnnnnggttgttttatgtttaaaaaccacatgtctgtacggaggagcttggttagctgacattgttttacagtgctgaaaaagaagcgtggcattgaacggcatgcaccagctaaagggctgcaagcagtgagtcatgcagtctcagactgcagcgtccctaggcctgcagaattaacaaaatatatgtgtgtatatatgtagcattggttccaaaaggaatcagaacagcccagaagtgtccaaattaagcacccatgttccaccaaccccaagggggggagaacctaagtcttcccctttggtggggaactggacccctatcttccttccccggattaaagccttatcttcct

SEQ ID NO: 170586 - DNA, 266 bp, Homo Sapiens
taagcctccttttcttcccagtcttgggtatgtctttatcagcagcatgaaagtgaactaatacagatcttttctcctattccccaaccctcttcttggcttccttgaactttctggttgtactcatgctcttcaacaaagatttcctatctctgtatctttcctctcaccttctgcatggcttggaatacccaatccttgtcctctaaaactgctcatccatccacccacccattcattcatccatccatccacccacccaccaa

SEQ ID NO: 170587 - DNA, 544 bp, Homo Sapiens
aaacctgtgaaaatattcgttaggaaaaagaaaatgagaaagaataagtgaagactttaggtttaggatgctttaggatggggcagatgtcctcaaagaacaatggggacagagtagggagaaaacggtacatgcagcctggggacctgatccccttccacggtcatattgcctctgctccttctgtctgatttattccgcattgggacatttgtctatcattctccaattgtttcgtgtttatgtgttctgtataccctgatcgtcaagtatgtttttcaagggaaaggatgctgtcttttactttggatatgtaccccgcattttgccctaaacaacccttgtatgcaacaagaactaacaggctatctctaagaccatagtaattctaagcacttagattctgagttttgtgttgaaaccacagttgatcctccattgttattgagtctgtgctttctaagttcaagctgtgacaccgagaactccacaccctgccacatctggaagcatcccactttctgctgtcattttctggccctcc

SEQ ID NO: 170588 - DNA, 527 bp, Homo Sapiens
gaactgacgctatctccctccccgcatcaagcttatctcctctcatactatgtcctttcaaggaggttgttttccacactcctttctatgccaaatgaattcaatgtcagtttcaatcccgtttgtatttttgaaaacttaatatgcacctgggactgtactaggcactgtgacaacagcaaaataaaatgtttgacataagttgggctctttaagagttaagaatttagttgagacaagatgtacacctgcaaagagttcaaaagcaaagaggaaactacaaaactatgtgaaaaatgtgcgcactgtgaacttcaaagtgccccaggggctcagagcgaagaagcagtgttgtctggagtgttcaggttgctcatgagggcaggtcagcactgggacttgggaggaatcttgaaaggaagagaaacagactatgactgattgacacaaacttagggagaaaaacaacttcctagtgaaaattttggccccggcacaaccgctcttctcttactcaccggcgctca

SEQ ID NO: 170589 - DNA, 321 bp, Homo Sapiens
actttcccttccccttggtggtggtgctcaagagcgctgaacggatgggttacaccgggctcaatatcacctatccctgcaagcaggccatcctccccttgctcgatgagctttctgacgaggcgcgcggtattggcgcggtcaacacggtggtgttcagggagggcaagcgcatcggccacaacaccgattgccttgggtttgccgaggggtttcgccgtggtcttgcccaggccgcacgtcaccgtgtgatacagatgggggctggcggcgccggtgcggcggtggcacatgcgttgctgtccgaaggccaccaagggg

SEQ ID NO: 170590 - DNA, 530 bp, Homo Sapiens
gagtccacatctcagagttccatacgtggaagtattttaagaatggagagaaatacgcagggcactgtgctcaggacaaagaagaagtttctcgagtggatgcaaaaccctgaggcccacccggccccagagcccactgtggaagagcagcagacaagcgtgtagcacctggtgggggacaacttccgggagaccctgaagaagaagaaacacaccttggtcatgttctacgccccttggtgcccacactgtaagaaggtcattccgcactttactgctactgctgatgccttcaaagatgaccgaaagattgcctgtgccgctgttgactgtgtcaaagacaagaaccaagacctgtgccagcaggaggcggtcaagggctaccccactttccactactaccactatgggaagttcgcagaaacagtatgacagcgaccgaacagaattgggatttaccaattatattcgagccctccgtgaagggcagaccatgaaagactagcgaccaagcaggaagcagtataatt

SEQ ID NO: 170591 - DNA, 312 bp, Homo Sapiens
gtgggcagtcgcattcctgggggcagtcgcggggatctggaggggatggagagccgtaggtgtaggctggcccttcatccaccccataggggtaaggctcgtaggtctcatacgggtaagggtcatagggatcgtagtaggtggactgctggctgcggaggtagtggaaccaccaatgagggtcatcttcatactgggcctgggagagggagaagagccctgccagcagcaggagggaggtccactgcattttgtctctcaagttgaacttttcagagagtgaccacgtccctctgtctggccaccaagggg

SEQ ID NO: 170592 - DNA, 169 bp, Homo Sapiens
cacagaaaattccaaaggaagcttcagattgactatgtataaaatatgtgttttaaagaatgaagttgaagaaaggttcaacttacatagtggaggcatcatgcccttgcttgaaggggggatgacaactcgaagatctggtttcctactgttcattccaagattacca

SEQ ID NO: 170593 - DNA, 617 bp, Homo Sapiens
  misc_feature (82)..(116): n is a, c, g, or t
  misc_feature (482)..(482): n is a, c, g, or t
  misc_feature (513)..(513): n is a, c, g, or t
  misc_feature (516)..(516): n is a, c, g, or t
  misc_feature (553)..(553): n is a, c, g, or t
  misc_feature (556)..(556): n is a, c, g, or t
  misc_feature (558)..(558): n is a, c, g, or t
  misc_feature (561)..(561): n is a, c, g, or t
  misc_feature (565)..(565): n is a, c, g, or t
  misc_feature (574)..(574): n is a, c, g, or t
  misc_feature (578)..(578): n is a, c, g, or t
  misc_feature (582)..(582): n is a, c, g, or t
ggtgggtgataagccagttgtagtgaaagtctgtttgctccacattaacagatttaggatgaacagcaaccaggccatcggnnnnnnnnnnnnnnnnnnnnnnnnnnnnnnnnnnnacccaaatttagtcgaattttagcaactttgggatataaaccagcacagatgacagctttaattatcttctcattatctgcagtgtgtttgaagacagaaaatattcccagcaatagtccttttcgtatctgaaaccacgtcgcctagcctcttcccagccctcaaacgcattcacaactgttaagtgatcacttctagtatcctttgccaattcctttcttcttgcatctgcaatcttttcttttcccagtggaatgacaaatgggatctttgaaactgagactagcagcaatagtgagtactgggtctaagcaagcagaacaagtgctccaaaaagaatcatttttccaatatggggctcaacngggtaaatcgtgccaaaggggactccaaganggnggcaattcttcttgggttatccaaaggcgttcaactnatnanggnggtnttatggganaggnaccnctggcttatttggatggggggggtccatttaatct

SEQ ID NO: 170594 - DNA, 1104 bp, Homo Sapiens
  misc_feature (44)..(46): n is a, c, g, or t
  misc_feature (65)..(65): n is a, c, g, or t
cttccccagccttcaacgcattcaaaactggtaaggatcccttnnnagatcctttgccaattccnttcttctggcatcggcaatcttttcttttcccagtggaatgcaaatgatcctttgaaacttgagactagcagcaatagtgagtactgggtctaagcagcagaacagtgctccaaaaaagaatcatttttccaatatgtggctcaacgggtaatcgtgccaagtggactcccaagaggtgtcaattcttcttgtttatccaaagcgttcagctccatcaggtgtcttatggagagtaacactgcctcatttgatggtgggtccattaatctactcagaaaataagcaattccacctagccttaaaatctttatttgtaaacaaagttcttccaaaggagttctcaaaatttctggcagttgatagtcatctagaagacttgctctaagaccattatacagatgatagcaatgaccaggttgaactcttccagctcgaccttttctctgtttggcattagctttactaacccactcagcggacattgtactgatattgttctgagtatcaaaatgcgtctcttttatttttcctccatctatcacataaacgacatcatctatggtaatgctagtctccgcaatgttggtagcaattactattttccgaacaccaggaggggttcttttaaacacctgtgtctggttaactgtaggcatcagtgaatgtaaaggtataattaaaaatttatctgatttaaacattacttgtgacatcaagagatcatgtaaagtgctgatattgtcccagcctggcagaaagaccagtatcgcaccatcctcttcttccaaaacaatgtatcggatgagggcaacaatcaaattcagatcaactttatcatcctccatcatttctataacatctacagtacttgcagaataccttgttcgcagttcccttacataatctggccaacgttctttatatattgcttctttttcttctttttcttgtctatttacaatcccttgcatgaaacccctcttaaactggcatctgtgttctttttgttctggaacataccttattttttcaattaca

SEQ ID NO: 170595 - DNA, 356 bp, Homo Sapiens
ggtggtgtggagagcagagcacagctccattcctcctctctgtgtgacctgggatgtggcatcttcctctgagcttcattcggacaaggtgttaatataaaattgcagcattaaatttacctataacctttcaattaggagccagtgctgttcagaattgttatcactactgttgtccaaacccttaaatattataaaatacctgtgtgacccctcatctcagacctcagatgaccacattgcagagaagacacctgctttgtttctgtcacgaacatggtattagaacgggaaagtatgtgtaaccttgttatagatttcatgttaattaagttacaatggtaaaattagaatta

SEQ ID NO: 170596 - DNA, 344 bp, Homo Sapiens
ctcctgtttaacctatgtacccataacgctttgagcacttcctacctttccagcatacacaaaaagttttctctgcaccagctttggaatcagctttttctccaatgagacctagctctttttagtggacaatggtatttagacaccaaaatctgggcactaaatgtgttcactgttacttacgtcatcgcttacagtctctctcagaggacagagctggaacacacatcacacacatacacaaaaacatttctatctacctctatctttaatatgtatatttttaaaaactatgatttcatattgacatctccaatgccaagtcaagaaatttgaaattcctt

SEQ ID NO: 170597 - DNA, 388 bp, Homo Sapiens
acagcgtgcaggcagctgctgcctgggaggacctggccctgagttccttcctgcctttcttcccttgctgtggagcctgttgttggacccgaggctttgacctccctcctgcatgtcagggtggtggaggctgttgtgtgatcacagagcaagacatggacctgtgtgggttcctggtgtgaggtaccctgtcctcccctgtctcatccacagagctggtggccatgtctggaaatgcaggagtttctgagtgggacctgctagctggatgttcacacctccattctcctttttcctttgtcagcaccttggtgcacagcttccgtgttttcccggcatgtgtccatgatgtttccagacatctcccaccaaggggaagagaaaatcc

SEQ ID NO: 170598 - DNA, 413 bp, Homo Sapiens
aatttacattctaatgggagagacagataatgaacaataaacataataaataaattatatcgtatgttagaagatgttgaaccctaacccctcctgtcacattggaaactcttccacacctttgccctccctggtgaggggaagtagatgagtagattgatcccctctgtccgattcctgtccaccccttggcttctgcccacctctggctttctctccttactgtttgaaaatttctccacagtttgtttctctgtagggtgtggggcatgcagttcaggtagccaggcccctggacgtggctgaatgggactgtttagtgttctggggccttgggggaggagcggcctttcccgctccatcgatgtgactgcttttcctcccttatcctcccaccaaccaccaagggggag

SEQ ID NO: 170599 - DNA, 674 bp, Homo Sapiens
  misc_feature (437)..(487): n is a, c, g, or t
  misc_feature (495)..(495): n is a, c, g, or t
  misc_feature (503)..(503): n is a, c, g, or t
  misc_feature (510)..(510): n is a, c, g, or t
  misc_feature (517)..(517): n is a, c, g, or t
  misc_feature (539)..(539): n is a, c, g, or t
  misc_feature (561)..(561): n is a, c, g, or t
  misc_feature (563)..(564): n is a, c, g, or t
  misc_feature (568)..(568): n is a, c, g, or t
  misc_feature (578)..(578): n is a, c, g, or t
  misc_feature (589)..(589): n is a, c, g, or t
  misc_feature (596)..(596): n is a, c, g, or t
  misc_feature (611)..(611): n is a, c, g, or t
  misc_feature (627)..(627): n is a, c, g, or t
  misc_feature (630)..(630): n is a, c, g, or t
  misc_feature (640)..(640): n is a, c, g, or t
ttttcccttccccttggtggagaccatctgactctccaccctctgtctcaaagcatcagacacacaaccacagacaccgtccccagcattcctgtctgcttcaggagtcatgtaggtttggggagacaggctgggtcccggaaggtctgagggaggagacggcagggctgagtcctggaggccttgaaggtataactggacccatctttggggtagggctcacggagcctcagggacatctggctggacgctgccatccactggtgcaagacaggggtggggatggggggtcaggggtaggaggagaattcattcctggactgaggttgaggacacccacttttcaaggttttctgtctcccttatcatgccctgggcaggatctttgttcactgactgttcccactggctccaaacgtctggttagggctatagtnnnnnnnnnnnnnnnnnnnnnnnnnnnnnnnnnnnnnnnnnnnnnnnnnnngtctcttnaatcaganctttaanttccttnaaaggccttattccttgtcagnacccccacaacaaccttgaatncnngganggggcccaanttaacctttantgggctnattgggaaaaaattnaatcctcacctgggtnttnaaaccccaangggtgccttgggaaaaacttgagggccccgggtt

SEQ ID NO: 170600 - DNA, 615 bp, Homo Sapiens
  misc_feature (26)..(26): n is a, c, g, or t
  misc_feature (131)..(131): n is a, c, g, or t
aagccacctttggattctgttcctcngacaatttagcttttattttttaaaaaactggttcaatatggttgctgacttttgagtcccaccaaggaggaagatggatatctttcatctatgctgctgacaanggttttccagccatcctaagaagtgaataaatcacttttactggttactaatctgaatggctttgtatcaatcatgtcaccattaccaacttatttgaggcagggatttctctagtattcaagtagacacttccaacaacttcctctagcagtccatttcacccctcagctcaggggtaatgccttggttagttcatggaatccttaggcggcaataacggttcaaaatgaacattatactgcagctcctagtaagttatggatttatagcctgcccctgctcaagagctccagaagttccttcagcttaaaggtaataggctgtttttctatcattatttaaaaacacaagtcgaacagtgatttccttgcagccctcaatcatatacagaatacagtctcaaagctggtacctcagggctcaaaatggggagccccagggtcactagggtgactcaaacccagaggaaagatggtcttgggg

SEQ ID NO: 170601 - DNA, 274 bp, Homo Sapiens
  misc_feature (254)..(254): n is a, c, g, or t
ctttcctcccccttggtggcatcagggacactgcgctcctgctctcgtctggctgtggctgctccttctcaatctccctagctgctctccatccatctttccttaatgctgcaccaccttccctgccctgggctttttggtcccggtctccttctggccctcaccctgggagagcccatctattctcaggctttgactaccacatgctccttggccccttcccacagggcttcagcccttgatgtcagctcaanaagtcctcagacccacagac

SEQ ID NO: 170602 - DNA, 490 bp, Homo Sapiens
  misc_feature (43)..(43): n is a, c, g, or t
  misc_feature (51)..(111): n is a, c, g, or t
  misc_feature (310)..(444): n is a, c, g, or t
  misc_feature (455)..(455): n is a, c, g, or t
  misc_feature (478)..(478): n is a, c, g, or t
cttccccttggtggccatggagagtaggtctaatctgtctacnaccaaagnnnnnnnnnnnnnnnnnnnnnnnnnnnnnnnnnnnnnnnnnnnnnnnnnnnnnnnnnnnnnggcctgcaggtggcctcttcccctctggctcattcctgaattggcccacaggagccttggagcacagatgtgggcagggttccttgttgccgcaggcctctcattcggtactggcccctaagtgccttttacctttaataacttttaattgttttttaaagacaagagtctcactccgtcacccaggctgcagtgtagnnnnnnnnnnnnnnnnnnnnnnnnnnnnnnnnnnnnnnnnnnnnnnnnnnnnnnnnnnnnnnnnnnnnnnnnnnnnnnnnnnnnnnnnnnnnnnnnnnnnnnnnnnnnnnnnnnnnnnnnnnnnnnnnnnnnnnnttcatgttggncaagctgatctcaaacttctganctcaagtgatct

SEQ ID NO: 170603 - DNA, 862 bp, Homo Sapiens
ttctctcacagcctccgtaggctattcttctctcttccaacaaatcagaaggtcttcacctgcaattcctttattttgaactaggaaatctcttaaatgttccttgaaagcaggaatatcttgatttaagctgaaaagccctgtcacaaagagctttacttgagcatcttgtaggtgagggaaggccgacttaaggagattagccacatattcctgaagaaagatttggttgttaactggatttccaggatttaatgatgtacttatttttccttcttcaaccaaattaaacatatatgcaagaattgatgcatgcattgttaaaccagcagtatgtgaagtgtctgtcacaacagaaaagatatgctggagaatatcacaaaataagtttgataaaaactctgagctgcagcttcttcttgtgcaacattttgtaagagtgtaaaaagtatctgtaagcccgtatctgcgacattcctcatagtatgtttgaaagcccaaatgatggaatccaaacaagtttaaactgtgtaggtggaatagcaaggaatgctgggaaacaatgagaattgacagcctgaagtagtaagaaaaagttcgttctatgttcaggatattcttcaaagtccttatttatcatattcaatgtgcattcaaaaacagcatcaaatatttgaggtatttcagctgttatatgtccccctaacttgttgacaattatggccatagtactaagcacttctggttctctagcagctgggacatttctctgataatcaatgagaactgcatccaacagagggggaacaaaattttcagcgaccatctgtggatcattggatcggctcacccaaccagatat

SEQ ID NO: 170604 - DNA, 228 bp, Homo Sapiens
gcatatgttgcagaagcttggactgccctgcaaacgcaacaacctttggtgcaatgtatcaccaacagtgttgctgccaattatgcagccaacgttttattggctgcgggcgcctcacctgccatgattgataatccctttgaagcagaaagtttcacacgcattagtgcagcgctcagtattaacttaggcacaccgacatctgaacaaatgcaagccatgcaaatc

SEQ ID NO: 170605 - DNA, 295 bp, Homo Sapiens
ctggtaatgattcaaattgccgagaaagaaaaagttcccggtgcttcagttgatggcgctgctgctcagacacccctggctgctttgattcctcttcaaactccctggcattactatcagccaggctgttgaggctactagaaatgtccctgcgccggaaaagacagacaacctttgcctccacatttccatttgcagtcttgttgagctcctcaatccgtctaaccaggtaaggattgctggaagagttctcaaaatagacgtaatctcccaccccaccaagggggaggaaaag
